United States Patent Application Publication US 2011/0183924 A1 - sequence listing, part 28

SEQ ID NO: 65694 - DNA, 3366 bp, Homo sapiens
tttaaataccttacccattcatatctctatcacgtggccgaatacagttatggccacccaggtaatggggcagtcttctggaggaggagggctgtttaccagcagtggcaacattggaatggccctgcctaacgacatgtatgacttgcatgacctttccaaagctgaactggccgcacctcagcttattatgctggcaaatgtggccttaactggggaagtaaatggcagctgctgtgattacctggtcggtgaagaaagacagatggcagaactgatgccggttggggataacaacttttcagatagtgaagaaggagaaggacttgaagagtctgctgatataaaaggtgaacctcatggactggaaaacatggaactgagaagtttggaactcagcgtcgtagaacctcagcctgtatttgaggcatcaggtgctccagatatttacagttcaaataaagatcttccccctgaaacacctggagcggaggacaaaggcaagagctcgaagaccaaaccctttcgctgtaagccatgccaatatgaagcagaatctgaagaacagtttgtgcatcacatcagagttcacagtgctaagaaattttttgtggaagagagtgcagagaagcaggcaaaagccagggaatctggctcttccactgcagaagagggagatttctccaagggccccattcgctgtgaccgctgcggctacaatactaatcgatatgatcactatacagcacacctgaaacaccacaccagagctggggataatgagcgagtctacaagtgtatcatttgcacatacacaacagtgagcgagtatcactggaggaaacatttaagaaaccattttccaaggaaagtatacacatgtggaaaatgcaactatttttcagacagaaaaaacaattatgttcagcatgttagaactcatacaggagaacgcccatataaatgtgaactttgtccttactcaagttctcagaagactcatctaactagacatatgcgtactcattcaggtgagaagccatttaaatgtgatcagtgcagttatgtggcctctaatcaacatgaagtaacccgccatgcaagacaggttcacaatgggcctaaacctcttaattgcccacactgtgattacaaaacagcagatagaagcaacttcaaaaaacatgtagagctacatgtgaacccacggcagttcaattgccctgtatgtgactatgcagcttccaagaagtgtaatctacagtatcacttcaaatctaagcatcctacttgtcctaataaaacaatggatgtctcaaaagtgaaactaaagaaaaccaaaaaacgagaggctgacttgcctgataatattaccaatgaaaaaacagaaatagaacaaacaaaaataaaaggggatgtggctggaaagaaaaatgaaaagtccgtcaaagcagagaaaagagatgtctcaaaagagaaaaagccttctaataatgtgtcagtgatccaggtgactaccagaactcgaaaatcagtaacagaggtgaaagagatggatgtgcatacaggaagcaattcagaaaaattcagtaaaactaagaaaagcaaaaggaagctggaagttgacagccattctttacatggtcctgtgaatgatgaggaatcttcaacaaaaaagaaaaagaaggtagaaagcaaatccaaaaataatagtcaggaagtgccaaagggtgacagcaaagtggaggagaataaaaagcaaaatacttgcatgaaaaaaagtacaaagaagaaaactctgaaaaataaatcaagtaagaaaagcagtaagcctcctcagaaggaacctgttgagaagggatctgctcagatggaccctcctcagatggggcctgctcccacagaggcggttcagaaggggcccgttcaggtggagccgccacctcccatggagcatgctcagatggagggtgcccagatacggccttgctcctgacgagcctgttcagatggaggtggttcaggaggggcctgctcagaaggagctgctgcctcccgtggagcctgctcagatggtgggtgcccaaattgtacttgctcacatggagctgcctcctcccatggagactgctcagacggaggttgcccaaatggggcctgctcccatggaacctgctcagatggaggttgcccaggtagaatctgctcccatgcaggtggtccagaaggagcctgttcagatggagctgtctcctcccatggaggtggtccagaaggagcctgttcagatagagctgtctcctcccatggaggtggtccagaaggaacctgttaagatagagctgtctcctcccatagaggtggtccagaaggagcctgttcagatggagttgtctcctcccatgggggtggttcagaaggagcctgctcagagggagccacctcctcccagagagcctccccttcacatggagccaatttccaaaaagcctcctctccgaaaagataaaaaggaaaagtctaacatgcagagtgaaagggcacggaaggagcaagtccttattgaagttggcttagtgcctgttaaagatagctggcttctaaaggaaagtgtaagcacagaggatctctcaccaccatcaccaccactgccaaaggaaaatttaagagaagaggcatcaggagaccaaaaattactcaacacaggtgaaggaaataaagaagcccctcttcagaaagtaggagcagaagaggcagatgagagcctacctggtcttgctgctaatatcaacgaatctacccatatttcatcctctggacaaaacttgaatacgccagagggtgaaactttaaatggtaaacatcagactgacagtatagtttgtgaaatgaaaatggacactgatcagaacacaagagagaatctcactggtataaattcaacagttgaagaaccagtttcaccaatgcttcccccttcagcagtagaagaacgtgaagcagtgtccaaaactgcactggcatcacctcctgctacaatggcagcaaatgagtctcaggaaattgatgaagatgaaggcatccacagccatgaaggaagtgacctaagtgacaacatgtcagagggtagtgatgattctggattgcatggggctcggccagttccacaagaatctagcagaaaaaatgcaaaggaagccttggcagtcaaagcggctaagggagattttgtttgtatcttctgtgatcgttctttcagaaagggaaaagattacagcaaacacctcaatcgccatttggttaatgtgtactatcttgaagaagcagctcaagggcaggagtaatgaaactttgaacaaggtttca

SEQ ID NO: 65695 - DNA, 3631 bp, Homo sapiens
gcagcgtcctgtgttggaatgtgcggctgccgcgagctcgcggcgcagcagcggagcgagcgccgccgaggcccggggccccagaccctggcggcggctgcggcagccgagacggcagggcgaggcccggaggcctgagcaccctctgcagccccactcctgggccttcttggtccacgacggccccagcacccaactttaccaccctcccccacctctcccccgaaactccagcaacaaagaaaagtagtcggagaaggagcggcgactcagggtcgcccgcccctcctcaccgaggaaggccgaatacagttatggccacccaggtaatggggcagtcttctggaggaggagggctgtttaccagcagtggcaacattggaatggccctgcctaacgacatgtatgacttgcatgacctttccaaagctgaactggccgcacctcagcttattatgctggcaaatgtggccttaactggggaagtaaatggcagctgctgtgattacctggtcggtgaagaaagacagatggcagaactgatgccggttggggataacaacttttcagatagtgaagaaggagaaggacttgaagagtctgctgatataaaaggtgaacctcatggactggaaaacatggaactgagaagtttggaactcagcgtcgtagaacctcagcctgtatttgaggcatcaggtgctccagatatttacagttcaaataaagatcttccccctgaaacacctggagcggaggacaaaggcaagagctcgaagaccaaaccctttcgctgtaagccatgccaatatgaagcagaatctgaagaacagtttgtgcatcacatcagagttcacagtgctaagaaattttttgtggaagagagtgcagagaagcaggcaaaagccagggaatctggctcttccactgcagaagagggagatttctccaagggccccattcgctgtgaccgctgcggctacaatactaatcgatatgatcactatacagcacacctgaaacaccacaccagagctggggataatgagcgagtctacaagtgtatcatttgcacatacacaacagtgagcgagtatcactggaggaaacatttaagaaaccattttccaaggaaagtatacacatgtggaaaatgcaactatttttcagacagaaaaaacaattatgttcagcatgttagaactcatacaggagaacgcccatataaatgtgaactttgtccttactcaagttctcagaagactcatctaactagacatatgcgtactcattcaggtgagaagccatttaaatgtgatcagtgcagttatgtggcctctaatcaacatgaagtaacccgccatgcaagacaggttcacaatgggcctaaacctcttaattgcccacactgtgattacaaaacagcagatagaagcaacttcaaaaaacatgtagagctacatgtgaacccacggcagttcaattgccctgtatgtgactatgcagcttccaagaagtgtaatctacagtatcacttcaaatctaagcatcctacttgtcctaataaaacaatggatgtctcaaaagtgaaactaaagaaaaccaaaaaacgagaggctgacttgcctgataatattaccaatgaaaaaacagaaatagaacaaacaaaaataaaaggggatgtggctggaaagaaaaatgaaaagtccgtcaaagcagagaaaagagatgtctcaaaagagaaaaagccttctaataatgtgtcagtgatccaggtgactaccagaactcgaaaatcagtaacagaggtgaaagagatggatgtgcatacaggaagcaattcagaaaaattcagtaaaactaagaaaagcaaaaggaagctggaagttgacagccattctttacatggtcctgtgaatgatgaggaatcttcaacaaaaaagaaaaagaaggtagaaagcaaatccaaaaataatagtcaggaagtgccaaagggtgacagcaaagtggaggagaataaaaagcaaaatacttgcatgaaaaaaagtacaaagaagaaaactctgaaaaataaatcaagtaagaaaagcagtaagcctcctcagaaggaacctgttgagaagggatctgctcagatggaccctcctcagatggggcctgctcccacagaggcggttcagaaggggcccgttcaggtggagccgccacctcccatggagcatgctcagatggagggtgcccagatacggccttgctcctgacgagcctgttcagatggaggtggttcaggaggggcctgctcagaaggagctgctgcctcccgtggagcctgctcagatggtgggtgcccaaattgtacttgctcacatggagctgcctcctcccatggagactgctcagacggaggttgcccaaatggggcctgctcccatggaacctgctcagatggaggttgcccaggtagaatctgctcccatgcaggtggtccagaaggagcctgttcagatggagctgtctcctcccatggaggtggtccagaaggagcctgttcagatagagctgtctcctcccatggaggtggtccagaaggaacctgttaagatagagctgtctcctcccatagaggtggtccagaaggagcctgttcagatggagttgtctcctcccatgggggtggttcagaaggagcctgctcagagggagccacctcctcccagagagcctccccttcacatggagccaatttccaaaaagcctcctctccgaaaagataaaaaggaaaagtctaacatgcagagtgaaagggcacggaaggagcaagtccttattgaagttggcttagtgcctgttaaagatagctggcttctaaaggaaagtgtaagcacagaggatctctcaccaccatcaccaccactgccaaaggaaaatttaagagaagaggcatcaggagaccaaaaattactcaacacaggtgaaggaaataaagaagcccctcttcagaaagtaggagcagaagaggcagatgagagcctacctggtcttgctgctaatatcaacgaatctacccatatttcatcctctggacaaaacttgaatacgccagagggtgaaactttaaatggtaaacatcagactgacagtatagtttgtgaaatgaaaatggacactgatcagaacacaagagagaatctcactggtataaattcaacagttgaagaaccagtttcaccaatgcttcccccttcagcagtagaagaacgtgaagcagtgtccaaaactgcactggcatcacctcctgctacaatggcagcaaatgagtctcaggaaattgatgaagatgaaggcatccacagccatgaaggaagtgacctaagtgacaacatgtcagagggtagtgatgattctggattgcatggggctcggccagttccacaagaatctagcagaaaaaatgcaaaggaagccttggcagtcaaagcggctaagggagattttgtttgtatcttctgtgatcgttctttcagaaagggaaaagattacagcaaacacctcaatcgccatttggttaatgtgtactatcttgaagaagcagctcaagggcaggagtaatgaaactttgaacaaggtttca

SEQ ID NO: 65696 - DNA, 3503 bp, Homo sapiens
cggcgctcggagcccgacgcctcgcgagggcgcccgcggagcctccccggccctgggcgttgggcgagccccggggcggtcggaggggcccgggggcggtcggagaagcccggacgccggctgcgcgaatacagttatggccacccaggtaatggggcagtcttctggaggaggagggctgtttaccagcagtggcaacattggaatggccctgcctaacgacatgtatgacttgcatgacctttccaaagctgaactggccgcacctcagcttattatgctggcaaatgtggccttaactggggaagtaaatggcagctgctgtgattacctggtcggtgaagaaagacagatggcagaactgatgccggttggggataacaacttttcagatagtgaagaaggagaaggacttgaagagtctgctgatataaaaggtgaacctcatggactggaaaacatggaactgagaagtttggaactcagcgtcgtagaacctcagcctgtatttgaggcatcaggtgctccagatatttacagttcaaataaagatcttccccctgaaacacctggagcggaggacaaaggcaagagctcgaagaccaaaccctttcgctgtaagccatgccaatatgaagcagaatctgaagaacagtttgtgcatcacatcagagttcacagtgctaagaaattttttgtggaagagagtgcagagaagcaggcaaaagccagggaatctggctcttccactgcagaagagggagatttctccaagggccccattcgctgtgaccgctgcggctacaatactaatcgatatgatcactatacagcacacctgaaacaccacaccagagctggggataatgagcgagtctacaagtgtatcatttgcacatacacaacagtgagcgagtatcactggaggaaacatttaagaaaccattttccaaggaaagtatacacatgtggaaaatgcaactatttttcagacagaaaaaacaattatgttcagcatgttagaactcatacaggagaacgcccatataaatgtgaactttgtccttactcaagttctcagaagactcatctaactagacatatgcgtactcattcagtggggtatggataccatttggtaatatttactagagtgtgatctagatgggtgagaagccatttaaatgtgatcagtgcagttatgtggcctctaatcaacatgaagtaacccgccatgcaagacaggttcacaatgggcctaaacctcttaattgcccacactgtgattacaaaacagcagatagaagcaacttcaaaaaacatgtagagctacatgtgaacccacggcagttcaattgccctgtatgtgactatgcagcttccaagaagtgtaatctacagtatcacttcaaatctaagcatcctacttgtcctaataaaacaatggatgtctcaaaagtgaaactaaagaaaaccaaaaaacgagaggctgacttgcctgataatattaccaatgaaaaaacagaaatagaacaaacaaaaataaaaggggatgtggctggaaagaaaaatgaaaagtccgtcaaagcagagaaaagagatgtctcaaaagagaaaaagccttctaataatgtgtcagtgatccaggtgactaccagaactcgaaaatcagtaacagaggtgaaagagatggatgtgcatacaggaagcaattcagaaaaattcagtaaaactaagaaaagcaaaaggaagctggaagttgacagccattctttacatggtcctgtgaatgatgaggaatcttcaacaaaaaagaaaaagaaggtagaaagcaaatccaaaaataatagtcaggaagtgccaaagggtgacagcaaagtggaggagaataaaaagcaaaatacttgcatgaaaaaaagtacaaagaagaaaactctgaaaaataaatcaagtaagaaaagcagtaagcctcctcagaaggaacctgttgagaagggatctgctcagatggaccctcctcagatggggcctgctcccacagaggcggttcagaaggggcccgttcaggtggagccgccacctcccatggagcatgctcagatggagggtgcccagatacggccttgctcctgacgagcctgttcagatggaggtggttcaggaggggcctgctcagaaggagctgctgcctcccgtggagcctgctcagatggtgggtgcccaaattgtacttgctcacatggagctgcctcctcccatggagactgctcagacggaggttgcccaaatggggcctgctcccatggaacctgctcagatggaggttgcccaggtagaatctgctcccatgcaggtggtccagaaggagcctgttcagatggagctgtctcctcccatggaggtggtccagaaggagcctgttcagatagagctgtctcctcccatggaggtggtccagaaggaacctgttaagatagagctgtctcctcccatagaggtggtccagaaggagcctgttcagatggagttgtctcctcccatgggggtggttcagaaggagcctgctcagagggagccacctcctcccagagagcctccccttcacatggagccaatttccaaaaagcctcctctccgaaaagataaaaaggaaaagtctaacatgcagagtgaaagggcacggaaggagcaagtccttattgaagttggcttagtgcctgttaaagatagctggcttctaaaggaaagtgtaagcacagaggatctctcaccaccatcaccaccactgccaaaggaaaatttaagagaagaggcatcaggagaccaaaaattactcaacacaggtgaaggaaataaagaagcccctcttcagaaagtaggagcagaagaggcagatgagagcctacctggtcttgctgctaatatcaacgaatctacccatatttcatcctctggacaaaacttgaatacgccagagggtgaaactttaaatggtaaacatcagactgacagtatagtttgtgaaatgaaaatggacactgatcagaacacaagagagaatctcactggtataaattcaacagttgaagaaccagtttcaccaatgcttcccccttcagcagtagaagaacgtgaagcagtgtccaaaactgcactggcatcacctcctgctacaatggcagcaaatgagtctcaggaaattgatgaagatgaaggcatccacagccatgaaggaagtgacctaagtgacaacatgtcagagggtagtgatgattctggattgcatggggctcggccagttccacaagaatctagcagaaaaaatgcaaaggaagccttggcagtcaaagcggctaagggagattttgtttgtatcttctgtgatcgttctttcagaaagggaaaagattacagcaaacacctcaatcgccatttggttaatgtgtactatcttgaagaagcagctcaagggcaggagtaatgaaactttgaacaaggtttca

SEQ ID NO: 65697 - DNA, 1734 bp, Homo sapiens
cgaagagaacgacagtgacacctggctacagccctatgagcccgcggaccccgccctggactggtggtgaggcgccctcgtggccgcgggactggccccgggggggccccctggatcccaggccagcgctttgctctcctgctccgtctgaagggagcaggtgcaccagccaaaatgtcagcgagggggacaaagagagggacctttgcctacgtagatgtgtatgtgtagtgcgattttcttcaaggaaaggagacaagtccaaagctcgtttgtggattgtgggactgagcgaaggagtacaaatatatccacgtcgctcagagctggggtgctcacggtgggcggtgggcaagaagccagcatggaagaaagaagggagaaaactttggtgactgccttagagggatcagttaatttgtatagttttatattttttgtatatgtttgctagctctaaaaaggtcgagatgcaataacacttcgtaagcaacgagttcacctaagtaaggctcagatcctagttttaaaaaccatttcccattaaaatgaagttggaggaacagctgcttctggagccggggcaaaaatttcaaggtgagcctggagcattgtgtgtggtgaagtaaaataaaggctcaaaacgtgacggcaacccggcaaaagggtagggagccaggccgaaggggcctcactgaccaattgtgggacaatttgaacatcaggatgaataatgacaggagagattataacacactgaataaaaacataatccatgagttcatgctgatactcaaatttctttttaaaaaggagaaacaggaaggtttcttttggaggtgaaatctaattattggtgagagtcttggagaacaggctgtttccagtctcaaagcagtaaccttatacactacttataagtttgaaaggggaaaggttacctttacaatggagacatctaccagatcatccaagtgattaaatttaacatcatcaatgatgggaccaaggacattattagtttgacaactggggaaagaagtgttcttcaccccctacccccaagacattctctctgtcggccaggctggagtgcagcctcaacctcctgggcccaagtgatcctcccacctcagcacacaacaccatgccagcaattttaagtgcgttatagagacgggggtctcactttgttacccaggctggtctcaaactcctgcgctcaagcaatcctcccacctgggcctcccaaaatgctgggtgtacaggcatgagccgctgtgcccggcttcattttcagagtgagacatttgtactgtggctatgtaggagaacattcttgttcttagcaaacatactgaagtttttagatattaattaccacagtgtctgccactgaatttccagtgactaagtggaaaaatataaaacatatgaatataaagaaagaaagagacaagtcaaatgtagcaaaatgacaacacttggtgactctaggtgactggtcgacagatgttcattgtactatcaatgtggctttgctgtgggtttgaaattttgcaaactaagagttgggtggcggggagaaggatacaccaaaaaactaagtgattatctttggatgggaaaatgtttggtaattgcattcttaaaatgtcttctttgtattttttaatgttcaataatgtatatgtatcagttctgtaataaaggggaaaacactttttttaaata

SEQ ID NO: 65698 - DNA, 1590 bp, Homo sapiens
atccgcctcaccattgctgaagagagagacaaaagactggcggggacaaagagagggacctttgcctacgtagatgtgtatgtgtagtgcgattttcttcaaggaaaggagacaagtccaaagctcgtttgtggattgtgggactgagcgaaggagtacaaatatatccacgtcgctcagagctggggtgctcacggtgggcggtgggcaagaagccagcatggaagaaagaagggagaaaactttggtgactgccttagagggatcagttaatttgtatagttttatattttttgtatatgtttgctagctctaaaaaggtcgagatgcaataacacttcgtaagcaacgagttcacctaagtaaggctcagatcctagttttaaaaaccatttcccattaaaatgaagttggaggaacagctgcttctggagccggggcaaaaatttcaaggtgagcctggagcattgtgtgtggtgaagtaaaataaaggctcaaaacgtgacggcaacccggcaaaagggtagggagccaggccgaaggggcctcactgaccaattgtgggacaatttgaacatcaggatgaataatgacaggagagattataacacactgaataaaaacataatccatgagttcatgctgatactcaaatttctttttaaaaaggagaaacaggaaggtttcttttggaggtgaaatctaattattggtgagagtcttggagaacaggctgtttccagtctcaaagcagtaaccttatacactacttataagtttgaaaggggaaaggttacctttacaatggagacatctaccagatcatccaagtgattaaatttaacatcatcaatgatgggaccaaggacattattagtttgacaactggggaaagaagtgttcttcaccccctacccccaagacattctctctgtcggccaggctggagtgcagcctcaacctcctgggcccaagtgatcctcccacctcagcacacaacaccatgccagcaattttaagtgcgttatagagacgggggtctcactttgttacccaggctggtctcaaactcctgcgctcaagcaatcctcccacctgggcctcccaaaatgctgggtgtacaggcatgagccgctgtgcccggcttcattttcagagtgagacatttgtactgtggctatgtaggagaacattcttgttcttagcaaacatactgaagtttttagatattaattaccacagtgtctgccactgaatttccagtgactaagtggaaaaatataaaacatatgaatataaagaaagaaagagacaagtcaaatgtagcaaaatgacaacacttggtgactctaggtgactggtcgacagatgttcattgtactatcaatgtggctttgctgtgggtttgaaattttgcaaactaagagttgggtggcggggagaaggatacaccaaaaaactaagtgattatctttggatgggaaaatgtttggtaattgcattcttaaaatgtcttctttgtattttttaatgttcaataatgtatatgtatcagttctgtaataaaggggaaaacactttttttaaata

SEQ ID NO: 65699 - DNA, 2052 bp, Homo sapiens
cgaagagaacgacagtgacacctggctacagccctatgagcccgcggaccccgccctggactggtggtgaggcgccctcgtggccgcgggactggccccgggggggccccctggatcccaggccagcgctttgctctcctgctccgtctgaagggagcaggtgcaccagccaaaatgtcagcgagggggacaaagagagggacctttgcctacgtagatgtgtatgtgtagtgcgattttcttcaaggaaaggagacaagtccaaagctcgtttgtggattgtgggactgagcgaaggagtacaaatatatccacgtcgctcagagctggggtgctcacggtgggcggtgggcaagaagccagcatggaagaaagaagggagaaaactttggtgactgccttagagggatcagttaatttgtatagttttatattttttgtatatgtttgctagctctaaaaaggtcgagatgcaataacacttcgtaagcaacgagttcacctaagtaaggctcagatcctagttttaaaaaccatttcccattaaaatgaagttggaggaacagctgcttctggagccggggcaaaaatttcaaggtgagcctggagcattgtgtgtggtgaagtaaaataaaggctcaaaacgtgacggcaacccggcaaaagggtagggagccaggccgaaggggcctcactgaccaattgtgggacaatttgaacatcaggatgaataatgacaggagagattataacacactgaataaaaacataatccatgagttcatgctgatactcaaatttctttttaaaaaggagaaacaggaaggtttcttttggaggtgaaatctaattattggtgagagtcttggagaacaggctgtttccagtctcaaagcagtaaccttatacactacttataagtttgaaaggggaaaggttacctttacaatggagacatctaccagatcatccaagtgattaaatttaacatcatcaatgatgggaccaaggacattattagtttgacaactggggaaagaagtgttcttcaccccctacccccaagacattctctctgtcggccaggctggagtgcagcctcaacctcctgggcccaagtgatcctcccacctcagcacacaacaccatgccagcaattttaagtgcgttatagagacgggggtctcactttgttacccaggctggtctcaaactcctgcgctcaagcaatcctcccacctgggcctcccaaaatgctgggtgtacaggcatgagccgctgtgcccggcttcattttcagagtgagacatttgtactgtggctatgtaggagaacattcttgttcttagcaaacatactgaagtttttagatattaattaccacagtgtctgccactgaatttccagtgactaagtggaaaaatataaaacatatgaatataaagaaagaaagagacaagtcaaatgtagcaaaatgacaacacttggtgactctaggtgactggtcgacagatgttcattgtactatcaatgtggctttgctgtgggtttgaaattttgcaaactaagagttgggtggcggggagaaggatacaccaaaaaactaagtgattatctttggatgggaaaatgtttggtaattgcattcttaaaatgtcttctttgtattttttaatgttcaataatgtatatgtatcagttctgtaataaaggggaaaacactttttttaaataaaaaaaaaaaaaaaaaaaaaaaaaaaaaaaaaggaggggggctcgtgccgaattcggcacgagaggcgacaaacctaccgagcctggtgatagctggttgtccaagatagaatcttaggtcaactttaaatttgcccacagaaccctctaaattcccttgtaaatttaactgttagtccaaagaggaacagctctttggacactaggaaaaaaccttgtagagagagttaaaaatttaacacccataggtggcctaaaagcagccaccaattaagaaagcgttaaaggtaacacccactacctatacctattgaagaa

SEQ ID NO: 65700 - DNA, 348 bp, Homo sapiens
tgatttcagactgccttactttgctggctgatttgcaaagcaaagtataaactttattatgtttcagaaaacatgctcagagaagttataggccaaagtgaagaagctgggactcaaaattcagcagtcttccagggaaattgtctctcagaatttagttattacagagttttatgataatgaagtatcataaaagtatattaacaatagcagatataatttctaccaagaagagattattttttatataagatgcaagtatgtgtcttctgtcagagtagaccagattcatcagagggatcatcatatctttccttcataatccaaagaaatattatgctataaatg

SEQ ID NO: 65701 - DNA, 396 bp, Homo sapiens
ttttatcatggaatacaagcttttatacagcacttttattgtacattcctgattaatgaaaaggattttggaaatacattaactttaggccaaaatagtgtccatttattcttaaattgtcaatggtacaaaaaagaaaaaagcaaggatacttgaggggaaagggcagagaatctatatactgaaactaatttttaaaaaaatgtctttgatatttaaaagcaatagaaaaagaagcacaattctcagataatagtataaaataaaaaataaggaaaattaagcattgataaacaccaaattcccaagtgataggatttttaagatgtaaagaatgagtgataatatactacattgattaagctgctacagaataccatgacactatgcacagat

SEQ ID NO: 65702 - DNA, 372 bp, Homo sapiens
ttcaccagtttttaaactgagacaagataaaatctgtttggattaggtgttttgttcaggggaatgcagaatgtatcctttactcttaacttgaagatgatcaagatataatccttttagccagggtggcaatttaaacataaaaatctctgttttccagttgatgagtgaatcttcctagaagggcacacaacttttcccctttccatgatggggtttaaaggccatgtttacatctgccaagtctctgggtaaacatttagctgctgtcccaacaggcagtaccagcatcttactctttcttctcataggtagaactagtaacacaatgtgcagagctttttggataaggtaggagaaaatagtcaggtt

SEQ ID NO: 65703 - DNA, 2488 bp, Homo sapiens
  misc_feature (383)..(383): n is a, c, g, or t
cagaaatgcaacgctttagagtacccacggaaaacttgtttaccttgtcaccatgagtaaaagttaattcccactcctgaagagagcaaaccaactctgaaagagagtgaaaatgcagacaagacagttatcagataatggctatctggacgagagattctttcgtttgacagcagtttggttgttgggagttccagttcagctcctgcacagttgctctgtacaaatcctcctccatatttgcttagagaaaacgtgttgccatcccatcatgaaggaagctgcctgagagtttttaaccattacagccgtgatgatgaaagagtgaagaaccgcctctaagttaaaaagtgcacccagagataaggttcgttctcaatgcnctgccgctgcttctcatcgcatggccaccgcatttctcaggccaggcacattgagcattggtcctgtgcctgacgctatgctagatgctggggttgcagccacgagcatagacacgacagacacggtcctcgccatcttctgttgagtactggtcggaacaagaggatcgtctgtagacaggatatgatcatcgtggcgcatgtattactcatccttttgggggccactgagatactgcaagctgacttacttcctgatgaaaagatttcacttctcccacctgtcaatttcaccattaaagttactggtttggctcaagttcttttacaatggaaaccaaatcctgatcaagagcaaaggaatgttaatctagaatatcaagtgaaaataaacgctccaaaagaagatgactatgaaaccagaatcactgaaagcaaatgtgtaaccatcctccacaaaggcttttcagcaagtgtgcggaccatcctgcagaacgaccactcactactggccagcagctgggcttctgctgaacttcatgccccaccagggtctcctggaacctcaattgtgaatttaacttgcaccacaaacactacagaagacaattattcacgtttaaggtcataccaagtttcccttcactgcacctggcttgttggcacagatgcccctgaggacacgcagtattttctctactataggtatggctcttggactgaagaatgccaagaatacagcaaagacacactggggagaaatatcgcatgctggtttcccaggacttttatcctcagcaaagggcgtgactggcttgcggtgcttgttaacggctccagcaagcactctgctatcaggccctttgatcagctgtttgcccttcacgccattgatcaaataaatcctccactgaatgtcacagcagagattgaaggaactcgtctctctatccaatgggagaaaccagtgtctgcttttccaatccattgctttgattatgaagtaaaaatacacaatacaaggaatggatatttgcagatagaaaaattgatgaccaatgcattcatctcaataattgatgatctttctaagtacgatgttcaagtgagagcagcagtgagctccatgtgcagagaggcagggctctggagtgagtggagccaacctatttatgtgggaaatgatgaacacaagcccttgagagagtggtttgtcattgtgattatggcaaccatctgcttcatcttgttaattctctcgcttatctgtaaaatatgtcatttatggatcaagttgtttccaccaattccagcaccaaaaagtaatatcaaagatctctttgtaaccactaactatgagaaagctggaatttaaattcaagcatgttttaacttttggtttaaggtacttgggtgtacctggcagtgttgtaagctctttacattaattaattaactctctaggtactgttatcttcattttataaacaaggcagctgaagttgagagaaataagtaacctgtcctaggtcacacaattaggaaatgacagatctggcagtctatttccaggcagtctatttccacgaggtcatgagtgcgaaagagggactaggggaagaatgattaactccagggagctgacttttctagtgtgcttacctgttttgcatctctcaaggatgtgccatgaagctgtagccaggtggaattgtaccacagccctgacatgaacacctgatggcagctgctgggttggagcctagacaaaaacatgaagaaccatggctgctgcctgagcccatcgtgctgtaattatagaaaaccttctaagggaagaatatgctgatatttttcagataagtaccccttttataaaaatcctccaagttagccctcgattttccatgtaaggaaacagaggctttgagataatgtctgtctcctaagggacaaagccaggacttgatcctgtcttaaaaatgcaaaatgtagtacttcttccatcaaaggtagacatgcactaagggacaggttttggcttggtatcagaatacatttttaaaagctgtgtaagaattgaacgggctgtactagggggtata

SEQ ID NO: 65704 - DNA, 2433 bp, Homo sapiens
cagaaatgcaacgctttagagtacccacggaaaacttgtttaccttgtcaccatgagtaaaagttaattcccactcctgaagagagcaaaccaactctgaaagagagtgaaaatgcagacaagacagttatcagataatggctatctggacgagagattctttcgtttgacagcagtttggttgttgggagttccagttcagctcctgcacagttgctctgtacaaatcctcctccatatttgcttagagaaaacgtgttgccatcccatcatgaaggaagctgcctgagagtttttaaccattacagccgtgatgatgaaagagtgaagaaccgcctctaagttaaaaagtgcacccagagataagggccaggcacattgagcattggtcctgtgcctgacgctatgctagatgctggggttgcagccacgagcatagacacgacagacacggtcctcgccatcttctgttgagtactggtcggaacaagaggatcgtctgtagacaggatatgatcatcgtggcgcatgtattactcatccttttgggggccactgagatactgcaagctgacttacttcctgatgaaaagatttcacttctcccacctgtcaatttcaccattaaagttactggtttggctcaagttcttttacaatggaaaccaaatcctgatcaagagcaaaggaatgttaatctagaatatcaagtgaaaataaacgctccaaaagaagatgactatgaaaccagaatcactgaaagcaaatgtgtaaccatcctccacaaaggcttttcagcaagtgtgcggaccatcctgcagaacgaccactcactactggccagcagctgggcttctgctgaacttcatgccccaccagggtctcctggaacctcaattgtgaatttaacttgcaccacaaacactacagaagacaattattcacgtttaaggtcataccaagtttcccttcactgcacctggcttgttggcacagatgcccctgaggacacgcagtattttctctactataggtatggctcttggactgaagaatgccaagaatacagcaaagacacactggggagaaatatcgcatgctggtttcccaggacttttatcctcagcaaagggcgtgactggcttgcggtgcttgttaacggctccagcaagcactctgctatcaggccctttgatcagctgtttgcccttcacgccattgatcaaataaatcctccactgaatgtcacagcagagattgaaggaactcgtctctctatccaatgggagaaaccagtgtctgcttttccaatccattgctttgattatgaagtaaaaatacacaatacaaggaatggatatttgcagatagaaaaattgatgaccaatgcattcatctcaataattgatgatctttctaagtacgatgttcaagtgagagcagcagtgagctccatgtgcagagaggcagggctctggagtgagtggagccaacctatttatgtgggaaatgatgaacacaagcccttgagagagtggtttgtcattgtgattatggcaaccatctgcttcatcttgttaattctctcgcttatctgtaaaatatgtcatttatggatcaagttgtttccaccaattccagcaccaaaaagtaatatcaaagatctctttgtaaccactaactatgagaaagctggaatttaaattcaagcatgttttaacttttggtttaaggtacttgggtgtacctggcagtgttgtaagctctttacattaattaattaactctctaggtactgttatcttcattttataaacaaggcagctgaagttgagagaaataagtaacctgtcctaggtcacacaattaggaaatgacagatctggcagtctatttccaggcagtctatttccacgaggtcatgagtgcgaaagagggactaggggaagaatgattaactccagggagctgacttttctagtgtgcttacctgttttgcatctctcaaggatgtgccatgaagctgtagccaggtggaattgtaccacagccctgacatgaacacctgatggcagctgctgggttggagcctagacaaaaacatgaagaaccatggctgctgcctgagcccatcgtgctgtaattatagaaaaccttctaagggaagaatatgctgatatttttcagataagtaccccttttataaaaatcctccaagttagccctcgattttccatgtaaggaaacagaggctttgagataatgtctgtctcctaagggacaaagccaggacttgatcctgtcttaaaaatgcaaaatgtagtacttcttccatcaaaggtagacatgcactaagggacaggttttggcttggtatcagaatacatttttaaaagctgtgtaagaattgaacgggctgtactagggggtata

SEQ ID NO: 65705 - DNA, 1981 bp, Homo sapiens
  misc_feature (383)..(383): n is a, c, g, or t
cagaaatgcaacgctttagagtacccacggaaaacttgtttaccttgtcaccatgagtaaaagttaattcccactcctgaagagagcaaaccaactctgaaagagagtgaaaatgcagacaagacagttatcagataatggctatctggacgagagattctttcgtttgacagcagtttggttgttgggagttccagttcagctcctgcacagttgctctgtacaaatcctcctccatatttgcttagagaaaacgtgttgccatcccatcatgaaggaagctgcctgagagtttttaaccattacagccgtgatgatgaaagagtgaagaaccgcctctaagttaaaaagtgcacccagagataaggttcgttctcaatgcnctgccgctgcttctcatcgcatggccaccgcatttctcaggccaggcacattgagcattggtcctgtgcctgacgctatgctagatgctggggttgcagccacgagcatagacacgacagacacggtcctcgccatcttctgttgagtactggtcggaacaagaggatcgtctgtagacaggatatgatcatcgtggcgcatgtattactcatccttttgggggccactgagatactgcaagctgacttacttcctgatgaaaagatttcacttctcccacctgtcaatttcaccattaaagttactggtttggctcaagttcttttacaatggaaaccaaatcctgatcaagagcaaaggaatgttaatctagaatatcaagtgaaaataaacgctccaaaagaagatgactatgaaaccagaatcactgaaagcaaatgtgtaaccatcctccacaaaggcttttcagcaagtgtgcggaccatcctgcagaacgaccactcactactggccagcagctgggcttctgctgaacttcatgccccaccagggtctcctggaacctcaattgtgaatttaacttgcaccacaaacactacagaagacaattattcacgtttaaggtcataccaagtttcccttcactgcacctggcttgttggcacagatgcccctgaggacacgcagtattttctctactataggtatggctcttggactgaagaatgccaagaatacagcaaagacacactggggagaaatatcgcatgctggtttcccaggacttttatcctcagcaaagggcgtgactggcttgcggtgcttgttaacggctccagcaagcactctgctatcaggccctttgatcagctgtttgcccttcacgccattgatcaaataaatcctccactgaatgtcacagcagagattgaaggaactcgtctctctatccaatgggagaaaccagtgtctgcttttccaatccattgctttgattatgaagtaaaaatacacaatacaaggaatggatatttgcagatagaaaaattgatgaccaatgcattcatctcaataattgatgatctttctaagtacgatgttcaagtgagagcagcagtgagctccatgtgcagagaggcagggctctggagtgagtggagccaacctatttatgtgggtaagtagcttatgtttattttacattggcagccttccttgtgatcaaaaaaggtaatcccagaaacgtacccgttcactcgtgggtcttaaaatggtttcatatctctattgtgactaattttctctcggtctactgccttttcaatcaggaatagatttgccatgaagccagtgaagtttttaagtgtctaggcttctcattagcgccaactctcctagacctggtgcctgttttttttccaagttttgtttctacttctatccattttttaaattaaactttttattttgaaataattatcacactcacaagctgtgggaagaaataatagagatcctgtgtctctttcatccagttttcctcaagggtaacatcttacaaaactatagtacaatagtggaatagaatattggtgtt

SEQ ID NO: 65706 - DNA, 2049 bp, Homo sapiens
  misc_feature (383)..(383): n is a, c, g, or t
cagaaatgcaacgctttagagtacccacggaaaacttgtttaccttgtcaccatgagtaaaagttaattcccactcctgaagagagcaaaccaactctgaaagagagtgaaaatgcagacaagacagttatcagataatggctatctggacgagagattctttcgtttgacagcagtttggttgttgggagttccagttcagctcctgcacagttgctctgtacaaatcctcctccatatttgcttagagaaaacgtgttgccatcccatcatgaaggaagctgcctgagagtttttaaccattacagccgtgatgatgaaagagtgaagaaccgcctctaagttaaaaagtgcacccagagataaggttcgttctcaatgcnctgccgctgcttctcatcgcatggccaccgcatttctcaggccaggcacattgagcattggtcctgtgcctgacgctatgctagatgctggggttgcagccacgagcatagacacgacagacacggtcctcgccatcttctgttgagtactggtcggaacaagaggatcgtctgtagacaggctacagattgttttagattgaagtttcctgtcatgttcactcatctttaaatcctcatagtaaaaaggatatgatcatcgtggcgcatgtattactcatccttttgggggccactgagatactgcaagctgacttacttcctgatgaaaagatttcacttctcccacctgtcaatttcaccattaaagttactggtttggctcaagttcttttacaatggaaaccaaatcctgatcaagagcaaaggaatgttaatctagaatatcaagtgaaaataaacgctccaaaagaagatgactatgaaaccagaatcactgaaagcaaatgtgtaaccatcctccacaaaggcttttcagcaagtgtgcggaccatcctgcagaacgaccactcactactggccagcagctgggcttctgctgaacttcatgccccaccagggtctcctggaacctcaattgtgaatttaacttgcaccacaaacactacagaagacaattattcacgtttaaggtcataccaagtttcccttcactgcacctggcttgttggcacagatgcccctgaggacacgcagtattttctctactataggtatggctcttggactgaagaatgccaagaatacagcaaagacacactggggagaaatatcgcatgctggtttcccaggacttttatcctcagcaaagggcgtgactggcttgcggtgcttgttaacggctccagcaagcactctgctatcaggccctttgatcagctgtttgcccttcacgccattgatcaaataaatcctccactgaatgtcacagcagagattgaaggaactcgtctctctatccaatgggagaaaccagtgtctgcttttccaatccattgctttgattatgaagtaaaaatacacaatacaaggaatggatatttgcagatagaaaaattgatgaccaatgcattcatctcaataattgatgatctttctaagtacgatgttcaagtgagagcagcagtgagctccatgtgcagagaggcagggctctggagtgagtggagccaacctatttatgtgggtaagtagcttatgtttattttacattggcagccttccttgtgatcaaaaaaggtaatcccagaaacgtacccgttcactcgtgggtcttaaaatggtttcatatctctattgtgactaattttctctcggtctactgccttttcaatcaggaatagatttgccatgaagccagtgaagtttttaagtgtctaggcttctcattagcgccaactctcctagacctggtgcctgttttttttccaagttttgtttctacttctatccattttttaaattaaactttttattttgaaataattatcacactcacaagctgtgggaagaaataatagagatcctgtgtctctttcatccagttttcctcaagggtaacatcttacaaaactatagtacaatagtggaatagaatattggtgtt

SEQ ID NO: 65707 - DNA, 2574 bp, Homo sapiens
  misc_feature (383)..(383): n is a, c, g, or t
cagaaatgcaacgctttagagtacccacggaaaacttgtttaccttgtcaccatgagtaaaagttaattcccactcctgaagagagcaaaccaactctgaaagagagtgaaaatgcagacaagacagttatcagataatggctatctggacgagagattctttcgtttgacagcagtttggttgttgggagttccagttcagctcctgcacagttgctctgtacaaatcctcctccatatttgcttagagaaaacgtgttgccatcccatcatgaaggaagctgcctgagagtttttaaccattacagccgtgatgatgaaagagtgaagaaccgcctctaagttaaaaagtgcacccagagataaggttcgttctcaatgcnctgccgctgcttctcatcgcatggccaccgcatttctcaggccaggcacattgagcattggtcctgtgcctgacgctatgctagatgctggggttgcagccacgagcatagacacgacagacacggtcctcgccatcttctgttgagtactggtcggaacaagaggatcgtctgtagacaggctacagattgttttagattgaagtttcctgtcatgttcactcatctttaaatcctcatagtaaaaaggatatgatcatcgtggcgcatgtattactcatccttttgggggccactgagatactgcaagctgacttacttcctgatgaaaagatttcacttctcccacctgtcaatttcaccattaaagttactggtttggctcaagttcttttacaatggaaaccaaatcctgatcaagagcaaaggaatgttaatctagaatatcaagtgaaaataaacgctccaaaagaagatgactatgaaaccagaatcactgaaagcaaatgtgtaaccatcctccacaaaggcttttcagcaagtgtgcggaccatcctgcagaacgaccactcactactggccagcagctgggcttctgctgaacttcatgccccaccagggtctcctggaacctcaattgtgaatttaacttgcaccacaaacactacagaagacaattattcacgtttaaggtcataccaagtttcccttcactgcacctggcttgttggcacagatgcccctgaggacacgcagtattttctctactataggtatggctcttggactgaagaatgccaagaatacagcaaagacacactggggagaaatatcgcatgctggtttcccaggacttttatcctcagcaaagggcgtgactggcttgcggtgcttgttaacggctccagcaagcactctgctatcaggccctttgatcagctgtttgcccttcacgccattgatcaaataaatcctccactgaatgtcacagcagagattgaaggaactcgtctctctatccaatgggagaaaccagtgtctgcttttccaatccattgctttgattatgaagtaaaaatacacaatacaaggaatggatatttgcagatagaaaaattgatgaccaatgcattcatctcaataattgatgatctttctaagtacgatgttcaagtgagagcagcagtgagctccatgtgcagagaggcagggctctggagtgagtggagccaacctatttatgtgggaaatgatgaacacaagcccttgagagagtggtttgtcattgtgattatggcaaccatctgcttcatcttgttaattctctcgcttatctgtaaaatatgtcatttatggatcaagttgtttccaccaattccagcaccaaaaagtaatatcaaagatctctttgtaaccactaactatgagaaagctgggtccagtgagacggaaattgaagtcatctgttatatagagaagcctggagttgagaccctggaggattctgtgttttgactgtcactttggcatcctctgatgaactcacacatgcctcagtgcctcagtgaaaagaacagggatgctggctcttggctaagaggtgttcagaatttaggcaacactcaatttacctgcgaagcaatacacccagacacaccagtcttgtatctcttaaaagtatggatgcttcatccaaatcgcctcacctacagcagggaagttgactcatccaagcattttgccatgttttttctccccatgccgtacagggtagcacctcctcacctgccaatctttgcaatttgcttgactcacctcagacttttcattcacaacagacagcttttaaggctaacgtccagctgtatttacttctggctgtgcccgtttggctgtttaagctgccaattgtagcactcagctaccatctgaggaagaaagcattttgcatcagcctggagtgaaccatgaacttggattcaagactgtcttttctatagcaagtgagagccacaaattcctcacccccctacattctagaatgatctttttctaggtagattgtgtatgtgtgtgtatgagagagagagagagagagagagagagagaaattatctcaagctccagaggcctgatccaggatacatcatttgaaaccaactaatttaaaagcataatagagctaatatat

SEQ ID NO: 65708 - DNA, 2506 bp, Homo sapiens
  misc_feature (383)..(383): n is a, c, g, or t
cagaaatgcaacgctttagagtacccacggaaaacttgtttaccttgtcaccatgagtaaaagttaattcccactcctgaagagagcaaaccaactctgaaagagagtgaaaatgcagacaagacagttatcagataatggctatctggacgagagattctttcgtttgacagcagtttggttgttgggagttccagttcagctcctgcacagttgctctgtacaaatcctcctccatatttgcttagagaaaacgtgttgccatcccatcatgaaggaagctgcctgagagtttttaaccattacagccgtgatgatgaaagagtgaagaaccgcctctaagttaaaaagtgcacccagagataaggttcgttctcaatgcnctgccgctgcttctcatcgcatggccaccgcatttctcaggccaggcacattgagcattggtcctgtgcctgacgctatgctagatgctggggttgcagccacgagcatagacacgacagacacggtcctcgccatcttctgttgagtactggtcggaacaagaggatcgtctgtagacaggatatgatcatcgtggcgcatgtattactcatccttttgggggccactgagatactgcaagctgacttacttcctgatgaaaagatttcacttctcccacctgtcaatttcaccattaaagttactggtttggctcaagttcttttacaatggaaaccaaatcctgatcaagagcaaaggaatgttaatctagaatatcaagtgaaaataaacgctccaaaagaagatgactatgaaaccagaatcactgaaagcaaatgtgtaaccatcctccacaaaggcttttcagcaagtgtgcggaccatcctgcagaacgaccactcactactggccagcagctgggcttctgctgaacttcatgccccaccagggtctcctggaacctcaattgtgaatttaacttgcaccacaaacactacagaagacaattattcacgtttaaggtcataccaagtttcccttcactgcacctggcttgttggcacagatgcccctgaggacacgcagtattttctctactataggtatggctcttggactgaagaatgccaagaatacagcaaagacacactggggagaaatatcgcatgctggtttcccaggacttttatcctcagcaaagggcgtgactggcttgcggtgcttgttaacggctccagcaagcactctgctatcaggccctttgatcagctgtttgcccttcacgccattgatcaaataaatcctccactgaatgtcacagcagagattgaaggaactcgtctctctatccaatgggagaaaccagtgtctgcttttccaatccattgctttgattatgaagtaaaaatacacaatacaaggaatggatatttgcagatagaaaaattgatgaccaatgcattcatctcaataattgatgatctttctaagtacgatgttcaagtgagagcagcagtgagctccatgtgcagagaggcagggctctggagtgagtggagccaacctatttatgtgggaaatgatgaacacaagcccttgagagagtggtttgtcattgtgattatggcaaccatctgcttcatcttgttaattctctcgcttatctgtaaaatatgtcatttatggatcaagttgtttccaccaattccagcaccaaaaagtaatatcaaagatctctttgtaaccactaactatgagaaagctgggtccagtgagacggaaattgaagtcatctgttatatagagaagcctggagttgagaccctggaggattctgtgttttgactgtcactttggcatcctctgatgaactcacacatgcctcagtgcctcagtgaaaagaacagggatgctggctcttggctaagaggtgttcagaatttaggcaacactcaatttacctgcgaagcaatacacccagacacaccagtcttgtatctcttaaaagtatggatgcttcatccaaatcgcctcacctacagcagggaagttgactcatccaagcattttgccatgttttttctccccatgccgtacagggtagcacctcctcacctgccaatctttgcaatttgcttgactcacctcagacttttcattcacaacagacagcttttaaggctaacgtccagctgtatttacttctggctgtgcccgtttggctgtttaagctgccaattgtagcactcagctaccatctgaggaagaaagcattttgcatcagcctggagtgaaccatgaacttggattcaagactgtcttttctatagcaagtgagagccacaaattcctcacccccctacattctagaatgatctttttctaggtagattgtgtatgtgtgtgtatgagagagagagagagagagagagagagagaaattatctcaagctccagaggcctgatccaggatacatcatttgaaaccaactaatttaaaagcataatagagctaatatat

SEQ ID NO: 65709 - DNA, 1713 bp, Homo sapiens
  misc_feature (383)..(383): n is a, c, g, or t
cagaaatgcaacgctttagagtacccacggaaaacttgtttaccttgtcaccatgagtaaaagttaattcccactcctgaagagagcaaaccaactctgaaagagagtgaaaatgcagacaagacagttatcagataatggctatctggacgagagattctttcgtttgacagcagtttggttgttgggagttccagttcagctcctgcacagttgctctgtacaaatcctcctccatatttgcttagagaaaacgtgttgccatcccatcatgaaggaagctgcctgagagtttttaaccattacagccgtgatgatgaaagagtgaagaaccgcctctaagttaaaaagtgcacccagagataaggttcgttctcaatgcnctgccgctgcttctcatcgcatggccaccgcatttctcaggccaggcacattgagcattggtcctgtgcctgacgctatgctagatgctggggttgcagccacgagcatagacacgacagacacggtcctcgccatcttctgttgagtactggtcggaacaagaggatcgtctgtagacaggctacagattgttttagattgaagtttcctgtcatgttcactcatctttaaatcctcatagtaaaaaggatatgatcatcgtggcgcatgtattactcatccttttgggggccactgagatactgcaagctgacttacttcctgatgaaaagatttcacttctcccacctgtcaatttcaccattaaagttactggtttggctcaagttcttttacaatggaaaccaaatcctgatcaagagcaaaggaatgttaatctagaatatcaagtgaaaataaacgctccaaaagaagatgactatgaaaccagaatcactgaaagcaaatgtgtaaccatcctccacaaaggcttttcagcaagtgtgcggaccatcctgcagaacgaccactcactactggccagcagctgggcttctgctgaacttcatgccccaccagggtctcctggaacctcaattgtgaatttaacttgcaccacaaacactacagaagacaattattcacgtttaaggtcataccaagtttcccttcactgcacctggcttgttggcacagatgcccctgaggacacgcagtattttctctactataggtatggctcttggactgaagaatgccaagaatacagcaaagacacactggggagaaatatcgcatgctggtttcccaggacttttatcctcagcaaagggcgtgactggcttgcggtgcttgttaacggctccagcaagcactctgctatcaggccctttgatcagctgtttgcccttcacgccattgatcaaataaatcctccactgaatgtcacagcagagattgaaggaactcgtctctctatccaatgggagaaaccagtgtctgcttttccaatccattgctttgattatgaagtaaaaatacacaatacaaggaatggatatttgcagatagaaaaattgatgaccaatgcattcatctcaataattgatgatctttctaagtacgatgttcaagtgagagcagcagtgagctccatgtgcagagaggcagggctctggagtgagtggagccaacctatttatgtggggttctcaagataaaggagataacatccagctttcctgccccacaccgtatctgaaataaaaacaacagcagggatagcagatt

SEQ ID NO: 65710 - DNA, 2563 bp, Homo sapiens
  misc_feature (383)..(383): n is a, c, g, or t
  misc_feature (1776)..(1776): n is a, c, g, or t
cagaaatgcaacgctttagagtacccacggaaaacttgtttaccttgtcaccatgagtaaaagttaattcccactcctgaagagagcaaaccaactctgaaagagagtgaaaatgcagacaagacagttatcagataatggctatctggacgagagattctttcgtttgacagcagtttggttgttgggagttccagttcagctcctgcacagttgctctgtacaaatcctcctccatatttgcttagagaaaacgtgttgccatcccatcatgaaggaagctgcctgagagtttttaaccattacagccgtgatgatgaaagagtgaagaaccgcctctaagttaaaaagtgcacccagagataaggttcgttctcaatgcnctgccgctgcttctcatcgcatggccaccgcatttctcaggccaggcacattgagcattggtcctgtgcctgacgctatgctagatgctggggttgcagccacgagcatagacacgacagacacggtcctcgccatcttctgttgagtactggtcggaacaagaggatcgtctgtagacaggatatgatcatcgtggcgcatgtattactcatccttttgggggccactgagatactgcaagctgacttacttcctgatgaaaagatttcacttctcccacctgtcaatttcaccattaaagttactggtttggctcaagttcttttacaatggaaaccaaatcctgatcaagagcaaaggaatgttaatctagaatatcaagtgaaaataaacgctccaaaagaagatgactatgaaaccagaatcactgaaagcaaatgtgtaaccatcctccacaaaggcttttcagcaagtgtgcggaccatcctgcagaacgaccactcactactggccagcagctgggcttctgctgaacttcatgccccaccagggtctcctggaacctcaattgtgaatttaacttgcaccacaaacactacagaagacaattattcacgtttaaggtcataccaagtttcccttcactgcacctggcttgttggcacagatgcccctgaggacacgcagtattttctctactataggtatggctcttggactgaagaatgccaagaatacagcaaagacacactggggagaaatatcgcatgctggtttcccaggacttttatcctcagcaaagggcgtgactggcttgcggtgcttgttaacggctccagcaagcactctgctatcaggccctttgatcagctgtttgcccttcacgccattgatcaaataaatcctccactgaatgtcacagcagagattgaaggaactcgtctctctatccaatgggagaaaccagtgtctgcttttccaatccattgctttgattatgaagtaaaaatacacaatacaaggaatggatatttgcagatagaaaaattgatgaccaatgcattcatctcaataattgatgatctttctaagtacgatgttcaagtgagagcagcagtgagctccatgtgcagagaggcagggctctggagtgagtggagccaacctatttatgtgggaaatgatgaacacaagcccttgagagagtggtttgtcattgtgattatggcaaccatctgcttcatcttgttaattctctcgcttatctgtaaaatatgtcatttatggatcaagttgtttccaccaattccagcaccaaaaagtaatatcaaagatctctttgtaaccactaactatgaggtcctctgcattttcatatacatcttagattcngctgacaattttctacaaaaaaagaaagctgggtccagtgagacggaaattgaagtcatctgttatatagagaagcctggagttgagaccctggaggattctgtgttttgactgtcactttggcatcctctgatgaactcacacatgcctcagtgcctcagtgaaaagaacagggatgctggctcttggctaagaggtgttcagaatttaggcaacactcaatttacctgcgaagcaatacacccagacacaccagtcttgtatctcttaaaagtatggatgcttcatccaaatcgcctcacctacagcagggaagttgactcatccaagcattttgccatgttttttctccccatgccgtacagggtagcacctcctcacctgccaatctttgcaatttgcttgactcacctcagacttttcattcacaacagacagcttttaaggctaacgtccagctgtatttacttctggctgtgcccgtttggctgtttaagctgccaattgtagcactcagctaccatctgaggaagaaagcattttgcatcagcctggagtgaaccatgaacttggattcaagactgtcttttctatagcaagtgagagccacaaattcctcacccccctacattctagaatgatctttttctaggtagattgtgtatgtgtgtgtatgagagagagagagagagagagagagagagaaattatctcaagctccagaggcctgatccaggatacatcatttgaaaccaactaatttaaaagcataatagagctaatatat

SEQ ID NO: 65711 - DNA, 253 bp, Homo sapiens
taaaaacaaagatagtaagtcctcaaaactcttcactttgtaattattgtattcatgttagtcttgtccaccatcgaggttgttggcagcgactgtgttgcatggtgaggatgctgtgtaatggtgtgctaccataactgaccccaggtgtgtctgctcactgcttgaaagccagattcgagagacaagtgttggtgggaggaaaagcaggattaattggaaagccaggaaaccgagaagatggggaactagc

SEQ ID NO: 65712 - DNA, 507 bp, Homo sapiens
atctttccaattttaatttaatatgactgattaaaaaatcattcatcatgttattatgaaagtgtttaccttatctcaagtatttatcagcagacttttggcattagttttcaaaaacaagatatattaatagacatgtactttgaatttttctaaaataattttatcccaacattttgggcaagaatagtgttaggtaaaagtgataggtgaattaatattgccactgcttttgagtgtgtagctattacatattttggctgtcttttaagatgtatttgggtgcctagaacatgcaaatttcatttaaattggtgtttgaacttaatgattcagagctttagctgagtattaatttatgtctgatcagtagtttgaaagacagtgacttatcagatgtgactaaataaatatacatgcttataatgatactgtacagttcatgtagttgattttttttctaatataaacatacttaaaaaacactgttatggatggaaatcagtt

SEQ ID NO: 65713 - DNA, 401 bp, Homo sapiens
attttagcagctttcttgaaatttaaaatatatgtgtaagtatctcatttatatgcatttctagtttctttatacaacagaataacttcttttacatcaaatttctgaatttgactaaatttagaaataatggaatctcatccattaaatatagtcatagaaggaaggaaatatgaaaattaggatttcagatgtttgaacataaaagataattttaaacattgtcagtaatctatttctttttttttttcgagacggagttttgctctgtcacccaggctggagtgcagtggcacgatcttggcttactgcaccctctgcctcccagttcaagtgattctcctgcctcaacctcctgagtagctgggattacaggggcatgccaacatgccgggctaatt

SEQ ID NO: 65714 - DNA, 406 bp, Homo sapiens
cccaagtaataatcaaaagactttaaaggcaatacaggaggttacatagatgtaaaacattaattcttttaaatatcagttttttaaggaattaaaaacctaataaagagtataggaattattttgataaaacctaaaatgttgtctcttaagcgagttatcagaaaggcaaagaaaaacctgcaatgtgactgcttcttatgggaagcccatttacataacctgaaaattaaatctgatgaaaaagtacttgaatttaatcagacatcagaagattgtgttaagattatgagtatagcaggggaatatataattcttagtaactgcataagaagttttctgattacattcaaaaatttagacatatcaagaaaagccaagatgacaaaatcaggttatactggag

SEQ ID NO: 65715 - DNA, 2115 bp, Homo sapiens
  misc_feature (1189)..(1189): n is a, c, g, or t
  misc_feature (1226)..(1226): n is a, c, g, or t
  misc_feature (1689)..(1689): n is a, c, g, or t
  misc_feature (1862)..(1863): n is a, c, g, or t
  misc_feature (1934)..(1934): n is a, c, g, or t
  misc_feature (1953)..(1953): n is a, c, g, or t
  misc_feature (1956)..(1956): n is a, c, g, or t
  misc_feature (1959)..(1959): n is a, c, g, or t
  misc_feature (1997)..(1997): n is a, c, g, or t
  misc_feature (2003)..(2003): n is a, c, g, or t
  misc_feature (2043)..(2043): n is a, c, g, or t
  misc_feature (2050)..(2050): n is a, c, g, or t
tgggtctcgatgacttgtcgaaggctgagctgattgcttctcctgcaacaattatcctggagcttcagacaacatcagaggaaataaatagttggaaagtttagagacagggactggaggaaaaagtcagggaggacatttaagaaacggggtgagcgggaagatgtcctgagcactcgctgggaggaaaggtagagaggaggagccccttcccatcctaagctctcatggttcttaggaagcatccatgattgttggaatctgaagcgatgcaggagacagcaaatttgctgctttttagaattaatggggatcttctggaatttcctagccccatgttcttattttatagatgaagacactgaggcctagatgggggaaggggttgtctttgcagagtggtggcgaagacaggattgaagtcagatctctgtcatctctaaaatggatttaagggcatgagagttcagatgtcttttcaagatcttgatttcaattctttctttttttttcttttgagagacttggtctcactctgtcacccaggctggtcttgaactcctggtctcaagtgatcctgctgcctcagcctcccaaaatgctgggattacaggcatgagccacctgcctgacctgatttcaattctttggatgaatacccagaagtgagactgctggatcatatggtagttctatatttaattttttgaagaatctccatactgttttccatggcaggggacatcattttatattcccaccaacaatgtacaaaagttccctttttcttcataccctcactgacacttggtgccttttgtgtttttgataataaccatcctgacagatgtgaggcaatatctcattgaagttttgatttgcacttccctgataattagtaaaattgactaccttgtcacatgtgttggccatttatttgtcttctttgaagaaatgtctattcaactctttagcccattaaaaattaatatgtaattgttgtacatatttttggagtactggtgatatttcgatacctgtatataatgtgtaagaatgagatcaggatacttgacatatctatcacctcaaatgtttatttttcttgtgttgggaacattacaaatgtagctattttgcatatacaataagttggattttggggattctttggctattgagttgtagnaattccttatatattctagaaattaacgccttatganatatattgtttgcaaatgttttccttcattgcatagtttgccctttcactctgttgattgcttccttttctgtgcagacactttttagtctgatgtagtcacatttgcctatttttgcttttgttgcctgtgtttttggtgtcctatccctgaagtaattgcaaagaccaatgatatgaagcttctcttgtgttttcttctaggggttttaggagtttcaggtcttaggtttcagtgtttaatccattttgggttgattttggggtatggcggaagagaagttccaatttgtaacttttgcatatagatatctgttttttccaacaccatttgtgaaagagaatgtcttctccccagtgtgtattcttggcagcagtactatttataataaccaagatgttgtagaaacaacccaaatgtccatctatgaatgactagataaagacaatgtggcatataaatncaatgaaaaactatttagctttaaaaaagaaggaaatcctgtcatatgtgacaacatgaatgaacattgaggacattatgccaagtgaaacaagccaggcacagaaggacaaatactgcgtgattccacttatatgagttagataggtccaggcaaggtggctcatgcctgcnntcccagaactttgagaggctgaggagggagggtcacttgaggtcaggagtttgagaccagcctggtcaacntggtgaacccccgtctctnctnaanatacaaaaattagccaggcatggtggtgcaggcctgtngtctcngctacttgggaggctgaggcgggagaattgcttgaacccnggaggcngaggttgcagtgagccgagattgcatcactgcattccagtctggtgacagagtgagactccatct

SEQ ID NO: 65716 - DNA, 778 bp, Homo sapiens
gaccaaaacacaatcctttttaaaaaatttgtttacaatttcagtatgttatgtagttacagatgagtaagtcagagaattaatttcacaatgaagtaattaacactttcaaaggactgtactttaaaatttcaaagtgtgatgttttctattggtgtagaatgagcctaaataaggagtaaaaagacacgagccctactccttgatctgccaatgacagatgactttgggccaccatgttatctctctgagcctcagtttccttatggtgagaacacagtagtctcccccttattttcaggggatgcattccaagaccccctgtggatgcttcaaaccatggttagtatcaaaccctatatatactgtttttttgatctgataaccaagcctgctactaagtgacttgtgggtgggtagcatctacagtgtagataggctggacatagggatgattcatgtcccaggctggacagtgagatggcaggacagtacaagatttcaccacaaagaatgtcattataactaaaatagataaggtatgtgaacatgcttcataagctgaaaagcgccacacaaatgccaggttttgttctagtggccttgtctaatgtgtcgagacacaatctatactgccctccgaggtggtgttgaaacagtggaaatgcaacgagatctgctttgtttcccaaactggatttggttagattggaaaataaactaaacatgcttgagcagaggctttgaaaagaataaatattaaattatggaaatgcct

SEQ ID NO: 65717 - DNA, 360 bp, Homo sapiens
aattctatcagacagcattacagtggtttcccattgggccccaagtgatctgggcccttcatccactccccacccctaatctctccaacctcatctcttttccctctgccctcactcattcagctccaatttcactggcttcctggctagttctttaatgggccaagtatcatcctgtattcaggtcctttgcagctgctcatctctctcctggagtcatcttccccctgatatctccatgtcttgctgtcaggtctctgctcaaatgtcaggttattagacagactctgcgaccaccctagttaaaacagcagcccatcaaagtctttaaccctcttagcatttactcagattactttt

SEQ ID NO: 65718 - DNA, 318 bp, Homo sapiens
agtgtctgctgagggcttcttccatcttctctcagcagcatccccacatggcagaaggtggaaggacaaaagggtttatgctagccctccagcccttttataaggcactaatccattcacaagggcagagcccttatgacttaatcactccccaaaggcctcacctcttaataccaccacaatgtggatggattttggaagccactcatgcaaatcataccaccatccaaccatctattgaataagccttctttcccctactgatatgttattttcataaaatattatattcttatgaaaactaaagtgtatttctag

SEQ ID NO: 65719 - DNA, 401 bp, Homo sapiens
atctggacctcgagcctcatctgtaatttcaacgtctgctttctctatttctgatacatggagattaagtgcctttactatgaaaaaactgacggcttctgctttaaccaggctgcagcctgtacaagcccgtcctacttgccagcatgtcactggagtcacacccatagaaggctgtaacccatgagacttagcttcaaatgaaatctgacagatggatgttactcacaaagctgtcattggcaagctcgcctttgttcatgggactatagacacttattctcacatgcggcatgctacatgtaaaccaggtcaaacagctggttatttacaatgacattgtctgtcatcatgtgctcatatgggggttcctaggcaattaaaaactgacaatggacacg

SEQ ID NO: 65720 - DNA, 2214 bp, Homo sapiens
actgagggtggtggagcaggtagatggaaagaactctcttcccaaagacaagccgcagagccgcatcccttccccagcccctgtgttaggccgtgaggcatcttcctgccagcctgcaccagggctttcaggttttgttgcttagcacatccagggtcatgcacttcaggacaagccacctgatgcccctcggccccccagtcctgcagcctcgctggagctctccctgcagcaggaagggctgaggccaaccacaaaggggcttggggcgacatcaagggatggcagagcgagagggaagtgcagggagcctggcccagaagaccagccctgccgccgcctcctggaaggggcacacctcctgagctaagcccaggatgccgcccaagcctcggggcctcccaaggtgtcccccatgccagagtgtgtggcctctgccaggcccagggtggctccaggtggttggactcccatttcctctccccttcccaggtctttcccaagcccagagcccctgttttagttttccagtgtggggagacaggagagtggccacagagcctggttctgcgcttggtgctgctggactccaaacctggctctggagctgcagtcctggtgagggcggtggccctggggaagatgagctccccaacacttgttacggcagtttccagtcacaagccgcaaggacacagtctcaaaggagcatcagatggggttgggggcatgtggggtggccctggctctcccaggtggggtcctgccaggccaagagctatgctaagtggggcccaccatggccataggcccctccgtgtcacctggcataatcagctggtagaaacagcccttggggactacatcacctgacctgatctccaggttccaggtaccatttcttactgccccccagcagcactgtgcccctgtccacaggtcatgtgactgggtgtcgggcacggttcccttgcagcaatgaacagtacatctgtggatgaaggtgggcagatagagggttggcggggggtggagcggggcactgatcatggcagcctgctgtggccagccccaagggcttcccggtgacttctcagagcctgaatgtctcccctggacaggtgggatcgagggaatgccatgaaggtgggcatgagggggaatctcgccaggggtacagtgcgtctacactgcttttcagactagtgccacgcaggcactaggtctcactggctgaggggcagcctctgtccccaggcgccgcgacttgccccatctgctgcagaggaggcccacctgtggtgagcattgtggtcttggggcctgcaggcgcccttgtggagttaccatggtgaccgcagccccttggactggtgctggggattcagacaccaggtcacgtaggccttggctcgtggcatggccaagccctggggtctgtcggggttggcagggcaggcttcctggaggaggggctgaggccgcgtattctccctctcatcctgccatccgctgcggctactcttcagggccacaactgtcacagaacgaggaacccgggccttgtgcagaagagccttgtgtaggtggattgagaagagagtcccagaggagaagctgagccctctgctgacttgcccccagctcatttctgcttgacctttccttgttgccgtttttgcttggaaactatattgtggacctcatcattctgggaaaaggtggttcacgagaaagcacagtcatgtgtcaattaacagtgcagatgcattctgagaaatgcgttgttaggtgatttcatcatcctgcaacatcagagtgtgccccgcgctcatggatgagacagcctgccccacacccaggctgtgggggacgggatggcctgttgcttctggaccagacgcctgcacagcacattaactgtgctgaatgctgtaggcagttgtaacgcaacgaccctgtattcagtggatcagctggcaccacccaaatagataaattggcccatctggtcttgtggcccccacccaggaatggactcagctcaagaggacagcttcagctccctaagattttatcttggacccgaccaatcagcactcccgacttactggccctctactcaccaagttatccttaaaaacctcaatccctgagttttcagagagactgatttgaataataataaaactccggtcttccacacggccaaaa

SEQ ID NO: 65721 - DNA, 3885 bp, Homo sapiens
actgagggtggtggagcaggtagatggaaagaactctcttcccaaagacaagccgcagagccgcatcccttccccagcccctgtgttaggccgtgaggcatcttcctgccagcctgcaccagggctttcaggttttgttgcttagcacatccagggtcatgcacttcaggacaagccacctgatgcccctcggccccccagtcctgcagcctcgctggagctctccctgcagcaggaagggctgaggccaaccacaaaggggcttggggcgacatcaagggatggcagagcgagagggaagtgcagggagcctggcccagaagaccagccctgccgccgcctcctggaaggggcacacctcctgagctaagcccaggatgccgcccaagcctcggggcctcccaaggtgtcccccatgccagagtgtgtggcctctgccaggcccagggtggctccaggtggttggactcccatttcctctccccttcccaggtctttcccaagcccagagcccctgttttagttttccagtgtggggagacaggagagtggccacagagcctggttctgcgcttggtgctgctggactccaaacctggctctggagctgcagtcctggtgagggcggtggccctggggaagatgagctccccaacacttgttacggcagtttccagtcacaagccgcaaggacacagtctcaaaggagcatcagatggggttgggggcatgtggggtggccctggctctcccaggtggggtcctgccaggccaagagctatgctaagtggggcccaccatggccataggcccctccgtgtcacctggcataatcagctggtagaaacagcccttggggactacatcacctgacctgatctccaggttccaggtaccatttcttactgccccccagcagcactgtgcccctgtccacaggtcatgtgactgggtgtcgggcacggttcccttgcagcaatgaacagtacatctgtggatgaaggtgggcagatagagggttggcggggggtggagcggggcactgatcatggcagcctgctgtggccagccccaagggcttcccggtgacttctcagagcctgaatgtctcccctggacaggtgggatcgagggaatgccatgaaggtgggcatgagggggaatctcgccaggggtacagtgcgtctacactgcttttcagactagtgccacgcaggcactaggtctcactggctgaggggcagcctctgtccccaggcgccgcgacttgccccatctgctgcagaggaggcccacctgtggtgagcattgtggtcttggggcctgcaggcgcccttgtggagttaccatggtgaccgcagccccttggactggtgctggggattcagacaccaggtcacgtaggccttggctcgtggcatggccaagccctggggtctgtcggggttggcagggcaggcttcctggaggaggggctgaggccgcgtattctccctctcatcctgccatccgctgcggctactcttcagggccacaactgtcacagaacgaggaacccgggccttgtgcagaagagccttgtgtaggtggattgagaagagagtcccagaggagaagctgagccctctgctgacttgcccccagctcatttctgcttgacctttccttgttgccgtttttgcttggaaactatattgtggacctcatcattctgggaaaaggtggttcacgagaaagcacagtcatgtgtcaattaacagtgcagatgcattctgagaaatgcgttgttaggtgatttcatcatcctgcaacatcagagtgtgccccgcgctcatggatgagacagcctgccccacacccaggctgtgggggacgggatggcctgttgcttctggaccagacgcctgcacagcacattaactgtgctgaatgctgtaggcagttgtaacgcaacggtaagtgtctgtatctaaacgtagaaaaggtatagtgaaaatatgatgtaaaagagaaaacatgcttcagctgtggagggcacatgcttcagctgattggggcctgtggacaaggctgtgggtgtccgtgagggagagggagtgcctctgaggcccttctgcaggctggatgaacaacacacttaggccacactcagtttatactaaaaaaatgtcttcaataacacattcacttgagcttttttctaacttgttaattttatgaattttaaaaacatttttgactcttttttaataacagcttaaaacacacatcgtacagctgtacaaaaatatttttcctttttttattttgtttttttgagacggggtcttgttgtgtcacccaggttagagtgtagtggcgccgtctcggctcactacagtgagcctcagcctcccgggcttaattgatctcctgcctcagccccccaagtagctgggaccacaggcacgtgccaccatgttgcccaggctggtcttgaactcctggactgaagcggtcctcctgttaggggtggcgaatatttgagttgtcagtggtgaattcacatgggtctgcagcagcctcaactcttgcctccttggaagaaagaattcatctgaagagcataaggcggaaaaaggagactgaggcaagtttccgagcgggagtggaagtttattaaaaagctttagagcaggaaagaaaaagtacacttggaagagacccaagcacgcactgtggaggtggagtgcagcatttgaccttttgacttggggtcttatatattggcgtacttctggggccttgtgtcccttttcccatgatgctttccttagggtgggctgcctgcatgcacggtgccctccttgcactccggacgtgagcattcgcagtgggtttgtgaagttgtatgtatgtttgcctgaggctgcttcccttttccggtaggacgcccccagaaggtcatactctgccattttgtctcttaatgcgcttgctctagcccacttacccaattcctgagattttattggaagccgctggtgagcaatttcaagtgcctttatctattgggaaattgcctctccctggcgcctgcgaccaatgatcatttttagacagccagtgtaacaactgtgggaccatcacctcaaggactaaactgattttttatcttgcccaaattcctatctaaggggtctggggagtcctgccctgcaaatcagaaattctcatcagatgggttttatttaaccctatatattatgacttactttccaacctgaccctggcataacattacaagtcaaggaagaaaaatcaaagtagtttacctcaaaatgtgtttaaccatattttgaaatgaccctacaaagctgttttgtgtgggggaaaatttgcatctgtaaagaatctctgttaacatagctagatctttttcttccagaccctcccaatcctgaggagattaaaactctagcaccttttgaaagatctgaataggaaacagttgtcatctattgtctctaagggcagcgactattagacttcaaagaactttggtctccacaatctttatcttaacttgaacatttcctttctatcaatcccaggtcttcagacaaactcaaccaattgtcaaccagaaaatgtttaaattcacttgtagcctggaagcttccctcccctgctccgacctttgagttgtcccgcctttctggaccaaaccaatgtatttctcaaatgtatttgattgatgtctcatgcctccctaaaatacataaaaccaagctgtgccccgaccaccttgggcacatgttctcaggacctcctgaggactgtgtcatgggccatggtcactcatatttggctcagaataaatctcttcaatattttacagaaaac

SEQ ID NO: 65722 - DNA, 3459 bp, Homo sapiens
ctcaatcagctttatgcagagaagaagcttactgagctcactgctggtgctggtgtaggcaagtgctgctttggcaatctgggctgacctggcttgtctcctcagaactccttctccaaccctggagcaggcttccatgctgctgtgggcgtccttgctggcctttgctccagtctgtggacaatctgcagctgcacacaaacctgtgatttccgtccatcctccatggaccacattcttcaaaggagagagagtgactctgacttgcaatggatttcagttctatgcaacagagaaaacaacatggtatcatcggcactactggggagaaaagttgaccctgaccccaggaaacaccctcgaggttcgggaatctggactgtacagatgccaggcccggggctccccacgaagtaaccctgtgcgcttgctcttttcttcagactccttaatcctgcaggcaccatattctgtgtttgaaggtgacacattggttctgagatgccacagaagaaggaaagagaaattgactgctgtgaaatatacttggaatggaaacattctttccatttctaataaaagctgggatcttcttatcccacaagcaagttcaaataacaatggcaattatcgatgcattggatatggagatgagaatgatgtatttagatcaaatttcaaaataattaaaattcaagaactatttccacatccagagctgaaagctacagactctcagcctacagaggggaattctgtaaacctgagctgtgaaacacagcttcctccagagcggtcagacaccccacttcacttcaacttcttcagagatggcgaggtcatcctgtcagactggagcacgtacccggaactccagctcccaaccgtctggagagaaaactcaggatcctattggtgtggtgctgaaacagtgaggggtaacatccacaagcacagtccctcgctacagatccatgtgcagcggatccctgtgtctggggtgctcctggagacccagccctcagggggccaggctgttgaaggggagatgctggtccttgtctgctccgtggctgaaggcacaggggataccacattctcctggcaccgagaggacatgcaggagagtctggggaggaaaactcagcgttccctgagagcagagctggagctccctgccatcagacagagccatgcagggggatactactgtacagcagacaacagctacggccctgtccagagcatggtgctgaatgtcactgtgagagagaccccaggcaacagagatggccttgtcgccgcgggagccactggagggctgctcagtgctcttctcctggctgtggccctgctgtttcactgctggcgtcggaggaagtcaggagttggtttcttgggagacgaaaccaggctccctcccgctccaggcccaggagagtcctcccattccatctgccctgcccaggtggagcttcagtcgttgtatgttgatgtacaccccaaaaagggagatttggtatactctgagatccagactactcagctgggagaagaagaggaagctaatacctccaggacacttctagaggataaggatgtctcagttgtctactctgaggtaaagacacaacacccagataactcagctggaaagatcagctctaaggatgaagaaagttaagagaatgaaaagttacgggaacgtcctactcatgtgatttctcccttgtccaaagtcccaggcccagtgcagtccttgcggcacctggaatgatcaactcattccagctttctaattcttctcatgcatatgcattcactcccaggaatactcattcgtctactctgatgttgggatggaatggcctctgaaagacttcactaaaatgaccaggatccacagttaagagaagaccctgtagtatttgctgtgggcctgacctaatgcattccctagggtctgctttagagaagggggataaagagagagaaggactgttatgaaaaacagaagcacaaattttggtgaattgggatttgcagagatgaaaaagactgggtgacctggatctctgcttaatacatctacaaccattgtctcactggagactcacttgcatcagtttgtttaactgtgagtggctgcacaggcactgtgcaaacaatgaaaagccccttcacttctgcctgcacagcttacactgtcaggattcagttgcagattaaagaacccatctggaatggtttacagagagaggaatttaaaagaggacatcagaagagctggagatgcaagctctaggctgcgcttccaaaagcaaatgataattatgttaatgtcattagtgacaaagatttgcaacattagagaaaagagacacaaatataaaattaaaaacttaagtaccaactctccaaaactaaatttgaacttaaaatattagtataaactcataataaactctgcctttaaaaaaagataaatatttcctacgtctgttcactgaaataattaccaaccccttagcaataagcactccttgcagagaggttttattctctaaataccattcccttctcaaaggaaataaggttgcttttcttgtaggaactgtgtctttgagttactaattagtttatatgagaataattcttgcaataaatgaagaaggaataaaagaaataggaagccacaaatttgtatggatatttcatgatacacctactggttaaataattgacaaaaaccagcagccaaatattagaggtctcctgatggaagtgtacaataccacctacaaattatccatgccccaagtgttaaaactgaatccattcaagtctttctaactgaatacttgttttatagaaaatgcatggagaaaaggaatttgtttaaataacattatgggattgcaaccagcaaaacataaactgagaaaaagttctatagggcaaatcacctggcttctataacaaataaatgggaaaaaaatgaaataaaaagaagagagggaggaagaaagggagagagaagaaaagaaaaatgaagaaaagtaattagaatattttcaacataaagaaaagacgaatatttaaggtgacagatatcccaactacgctgatttgatctttacaaattatatgagtgtatgaatttgtcacatgtatcacccccaaaaaaagagaaaaagaaaaatagaagacatataaattaaatgagacgagacatgtcgaccaaaaggaatgtgtgggtcttgtttggatcctgactcaaattaagaaaaaataaaactacctacgaaatactaagaaaaatttgtatactaatattaagaaattgttgtgtgttttggatataagtgatagtttattgtagtgatgtttttataaaagcaaaaggatattcactttcagcgcttatactgaagtattagattaaagcttattaacgta

SEQ ID NO: 65723 - DNA, 388 bp, Homo sapiens
caaggtctcactatgttgcccaggctggaaagccagtattttttaaccaaacaagagtaatcattctgactatgagacgatgattgttacgatgatgtcagagactccctaaccttgtttccaggcagcctgtccataccacagctccagggtttttttaaaaagaacagtctcactctatatagacctattgaaactctgattaaaccattcaggctttccagttccctactggctgctgactttctccaaatcctctttctcctctgccgctctccctgggtatctcactctcccgcatgttacagtgttccagggattattatgtgtttctgtgtctcacaggctccctcccgctccaggcccaggagagtcctcccattccatc

SEQ ID NO: 65724 - DNA, 2475 bp, Homo sapiens
ctcaatcagctttatgcagagaagaagcttactgagctcactgctggtgctggtgtaggcaagtgctgctttggcaatctgggctgacctggcttgtctcctcagaactccttctccaaccctggagcaggcttccatgctgctgtgggcgtccttgctggcctttgctccagtctgtggacaatctgcagctgcacacaaacctgtgatttccgtccatcctccatggaccacattcttcaaaggagagagagtgactctgacttgcaatggatttcagttctatgcaacagagaaaacaacatggtatcatcggcactactggggagaaaagttgaccctgaccccaggaaacaccctcgaggttcgggaatctggactgtacagatgccaggcccggggctccccacgaagtaaccctgtgcgcttgctcttttcttcagactccttaatcctgcaggcaccatattctgtgtttgaaggtgacacattggttctgagatgccacagaagaaggaaagagaaattgactgctgtgaaatatacttggaatggaaacattctttccatttctaataaaagctgggatcttcttatcccacaagcaagttcaaataacaatggcaattatcgatgcattggatatggagatgagaatgatgtatttagatcaaatttcaaaataattaaaattcaagaactatttccacatccagagctgaaagctacagactctcagcctacagaggggaattctgtaaacctgagctgtgaaacacagcttcctccagagcggtcagacaccccacttcacttcaacttcttcagagatggcgaggtcatcctgtcagactggagcacgtacccggaactccagctcccaaccgtctggagagaaaactcaggatcctattggtgtggtgctgaaacagtgaggggtaacatccacaagcacagtccctcgctacagatccatgtgcagcggatccctgtgtctggggtgctcctggagacccagccctcagggggccaggctgttgaaggggagatgctggtccttgtctgctccgtggctgaaggcacaggggataccacattctcctggcaccgagaggacatgcaggagagtctggggaggaaaactcagcgttccctgagagcagagctggagctccctgccatcagacagagccatgcagggggatactactgtacagcagacaacagctacggccctgtccagagcatggtgctgaatgtcactgtgagagagaccccaggcaacagagatggccttgtcgccgcgggagccactggagggctgctcagtgctcttctcctggctgtggccctgctgtttcactgctggcgtcggaggaagtcaggagttggtttcttgggagacgaaaccaggctccctcccgctccaggcccaggagagtcctcccattccatctgccctgcccaggtggagcttcagtcgttgtatgttgatgtacaccccaaaaagggagatttggtatactctgagatccagactactcagctgggagaagaagaggaagctaatacctccaggacacttctagaggataaggatgtctcagttgtctactctgaggtaaagacacaacacccagataactcagctggaaagatcagctctaaggatgaagaaagttaagagaatgaaaagttacgggaacgtcctactcatgtgatttctcccttgtccaaagtcccaggcccagtgcagtccttgcggcacctggaatgatcaactcattccagctttctaattcttctcatgcatatgcattcactcccaggaatactcattcgtctactctgatgttgggatggaatggcctctgaaagacttcactaaaatgaccaggatccacagttaagagaagaccctgtagtatttgctgtgggcctgacctaatgcattccctagggtctgctttagagaagggggataaagagagagaaggactgttatgaaaaacagaagcacaaattttggtgaattgggatttgcagagatgaaaaagactgggtgacctggatctctgcttaatacatctacaaccattgtctcactggagactcacttgcatcagtttgtttaactgtgagtggctgcacaggcactgtgcaaacaatgaaaagccccttcacttctgcctgcacagcttacactgtcaggattcagttgcagattaaagaacccatctggaatggtttacagagagaggaatttaaaagaggacatcagaagagctggagatgcaagctctaggctgcgcttccaaaagcaaatgataattatgttaatgtcattagtgacaaagatttgcaacattagagaaaagagacacaaatataaaattaaaaacttaagtaccaactctccaaaactaaatttgaacttaaaatattagtataaactcataataaactctgccttta

SEQ ID NO: 65725 - DNA, 276 bp, Homo sapiens
gtgctgacttcatatctcatcctgtgacttggaatgccttaagcatctgggaatgtagcctagtagttctcagcctcattttacccatctcctactcaagatttagttgctctggttcacacgcctctgacatatcaaaatattctttataccagggagccatattttaaggtgaaattggctgcactccttcaatgtgctctaggggaagaaaccttgaattgaaattaaaaggagttggtttctaatcataaaactgtcattgagtagagctac

SEQ ID NO: 65726 - DNA, 989 bp, Homo sapiens
attttgtgagtttttttcattcaacagaaatttaactgttaaattaagggaaacctacaaagtatactttcataaaatgctagagttcaggttattaaaaagccattttaaaagatacatctgaatcttagtgggtttgtcttaattacattattaatgaactgctgtgtctatgctataatgtttgagttagtgccctctggcttcagaaaattatggtcttaattattgtttataataatacaaaattgaaaataaccgaaaagtccatcaattgggaattgattaaattataaatattcataagatagtgtgccaggcagacatttacaaggatctgatagaatgatgaatgcttatacattgtcatagaaagagcttcaaatatatttctaagtaaggaaaaaaaaacagttatataacagtatgtataatatggccttatttatgtaaaagattcttctacatgtttatatgggcatttgtaaaatctaaaaggatacataccaagctgttaacagtgttagctctaggagggtggaattatggaggaacatttacgttttctgtatctttataacatattttacaacgatcctgtagtactagggaaaaaagctttttccattttgaaaaatttcaagcatttatgcaaatgtttttcgaatactaaaaattccaaatttctctaaatactaaatgttctctactaaaaattatttgaaattatcttttgtgggtttgcagtgaatggcgtacttgtcataaataactgttttctttgagaattcatccttgcaacaaagataactataaaggtactctattaactgaaacaagacttggggtttttcttttaggtatttctgctattgtttcattccaaacaataattactataaaatttgaatttgttttcacctctctggctctgatgaagtacagttaaactccacacaacagctaaggtattaataatttagaaaagt

SEQ ID NO: 65727 - DNA, 397 bp, Homo sapiens
gaggctggagaatcacttgaacccaggaggcagaggttgcagtgagccgagatggcgccattgcactccagcctgggccagagcaaggttccttctcaaaaaacttggaaatctgttgggaagtagggggagggcaaggttaaaacctatgcaggtgtgtcaattagacttgttccaacttgagaacctgaattttgcatgtaattgaaatgttccagaacaagtctggcagtttcataagggagtttttagatgccaatacattgcagataaccatattggctacattaggggaatgagcatggataggtgcctccaagttggtagaatagcatgagaagttttcaaaagtaaccgctttaaggttatgttcagtatttgctaagtaaacaaagat

SEQ ID NO: 65728 - DNA, 426 bp, Homo sapiens
tgtactatcacatgtgagctctatttgataacataaaaatgctatacttattttagggtaaatttgttacactatttgataccaggaaataagttgtaaataacaagcaactgctcttccctcacatctggcctttcaaaatccctcccagctcccggggtgcaagtgaaatatccggaggctgccagggtccatcctagagagcagagggggtgcgtggagctccacatcccctacagggtcttttcatcttggtagtaggcacgcagttttagaaccctcaagaaataaaatatataaaggagaaccagactcaatcaagagaactgataaattctagagagctttggcttagaaactgtcaaaggataggatttccaggcagtattgaagtccagtaagggaacagcagcatgagttaagttt

SEQ ID NO: 65729 - DNA, 342 bp, Homo sapiens
gcacagggagagcagacggggtcatgtggcgagggcaggagcaaggagtcggggcaagtcccaaacttttaaacaaccagatctcacgggaactcaccaagcaagaactcacttatcaccgaggggatggtgctagaccattcatgacagatctgtccccacgatccagccacctcccaccagaccccacctccaacgtcggaatcccatttccacatgagatctggaggggacagacgtctaaaccatatcacagacactaagaaaggcatacgtggacgaatggggtgagttcagatttggatgtaggagccaagggtggctatggaggaatttgagcag

SEQ ID NO: 65730 - DNA, 455 bp, Homo sapiens
tctgtgcatctttctgcttccctagatcctacagttttaatgttatcttctggagtatcacagcaacttccttaacgcaaggtttctccaactctgagttgtcacttagtgggtagtgaaatcagatgagtcatgcagtttcaccatttagaaaatgcaaaaggttaggtagaaaatgtcagcgtacatcctgtgtagaaaaagtaagtcttgttgtgaaacctctttcagtttgtgtgtgcgtgtccccggatctgtgtacatactgggcaacagggaaaatgcattttgtaggtcaaaatatttggagaaatacgtttctacttagtctcactgggtctgtcttttctgtttccaaactattgtgtacacttagaggaagagtggaaaccctccagcaggtcctgtcagtctgcagtttacaaatctcccctcaggataagagttcctgttca

SEQ ID NO: 65731 - DNA, 494 bp, Homo sapiens
tgaaagaacacaaaaggaaatcgttttaagctgtttaacctcccaacaaaattatcttaggtgaaacaccacaagtacagtacaaaaacatgtcaccaattcgagatttgtgtctctaaagaaatacatacctacacaggtaagaagtttctggctgtgaccgaaggtagaacagtcaaaagtttagagcttttattagctaaaataagatcccagctagccaaggatccagcgaaaagttttgttgattacaaataaaatcggatccattaaataggtaaggacgactgcttcatttcctcacttaccagaaatgacataagactccctcagatcgttctgatttagtacaaacacagtctctcatagaaactcctatcattaatggtaaaggtataaaaaacaattactcgtcaagcaaactctcaatttacctgaccttcctgccttgctcaagtctaccactctgaaaaccacagttacagccctaagtg

SEQ ID NO: 65732 - DNA, 531 bp, Homo sapiens
gtgccaggcgtggttctcagatcttcacatacactaacacacttagtcctcacagctctcaaaataggagggccaggtggggtggcttacacctgtaattccagcactttgggaggctgaggcaggcagatcacctgaggtcaggagttcaagacaagcctggccaacatggtgaaaccccatttttactaaaaatacaaaaattagccggatgtggtggcaggcacctgtaatcctagctactcaggaggctgaggcaggagaatcacttgaacctgggagatggaggttgcggtgagccgaggtcgcaccactgcactccagcctgggcaacagagtgagactccgtctcagaaaaacaaaaaaaaaaaaaataggaggattgtttttacaggtaacaaaactgaggtgtagagagattcagtggcttgctcaaggtcaaagtgaggaaccaggatgtatatgcagattgtctgactctagagtccatgctctcaatcatgagctatattacttcccatagaaagctaa

SEQ ID NO: 65733 - DNA, 362 bp, Homo sapiens
aatggctttgttgatttggttaaattagttgaccctttcatcaattcttcttcagttctgtcatcattctttccctcctctttcaatttcctatctaaaatgttccaaaataattataaaagtcagagaggcatgatgaacctttttattggaaagagatgaaccttccaaactcattctcagctcatcatcacagcatttggaatatggagtaaaaattcatattttgcaagtgccttggtgcttaagcatgcagaacagatgtttcatttcacaagttttcccaatttattacacataatatctctatttctgtgagacaaacactgctttggggaataggcctttccatttcctccagc

SEQ ID NO: 65734 - DNA, 2666 bp, Homo sapiens
gctcagctggtagtttgacctccgttggtgcaatgccagagatgggattgtcagccaccacactgccaccaccctgcacacagtctgggtccctccgagagaagcacgccaaccttaacatcccctacagcatcttggtgcttcacacaccatttaggaggccaccctaacgaggcaagaggacatgggggtgtgcagaagttctgttcttagtgagaatggctggcctgagaatccagctcacctcctctgcccacagtctggactgcttgtgggaaggccatctcctcctgtctggtggtacctccactctgggcagggagggcctgtctgtgactcgctctggaccccacttcccgctctggccaagggctgtcttctgtgcacatagctcaggagcctgcagcagttccctgtatgggtggatgtcctcaggggccaagaagagaagaatggggacaacagaaacctgctttgtaggggattatgtagactaaaagcctagaagttctgcccacatccttatgacgcagccaatctggagcttcatgtttccttctaaaagtagtaaccgggtagaagtgggtgacccattgaggacacatgatgtgaggtatttctgccggattctaggttagcaaagactcaaatgggtgactcatgaatgaagggagaacaggcacaggacttaatgaaaagagtttcttgaacttagttttctgaatgggggtggggagttggggcacgtgtgtgtaaggggaggctgcctcactttgaaggaatggtgttggctaacaggatccatgaaattcctaggtcagttgaataataactgaactactggtttgactgtggattatttcctgggtattagtgggacccaacagcacattgctattaatagtatggaaataatggtccctctgtttcattgaattgctgaagtaatgataatgccatgaaccaggagaagatggttgtgggggtttctaggaagcagctgctgtgacaggccaatcccaggcttgcccccgagccctcctgtccttctgggtttgtgtttgccttgcctggtgcttcctccctcattgtgttgttgaatagacctaggcagccttgtatccatagaaagcctccactgctgggccggggagggggttgtggtaagggccctctggaaatcaagcagagaatgcctttgcagtggtctcccgggcattgggcagggcctagccttttgcagcccccagaggaccttgcctgcataaagcactcagaagggttagccacctggtgattttgtctctagtgaaactgtgtttgccgataatcatccacatagccacctctgtcctcgcagtttggatgcctttttttgacacctgcgctaggttcttgtatgctggcttttcttaaaggaacagcagagtagaaaagaggttgagaatgttttctagcaggcagaatgtgcatacatgttttcatgagtgtcctttgggtgctgtttcttttaaatcctctgtgcacagggctctggcctttagtaaactgtttttctgtcttacgtcatgctgactgggtgctaggggctgattacaaaggggaagagttgaacagacatcaggggccgatgaaaccaaaggactaggagtcaggagaacaagtcagggattaggagacagcggtttggtttattgttatccagctggaggactcctaggggcagcagcaggaggaataccagggccacggaggggccaggagtctcacagtggagggcagactctaacagatgccagctgaacgctcgctggccctggatgtcatacgagttggggaccagaaatctgggctcagagaacccgtccagggagatttgaagccatgggttatcttctagagttgatactgataatatattttaatttttattgatgtttaataccttctgaaacaggagggtaagatcagatgggaagcccctctgttgaaggatcttgggaaccttggtggtttttttttttttttggttttttttttttgatcgagctgtggacatccttcttaattcgattctgaggatttgtttaactaaaaagttcccaaacacagaaagggcctccccacctgctttggggagctgtctgtgctgggagtgccaggcatcccatgggacccatcactgccagtgtctgtgcctcccagaggtcagccgtgtctgccctggctctgtctcctctgtgacagggcagagcatttctggtcagtttctccatggtgcctcccacccctttgtaaagtggatggacatgatggaattcagttgtctcaccctgatagcctgggtgttgatattcactttacccgcactcagacacaggcgaccttgaagcagttctcggtgtgtagagtccacgtgacagtccccacagcctccccagatagctgtgtgcctgtgcgctactgctgtgccattttcccaacttggcgtttcactaaatgcagctgatctctctctctgtgcactcgtgatccatgttgaacaatacatgtaggttctttttccacgcaatgtaagaacatgatatactgtacgttggaaagcatttaccttatttatatacctgaatgttcctactacacaaataaacatatattaaattcta

SEQ ID NO: 65735 - DNA, 1151 bp, Homo sapiens
gctcagctggtagtttgacctccgttggtgcaatgccagagatgggattgtcagccaccacactgccaccaccctgcacacagtctgggtccctccgagagaagcacgccaaccttaacatcccctacagcatcttggtgcttcacacaccatttaggaggccaccctaacgaggcaagaggacatgggggtgtgcagaagttctgttcttagtgagaatggctggcctgagaatccagctcacctcctctgcccacagtctggactgcttgtgggaaggccatctcctcctgtctggtggtacctccactctgggcagggagggcctgtctgtgactcgctctggaccccacttcccgctctggccaagggctgtcttctgtgcacatagctcaggagcctgcagcagttccctgtatgggtggatgtcctcaggggccaagaagagaagaatggggacaacagaaacctgctttgtaggggattatgtagactaaaagcctagaagttctgcccacatccttatgacgcagccaatctggagcttcatgtttccttctaaaagtagtaaccgggtagaagtgggtgacccattgaggacacatgatgtgaggtatttctgccggattctaggttagcaaagactcaaatgggtgactcatgaatgaagggagaacaggcacaggacttaatgaaaagagtttcttgaacttagttttctgaatgggggtggggagttggggcacgtgtgtgtaaggggaggctgcctcactttgaaggaatggtgttggctaacaggatccatgaaattcctaggtcagttgaataataactgaactactggtttgactgtggattatttcctgggtattagtgggacccaacagcacattgctattaatagtatggaaataatggtccctctgtttcattgaattgctgaagtaatgataatgccattttcccaacttggcgtttcactaaatgcagctgatctctctctctgtgcactcgtgatccatgttgaacaatacatgtaggttctttttccacgcaatgtaagaacatgatatactgtacgttggaaagcatttaccttatttatatacctgaatgttcctactacacaaataaacatatattaaattcta

SEQ ID NO: 65736 - DNA, 160 bp, Homo sapiens
ctgtctaccagatgaggaaatggcagttctgagaagtcactggtctagatcccgcaggtggcacgtgacagctagggttcaaaacgttctcaccaaatccaatgctcctcacatattaattttataaccagacaaataaatattagagacaaccaccatc

SEQ ID NO: 65737 - DNA, 143 bp, Homo sapiens
ctgtctaccagatgaggaaatggcagttctgagaagtcactggtctagatcccgcaggtggcacgtgacagctagggttcaaaacgttctcaccaaatccaatgctcctcatccaagacctgggaccagcaggtaccgactga

SEQ ID NO: 65738 - DNA, 474 bp, Homo sapiens
gtcaagaaatttggagcagagtctgattacttgagcatgaacatacccgaccaaggtatgttctggagtcatattctagcctctgagctcattttttcatgcgagttcatataaaatcctcgaaagtttagaaactaggttttagtagtaacggagctagaatcatcttcgggcttattcctgctagttgttccatatttctagatttcatcttgaattttgaaaactgatttaagaatatatttagtattattattagtaagggaatacgcaatccagtttcaattttattcagaagtaggtcacctaattctagaaaatggttattagtctagtgtcgcttagcaaggtacttaaaagaaaatctgcacatatccttgtgctgcccttcttaaaaacagaaaacaaaaagtgtaagatcatcattgcttcccacataggaaaaataaaatgtcttcagacttgatgtgactc

SEQ ID NO: 65739 - DNA, 1127 bp, Homo sapiens
  misc_feature (272)..(272): n is a, c, g, or t
ctgcacgtttgagagctgtgttggcaagacctcaggacagagtgccctctgtgtctggtggtgattctcagacaccatcacattctgatcctgcattgtgggccattctactgagtgcatctactcctaagttaaggactttcatgaacctgtctcatgactggccctttctaaagggaagtatggccgttagttactttaatcaacatttcccaatgggtaaggaacagtctgtgaacttatgagttttgttttgttttgttttgtttttnatttttgagacagagtctcgctctgtcgcccagactagagtgcagtggtgcaatctcagctcaccacaacctcgacctcttgggttcaagtgattctcctgcctcagcctcccaagtggctgggattataggtgcccatcaccacgcatggcctatttttgtacttttagtagagacagggtttcaccctgttggcgaggctggtctcaaactcctgacaccaggtgatctgcccacctcggcctcccgaagtgctgggattacaggcgggagccaccatgatggccaacttttgaattctgaaccagttgtttgagtaccagagctcttcaataccttgaagaaagattcaggggagagctgttgtgaacagcttgccccagggaaaggacaaggctaagacaatttcagggcttccttgggaaaacagaattgaggaaatgcaaagtgaagaaattgtagctgtcaggaacaagagaagagggacgggaaacctgctactgaggtttggaggtattcctctggagttttcacttataccattctctcatgcccaggaagctgctcatcaccaaaccacaagtcttcctctaactcagtcacaactaagcttctatccagacactgatgatactgtaactgttttgttgtgcttctgattagttgccctgtcaaccataagcagcctataaacagggcctggctccatccttgttacttccccattgcactgaattcagtatttttccctcaaggtagatagttgtggggcagcatccctaaaaatatctagttatattatggcatccagtaaatgtttccttaattacttacctccattaacaagctttatgc

SEQ ID NO: 65740 - DNA, 117 bp, Homo sapiens
aatatccattgagtactgtaaacgcaggagctacatagaaaaacgggcttcaaaaatctgcacagaggtttgcttgagaatttagctacacaaatatgtgtagaagtgaaaaaaaaa

SEQ ID NO: 65741 - DNA, 921 bp, Homo sapiens
taaactttgctgtggcaaagactttggtttaacatgtacacactcgcacccccctgctgccctatggagttttctttttaaaatgccttcatgctgtcagaataatttcttgacttagaatcagagaatcctagacttttctcccctctaaaattaactacatgtctgaatttttctccctctcttctgaatcctcagaaagcaagccctcttctctacactccccagttagaagatgcatctctttctctttagtgaccataaaactagacacacagtcagccttctgcatctgtggattcaaccaaccatggattcaaaatatttgaggaaaaaaaaagtacctctttactgaatatgtatatactgttttccttgtcatgatttcctaaacaatacagtataatggtgatttatataatatttacataatattaggtgtcataagtaatttagagatgatttaacttatatgggagcgtatgtgtaggttgtatgcaaatactacacgatattttatcagggacttgagtgtctgtggattttggcatcctcggggggtgcttggaaccagtccccctggatacctgaggagtgactgtactgtgtgatagcagcagtatgggatggaaagatgagatcctagtggtgcaggtacatcagttggacatttggtgtaactcaccaaaagtgaaaaaaacagagaaacaatatttgtggtgaattaagagattgagaagcaccgaattgaattgagaggtggttttgacttcctgaaatctccccacaccattttataactcctcagtttttccatttagctttaccttcttctgtgacagagattcattcattgtctttccttactatgctttaagcaactcttacacttctgtatagaaaaggtgtttcattccctct

SEQ ID NO: 65742 - DNA, 3139 bp, Homo sapiens
  misc_feature (403)..(403): n is a, c, g, or t
  misc_feature (456)..(456): n is a, c, g, or t
  misc_feature (606)..(606): n is a, c, g, or t
  misc_feature (2080)..(2080): n is a, c, g, or t
  misc_feature (2082)..(2082): n is a, c, g, or t
  misc_feature (2349)..(2349): n is a, c, g, or t
  misc_feature (2403)..(2403): n is a, c, g, or t
  misc_feature (2749)..(2749): n is a, c, g, or t
  misc_feature (2871)..(2871): n is a, c, g, or t
  misc_feature (2962)..(2962): n is a, c, g, or t
  misc_feature (2977)..(2977): n is a, c, g, or t
  misc_feature (3048)..(3048): n is a, c, g, or t
aaacatacatatatttattgcacaggattgaggaagaatttatcaaacaaaaagctctccaactggtcagtatctcactgaaataaataaacctttcattgacagaggagagctgtgctataaaggagaaatacagaggcacatcttttaaaaattcacttattcatttaacagaggtgacaaaacccatagagagctggaatggaattgaggacaaaattagtttaaaaatgcaaatcttgtttttagaataacttcttcagaaatagaagaaacacaaagaagcaaaatttccatacgtgggtttccagatactggctcacccatgtattatccacagattgctaggtttctccaccagaaatgaaaatttgtttcaatcctcttttaatataaaatatgngagaaaacttttcagaaaaccaaaatactttttaagtaatacaaacatctttnttttttttttttttgagacagagtctcgctctgtcatccaggctgaagtgcagtggcgcgagctccgctcactgcaagctccgcctcccgggttcacgccattctcctgcctcagcctcctgagtagctgggactacaggcgcccaacancatgcccggctaattttttgtatttttttagtagagacggagtttcaccgtgctagccaggatggtcttgatctcctgacctcgtgatccgcccgcctcggccttccaaagtgctgggattacaggcgtgagccaccgcgcccggcccggccaaacatcttttattttacctagtttgggacttgctttccttgattatgctcaacaaagggaagaattgtgaagaaaaatctaaaacttggatcaatgtattgtcggggacacacccaagtacctcccttttgtataaagatcaattaatgtatcacacattatatatgcatgaataaatctgagaaaagaaacgtgaaataattcctaagaaattaaacgcaaatgtgatcaaatcgatggcaaataagaacagagaaaagagcagacaaaaatttgtaatggggaagtcctaacaaagataagatcagttttctctaccaaagaataggagggataccttagtgcagataattaaaattaatataaacacagggagaaacaagacattttcaccgtgaaaactatgcacattgcgttgtacattgcaattggtatttatgttaactatgacaggtatgcttttatttttttcatgaatattggctatggtattatttgaaatcaggatatgacctcacaaatgataaaaatttggtcataaattacctctatttacaaggtgaattaagaataaagcaaatgtaaaaattcagagattgaaatatcatgtaaatatgtgtgttctaataattttgaaacagtacaacttacaaagaattgacaggagaaaaggtggcatttgggggctaaaattaattagctgattttctgatctgtagtagcttggatttctttaaagcgtatctcagaatgcataacctaaacttatatgacaattttaagatggtagtagattgatttgaaaatggctccaatacttaacgtctctttgaatctatgtcctttgcaatctctctttgcatatgtgcccttagtaatgtgacattacagatctaaccatctaaccagggatagagatgatttctgcatcctcttgattattgataattcttgcaatttaatgtgatcaacagaatgaggtgaaaacacagtcgcaagaaatgcgggcttgaggttcaggaggacttcccctgagaatcctgccaccacattgtgaacaagtcaaggctaccatggtagcgtatgacagaagatggagaccaatcaacagcaatctggcccatgattatgtaaaccaacagaatcaagattagcagagctaactatctgtttcactgttgattgcagaggcatgagaaaacacatcctagaggataactaatacccaactgatacaaacatagatgaatcacttttgagtcactttgtttcagtgtcatttgctaagcagtaatattgaccttaaataaagaaagggtangnctaaacataacttttctatttgatgacttaattttaattattaaaaaatattttcaccatatatctcacaaacaacacctgactctacggtatataacaaagacacctaaaaaaataagaatttttaaaacttgagaaatataggtgagcttgactagtaagtattaaaaaagttaaaataaaaataataatctggttttgatcaaatatatgtacaaaataatgtaatattgaataaaatatatcaaaaacttgaaaaatagaganaaatacaatgatcccctcacctaaatccaaaaatgagacacattctgaagtatnatttacacaccactttaaattaatttgtagatatcctgacattcatccatgactaaacgagaatgttttaaataacagtatacttgcttatattgcaacaataatattattcataacaaaattaacaaattatcaaatattgccttgtatcttattcatattcaacatttttcaaaacatcttacgtaagtgtttttaattttattttattttgtgttttgttacaggatattgtcaagcaacaatgatttgtccaacttttgtacctctttagtctctgaatctacaataattccctcccaaacaaacacacttttttcctttcattctttcctacttcctcccntctctctgcatttctatcctgctctctgtctttctctttctccctctctctctgcataatgtagtttgcaatttaagaagccattgtcttctacaatatcttttgttctggaagaaaaatcnctcaactgttttcgataagggtgatccaaaaaagacaaaaatgtatcctgctttacactaaaatgctcaaggtaaattaattataaatatngatacttaaactaantaatgcctggtagaaataagtgctaccctttttatattaaactctaccatctttgctcaaaatcttcccangaataaacatatcacacatttggtatgtattttgagttacccacagatattccttttctcctaggccttaattcttaaccttagactccgg

SEQ ID NO: 65743 - DNA, 14896 bp, Homo sapiens
cagcggtgcgagctccaggcccatgcactgaggaggcggaaacaaggggagcccccagagctccatcaagccccctccaaaggctcccctacccggtccacgccccccaccccccctccccgcctcctcccaattgtgcatttttgcagccggaggcggctccgagatggggctgtgagcttcgcccggggagggggaaagagcagcgaggagtgaagcgggggggtggggtgaagggtttggatttcggggcagggggcgcacccccgtcagcaggccctccccaaggggctcggaactctacctcttcacccacgcccctggtgcgctttgccgaaggaaagaataagaacagagaaggaggagggggaaaggaggaaaagggggaccccccaactggggggggtgaaggagagaagtagcaggaccagaggggaaggggctgctgcttgcatcagcccacaccatgctgaccccgccgttgctcctgctgctgcccctgctctcagctctggtcgcggcggctatcgacgcccctaagacttgcagccccaagcagtttgcctgcagagatcaaataacctgtatctcaaagggctggcggtgcgacggtgagagggactgcccagacggatctgacgaggcccctgagatttgtccacagagtaaggcccagcgatgccagccaaacgagcataactgcctgggtactgagctgtgtgttcccatgtcccgcctctgcaatggggtccaggactgcatggacggctcagatgaggggccccactgccgagagctccaaggcaactgctctcgcctgggctgccagcaccattgtgtccccacactcgatgggcccacctgctactgcaacagcagctttcagcttcaggcagatggcaagacctgcaaagattttgatgagtgctcagtgtacggcacctgcagccagctatgcaccaacacagacggctccttcatatgtggctgtgttgaaggatacctcctgcagccggataaccgctcctgcaaggccaagaacgagccagtagaccggccccctgtgctgttgatagccaactcccagaacatcttggccacgtacctgagtggggcccaggtgtctaccatcacacctacgagcacgcggcagaccacagccatggacttcagctatgccaacgagaccgtatgctgggtgcatgttggggacagtgctgctcagacgcagctcaagtgtgcccgcatgcctggcctaaagggcttcgtggatgagcacaccatcaacatctccctcagtctgcaccacgtggaacagatggccatcgactggctgacaggcaacttctactttgtggatgacatcgatgataggatctttgtctgcaacagaaatggggacacatgtgtcacattgctagacctggaactctacaaccccaagggcattgccctggaccctgccatggggaaggtgtttttcactgactatgggcagatcccaaaggtggaacgctgtgacatggatgggcagaaccgcaccaagctcgtcgacagcaagattgtgtttcctcatggcatcacgctggacctggtcagccgccttgtctactgggcagatgcctatctggactatattgaagtggtggactatgagggcaagggccgccagaccatcatccagggcatcctgattgagcacctgtacggcctgactgtgtttgagaattatctctatgccaccaactcggacaatgccaatgcccagcagaagacgagtgtgatccgtgtgaaccgctttaacagcaccgagtaccaggttgtcacccgggtggacaagggtggtgccctccacatctaccaccagaggcgtcagccccgagtgaggagccatgcctgtgaaaacgaccagtatgggaagccgggtggctgctctgacatctgcctgctggccaacagccacaaggcgcggacctgccgctgccgttccggcttcagcctgggcagtgacgggaagtcatgcaagaagccggagcatgagctgttcctcgtgtatggcaagggccggccaggcatcatccggggcatggatatgggggccaaggtcccggatgagcacatgatccccattgaaaacctcatgaacccccgagccctggacttccacgctgagaccggcttcatctactttgccgacaccaccagctacctcattggccgccagaagattgatggcactgagcgggagaccatcctgaaggacggcatccacaatgtggagggtgtggccgtggactggatgggagacaatctgtactggacggacgatgggcccaaaaagacaatcagcgtggccaggctggagaaagctgctcagacccgcaagactttaatcgagggcaaaatgacacaccccagggctattgtggtggatccactcaatgggtggatgtactggacagactgggaggaggaccccaaggacagtcggcgtgggcggctggagagggcgtggatggatggctcacaccgagacatctttgtcacctccaagacagtgctttggcccaatgggctaagcctggacatcccggctgggcgcctctactgggtggatgccttctacgaccgcatcgagacgatactgctcaatggcacagaccggaagattgtgtatgaaggtcctgagctgaaccacgcctttggcctgtgtcaccatggcaactacctcttctggactgagtatcggagtggcagtgtctaccgcttggaacggggtgtaggaggcgcaccccccactgtgacccttctgcgcagtgagcggccccccatctttgagatccgaatgtatgatgcccagcagcagcaagttggcaccaacaaatgccgggtgaacaatggcggctgcagcagcctgtgcttggccacccctgggagccgccagtgcgcctgtgctgaggaccaggtgttggacgcagacggcgtcacttgcttggcgaacccatcctacgtgcctccaccccagtgccagccaggcgagtttgcctgtgccaacagccgctgcatccaggagcgctggaagtgtgacggagacaacgattgcctggacaacagtgatgaggccccagccctctgccatcagcacacctgcccctcggaccgattcaagtgcgagaacaaccggtgcatccccaaccgctggctctgcgacggggacaatgactgtgggaacagtgaagatgagtccaatgccacttgttcagcccgcacctgcccccccaaccagttctcctgtgccagtggccgctgcatccccatctcctggacgtgtgatctggatgacgactgtggggaccgctctgatgagtctgcttcgtgtgcctatcccacctgcttccccctgactcagtttacctgcaacaatggcagatgtatcaacatcaactggagatgcgacaatgacaatgactgtggggacaacagtgacgaagccggctgcagccactcctgttctagcacccagttcaagtgcaacagcgggcgttgcatccccgagcactggacctgcgatggggacaatgactgcggagactacagtgatgagacacacgccaactgcaccaaccaggccacgaggccccctggtggctgccacactgatgagttccagtgccggctggatggactatgcatccccctgcggtggcgctgcgatggggacactgactgcatggactccagcgatgagaagagctgtgagggagtgacccacgtctgcgatcccagtgtcaagtttggctgcaaggactcagctcggtgcatcagcaaagcgtgggtgtgtgatggcgacaatgactgtgaggataactcggacgaggagaactgcgagtccctggcctgcaggccaccctcgcacccttgtgccaacaacacctcagtctgcctgccccctgacaagctgtgtgatggcaacgacgactgtggcgacggctcagatgagggcgagctctgcgaccagtgctctctgaataacggtggctgcagccacaactgctcagtggcacctggcgaaggcattgtgtgttcctgccctctgggcatggagctggggcccgacaaccacacctgccagatccagagctactgtgccaagcatctcaaatgcagccaaaagtgcgaccagaacaagttcagcgtgaagtgctcctgctacgagggctgggtcctggaacctgacggcgagagctgccgcagcctggaccccttcaagccgttcatcattttctccaaccgccatgaaatccggcgcatcgatcttcacaaaggagactacagcgtcctggtgcccggcctgcgcaacaccatcgccctggacttccacctcagccagagcgccctctactggaccgacgtggtggaggacaagatctaccgcgggaagctgctggacaacggagccctgactagtttcgaggtggtgattcagtatggcctggccacacccgagggcctggctgtagactggattgcaggcaacatctactgggtggagagtaacctggatcagatcgaggtggccaagctggatgggaccctccggaccaccctgctggccggtgacattgagcacccaagggcaatcgcactggatccccgggatgggatcctgttttggacagactgggatgccagcctgccccgcattgaggcagcctccatgagtggggctgggcgccgcaccgtgcaccgggagaccggctctgggggctggcccaacgggctcaccgtggactacctggagaagcgcatcctttggattgacgccaggtcagatgccatttactcagcccgttacgacggctctggccacatggaggtgcttcggggacacgagttcctgtcgcacccgtttgcagtgacgctgtacgggggggaggtctactggactgactggcgaacaaacacactggctaaggccaacaagtggaccggccacaatgtcaccgtggtacagaggaccaacacccagccctttgacctgcaggtgtaccacccctcccgccagcccatggctcccaatccctgtgaggccaatgggggccagggcccctgctcccacctgtgtctcatcaactacaaccggaccgtgtcctgcgcctgcccccacctcatgaagctccacaaggacaacaccacctgctatgagtttaagaagttcctgctgtacgcacgtcagatggagatccgaggtgtggacctggatgctccctactacaactacatcatctccttcacggtgcccgacatcgacaacgtcacagtgctagactacgatgcccgcgagcagcgtgtgtactggtctgacgtgcggacacaggccatcaagcgggccttcatcaacggcacaggcgtggagacagtcgtctctgcagacttgccaaatgcccacgggctggctgtggactgggtctcccgaaacctgttctggacaagctatgacaccaataagaagcagatcaatgtggcccggctggatggctccttcaagaacgcagtggtgcagggcctggagcagccccatggccttgtcgtccaccctctgcgtgggaagctctactggaccgatggtgacaacatcagcatggccaacatggatggcagcaatcgcaccctgctcttcagtggccagaagggccccgtgggcctggctattgacttccctgaaagcaaactctactggatcagctccgggaaccataccatcaaccgctgcaacctggatgggagtgggctggaggtcatcgatgccatgcggagccagctgggcaaggccaccgccctggccatcatgggggacaagctgtggtgggctgatcaggtgtcggaaaagatgggcacatgcagcaaggctgacggctcgggctccgtggtccttcggaacagcaccaccctggtgatgcacatgaaggtctatgacgagagcatccagctggaccataagggcaccaacccctgcagtgtcaacaacggtgactgctcccagctctgcctgcccacgtcagagacgacccgctcctgcatgtgcacagccggctatagcctccggagtggccagcaggcctgcgagggcgtaggttcctttctcctgtactctgtgcatgagggaatcaggggaattcccctggatcccaatgacaagtcagatgccctggtcccagtgtccgggacctcgctggctgtcggcatcgacttccacgctgaaaatgacaccatctactgggtggacatgggcctgagcacgatcagccgggccaagcgggaccagacgtggcgtgaagacgtggtgaccaatggcattggccgtgtggagggcattgcagtggactggatcgcaggcaacatctactggacagaccagggctttgatgtcatcgaggtcgcccggctcaatggctccttccgctacgtggtgatctcccagggtctagacaagccccgggccatcaccgtccacccggagaaagggtacttgttctggactgagtggggtcagtatccgcgtattgagcggtctcggctagatggcacggagcgtgtggtgctggtcaacgtcagcatcagctggcccaacggcatctcagtggactaccaggatgggaagctgtactggtgcgatgcacggacagacaagattgaacggatcgacctggagacaggtgagaaccgcgaggtggttctgtccagcaacaacatggacatgttttcagtgtctgtgtttgaggatttcatctactggagtgacaggactcatgccaacggctctatcaagcgcgggagcaaagacaatgccacagactccgtgcccctgcgaaccggcatcggcgtccagcttaaagacatcaaagtcttcaaccgggaccggcagaaaggcaccaacgtgtgcgcggtggccaatggcgggtgccagcagctgtgcctgtaccggggccgtgggcagcgggcctgcgcctgtgcccacgggatgctggctgaagacggagcatcgtgccgcgagtatgccggctacctgctctactcagagcgcaccattctcaagagtatccacctgtcggatgagcgcaacctcaatgcgcccgtgcagcccttcgaggaccctgagcacatgaagaacgtcatcgccctggcctttgactaccgggcaggcacctctccgggcacccccaatcgcatcttcttcagcgacatccactttgggaacatccaacagatcaacgacgatggctccaggaggatcaccattgtggaaaacgtgggctccgtggaaggcctggcctatcaccgtggctgggacactctctattggacaagctacacgacatccaccatcacgcgccacacagtggaccagacccgcccaggggccttcgagcgtgagaccgtcatcactatgtctggagatgaccacccacgggccttcgttttggacgagtgccagaacctcatgttctggaccaactggaatgagcagcatcccagcatcatgcgggcggcgctctcgggagccaatgtcctgacccttatcgagaaggacatccgtacccccaatggcctggccatcgaccaccgtgccgagaagctctacttctctgacgccaccctggacaagatcgagcggtgcgagtatgacggctcccaccgctatgtgatcctaaagtcagagcctgtccaccccttcgggctggccgtgtatggggagcacattttctggactgactgggtgcggcgggcagtgcagcgggccaacaagcacgtgggcagcaacatgaagctgctgcgcgtggacatcccccagcagcccatgggcatcatcgccgtggccaacgacaccaacagctgtgaactctctccatgccgaatcaacaacggtggctgccaggacctgtgtctgctcactcaccagggccatgtcaactgctcatgccgagggggccgaatcctccaggatgacctcacctgccgagcggtgaattcctcttgccgagcacaagatgagtttgagtgtgccaatggcgagtgcatcaacttcagcctgacctgcgacggcgtcccccactgcaaggacaagtccgatgagaagccatcctactgcaactcccgccgctgcaagaagactttccggcagtgcagcaatgggcgctgtgtgtccaacatgctgtggtgcaacggggccgacgactgtggggatggctctgacgagatcccttgcaacaagacagcctgtggtgtgggcgagttccgctgccgggacgggacctgcatcgggaactccagccgctgcaaccagtttgtggattgtgaggacgcctcagatgagatgaactgcagtgccaccgactgcagcagctacttccgcctgggcgtgaagggcgtgctcttccagccctgcgagcggacctcactctgctacgcacccagctgggtgtgtgatggcgccaatgactgtggggactacagtgatgagcgcgactgcccaggtgtgaaacgccccagatgccctctgaattacttcgcctgccctagtgggcgctgcatccccatgagctggacgtgtgacaaagaggatgactgtgaacatggcgaggacgagacccactgcaacaagttctgctcagaggcccagtttgagtgccagaaccatcgctgcatctccaagcagtggctgtgtgacggcagcgatgactgtggggatggctcagacgaggctgctcactgtgaaggcaagacgtgcggcccctcctccttctcctgccctggcacccacgtgtgcgtccccgagcgctggctctgtgacggtgacaaagactgtgctgatggtgcagacgagagcatcgcagctggttgcttgtacaacagcacttgtgacgaccgtgagttcatgtgccagaaccgccagtgcatccccaagcacttcgtgtgtgaccacgaccgtgactgtgcagatggctctgatgagtcccccgagtgtgagtacccgacctgcggccccagtgagttccgctgtgccaatgggcgctgtctgagctcccgccagtgggagtgtgatggcgagaatgactgccacgaccagagtgacgaggctcccaagaacccacactgcaccagcccagagcacaagtgcaatgcctcgtcacagttcctgtgcagcagtgggcgctgtgtggctgaggcactgctctgcaacggccaggatgactgtggcgacagctcggacgagcgtggctgccacatcaatgagtgtctcagccgcaagctcagtggctgcagccaggactgtgaggacctcaagatcggcttcaagtgccgctgtcgccctggcttccggctgaaggatgacggccggacgtgtgctgatgtggacgagtgcagcaccaccttcccctgcagccagcgctgcatcaacacccatggcagctataagtgtctgtgtgtggagggctatgcaccccgcggcggcgacccccacagctgcaaggctgtgactgacgaggaaccgtttctgatcttcgccaaccggtactacctgcgcaagctcaacctggacgggtccaactacacgttacttaagcagggcctgaacaacgccgttgccttggattttgactaccgagagcagatgatctactggacagatgtgaccacccagggcagcatgatccgaaggatgcaccttaacgggagcaatgtgcaggtcctacaccgtacaggcctcagcaaccccgatgggctggctgtggactgggtgggtggcaacctgtactggtgcgacaaaggccgggacaccatcgaggtgtccaagctcaatggggcctatcggacggtgctggtcagctctggcctccgtgagcccagggctctggtggtggatgtgcagaatgggtacctgtactggacagactggggtgaccattcactgatcggccgcatcggcatggatgggtccagccgcagcgtcatcgtggacaccaagatcacatggcccaatggcctgacgctggactatgtcactgagcgcatctactgggccgacgcccgcgaggactacattgaatttgccagcctggatggctccaatcgccacgttgtgctgagccaggacatcccgcacatctttgcactgaccctgtttgaggactacgtctactggaccgactgggaaacaaagtccattaaccgagcccacaagaccacgggcaccaacaaaacgctcctcatcagcacgctgcaccggcccatggacctgcatgtcttccatgccctgcgccagccagacgtgcccaatcacccctgcaaggtcaacaatggtggctgcagcaacctgtgcctgctgtcccccgggggagggcacaaatgtgcctgccccaccaacttctacctgggcagcgatgggcgcacctgtgtgtccaactgcacggctagccagtttgtatgcaagaacgacaagtgcatccccttctggtggaagtgtgacaccgaggacgactgcggggaccactcagacgagcccccggactgccctgagttcaagtgccggcccggacagttccagtgctccacaggtatctgcacaaaccctgccttcatctgcgatggcgacaatgactgccaggacaacagtgacgaggccaactgtgacatccacgtctgcttgcccagtcagttcaaatgcaccaacaccaaccgctgtattcccggcatcttccgctgcaatgggcaggacaactgcggagatggggaggatgagagggactgccccgaggtgacctgcgcccccaaccagttccagtgctccattaccaaacggtgcatcccccgggtctgggtctgcgaccgggacaatgactgtgtggatggcagtgatgagcccgccaactgcacccagatgacctgtggtgtggacgagttccgctgcaaggattcgggccgctgcatcccagcgcgttggaagtgtgacggagaggatgactgtggggatggctcggatgagcccaaggaagagtgtgatgaacgcacctgtgagccataccagttccgctgcaagaacaaccgctgcgtgcccggccgctggcagtgcgactacgacaacgattgcggtgacaactccgatgaagagagctgcacccctcggccctgctccgagagtgagttctcctgtgccaacggccgctgcatcgcggggcgctggaaatgcgatggagaccacgactgcgcggacggctcggacgagaaagactgcaccccccgctgtgacatggaccagttccagtgcaagagcggccactgcatccccctgcgctggcgctgtgacgcagacgccgactgcatggacggcagcgacgaggaggcctgcggcactggcgtgcggacctgccccctggacgagttccagtgcaacaacaccttgtgcaagccgctggcctggaagtgcgatggcgaggatgactgtggggacaactcagatgagaaccccgaggagtgtgcccggttcgtgtgccctcccaaccggcccttccgttgcaagaatgaccgcgtctgtctgtggatcgggcgccaatgcgatggcacggacaactgtggggatgggactgatgaagaggactgtgagccccccacagcccacaccacccactgcaaagacaagaaggagtttctgtgccggaaccagcgctgcctctcctcctccctgcgctgcaacatgttcgatgactgcggggacggctctgacgaggaggactgcagcatcgaccccaagctgaccagctgcgccaccaatgccagcatctgtggggacgaggcacgctgcgtgcgcaccgagaaagcggcctactgtgcctgccgctcgggcttccacaccgtgcccggccagcccggatgccaagacatcaacgagtgcctgcgcttcggcacctgctcccagctctgcaacaacaccaagggcggccacctctgcagctgcgctcggaacttcatgaagacgcacaacacctgcaaggccgaaggctctgagtaccaggtcctgtacatcgctgatgacaatgagatccgcagcctgttccccggccacccccattcggcttacgagcaggcattccagggtgacgagagtgtccgcattgatgctatggatgtccatgtcaaggctggccgtgtctattggaccaactggcacacgggcaccatctcctaccgcagcctgccacctgctgcgcctcctaccacttccaaccgccaccggcgacagattgaccggggtgtcacccacctcaacatttcagggctgaagatgcccagaggcatcgccatcgactgggtggccggaaacgtgtactggaccgactcgggccgagatgtgattgaggtggcgcagatgaagggcgagaaccgcaagacgctcatctcgggcatgattgacgagccccacgccattgtggtggacccactgagggggaccatgtactggtcagactggggcaaccaccccaagattgagacggcagcgatggatgggacgcttcgggagacactggtgcaggacaacattcagtggcccacaggcctggccgtggattatcacaatgagcggctgtactgggcagacgccaagctttcagtcatcggcagcatccggctcaatggcacggaccccattgtggctgctgacagcaaacgaggcctaagtcaccccttcagcatcgacgtctttgaggattacatctatggtgtcacctacatcaataatcgtgtcttcaagatccataagtttggccacagccccttggtcaacctgacagggggcctgagccacgcctctgacgtggtcctttaccatcagcacaagcagcccgaagtgaccaacccatgtgaccgcaagaaatgcgagtggctctgcctgctgagccccagtgggcctgtctgcacctgtcccaatgggaagcggctggacaacggcacatgcgtgcctgtgccctctccaacgccccccccagatgctccccggcctggaacctgtaacctgcagtgcttcaacggtggcagctgtttcctcaatgcacggaggcagcccaagtgccgctgccaaccccgctacacgggtgacaagtgtgaactggaccagtgctgggagcactgtcgcaatgggggcacctgtgctgcctccccctctggcatgcccacgtgccggtgccccacgggcttcacgggccccaaatgcacccagcaggtgtgtgcgggctactgtgccaacaacagcacctgcactgtcaaccagggcaaccagccccagtgccgatgcctacccggcttcctgggcgaccgctgccagtaccggcagtgctctggctactgtgagaactttggcacatgccagatggctgctgatggctcccgacaatgccgctgcactgcctactttgagggatcgaggtgtgaggtgaacaagtgcagccgctgtctcgaaggggcctgtgtggtcaacaagcagagtggggatgtcacctgcaactgcacggatggccgggtggcccccagctgtctgacctgcgtcggccactgcagcaatggcggctcctgtaccatgaacagcaaaatgatgcctgagtgccagtgcccaccccacatgacagggccccggtgtgaggagcacgtcttcagccagcagcagccaggacatatagcctccatcctaatccctctgctgttgctgctgctgctggttctggtggccggagtggtattctggtataagcggcgagtccaaggggctaagggcttccagcaccaacggatgaccaacggggccatgaacgtggagattggaaaccccacctacaagatgtacgaaggcggagagcctgatgatgtgggaggcctactggacgctgactttgccctggaccctgacaagcccaccaacttcaccaaccccgtgtatgccacactctacatggggggccatggcagtcgccactccctggccagcacggacgagaagcgagaactcctgggccggggccctgaggacgagataggggaccccttggcatagggccctgccccgtcggactgcccccagaaagcctcctgccccctgccggtgaagtccttcagtgagcccctccccagccagcccttccctggccccgccggatgtataaatgtaaaaatgaaggaattacattttatatgtgagcgagcaagccggcaagcgagcacagtattatttctccatcccctccctgcctgctccttggcacccccatgctgccttcagggagacaggcagggagggcttggggctgcacctcctaccctcccaccagaacgcaccccactgggagagctggtggtgcagccttcccctccctgtataagacactttgccaaggctctcccctctcgccccatccctgcttgcccgctcccacagcttcctgagggctaattctgggaagggagagttctttgctgcccctgtctggaagacgtggctctgggtgaggtaggcgggaaaggatggagtgttttagttcttgggggaggccaccccaaaccccagccccaactccaggggcacctatgagatggccatgctcaacccccctcccagacaggccctccctgtctccagggcccccaccgaggttcccagggctggagacttcctctggtaaacattcctccagcctcccctcccctggggacgccaaggaggtgggccacacccaggaagggaaagcgggcagccccgttttggggacgtgaacgttttaataatttttgctgaattctttacaactaaataacacagatattcttataaataaaattgtaaaaaaaaaaa

SEQ ID NO: 65744 - DNA, 1526 bp, Homo sapiens
ggcgggggggtggggtgaagggtttggatttcggtggcatggtggacgcacccaccgatacagcagtgcccatcgccacaaggtgtgctcaggaaagctctaacgcatcgttcagtcctactgctcgcctgtagtgctgccatttgcctgcaatgtgaagacgcacatacagaagcagcagacaggcaggcagggcggacacaggcagcgaacaatgggcggacctccgccaacttgtgggcggcgtgcaaggcagagcaagtagcagtgacccagaagggtgacagggtgcttgctagcggttgccattcaggactcgacagccaatgcttgatccgccaggcacgttgctcctgctgctgcccctgctctcagctctggtcgcggcggctatcgacgcccctaagacttgcagccccaagcagtttgcctgcagagatcaaataacctgtatctcaaagggctggcggtgcgacggtgagagggactgcccagacggatctgacgaggcccctgagatttgtccacagagtaaggcccagcgatgccagccaaacgagcataactgcctgggtactgagctgtgtgttcccatgtcccgcctctgcaatggggtccaggactgcatggacggctcagatgaggggccccactgccgagagctccaaggcaactgctctcgcctgggctgccagcaccattgtgtccccacactcgatgggcccacctgctactgcaacagcagctttcagcttcaggcagatggcaagacctgcaaagattttgatgagtgctcagtgtacggcacctgcagccagctatgcaccaacacagacggctccttcatatgtggctgtgttgaaggatacctcctgcagccggataaccgctcctgcaaggccaagaacgagccagtagaccggccccctgtgctgttgatagccaactcccagaacatcttggccacgtacctgagtggggcccaggtgtctaccatcacacctacgagcacgcggcagaccacagccatggacttcagctatgccaacgagaccgtatgctgggtgcatgttggggacagtgctgctcagacgcagctcaagtgtgcccgcatgcctggcctaaagggcttcgtggatgagcacaccatcaacatctccctcagtctgcaccacgtggaacagatggccatcgactggctgacaggcaacttctactttgtggatgacatcgatgataggatctttgtctgcaacagaaatggggacacatgtgtcacattgctagacctggaactctacaaccccaagggcattgccctggaccctgccatggggaaggtgtttattataataaacaccctcaccactacaatcttcctaggaacagcatatgacgcactctcgcctgaactctacacaacatattttgtcaccaagaccctacttctaacctccctgttcttatgaattcgaacagcatacccccgattccgctatatgacttggggatactcaaggagacgg

SEQ ID NO: 65745 - DNA, 1660 bp, Homo sapiens
cagcggtgcgagctccaggcccatgcactgaggaggcggaaacaaggggagcccccagagctccatcaagccccctccaaaggctcccctacccggtccacgccccccaccccccctccccgcctcctcccaattgtgcatttttgcagccggaggcggctccgagatggggctgtgagcttcgcccggggagggggaaagagcagcgaggagtgaagcgggggggtggggtgaagggtttggatttcggggcagggggcgcacccccgtcagcaggccctccccaaggggctcggaactctacctcttcacccacgcccctggtgcgctttgccgaaggaaagaataagaacagagaaggaggagggggaaaggaggaaaagggggaccccccaactggggggggtgaaggagagaagtagcaggaccagaggggaaggggctgctgcttgcatcagcccacaccatgctgaccccgccgttgctcctgctgctgcccctgctctcagctctggtcgcggcggctatcgacgcccctaagacttgcagccccaagcagtttgcctgcagagatcaaataacctgtatctcaaagggctggcggtgcgacggtgagagggactgcccagacggatctgacgaggcccctgagatttgtccacagagtaaggcccagcgatgccagccaaacgagcataactgcctgggtactgagctgtgtgttcccatgtcccgcctctgcaatggggtccaggactgcatggacggctcagatgaggggccccactgccgagagctccaaggcaactgctctcgcctgggctgccagcaccattgtgtccccacactcgatgggcccacctgctactgcaacagcagctttcagcttcaggcagatggcaagacctgcaaagattttgatgagtgctcagtgtacggcacctgcagccagctatgcaccaacacagacggctccttcatatgtggctgtgttgaaggatacctcctgcagccggataaccgctcctgcaaggccaagaacgagccagtagaccggccccctgtgctgttgatagccaactcccagaacatcttggccacgtacctgagtggggcccaggtgtctaccatcacacctacgagcacgcggcagaccacagccatggacttcagctatgccaacgagaccgtatgctgggtgcatgttggggacagtgctgctcagacgcagctcaagtgtgcccgcatgcctggcctaaagggcttcgtggatgagcacaccatcaacatctccctcagtctgcaccacgtggaacagatggccatcgactggctgacaggcaacttctactttgtggatgacatcgatgataggatctttgtctgcaacagaaatggggacacatgtgtcacattgctagacctggaactctacaaccccaagggcattgccctggaccctgccatggggaaggtgtttattataataaacaccctcaccactacaatcttcctaggaacagcatatgacgcactctcgcctgaactctacacaacatattttgtcaccaagaccctacttctaacctccctgttcttatgaattcgaacagcatacccccgattccgctatatgacttggggatactcaaggagacgg

SEQ ID NO: 65746 - DNA, 2216 bp, Homo sapiens
  misc_feature (874)..(874): n is a, c, g, or t
  misc_feature (1027)..(1027): n is a, c, g, or t
  misc_feature (1079)..(1079): n is a, c, g, or t
  misc_feature (1103)..(1103): n is a, c, g, or t
  misc_feature (1141)..(1141): n is a, c, g, or t
  misc_feature (1146)..(1146): n is a, c, g, or t
  misc_feature (1157)..(1157): n is a, c, g, or t
  misc_feature (1159)..(1159): n is a, c, g, or t
  misc_feature (1163)..(1163): n is a, c, g, or t
  misc_feature (1166)..(1166): n is a, c, g, or t
  misc_feature (1177)..(1178): n is a, c, g, or t
  misc_feature (1184)..(1184): n is a, c, g, or t
  misc_feature (1297)..(1297): n is a, c, g, or t
ctcagctctgcaaagagctcctccccctccaggaaaagcacttctccccaggcagggcggtcagtcccctcagcgcacctgcatgcacacacaccacctcacaaccacacactgcatgcacacacatacaccacagccacacactgtgcatacacgcacaccccacaacccacatactgcatgcacacacacacacctacaagctgcatgctgcatacacaagtcatacaggagataaactcagagtcccagccccaaatagaccccatctcttgctcagttgctgtcatcctagacctgtttctttcgccacatttctataatctgccagtgtctgcaaggagaagacatggggggttttctacctaaggcagaagggcccgggagccaactccagaaacttctgccctcctttctggtcagagaacaagactgggaccagcacctggacaagcttcatatgctgcagcagaagaggattctagagtctccactgcttcgagcatccaaggaaaatgacctgtctgttcttaggcaacttctactggactgcacctgtgacgttcgacaaagaggagccctgggggagacggcgctgcacatagcagccctctatgacaacttggaggcggccttggtgctgatggaggctgccccagagctggtctttgagcccaccacatgtgaggcttttgcaggtcagactgcactgcacatcgctgttgtgaaccagaatgtgaacctggtgcgtgccctgctcacccgcagggccagtgtctctgccagagccacaggcactgccttccgccgtagtccccgcaacctcatctactttggggagcaccctttgtcctttgctgcctgtgtgaacagngaggagatcgtgcggctgctcattgagcatggagctgacatccgggcccaggactccctgggaaacacagtgttacacatcctcatcctccagcccaacaaaacctttgcctgccagatgtacaacctgttgctgtcctacgacagacatggngaccacctgcagcccctggacctctgtgcccaatcaccagggtctcaccccnttcaagctggctggagtggagggnaacactgtgatgttccagcacctgatgcagaagcggangcacntccagtggacntntggnccnctgacctccannctctangacctcacagagatcgactcctggggagaggagctgtccttcctggagcttgtggtctcctctgataaacgagaggctcgccaaattctggaacagaccccagtgaaggagcnggtgagcttcaagtggaacaagtatggccggccgtacttctgcatcctggctgccttgtacctgctctacatgatctgctttaccacgtgctgcgtctaccgcccccttaagtttcgtggtggcaaccgcactcattctcgagacatcaccatcctccagcaaaaactactacaggaggcctatgagacacgtgaagatatcatcaggctggtgggggagctggtgagcatcgttggggctgtgatcatcctgctcctagagattccagacatcttcagggttggtgcctctcgctattttggaaagacgattcttggggggccattccatgtcatcatcatcacctatgcctccctggtgctggtgaccatggtgatgcggctcaccaacaccaatggggaggtggtgcccatgtcctttgccctggtgctgggctggtgcagtgtcatgtatttcactcgaggattccagatgctgggtcccttcaccatcatgatccagaagatgatttttggagacctaatgcgtttctgctggctgatggctgtggtcatcttgggatttgcctccggtaaggcaccatacactcctctactagatcagcagatctagttctccagaaagttcactctcattcttgctctcagttctcatttgcacttcattttgctttctttttttttgtttgttttttgttttgttttttcctgttggaaggtaagtctaaaagcacacccatatttataggaccaggggccactcaggttggcctggaacgtaaagccatgtgttcagggccaataagatttatgttcactaactgccttgcaagatctttaaaggagagacaggaaaagacttttggtgagaacagggcattaaacaggaaagactggccagtcatggatctcagaaaac

SEQ ID NO: 65747 - DNA, 3007 bp, Homo sapiens
  misc_feature (874)..(874): n is a, c, g, or t
  misc_feature (1027)..(1027): n is a, c, g, or t
  misc_feature (1079)..(1079): n is a, c, g, or t
  misc_feature (1103)..(1103): n is a, c, g, or t
  misc_feature (1141)..(1141): n is a, c, g, or t
  misc_feature (1146)..(1146): n is a, c, g, or t
  misc_feature (1157)..(1157): n is a, c, g, or t
  misc_feature (1159)..(1159): n is a, c, g, or t
  misc_feature (1163)..(1163): n is a, c, g, or t
  misc_feature (1166)..(1166): n is a, c, g, or t
  misc_feature (1177)..(1178): n is a, c, g, or t
  misc_feature (1184)..(1184): n is a, c, g, or t
  misc_feature (1297)..(1297): n is a, c, g, or t
  misc_feature (1937)..(1937): n is a, c, g, or t
  misc_feature (1945)..(1945): n is a, c, g, or t
  misc_feature (1952)..(1952): n is a, c, g, or t
  misc_feature (1958)..(1958): n is a, c, g, or t
  misc_feature (1961)..(1961): n is a, c, g, or t
  misc_feature (1964)..(1964): n is a, c, g, or t
  misc_feature (1967)..(1968): n is a, c, g, or t
  misc_feature (1970)..(1970): n is a, c, g, or t
  misc_feature (1973)..(1973): n is a, c, g, or t
  misc_feature (1983)..(1983): n is a, c, g, or t
  misc_feature (1993)..(1993): n is a, c, g, or t
  misc_feature (2002)..(2002): n is a, c, g, or t
  misc_feature (2015)..(2015): n is a, c, g, or t
  misc_feature (2037)..(2037): n is a, c, g, or t
  misc_feature (2046)..(2046): n is a, c, g, or t
  misc_feature (2068)..(2068): n is a, c, g, or t
  misc_feature (2070)..(2070): n is a, c, g, or t
  misc_feature (2076)..(2076): n is a, c, g, or t
  misc_feature (2094)..(2094): n is a, c, g, or t
  misc_feature (2101)..(2101): n is a, c, g, or t
  misc_feature (2112)..(2112): n is a, c, g, or t
  misc_feature (2116)..(2116): n is a, c, g, or t
  misc_feature (2127)..(2127): n is a, c, g, or t
  misc_feature (2932)..(2932): n is a, c, g, or t
ctcagctctgcaaagagctcctccccctccaggaaaagcacttctccccaggcagggcggtcagtcccctcagcgcacctgcatgcacacacaccacctcacaaccacacactgcatgcacacacatacaccacagccacacactgtgcatacacgcacaccccacaacccacatactgcatgcacacacacacacctacaagctgcatgctgcatacacaagtcatacaggagataaactcagagtcccagccccaaatagaccccatctcttgctcagttgctgtcatcctagacctgtttctttcgccacatttctataatctgccagtgtctgcaaggagaagacatggggggttttctacctaaggcagaagggcccgggagccaactccagaaacttctgccctcctttctggtcagagaacaagactgggaccagcacctggacaagcttcatatgctgcagcagaagaggattctagagtctccactgcttcgagcatccaaggaaaatgacctgtctgttcttaggcaacttctactggactgcacctgtgacgttcgacaaagaggagccctgggggagacggcgctgcacatagcagccctctatgacaacttggaggcggccttggtgctgatggaggctgccccagagctggtctttgagcccaccacatgtgaggcttttgcaggtcagactgcactgcacatcgctgttgtgaaccagaatgtgaacctggtgcgtgccctgctcacccgcagggccagtgtctctgccagagccacaggcactgccttccgccgtagtccccgcaacctcatctactttggggagcaccctttgtcctttgctgcctgtgtgaacagngaggagatcgtgcggctgctcattgagcatggagctgacatccgggcccaggactccctgggaaacacagtgttacacatcctcatcctccagcccaacaaaacctttgcctgccagatgtacaacctgttgctgtcctacgacagacatggngaccacctgcagcccctggacctctgtgcccaatcaccagggtctcaccccnttcaagctggctggagtggagggnaacactgtgatgttccagcacctgatgcagaagcggangcacntccagtggacntntggnccnctgacctccannctctangacctcacagagatcgactcctggggagaggagctgtccttcctggagcttgtggtctcctctgataaacgagaggctcgccaaattctggaacagaccccagtgaaggagcnggtgagcttcaagtggaacaagtatggccggccgtacttctgcatcctggctgccttgtacctgctctacatgatctgctttaccacgtgctgcgtctaccgcccccttaagtttcgtggtggcaaccgcactcattctcgagacatcaccatcctccagcaaaaactactacaggaggcctatgagacacgtgaagatatcatcaggctggtgggggagctggtgagcatcgttggggctgtgatcatcctgctcctagagattccagacatcttcagggttggtgcctctcgctattttggaaagacgattcttggggggccattccatgtcatcatcatcacctatgcctccctggtgctggtgaccatggtgatgcggctcaccaacaccaatggggaggtggtgcccatgtcctttgccctggtgctgggctggtgcagtgtcatgtatttcactcgaggattccagatgctgggtcccttcaccatcatgatccagaagatgatttttggagacctaatgcgtttctgctggctgatggctgtggtcatcttgggatttgcctccgcgttctatatcattttccagacagaggacccaaccagtctggggcaattctatgactaccccatggcnctgttcancaccttngagctnttnctnacnntnatngatggcaccngccaactacnacgtggacntgcccttcatgtncagcatcacctatgctgccttngccatcatngccacactgctcatgctcaacntnttcatngccatgatgggcgacacncactggngggtggcccangagngggatgagctntggagggcccaggtcgtggccaccacagtgatgctggagcggaagctgcctcgctgcctgtggcctcgctccgggatctgtgggtgcgaattcgggctgggggaccgctggttcctgcgggttgagaaccacaatgatcagaatcctctgcgagtgcttcgctatgtggaagtgttcaagaactcagacaaggaggatgaccaggagcatccatctgagaaacagccctctggggctgagagtgggactctagccagagcctctttggctcttccaacttcctccctgtcccggaccgcgtcccagagcagcagtcaccgaggctgggagatccttcgtcaaaacaccctggggcacttgaatcttggactgaaccttagtgagggggatggagaggaggtctaccatttttgattaacatcgctatcactcttgaccttactcccggttggcctgggggcggggacagagacggagacctctgcctatgcaagtgtctaacttctgtgcctgttaatcatgggagggtgagacagaacaatccctaaagggtcatgcctcacacttcacatcaagaatttctggcaatgggcaatggtcatcgattgtctcacgtattttctgggctcttgcaagtcacccatctcaggaaaaaggaggttggcaactaaagacatgaggcagggatgctagattaatgtcaggaccatttctcttctgccccacgcagcccctagaaagtagtaagctgtgaggctattctggctccccagggcttacgtgggaagagccaggcatggcatanaggttgtggcccttctttttttcccagcctcctgtaggtctctctctccacttagcaagcaaacaccaactgcaa

SEQ ID NO: 65748 - DNA, 391 bp, Homo sapiens
ccgaagcttcctccgcctcaggcacaagaccttcacagacagagggatggaggtagaatggagctggtagaactatgggggcctcttgatctgttagcgttagctgctcaaaagcagtggaaaaggaatcatcccaccctttcttccttctgtttcctgcagatgatttttggagacctaatgcgtttctgctggctgatggctgtggtcatcttgggatttgcctccggtaaggcaccatacactcctctactagatcagcagatctagttctccagaaagttcactctcattcttgctctcagttctcatttgcacttcattttgctttctttttttttgtttgttttttgttttgttttttcctgttggaaggtaagtctaaaagcac

SEQ ID NO: 65749 - DNA, 1999 bp, Homo sapiens
ttaaatgaatttttgaaaagcaacagtgttttattactggaaagtgttacagacagatattgtgaaatttttccttgggcttctttcaatttcgttcaattctcgtccagtattctcataacatttggatcaggtactttatcaccttgtagtgtcactgttcctttctgtatcctctcgaagcctcctgttactcgttttctaattctcttccagcccactgcacgatctagtgtcgaatggatgaaacagctgagcagaacagttctttagctgtcggcctaaatgaccaacttcatgacctctcaaggtctcgctccccggctgcacgcagctcagcttccaacattcgggaaaggcgtgccggatcgcgaggggccgctgggaccgagtcccggacgtcgcgacgcgcagggggctgctgcggccggcggtctcgggaaaagtgaggggacggaggcgcccaagcaacgtgggtttcgggaactgctcttcagcaaaagcccttgtcagtttaaaagaaggaagcttatctaacacgtggaatgaaaagtacagttctttacagaaaacacctgtttggaaaggcaggaatacaagctctgctgtggaaatgcctttcagaaattcaaaacgaagtcgacttttttctgatgaagatgataggcaaataaatacaaggtcacctaaaagaaaccagagggttgcaatggttccacagaaatttacagcaacaatgtcaacaccagataagaaagcttcacagaagattggttttcgattacgtaatctgctcaagcttcctaaagcacataaatggtgtatatacgagtggttctattcaaatatagataaaccactttttgaaggtgataatgacttctgtgtatgtctaaaggaatcttttcctaatttgaaaacaagaaagttaacaagagtagaatggggaaaaattcggcggcttatgggaaaaccacggagatgttcttctgcattttttgaggaagagagatcagcattaaaacagaaacggcagaaaataaggctcttacaacaaaggaaagttgcagatgtttcacaattcaaagatctcccagatgaaattcctttgcctctggttattggaacgaaagttacagcacgattacgtggtgttcatgatggtttgttcactggacaaatagatgctgtggatactcttaatgctacttatagagtaacttttgataggacagggcttggaacccataccatccctgactatgaagttctcagtaatgaacctcatgagacaatgccaattgctgcctttggacaaaaacagcggccttctcgattttttatgaccccaccacggttacattatactcctcctctccagtcaccaattatagataatgatcctttattaggacagtcgccgtggagaagtaaaatttctggctctgacactgaaacattaggtggttttccagtagaatttcttatccaagtgaccagattatcaaaaattctcatgattcaccaaggaacatatcaagaacatcagggacatgaacacagaagcagaaacactggcaatcatattgcatgccagtcagcattggattcacgcggagatttgcgacaatcggtctcggggacttgaacaggtgaacacagggcctaaacacagtttgggtaacggtcaccggattgctatgagattgtcccaacacgggggtccagctgagagatcagcgaaggtattaacccgtgtgtagcggcgaaacacccggcacagtgtccgcgcgacatcctcagcggagaacccgtctttacaggggcactgggcgacagcaattcagatcgcgactggtgaccaattgtgccagcggacgcccctgagcaaccaactcagagtaacgaaacatgatcacgagcactaacaaacgataagtgaagcgaacggcccacggctgcaacgactgcttcctcatcatacatctttcattatgag

SEQ ID NO: 65750 - DNA, 1606 bp, Homo sapiens
cagtctccgccccacaatgcaccgcggcgggcagcctttgaaaaagcggcgcggctcgttcaagatggcggagctcgaccagttgcctgacgagagctcttcagcaaaagcccttgtcagtttaaaagaaggaagcttatctaacacgtggaatgaaaagtacagttctttacagaaaacacctgtttggaaaggcaggaatacaagctctgctgtggaaatgcctttcagaaattcaaaacgaagtcgacttttttctgatgaagatgataggcaaataaatacaaggtcacctaaaagaaaccagagggttgcaatggttccacagaaatttacagcaacaatgtcaacaccagataagaaagcttcacagaagattggttttcgattacgtaatctgctcaagcttcctaaagcacataaatggtgtatatacgagtggttctattcaaatatagataaaccactttttgaaggtgataatgacttctgtgtatgtctaaaggaatcttttcctaatttgaaaacaagaaagttaacaagagtagaatggggaaaaattcggcggcttatgggaaaaccacggagatgttcttctgcattttttgaggaagagagatcagcattaaaacagaaacggcagaaaataaggctcttacaacaaaggaaagttgcagatgtttcacaattcaaagatctcccagatgaaattcctttgcctctggttattggaacgaaagttacagcacgattacgtggtgttcatgatggtttgttcactggacaaatagatgctgtggatactcttaatgctacttatagagtaacttttgataggacagggcttggaacccataccatccctgactatgaagttctcagtaatgaacctcatgagacaatgccaattgctgcctttggacaaaaacagcggccttctcgattttttatgaccccaccacggttacattatactcctcctctccagtcaccaattatagataatgatcctttattaggacagtcgccgtggagaagtaaaatttctggctctgacactgaaacattaggtggttttccagtagaatttcttatccaagtgaccagattatcaaaaattctcatgattcaccaaggaacatatcaagaacatcagggacatgaacacagaagcagaaacactggcaatcatattgcatgccagtcagcattggattcacgcggagatttgcgacaatcggtctcggggacttgaacaggtgaacacagggcctaaacacagtttgggtaacggtcaccggattgctatgagattgtcccaacacgggggtccagctgagagatcagcgaaggtattaacccgtgtgtagcggcgaaacacccggcacagtgtccgcgcgacatcctcagcggagaacccgtctttacaggggcactgggcgacagcaattcagatcgcgactggtgaccaattgtgccagcggacgcccctgagcaaccaactcagagtaacgaaacatgatcacgagcactaacaaacgataagtgaagcgaacggcccacggctgcaacgactgcttcctcatcatacatctttcattatgag

SEQ ID NO: 65751 - DNA, 1865 bp, Homo sapiens
ttcccgcctgctgcttgcccagcggttgcaccggccgggacggacggccgtgccctccgctgggcaggtgggctgactgccagccccactgtggtcccctagtcctcccactccggtgttgccgccgcgtcgccgcctttgttatggtgtctgtgtgttggtttctggggttgtgtgagcgccagggccggaaaccgagagcccgggagtccagcctgtgccaggcggaggcggtggctgctcccctggcgccactccggcccccagccgaggtggagggaagagcggcccctgggcgcgggggctgtcctcgccgcctgcaccactcgcccggcgccgagagacgccgccggggctcttcagcaaaagcccttgtcagtttaaaagaaggaagcttatctaacacgtggaatgaaaagtacagttctttacagaaaacacctgtttggaaaggcaggaatacaagctctgctgtggaaatgcctttcagaaattcaaaacgaagtcgacttttttctgatgaagatgataggcaaataaatacaaggtcacctaaaagaaaccagagggttgcaatggttccacagaaatttacagcaacaatgtcaacaccagataagaaagcttcacagaagattggttttcgattacgtaatctgctcaagcttcctaaagcacataaatggtgtatatacgagtggttctattcaaatatagataaaccactttttgaaggtgataatgacttctgtgtatgtctaaaggaatcttttcctaatttgaaaacaagaaagttaacaagagtagaatggggaaaaattcggcggcttatgggaaaaccacggagatgttcttctgcattttttgaggaagagagatcagcattaaaacagaaacggcagaaaataaggctcttacaacaaaggaaagttgcagatgtttcacaattcaaagatctcccagatgaaattcctttgcctctggttattggaacgaaagttacagcacgattacgtggtgttcatgatggtttgttcactggacaaatagatgctgtggatactcttaatgctacttatagagtaacttttgataggacagggcttggaacccataccatccctgactatgaagttctcagtaatgaacctcatgagacaatgccaattgctgcctttggacaaaaacagcggccttctcgattttttatgaccccaccacggttacattatactcctcctctccagtcaccaattatagataatgatcctttattaggacagtcgccgtggagaagtaaaatttctggctctgacactgaaacattaggtggttttccagtagaatttcttatccaagtgaccagattatcaaaaattctcatgattcaccaaggaacatatcaagaacatcagggacatgaacacagaagcagaaacactggcaatcatattgcatgccagtcagcattggattcacgcggagatttgcgacaatcggtctcggggacttgaacaggtgaacacagggcctaaacacagtttgggtaacggtcaccggattgctatgagattgtcccaacacgggggtccagctgagagatcagcgaaggtattaacccgtgtgtagcggcgaaacacccggcacagtgtccgcgcgacatcctcagcggagaacccgtctttacaggggcactgggcgacagcaattcagatcgcgactggtgaccaattgtgccagcggacgcccctgagcaaccaactcagagtaacgaaacatgatcacgagcactaacaaacgataagtgaagcgaacggcccacggctgcaacgactgcttcctcatcatacatctttcattatgag

SEQ ID NO: 65752 - DNA, 458 bp, Homo sapiens
tccatactgctgataatccagagttagctcagttttccaagtatagaattgtattttggaacaaaaatgggagggttcggctttttcattaaatgaaaacatttctatcatagcctttcagaaattcaaaacgaagtcgacttttttctgatgaagatgataggcaaataaatacaaggtcacctaaaagaaaccagagggttgcaatggttccacaggtatgtgtgtgctaaaattttgtttcattggaaaggaagtaagcaaatgctcagcctaataaagtttatatttctgttacattttgagtaacaagttcttttctttaaattcgtacggctgctctggtcctgttttagttacctagaaaatgttatttttttgatcaactttaaaacaggatagaaagccagtcattagtcctacaaatgcacacttttaagcatggagatagtggaaga

SEQ ID NO: 65753 - DNA, 1501 bp, Homo sapiens
cagtctccgccccacaatgcaccgcggcgggcagcctttgaaaaagcggcgcggctcgttcaagatggcggagctcgaccagttgcctgacgagagctcttcagcaaaagcccttgtcagtttaaaagaaggaagcttatctaacacgtggaatgaaaagtacagttctttacagaaaacacctgtttggaaaggcaggaatacaagctctgctgtggaaatgaaatttacagcaacaatgtcaacaccagataagaaagcttcacagaagattggttttcgattacgtaatctgctcaagcttcctaaagcacataaatggtgtatatacgagtggttctattcaaatatagataaaccactttttgaaggtgataatgacttctgtgtatgtctaaaggaatcttttcctaatttgaaaacaagaaagttaacaagagtagaatggggaaaaattcggcggcttatgggaaaaccacggagatgttcttctgcattttttgaggaagagagatcagcattaaaacagaaacggcagaaaataaggctcttacaacaaaggaaagttgcagatgtttcacaattcaaagatctcccagatgaaattcctttgcctctggttattggaacgaaagttacagcacgattacgtggtgttcatgatggtttgttcactggacaaatagatgctgtggatactcttaatgctacttatagagtaacttttgataggacagggcttggaacccataccatccctgactatgaagttctcagtaatgaacctcatgagacaatgccaattgctgcctttggacaaaaacagcggccttctcgattttttatgaccccaccacggttacattatactcctcctctccagtcaccaattatagataatgatcctttattaggacagtcgccgtggagaagtaaaatttctggctctgacactgaaacattaggtggttttccagtagaatttcttatccaagtgaccagattatcaaaaattctcatgattcaccaaggaacatatcaagaacatcagggacatgaacacagaagcagaaacactggcaatcatattgcatgccagtcagcattggattcacgcggagatttgcgacaatcggtctcggggacttgaacaggtgaacacagggcctaaacacagtttgggtaacggtcaccggattgctatgagattgtcccaacacgggggtccagctgagagatcagcgaaggtattaacccgtgtgtagcggcgaaacacccggcacagtgtccgcgcgacatcctcagcggagaacccgtctttacaggggcactgggcgacagcaattcagatcgcgactggtgaccaattgtgccagcggacgcccctgagcaaccaactcagagtaacgaaacatgatcacgagcactaacaaacgataagtgaagcgaacggcccacggctgcaacgactgcttcctcatcatacatctttcattatgag

SEQ ID NO: 65754 - DNA, 249 bp, Homo sapiens
cagagggggcggacaccccccaagacccccaactctgcagggattggactccgtgggcaggaacctgccctctggtcagggcaaggtcaaggaacagaggggccagtccagggaggcccagcagcgagaagccagcagcctctgcggcccgaacgttccagctgcaggggccaaggtcacagccgccatccacctctcccctcaagcaggagtgtggcccttgttactaggacaacccaagcctggact

SEQ ID NO: 65755 - DNA, 304 bp, Homo sapiens
gaatatgaacacttatccttgaaccctatcaataacatttttcacatatctcaatttttgtgtgtctttgtagttgtatgtgggccacttactaatattttagcaagtaataaaaatagaaacgtaaaggaatattggaaaaagtctaatggaaccagaaagttctagcatttttttcccattctgtagtaggtcatctggtttatttggtttggtgaccgcaagtctagaagactaaccctgaattgaatggtaacagacaggcagaatgacaatgtagtgttgcagtgcagagcagtacaga

SEQ ID NO: 65756 - DNA, 345 bp, Homo sapiens
ggattaagccaggtcccatccatactgagggaatgaggttacaaaagactagaaactgctaggttgacagaaagggattaattcatgggctagcgtcaggatgttgactaataacatattgatcgtatctgtaacatatgcagaatgtctgtcaggagcagatgcactttggaattgaagatggctaggatatctgacacgatcaaagtcagattaatattattaaggagctgcaagtgagctgccaattaccttagcaatcacagacattttctacacgtgcctgtgattgaccgtcctaaacagtagcagtacttgctgcttagagggaagtgacagatttgt

SEQ ID NO: 65757 - DNA, 858 bp, Homo sapiens
tttctgactgaattttatgaactcattctgaagaggctgacgattttactgtctcatttttttcctttctccagaatgggttctgggtgggtcccctgggtggtggctctgctagtgaatctgacccgactggattcctccatgactcaaggcacagactctccagaagattttgtgattcaggcaaaggctgactgttacttcaccaacgggacagaaaaggtgcagtttgtggtcagattcatctttaacttggaggagtatgtacgtttcgacagtgatgtggggatgtttgtggcattgaccaagctggggcagccagatgctgagcagtggaacagccggctggatctcttggagaggagcagacaggccgtggatggggtctgtagacacaactacaggctgggcgcacccttcactgtggggagaaaagtgcaaccagaggtgacagtgtacccagagaggaccccactcctgcaccagcataatctgctgcactgctctgtgacaggcttctatccaggggatatcaagatcaagtggttcctgaatgggcaggaggagagagctggggtcatgtccactggccctatcaggaatggagactggacctttcagactgtggtgatgctagaaatgactcctgaacttggacatgtctacacctgccttgtcgatcactccagcctgctgagccctgtttctgtggagtggagtgagaattagtttctagtactctctgggcctgactcaggactatactgactcaatacagagcctgggcacttctgcgtttatcttggtcacaacatgaattattctttcccttgatctgggacagtcacagaaaccaga

SEQ ID NO: 65758 - DNA, 814 bp, Homo sapiens
atgggtggtaactccatgggtgccaactttggtttcgaagaaccttttctaaatttatttatttttctctagctagcattggatttggtgtctagtacagattctgggattccaagaaagtgctttaaatattgggatatttttactaatttaaagacctgtttcccataggagctcagtctgaatattcttggagaaagatgctgagtggcattgcagccttcctacttgggctaatcttccttctggtgggaatcgtcatccagctaagggctcagaaaggatatgtgaggacgcagatgtctggtaatgaggtctcaagagctgttctgctccctcagtcatgctaaggtcctcactgaagcttctctctctggagcctgaagtagtgatgagtagtctgggccctgggtgaggtaaaggacattcatgaggtcaatgttctgggaataactctcttccctgatccttggaggagcccgaactgattctggagctctgtgttctgagatcatgcatctcccacccatctgcccttctcccttctacgtgtacatcattaatccccattgccaagggcattgtccagaaactcccctgagaccttactccttccagccccaaatcatttacttttctgtggtccagccctactcctataagtcatgatctccaaagctttctgtcttccaactgcagtctccacagtcttcagaagacaaatgctcaggtagtcactgtttccttttcactgtttttaaaaaccttttattgtcaaataaaatggagatacaaaaaatgtaaaaaaaaagaa

SEQ ID NO: 65759 - DNA, 1361 bp, Homo sapiens
tttctgactgaattttatgaactcattctgaagaggctgacgattttactgtctcatttttttcctttctccagaatgggttctgggtgggtcccctgggtggtggctctgctagtgaatctgacccgactggattcctccatgactcaaggcacagactctccagaagattttgtgattcaggcaaaggctgactgttacttcaccaacgggacagaaaaggtgcagtttgtggtcagattcatctttaacttggaggagtatgtacgtttcgacagtgatgtggggatgtttgtggcattgaccaagctggggcagccagatgctgagcagtggaacagccggctggatctcttggagaggagcagacaggccgtggatggggtctgtagacacaactacaggctgggcgcacccttcactgtggggagaaaagtgcaaccagaggtgacagtgtacccagagaggaccccactcctgcaccagcataatctgctgcactgctctgtgacaggcttctatccaggggatatcaagatcaagtggttcctgaatgggcaggaggagagagctggggtcatgtccactggccctatcaggaatggagactggacctttcagactgtggtgatgctagaaatgactcctgaacttggacatgtctacacctgccttgtcgatcactccagcctgctgagccctgtttctgtggagtggagagctcagtctgaatattcttggagaaagatgctgagtggcattgcagccttcctacttgggctaatcttccttctggtgggaatcgtcatccagctaagggctcagaaaggatatgtgaggacgcagatgtctggtaatgaggtctcaagagctgttctgctccctcagtcatgctaaggtcctcactgaagcttctctctctggagcctgaagtagtgatgagtagtctgggccctgggtgaggtaaaggacattcatgaggtcaatgttctgggaataactctcttccctgatccttggaggagcccgaactgattctggagctctgtgttctgagatcatgcatctcccacccatctgcccttctcccttctacgtgtacatcattaatccccattgccaagggcattgtccagaaactcccctgagaccttactccttccagccccaaatcatttacttttctgtggtccagccctactcctataagtcatgatctccaaagctttctgtcttccaactgcagtctccacagtcttcagaagacaaatgctcaggtagtcactgtttccttttcactgtttttaaaaaccttttattgtcaaataaaatggagatacaaaaaatgtaaaaaaaaagaa

SEQ ID NO: 65760 - DNA, 444 bp, Homo sapiens
caccactctgagaagggtttcctctctggcctccccatagctccctgtgcatacctttatcatggtattattcatattgtgttctggttctcttttatatttttctactgctttccaatcctccaaagaattataagttatttagaggcaggagctgttgaatgaataaattaatgaatacaagaaaaagagtaaatatctaagagtttcctactccctttattagttcacaaacgtggtcaaattaatagtttaccaattataaaccatcataagctctatgcagaagctcgcttttgttctaaccgaatacactgttcttcaaagacacaaatgacattaaatgttttgcaaatgaacccactggagtgcaggaagaacattatattggaaaatattaaacaacctgaaacaaaaagcagatcatttcccaaccacaaattg

SEQ ID NO: 65761 - DNA, 138 bp, Homo sapiens
ccaggtcttctcattatgctgtgtttttagacatcttttctcctttgcttgaaacgtcattttctcctcttactccagcttctcctcagccaacttctatttgtgtttatgactcagcccaaatatcatcatggaatt

SEQ ID NO: 65762 - DNA, 122 bp, Homo sapiens
ttttatttcaaggcacatttaatttaatatcaagagtgcaatacaaaaggcccaaatacaatgaaggaacacatccccccattaacaccaacgacaatgttcttttaaacatgtgcctgttg

SEQ ID NO: 65763 - DNA, 228 bp, Homo sapiens
cttcctggtccccagtaccccctgtccacctctggcacatgctggcctagtgggcagcgattatggacttctcagccccaggctgtgctgctgtaatccctccacccccaagccattctccaaggcccagctccggggccacctcctgaaggcctggtcctatgccactgccctccagcaatagtacgggtcacctctggagcatgcatcccctgccctccacggagg

SEQ ID NO: 65764 - DNA, 430 bp, Homo sapiens
gcatactggaaaacatattttcttttcgaaagtattatatcaatagaacaatatcatagcaaccttatcagtgtgggtggtactattaataattttgagggtttaataggcatcaaataaagccactttaataggtctaaaaaaaataagactttgttaaaatgtacatttctttaactgctattaatgtttttctcatatacttgtgaatgatttatatttctctgtttaatggtctctcctttttaaactattaagggcctgagaattttctctcacatttgaatgaacactttcatggtatatgtaaatattttcctagtttattgttctttttagtttttcatagttaaaaaaatttttaatcttcatctggctgaatttatcaatattttctttgttcactgtcctttctttagacgttgatgta

SEQ ID NO: 65765 - DNA, 1714 bp, Homo sapiens
tgagagaatcattaacttaatttgactatctggtttgtggatgcgtttactctcatgtaagtcaacaacatcctgggattgggacacactttctgggcactgctggccagtcccaaaatggaacataaggaagtggttcttctacttctgttatttctgaagtcagcaccgactgagacagggccttctgtgcaggagtgctaccacagtaatggacagagttatcgaggcacatacttcaccactgtcacaggaagaacctgccaagcttggtcatctatgacgccacaccagcacagtagaaccccagaaaagtacccaaatgatggcttgatctcgaactactgcaggaatccggattgttcggcaggcccttggtgttatacgacggatcccaatgtcaggtgggagtactgcaacctgacacggtgctcagacgatgaagggactgtgttcgtgcctctgactgttatcccagttccaagcctagaggattcattcatacaagtggcttgatctccaactactgcaggaatccggattgttcggcaggcccttggtgttatacaacggatcccaaagtcaggtgggagtactgcaacctgacaggatgctcagacaagaatagggctgtggccgcgcctctgactattatcccggttccaagacgagaggatacttccaaacaagcactgattgatccaaggccttcaatgtaggagtgctaccatggaaatggacagagttatcgaggcacatacttcaccaccgtcacaggaagcacttgccaagcttggtcatctatgacaccacaccagcacagtaggacctcagaaaagtacccaaatgctgacttgatcatgaactactgcaggaatccagatcctgtggaaggcccttggtgttacacgatggatcccaaagtcagatgggagtactgcaacctgacacgatgctcagacacagaagggactgcagtcgtgcctctgactgttatcccggttccaagcctagaggatccttccaaaccagcaccaacagagccaaggccttgggagcagcagtgctaccacggtaatggacagagttatcgaggcacatacttcaccactgtcacaggaagaacctgccaagcttggtcatctatgacgccacatcagcacatggcctgaccaggaacactgcaggaatccagattctgggaaacaaccctggtgttacacaactgatccgtgtgtgaggtgggagtactgcaacctgacacaatgctcagaaacagaatcagtgtcctagagactcccactgttgttcccgttccaagcatggaggctcattctgaagcagcaccaactgagcaaacccctgtggtccggcagtgctaccatggtaatggacagagttatcaaggcacattctccaccactgtcacaggaaggacatgtcaatcttggtcatccatgacaccacaccggtcatcagaggaccccagaaaactacccaaatgaactctatgtttgggaatgggaaaggataccggggcaagaaggcaaccactgttactgggacgccacgccaagaatggactgcccaagagccccatagacacagcaggttcactccagggacaagtccacgggcaggtctggaaaaaaatgtagggacatggatgaagctggaaaccatcatcctcagcaaactatcgcaaggacaaaaa

SEQ ID NO: 65766 - DNA, 578 bp, Homo sapiens
ttttttttttgcggcaattgtatggtacttttaatgggaatatttcaaaggccctggttatgaccttgttacagcaaaacggagagggtgctgggtgcccctgcatattgtcccacctcttgtgacgtatatccttttggaatttccagtgacttgatcatgaactactgcaggaatccagatcctgtggaaggcccttggtgttacacgatggatcccaaagtcagatgggagtactgcaacctgacacgatgctcagacacagaagggactgcagtcgtgcctctgactgttatcccggttccaagcctagaggatccttccaaaccaggtaagaagtctgtggccagacatctccacacttggacactgggtagaaaagcctttgaaactcccattgttgcagaagccttcagtgctacgcacgtgctcacatgttggttgatggtctgtcatgttggaagaatcctcagggcactctgggggggagccagacgagtgatttttggtgcaacgtgagtgggctgtgtctttaggataggcacgaaccctccaggttggtggacttcaccactcac

SEQ ID NO: 65767 - DNA, 2195 bp, Homo sapiens
tgagagaatcattaacttaatttgactatctggtttgtggatgcgtttactctcatgtaagtcaacaacatcctgggattgggacacactttctgggcactgctggccagtcccaaaatggaacataaggaagtggttcttctacttctgttatttctgaagtcagcaccgactgagacagggccttctgtgcaggagtgctaccacagtaatggacagagttatcgaggcacatacttcaccactgtcacaggaagaacctgccaagcttggtcatctatgacgccacaccagcacagtagaaccccagaaaagtacccaaatgatggcttgatctcgaactactgcaggaatccggattgttcggcaggcccttggtgttatacgacggatcccaatgtcaggtgggagtactgcaacctgacacggtgctcagacgatgaagggactgtgttcgtgcctctgactgttatcccagttccaagcctagaggattcattcatacaagtggcttgatctccaactactgcaggaatccggattgttcggcaggcccttggtgttatacaacggatcccaaagtcaggtgggagtactgcaacctgacaggatgctcagacaagaatagggctgtggccgcgcctctgactattatcccggttccaagacgagaggatacttccaaacaagcactgattgatccaaggccttcaatgtaggagtgctaccatggaaatggacagagttatcgaggcacatacttcaccaccgtcacaggaagcacttgccaagcttggtcatctatgacaccacaccagcacagtaggacctcagaaaagtacccaaatgctgacttgatcatgaactactgcaggaatccagatcctgtggaaggcccttggtgttacacgatggatcccaaagtcagatgggagtactgcaacctgacacgatgctcagacacagaagggactgcagtcgtgcctctgactgttatcccggttccaagcctagaggatccttccaaaccagcaccaacagagccaaggccttgggagcagcagtgctaccacggtaatggacagagttatcgaggcacatacttcaccactgtcacaggaagaacctgccaagcttggtcatctatgacgccacatcagcacatggcctgaccaggaacactgcaggaatccagattctgggaaacaaccctggtgttacacaactgatccgtgtgtgaggtgggagtactgcaacctgacacaatgctcagaaacagaatcagtgtcctagagactcccactgttgttcccgttccaagcatggaggctcattctgaagcagcaccaactgagcaaacccctgtggtccggcagtgctaccatggtaatggacagagttatcaaggcacattctccaccactgtcacaggaaggacatgtcaatcttggtcatccatgacaccacaccggtcatcagaggaccccagaaaactacccaaatgatggcctgacaatgaactactgcaggaatccagatgccgatacaggcccttggtgttttaccacagaccccagcgtcaggtgggagtactgcaacctgacgcgatgctcagacagaagggactgtggtcgctcctccgactgttatccaggttccaagcctagaggctccttccgaacaagtaaaaagtctgtatccagacatctatgtgcttggacaacgggatgaaaagacatgaaaagccacactgatgcagaagcctttagtgctgcacgggagctcgagtgttggttgagggtctgccgtgaccaaggaagcctcaatgccgtccctgggaaagccagagctgtgatttttggcacaacttgcgagtgtagtgactttaggactggcgcaaaacctccagggtgctcaacttaaccactcaccttgttctaaaataggttatttcagtgtcccagtcaaattcctattctaacatgctgtcaactatgtgattctttccaagccaataaacatttccagtaatttcttaaaatagtgttcatggcagtcttcagcagtggcttctgactaatgtggcccctgattccgtcgtcctagagaaacctgacatgactgcattgattccatattgtcctgggtctatgtggctgtgcatatcatctgctttttgtttttgttttcgtttt

SEQ ID NO: 65768 - DNA, 1676 bp, Homo sapiens
tgagagaatcattaacttaatttgactatctggtttgtggatgcgtttactctcatgtaagtcaacaacatcctgggattgggacacactttctgggcactgctggccagtcccaaaatggaacataaggaagtggttcttctacttctgttatttctgaagtcagcaccgactgagacagggccttctgtgcaggagtgctaccacagtaatggacagagttatcgaggcacatacttcaccactgtcacaggaagaacctgccaagcttggtcatctatgacgccacaccagcacagtagaaccccagaaaagtacccaaatgacggcaggcccttggtgttatacgacggatcccaatgtcaggtgggagtactgcaacctgacacggtgctcagacgatgaagggactgtgttcgtgcctctgactgttatcccagttccaagcctagaggattcattcatacaagtggcttgatctccaactactgcaggaatccggattgttcggcaggcccttggtgttatacaacggatcccaaagtcaggtgggagtactgcaacctgacaggatgctcagacaagaatagggctgtggccgcgcctctgactattatcccggttccaagacgagaggatacttccaaacaagcactgattgatccaaggccttcaatgtaggagtgctaccatggaaatggacagagttatcgaggcacatacttcaccaccgtcacaggaagcacttgccaagcttggtcatctatgacaccacaccagcacagtaggacctcagaaaagtacccaaatgctgacttgatcatgaactactgcaggaatccagatcctgtggaaggcccttggtgttacacgatggatcccaaagtcagatgggagtactgcaacctgacacgatgctcagacacagaagggactgcagtcgtgcctctgactgttatcccggttccaagcctagaggatccttccaaaccagcaccaacagagccaaggccttgggagcagcagtgctaccacggtaatggacagagttatcgaggcacatacttcaccactgtcacaggaagaacctgccaagcttggtcatctatgacgccacatcagcacatggcctgaccaggaacactgcaggaatccagattctgggaaacaaccctggtgttacacaactgatccgtgtgtgaggtgggagtactgcaacctgacacaatgctcagaaacagaatcagtgtcctagagactcccactgttgttcccgttccaagcatggaggctcattctgaagcagcaccaactgagcaaacccctgtggtccggcagtgctaccatggtaatggacagagttatcaaggcacattctccaccactgtcacaggaaggacatgtcaatcttggtcatccatgacaccacaccggtcatcagaggaccccagaaaactacccaaatgaactctatgtttgggaatgggaaaggataccggggcaagaaggcaaccactgttactgggacgccacgccaagaatggactgcccaagagccccatagacacagcaggttcactccagggacaagtccacgggcaggtctggaaaaaaatgtagggacatggatgaagctggaaaccatcatcctcagcaaactatcgcaaggacaaaaa

SEQ ID NO: 65769 - DNA, 3767 bp, Homo sapiens
gcggaagacagggctggtgctgcaccggtcgctgcttccccagtccttttttggcctcctttctgacgcgacgcagaccccagttctggagagtctgtcactcgctccccgtggtgggagatcagaggcctggtgtccttgggagcggcgagcggtgctcggcgcaggatagaaagggagtgcgcgcccgagtcccccagatccctgggaacccgcgccaccctcccgcccctgcccatccccggccgcgctgtcagtctccattagcgctaacaggctccagacggagcgggccgggcgctgggttaatgcaatcggcgcgttacctggggcgcaggctacattaccagcccggcccccgccaggcacggccagaaccaggcgcaaggcaccagggatcccctcgccgccggacacagcctcggcgtgcccccaggaccggtaaagttcctctcgccagccgcatccatgcttctggcgcggatgaacccgcaggtgcagcccgagaacaacggggcggacacgggtccagagcagccccttcgggcgcgcaaaactgcggagctgctggtggtgaaggagcgcaacggcgtccagtgcctgctggcgccccgcgacggcgacgcgcagccccgggagacctggggcaagaagatcgacttcctgctgtccgtagtcggcttcgcagtggacctggccaacgtgtggcgcttcccctacctctgctacaagaacggcggcggtgccttcttgatcccgtacacactgttccttatcatcgcggggatgcccctgttctacatggagctggctctgggacagtacaaccgggagggggctgccaccgtttggaaaatctgcccattcttcaaaggcgttggctatgctgtcatcctgatcgccctgtacgttggcttctactacaacgtcatcatcgcctggtcactctactacctcttctcctccttcaccctcaacctgccctggaccgactgtggccacacctggaacagccccaactgtaccgaccccaagctcctcaatggctccgtgcttggcaaccacaccaagtactccaagtacaagttcacgccggcagccgagttttatgagcgtggtgtcctgcaccttcacgagagcagcgggattcatgacatcggcctgccccagtggcagctcttgctctgtctgatggtcgtcgtcatcgtcttgtattttagcctctggaaaggggtgaagacatcaggaaaggtggtgtggatcacagccacgctgccttacttcgtgctgttcgtgctcctggtccatggcgtcacgctgcccggagcctccaatggcatcaatgcctacctgcacatcgacttctaccgcttgaaagaggccacggtatggattgatgccgcaactcagatatttttttccttgggggctggatttggagtattgattgcatttgccagttacaacaaatttgacaacaactgttacagggatgccctgctgaccagcagcatcaactgtatcaccagcttcgtctctgggttcgccatcttctccatccttggttacatggcccatgaacacaaggtcaacattgaggatgtggccacagaaggagctggcctagtgttcatcctgtatccagaggccatttctaccctgtctggatctacattctgggctgttgtgtttttcgtcatgctcctggcgctgggccttgacagctcaatgggaggcatggaggctgtcatcacgggcctggcagatgacttccaggtcctgaagcgacaccggaaactcttcacatttggcgtcaccttcagcactttccttctcgccctgttctgcataaccaagggtggaatttacgtcttgaccctcctggacacctttgctgcgggcacctccatcctttttgctgtcctcatggaagccatcggagtttcctggttttatggagtggacaggttcagcaacgacatccagcagatgatggggttcaggccgggtctatactggagactgtgctggaagttcgtcagtcctgccttcctcctgttcgtggttgtggtcagcatcatcaacttcaagccactcacctacgacgactacatcttcccgccctgggccaactgggtggggtggggcatcgccctgtcctccatggtcctggtgcccatctacgtcatctataagttcctcagcacgcagggctctctttgggagagactggcctatggcatcacgccagagaacgagcaccacctggtggctcagagggacatcagacagttccagttgcaacactggctggccatctgagcctgcctggaggagaaggaggaacccccatgccaatgtccaggtcacaggcatccgctgcgctcccacctcggacaccatcttgggattcctcccctggaagttgtcctttctgatcctctcttcttttcccatttacaaatgatttcgtgactgtagtttttgttcaccttctgtgcatctggcctgggggctgttagctcagaggagaggagcaaacaggaaaatgacttctgttctgtccccgctgttttgggggaagtctctcccactttgggatcctgctgaagctaggttcatgaggtcggaaatccccaccacatttgcctagactttgggcacaggagttcttagtccaccaaatcagagagaggatgggcttttgatcagatacccctcccaaaaaaaaaaaaaaactaaaactaaagcaaaaatcaaacaaaatctggctgagtttagtggggtggttggggaaggtacatagaccctcctcttgcccaccctagacagccctctcatgtctgaacctcagcctgggagttagatttatttgtctctaaaatgaagtcagtggatagatgctttgagggattttgagtagaaacattcatagttaattttcactctggccaatctgagtttgatgtgtgtgttctggaacattcctccagcttttggtggtcagatggcccagagatatgggggacaggaggaagagggtaaatgaaccacagtgagcaggttctaggaggtacctgcatcagacaagctggtggaggccacgtggcaagccacatctactgaggcctcatgctgctcttgctctgtaagacacggagcccagaaacccatctgcacttcctgagacctgcctggggaaacgggggcagggaccaagtgaggcctcatgtgtgtcttcaccgtgctgtcctcacaaggccaggtgggtgcccaaagggagcctgacaggctgttgtgttaatttattgttcttgcacacctgcacagcctccctctggggatcccacctggagtggaccaggggtcttgagaaatggagagttggctgcaaaaactctcatgcactagatgtggcaccttggagggcagggtgagacaagcagcccagaaatactctctcaagtggaggggagaattttgagagtggatggaacagtttggtggtttcagagaatttctaggtttctacttggatctacttctgatacaaacttgcacttggtgccctctggtggtgtttagttttagttccgtaagagaaatgattcctagtttgctaaattggtggcatctttgggaggggtttctgtttatggttagagtctcttacacccttgttggagggattcttattctgactgtgggagctcctgttgcaggatcttgggaaaaaataaagaagccgctgcattcgcacgtcaaga

SEQ ID NO: 65770 - DNA, 3900 bp, Homo sapiens
gcggaagacagggctggtgctgcaccggtcgctgcttccccagtccttttttggcctcctttctgacgcgacgcagaccccagttctggagagtctgtcactcgctccccgtggtgggagatcagaggcctggtgtccttgggagcggcgagcggtgctcggcgcaggatagaaagggagtgcgcgcccgagtcccccagatccctgggaacccgcgccaccctcccgcccctgcccatccccggccgcgctgtcagtctccattagcgctaacaggctccagacggagcgggccgggcgctgggttaatgcaatcggcgcgttacctggggcgcaggctacattaccagcccggcccccgccaggcacggccagaaccagtcagcccgcgccctgccggccgccccgcgcctccagctcttccccgggccccgcccgaacgccacacggcggagcccagccccagcccgcgccctagagcctgccaaggcgccgccggtcgggggccggcagggcgcaaggcaccagggatcccctcgccgccggacacagcctcggcgtgcccccaggaccggtaaagttcctctcgccagccgcatccatgcttctggcgcggatgaacccgcaggtgcagcccgagaacaacggggcggacacgggtccagagcagccccttcgggcgcgcaaaactgcggagctgctggtggtgaaggagcgcaacggcgtccagtgcctgctggcgccccgcgacggcgacgcgcagccccgggagacctggggcaagaagatcgacttcctgctgtccgtagtcggcttcgcagtggacctggccaacgtgtggcgcttcccctacctctgctacaagaacggcggcggtgccttcttgatcccgtacacactgttccttatcatcgcggggatgcccctgttctacatggagctggctctgggacagtacaaccgggagggggctgccaccgtttggaaaatctgcccattcttcaaaggcgttggctatgctgtcatcctgatcgccctgtacgttggcttctactacaacgtcatcatcgcctggtcactctactacctcttctcctccttcaccctcaacctgccctggaccgactgtggccacacctggaacagccccaactgtaccgaccccaagctcctcaatggctccgtgcttggcaaccacaccaagtactccaagtacaagttcacgccggcagccgagttttatgagcgtggtgtcctgcaccttcacgagagcagcgggattcatgacatcggcctgccccagtggcagctcttgctctgtctgatggtcgtcgtcatcgtcttgtattttagcctctggaaaggggtgaagacatcaggaaaggtggtgtggatcacagccacgctgccttacttcgtgctgttcgtgctcctggtccatggcgtcacgctgcccggagcctccaatggcatcaatgcctacctgcacatcgacttctaccgcttgaaagaggccacggtatggattgatgccgcaactcagatatttttttccttgggggctggatttggagtattgattgcatttgccagttacaacaaatttgacaacaactgttacagggatgccctgctgaccagcagcatcaactgtatcaccagcttcgtctctgggttcgccatcttctccatccttggttacatggcccatgaacacaaggtcaacattgaggatgtggccacagaaggagctggcctagtgttcatcctgtatccagaggccatttctaccctgtctggatctacattctgggctgttgtgtttttcgtcatgctcctggcgctgggccttgacagctcaatgggaggcatggaggctgtcatcacgggcctggcagatgacttccaggtcctgaagcgacaccggaaactcttcacatttggcgtcaccttcagcactttccttctcgccctgttctgcataaccaagggtggaatttacgtcttgaccctcctggacacctttgctgcgggcacctccatcctttttgctgtcctcatggaagccatcggagtttcctggttttatggagtggacaggttcagcaacgacatccagcagatgatggggttcaggccgggtctatactggagactgtgctggaagttcgtcagtcctgccttcctcctgttcgtggttgtggtcagcatcatcaacttcaagccactcacctacgacgactacatcttcccgccctgggccaactgggtggggtggggcatcgccctgtcctccatggtcctggtgcccatctacgtcatctataagttcctcagcacgcagggctctctttgggagagactggcctatggcatcacgccagagaacgagcaccacctggtggctcagagggacatcagacagttccagttgcaacactggctggccatctgagcctgcctggaggagaaggaggaacccccatgccaatgtccaggtcacaggcatccgctgcgctcccacctcggacaccatcttgggattcctcccctggaagttgtcctttctgatcctctcttcttttcccatttacaaatgatttcgtgactgtagtttttgttcaccttctgtgcatctggcctgggggctgttagctcagaggagaggagcaaacaggaaaatgacttctgttctgtccccgctgttttgggggaagtctctcccactttgggatcctgctgaagctaggttcatgaggtcggaaatccccaccacatttgcctagactttgggcacaggagttcttagtccaccaaatcagagagaggatgggcttttgatcagatacccctcccaaaaaaaaaaaaaaactaaaactaaagcaaaaatcaaacaaaatctggctgagtttagtggggtggttggggaaggtacatagaccctcctcttgcccaccctagacagccctctcatgtctgaacctcagcctgggagttagatttatttgtctctaaaatgaagtcagtggatagatgctttgagggattttgagtagaaacattcatagttaattttcactctggccaatctgagtttgatgtgtgtgttctggaacattcctccagcttttggtggtcagatggcccagagatatgggggacaggaggaagagggtaaatgaaccacagtgagcaggttctaggaggtacctgcatcagacaagctggtggaggccacgtggcaagccacatctactgaggcctcatgctgctcttgctctgtaagacacggagcccagaaacccatctgcacttcctgagacctgcctggggaaacgggggcagggaccaagtgaggcctcatgtgtgtcttcaccgtgctgtcctcacaaggccaggtgggtgcccaaagggagcctgacaggctgttgtgttaatttattgttcttgcacacctgcacagcctccctctggggatcccacctggagtggaccaggggtcttgagaaatggagagttggctgcaaaaactctcatgcactagatgtggcaccttggagggcagggtgagacaagcagcccagaaatactctctcaagtggaggggagaattttgagagtggatggaacagtttggtggtttcagagaatttctaggtttctacttggatctacttctgatacaaacttgcacttggtgccctctggtggtgtttagttttagttccgtaagagaaatgattcctagtttgctaaattggtggcatctttgggaggggtttctgtttatggttagagtctcttacacccttgttggagggattcttattctgactgtgggagctcctgttgcaggatcttgggaaaaaataaagaagccgctgcattcgcacgtcaaga

SEQ ID NO: 65771 - DNA, 3765 bp, Homo sapiens
gcggaagacagggctggtgctgcaccggtcgctgcttccccagtccttttttggcctcctttctgacgcgacgcagaccccagttctggagagtctgtcactcgctccccgtggtgggagatcagaggcctggtgtccttgggagcggcgagcggtgctcggcgcaggatagaaagggagtgcgcgcccgagtcccccagatccctgggaacccgcgccaccctcccgcccctgcccatccccggccgcgctgtcagtctccattagcgctaacaggctccagacggagcgggccgggcgctgggttaatgcaatcggcgcgttacctggggcgcaggctacattaccagcccggcccccgccaggcacggccagaaccagtcagcccgcgccctgccggccgccccgcgcctccagctcttccccgggccccgcccgaacgccacacggcggagcccagccccagcccgcgccctagagcctgccaaggcgccgccggtcgggggccggcagggcgcaaggcaccagggatcccctcgccgccggacacagcctcggcgtgcccccaggaccggtaaagttcctctcgccagccgcatccatgcttctggcgcggatgaacccgcaggtgcagcccgagaacaacggggcggacacgggtccagagcagccccttcgggcgcgcaaaactgcggagctgctggtggtgaaggagcgcaacggcgtccagtgcctgctggcgccccgcgacggcgacgcgcagccccgggagacctggggcaagaagatcgacttcctgctgtccgtagtcggcttcgcagtggacctggccaacgtgtggcgcttcccctacctctgctacaagaacggcggcggtgccttcttgatcccgtacacactgttccttatcatcgcggggatgcccctgttctacatggagctggctctgggacagtacaaccgggagggggctgccaccgtttggaaaatctgcccattcttcaaaggcgttggctatgctgtcatcctgatcgccctgtacgttggcttctactacaacgtcatcatcgcctggtcactctactacctcttctcctccttcaccctcaacctgccctggaccgactgtggccacacctggaacagccccaactgtaccgaccccaagctcctcaatggctccgtgcttggcaaccacaccaagtactccaagtacaagttcacgccggcagccgagttttatgagcgtggtgtcctgcaccttcacgagagcagcgggattcatgacatcggcctgccccagtggcagctcttgctctgtctgatggtcgtcgtcatcgtcttgtattttagcctctggaaaggggtgaagacatcaggaaaggtatggattgatgccgcaactcagatatttttttccttgggggctggatttggagtattgattgcatttgccagttacaacaaatttgacaacaactgttacagggatgccctgctgaccagcagcatcaactgtatcaccagcttcgtctctgggttcgccatcttctccatccttggttacatggcccatgaacacaaggtcaacattgaggatgtggccacagaaggagctggcctagtgttcatcctgtatccagaggccatttctaccctgtctggatctacattctgggctgttgtgtttttcgtcatgctcctggcgctgggccttgacagctcaatgggaggcatggaggctgtcatcacgggcctggcagatgacttccaggtcctgaagcgacaccggaaactcttcacatttggcgtcaccttcagcactttccttctcgccctgttctgcataaccaagggtggaatttacgtcttgaccctcctggacacctttgctgcgggcacctccatcctttttgctgtcctcatggaagccatcggagtttcctggttttatggagtggacaggttcagcaacgacatccagcagatgatggggttcaggccgggtctatactggagactgtgctggaagttcgtcagtcctgccttcctcctgttcgtggttgtggtcagcatcatcaacttcaagccactcacctacgacgactacatcttcccgccctgggccaactgggtggggtggggcatcgccctgtcctccatggtcctggtgcccatctacgtcatctataagttcctcagcacgcagggctctctttgggagagactggcctatggcatcacgccagagaacgagcaccacctggtggctcagagggacatcagacagttccagttgcaacactggctggccatctgagcctgcctggaggagaaggaggaacccccatgccaatgtccaggtcacaggcatccgctgcgctcccacctcggacaccatcttgggattcctcccctggaagttgtcctttctgatcctctcttcttttcccatttacaaatgatttcgtgactgtagtttttgttcaccttctgtgcatctggcctgggggctgttagctcagaggagaggagcaaacaggaaaatgacttctgttctgtccccgctgttttgggggaagtctctcccactttgggatcctgctgaagctaggttcatgaggtcggaaatccccaccacatttgcctagactttgggcacaggagttcttagtccaccaaatcagagagaggatgggcttttgatcagatacccctcccaaaaaaaaaaaaaaactaaaactaaagcaaaaatcaaacaaaatctggctgagtttagtggggtggttggggaaggtacatagaccctcctcttgcccaccctagacagccctctcatgtctgaacctcagcctgggagttagatttatttgtctctaaaatgaagtcagtggatagatgctttgagggattttgagtagaaacattcatagttaattttcactctggccaatctgagtttgatgtgtgtgttctggaacattcctccagcttttggtggtcagatggcccagagatatgggggacaggaggaagagggtaaatgaaccacagtgagcaggttctaggaggtacctgcatcagacaagctggtggaggccacgtggcaagccacatctactgaggcctcatgctgctcttgctctgtaagacacggagcccagaaacccatctgcacttcctgagacctgcctggggaaacgggggcagggaccaagtgaggcctcatgtgtgtcttcaccgtgctgtcctcacaaggccaggtgggtgcccaaagggagcctgacaggctgttgtgttaatttattgttcttgcacacctgcacagcctccctctggggatcccacctggagtggaccaggggtcttgagaaatggagagttggctgcaaaaactctcatgcactagatgtggcaccttggagggcagggtgagacaagcagcccagaaatactctctcaagtggaggggagaattttgagagtggatggaacagtttggtggtttcagagaatttctaggtttctacttggatctacttctgatacaaacttgcacttggtgccctctggtggtgtttagttttagttccgtaagagaaatgattcctagtttgctaaattggtggcatctttgggaggggtttctgtttatggttagagtctcttacacccttgttggagggattcttattctgactgtgggagctcctgttgcaggatcttgggaaaaaataaagaagccgctgcattcgcacgtcaaga

SEQ ID NO: 65772 - DNA, 2848 bp, Homo sapiens
  misc_feature (1)..(1): n is a, c, g, or t
naaaagaaaaacaaaaaatcggctaggacgaggctggtgttaatcggacgagcctcaacctgccctggaccgactgtggccacacctggaacagccccaactgtaccgaccccaagctcctcaatggctccgtgcttggcaaccacaccaagtactccaagtacaagttcacgccggcagccgagttttatgagcgtggtgtcctgcaccttcacgagagcagcgggattcatgacatcggcctgccccagtggcagctcttgctctgtctgatggtcgtcgtcatcgtcttgtattttagcctctggaaaggggtgaagacatcaggaaaggtggtgtggatcacagccacgctgccttacttcgtgctgttcgtgctcctggtccatggcgtcacgctgcccggagcctccaatggcatcaatgcctacctgcacatcgacttctaccgcttgaaagaggccacggtatggattgatgccgcaactcagatatttttttccttgggggctggatttggagtattgattgcatttgccagttacaacaaatttgacaacaactgttacagggatgccctgctgaccagcagcatcaactgtatcaccagcttcgtctctgggttcgccatcttctccatccttggttacatggcccatgaacacaaggtcaacattgaggatgtggccacagaaggagctggcctagtgttcatcctgtatccagaggccatttctaccctgtctggatctacattctgggctgttgtgtttttcgtcatgctcctggcgctgggccttgacagctcaatgggaggcatggaggctgtcatcacgggcctggcagatgacttccaggtcctgaagcgacaccggaaactcttcacatttggcgtcaccttcagcactttccttctcgccctgttctgcataaccaagggtggaatttacgtcttgaccctcctggacacctttgctgcgggcacctccatcctttttgctgtcctcatggaagccatcggagtttcctggttttatggagtggacaggttcagcaacgacatccagcagatgatggggttcaggccgggtctatactggagactgtgctggaagttcgtcagtcctgccttcctcctgttcgtggttgtggtcagcatcatcaacttcaagccactcacctacgacgactacatcttcccgccctgggccaactgggtggggtggggcatcgccctgtcctccatggtcctggtgcccatctacgtcatctataagttcctcagcacgcagggctctctttgggagagactggcctatggcatcacgccagagaacgagcaccacctggtggctcagagggacatcagacagttccagttgcaacactggctggccatctgagcctgcctggaggagaaggaggaacccccatgccaatgtccaggtcacaggcatccgctgcgctcccacctcggacaccatcttgggattcctcccctggaagttgtcctttctgatcctctcttcttttcccatttacaaatgatttcgtgactgtagtttttgttcaccttctgtgcatctggcctgggggctgttagctcagaggagaggagcaaacaggaaaatgacttctgttctgtccccgctgttttgggggaagtctctcccactttgggatcctgctgaagctaggttcatgaggtcggaaatccccaccacatttgcctagactttgggcacaggagttcttagtccaccaaatcagagagaggatgggcttttgatcagatacccctcccaaaaaaaaaaaaaaactaaaactaaagcaaaaatcaaacaaaatctggctgagtttagtggggtggttggggaaggtacatagaccctcctcttgcccaccctagacagccctctcatgtctgaacctcagcctgggagttagatttatttgtctctaaaatgaagtcagtggatagatgctttgagggattttgagtagaaacattcatagttaattttcactctggccaatctgagtttgatgtgtgtgttctggaacattcctccagcttttggtggtcagatggcccagagatatgggggacaggaggaagagggtaaatgaaccacagtgagcaggttctaggaggtacctgcatcagacaagctggtggaggccacgtggcaagccacatctactgaggcctcatgctgctcttgctctgtaagacacggagcccagaaacccatctgcacttcctgagacctgcctggggaaacgggggcagggaccaagtgaggcctcatgtgtgtcttcaccgtgctgtcctcacaaggccaggtgggtgcccaaagggagcctgacaggctgttgtgttaatttattgttcttgcacacctgcacagcctccctctggggatcccacctggagtggaccaggggtcttgagaaatggagagttggctgcaaaaactctcatgcactagatgtggcaccttggagggcagggtgagacaagcagcccagaaatactctctcaagtggaggggagaattttgagagtggatggaacagtttggtggtttcagagaatttctaggtttctacttggatctacttctgatacaaacttgcacttggtgccctctggtggtgtttagttttagttccgtaagagaaatgattcctagtttgctaaattggtggcatctttgggaggggtttctgtttatggttagagtctcttacacccttgttggagggattcttattctgactgtgggagctcctgttgcaggatcttgggaaaaaataaagaagccgctgcattcgcacgtcaaga

SEQ ID NO: 65773 - DNA, 3167 bp, Homo sapiens
gtcagaagtctccaactcttgagttccggcgtgccccaacctctgtttccaaatttttccagcggacgcgcgctcttttctgggaaccctgcgtccgctcagcgcgcgctcatcccagtgtctaaggcgctcccgggtggtcttgggagttgcaagtagggaggaacggccgggtaaccacctcttttccctttatccaagcagagcctcggcgtgcccccaggaccggtaaagttcctctcgccagccgcatccatgcttctggcgcggatgaacccgcaggtgcagcccgagaacaacggggcggacacgggtccagagcagccccttcgggcgcgcaaaactgcggagctgctggtggtgaaggagcgcaacggcgtccagtgcctgctggcgccccgcgacggcgacgcgcagccccgggagacctggggcaagaagatcgacttcctgctgtccgtagtcggcttcgcagtggacctggccaacgtgtggcgcttcccctacctctgctacaagaacggcggcggtgccttcttgatcccgtacacactgttccttatcatcgcggggatgcccctgttctacatggagctggctctgggacagtacaaccgggagggggctgccaccgtttggaaaatctgcccattcttcaaaggcgttggctatgctgtcatcctgatcgccctgtacgttggcttctactacaacgtcatcatcgcctggtcactctactacctcttctcctccttcaccctcaacctgccctggaccgactgtggccacacctggaacagccccaactgtaccgaccccaagctcctcaatggctccgtgcttggcaaccacaccaagtactccaagtacaagttcacgccggcagccgagttttatgagtatggattgatgccgcaactcagatatttttttccttgggggctggatttggagtattgattgcatttgccagttacaacaaatttgacaacaactgttacagggatgccctgctgaccagcagcatcaactgtatcaccagcttcgtctctgggttcgccatcttctccatccttggttacatggcccatgaacacaaggtcaacattgaggatgtggccacagaagatgggaggcatggaggctgtcatcacgggcctggcagatgacttccaggtcctgaagcgacaccggaaactcttcacatttggcgtcaccttcagcactttccttctcgccctgttctgcataaccaagggtggaatttacgtcttgaccctcctggacacctttgctgcgggcacctccatcctttttgctgtcctcatggaagccatcggagtttcctggttttatggagtggacaggttcagcaacgacatccagcagatgatggggttcaggccgggtctatactggagactgtgctggaagttcgtcagtcctgccttcctcctgttcgtggttgtggtcagcatcatcaacttcaagccactcacctacgacgactacatcttcccgccctgggccaactgggtggggtggggcatcgccctgtcctccatggtcctggtgcccatctacgtcatctataagttcctcagcacgcagggctctctttgggagagactggcctatggcatcacgccagagaacgagcaccacctggtggctcagagggacatcagacagttccagttgcaacactggctggccatctgagcctgcctggaggagaaggaggaacccccatgccaatgtccaggtcacaggcatccgctgcgctcccacctcggacaccatcttgggattcctcccctggaagttgtcctttctgatcctctcttcttttcccatttacaaatgatttcgtgactgtagtttttgttcaccttctgtgcatctggcctgggggctgttagctcagaggagaggagcaaacaggaaaatgacttctgttctgtccccgctgttttgggggaagtctctcccactttgggatcctgctgaagctaggttcatgaggtcggaaatccccaccacatttgcctagactttgggcacaggagttcttagtccaccaaatcagagagaggatgggcttttgatcagatacccctcccaaaaaaaaaaaaaaactaaaactaaagcaaaaatcaaacaaaatctggctgagtttagtggggtggttggggaaggtacatagaccctcctcttgcccaccctagacagccctctcatgtctgaacctcagcctgggagttagatttatttgtctctaaaatgaagtcagtggatagatgctttgagggattttgagtagaaacattcatagttaattttcactctggccaatctgagtttgatgtgtgtgttctggaacattcctccagcttttggtggtcagatggcccagagatatgggggacaggaggaagagggtaaatgaaccacagtgagcaggttctaggaggtacctgcatcagacaagctggtggaggccacgtggcaagccacatctactgaggcctcatgctgctcttgctctgtaagacacggagcccagaaacccatctgcacttcctgagacctgcctggggaaacgggggcagggaccaagtgaggcctcatgtgtgtcttcaccgtgctgtcctcacaaggccaggtgggtgcccaaagggagcctgacaggctgttgtgttaatttattgttcttgcacacctgcacagcctccctctggggatcccacctggagtggaccaggggtcttgagaaatggagagttggctgcaaaaactctcatgcactagatgtggcaccttggagggcagggtgagacaagcagcccagaaatactctctcaagtggaggggagaattttgagagtggatggaacagtttggtggtttcagagaatttctaggtttctacttggatctacttctgatacaaacttgcacttggtgccctctggtggtgtttagttttagttccgtaagagaaatgattcctagtttgctaaattggtggcatctttgggaggggtttctgtttatggttagagtctcttacacccttgttggagggattcttattctgactgtgggagctcctgttgcaggatcttgggaaaaaataaagaagccgctgcattcgcacgtcaaga

SEQ ID NO: 65774 - DNA, 3554 bp, Homo sapiens
gtcagaagtctccaactcttgagttccggcgtgccccaacctctgtttccaaatttttccagcggacgcgcgctcttttctgggaaccctgcgtccgctcagcgcgcgctcatcccagtgtctaaggcgctcccgggtggtcttgggagttgcaagtagggaggaacggccgggtaaccacctcttttccctttatccaagcagagcctcggcgtgcccccaggaccggtaaagttcctctcgccagccgcatccatgcttctggcgcggatgaacccgcaggtgcagcccgagaacaacggggcggacacgggtccagagcagccccttcgggcgcgcaaaactgcggagctgctggtggtgaaggagcgcaacggcgtccagtgcctgctggcgccccgcgacggcgacgcgcagccccgggagacctggggcaagaagatcgacttcctgctgtccgtagtcggcttcgcagtggacctggccaacgtgtggcgcttcccctacctctgctacaagaacggcggcggtgccttcttgatcccgtacacactgttccttatcatcgcggggatgcccctgttctacatggagctggctctgggacagtacaaccgggagggggctgccaccgtttggaaaatctgcccattcttcaaaggcgttggctatgctgtcatcctgatcgccctgtacgttggcttctactacaacgtcatcatcgcctggtcactctactacctcttctcctccttcaccctcaacctgccctggaccgactgtggccacacctggaacagccccaactgtaccgaccccaagctcctcaatggctccgtgcttggcaaccacaccaagtactccaagtacaagttcacgccggcagccgagttttatgagcgtggtgtcctgcaccttcacgagagcagcgggattcatgacatcggcctgccccagtggcagctcttgctctgtctgatggtcgtcgtcatcgtcttgtattttagcctctggaaaggggtgaagacatcaggaaaggtggtgtggatcacagccacgctgccttacttcgtgctgttcgtgctcctggtccatggcgtcacgctgcccggagcctccaatggcatcaatgcctacctgcacatcgacttctaccgcttgaaagaggccacggtatggattgatgccgcaactcagatatttttttccttgggggctggatttggagtattgattgcatttgccagttacaacaaatttgacaacaactgttacagggatgccctgctgaccagcagcatcaactgtatcaccagcttcgtctctgggttcgccatcttctccatccttggttacatggcccatgaacacaaggtcaacattgaggatgtggccacagaaggagctggcctagtgttcatcctgtatccagaggccatttctaccctgtctggatctacattctgggctgttgtgtttttcgtcatgctcctggcgctgggccttgacagctcaatgggaggcatggaggctgtcatcacgggcctggcagatgacttccaggtcctgaagcgacaccggaaactcttcacatttggcgtcaccttcagcactttccttctcgccctgttctgcataaccaagggtggaatttacgtcttgaccctcctggacacctttgctgcgggcacctccatcctttttgctgtcctcatggaagccatcggagtttcctggttttatggagtggacaggttcagcaacgacatccagcagatgatggggttcaggccgggtctatactggagactgtgctggaagttcgtcagtcctgccttcctcctgttcgtggttgtggtcagcatcatcaacttcaagccactcacctacgacgactacatcttcccgccctgggccaactgggtggggtggggcatcgccctgtcctccatggtcctggtgcccatctacgtcatctataagttcctcagcacgcagggctctctttgggagagactggcctatggcatcacgccagagaacgagcaccacctggtggctcagagggacatcagacagttccagttgcaacactggctggccatctgagcctgcctggaggagaaggaggaacccccatgccaatgtccaggtcacaggcatccgctgcgctcccacctcggacaccatcttgggattcctcccctggaagttgtcctttctgatcctctcttcttttcccatttacaaatgatttcgtgactgtagtttttgttcaccttctgtgcatctggcctgggggctgttagctcagaggagaggagcaaacaggaaaatgacttctgttctgtccccgctgttttgggggaagtctctcccactttgggatcctgctgaagctaggttcatgaggtcggaaatccccaccacatttgcctagactttgggcacaggagttcttagtccaccaaatcagagagaggatgggcttttgatcagatacccctcccaaaaaaaaaaaaaaactaaaactaaagcaaaaatcaaacaaaatctggctgagtttagtggggtggttggggaaggtacatagaccctcctcttgcccaccctagacagccctctcatgtctgaacctcagcctgggagttagatttatttgtctctaaaatgaagtcagtggatagatgctttgagggattttgagtagaaacattcatagttaattttcactctggccaatctgagtttgatgtgtgtgttctggaacattcctccagcttttggtggtcagatggcccagagatatgggggacaggaggaagagggtaaatgaaccacagtgagcaggttctaggaggtacctgcatcagacaagctggtggaggccacgtggcaagccacatctactgaggcctcatgctgctcttgctctgtaagacacggagcccagaaacccatctgcacttcctgagacctgcctggggaaacgggggcagggaccaagtgaggcctcatgtgtgtcttcaccgtgctgtcctcacaaggccaggtgggtgcccaaagggagcctgacaggctgttgtgttaatttattgttcttgcacacctgcacagcctccctctggggatcccacctggagtggaccaggggtcttgagaaatggagagttggctgcaaaaactctcatgcactagatgtggcaccttggagggcagggtgagacaagcagcccagaaatactctctcaagtggaggggagaattttgagagtggatggaacagtttggtggtttcagagaatttctaggtttctacttggatctacttctgatacaaacttgcacttggtgccctctggtggtgtttagttttagttccgtaagagaaatgattcctagtttgctaaattggtggcatctttgggaggggtttctgtttatggttagagtctcttacacccttgttggagggattcttattctgactgtgggagctcctgttgcaggatcttgggaaaaaataaagaagccgctgcattcgcacgtcaaga

SEQ ID NO: 65775 - DNA, 3164 bp, Homo sapiens
atctaggttgtgtgctccttatgagaatctaactaacgcctgatgacctgaggtggaacggtttcatcttgaaactacccccaccccaaaatctgtggaaaaattgtcttccatgcgacaggtcactggtgctgaaaaggttggggaccgctgttctgcaggaaacgagagacagagggaatgggagtgcagtggtggagccacacccaaggagaggtggctgtggggctgggcctgggagactcctaccttaccccctgtccctgcccaggcgttggctatgctgtcatcctgatcgccctgtacgttggcttctactacaacgtcatcatcgcctggtcactctactacctcttctcctccttcaccctcaacctgccctggaccgactgtggccacacctggaacagccccaactgtaccgaccccaagctcctcaatggctccgtgcttggcaaccacaccaagtactccaagtacaagttcacgccggcagccgagttttatgagcgtggtgtcctgcaccttcacgagagcagcgggattcatgacatcggcctgccccagtggcagctcttgctctgtctgatggtcgtcgtcatcgtcttgtattttagcctctggaaaggggtgaagacatcaggaaaggtggtgtggatcacagccacgctgccttacttcgtgctgttcgtgctcctggtccatggcgtcacgctgcccggagcctccaatggcatcaatgcctacctgcacatcgacttctaccgcttgaaagaggccacggtatggattgatgccgcaactcagatatttttttccttgggggctggatttggagtattgattgcatttgccagttacaacaaatttgacaacaactgttacagggatgccctgctgaccagcagcatcaactgtatcaccagcttcgtctctgggttcgccatcttctccatccttggttacatggcccatgaacacaaggtcaacattgaggatgtggccacagaaggagctggcctagtgttcatcctgtatccagaggccatttctaccctgtctggatctacattctgggctgttgtgtttttcgtcatgctcctggcgctgggccttgacagctcaatgggaggcatggaggctgtcatcacgggcctggcagatgacttccaggtcctgaagcgacaccggaaactcttcacatttggcgtcaccttcagcactttccttctcgccctgttctgcataaccaagggtggaatttacgtcttgaccctcctggacacctttgctgcgggcacctccatcctttttgctgtcctcatggaagccatcggagtttcctggttttatggagtggacaggttcagcaacgacatccagcagatgatggggttcaggccgggtctatactggagactgtgctggaagttcgtcagtcctgccttcctcctgttcgtggttgtggtcagcatcatcaacttcaagccactcacctacgacgactacatcttcccgccctgggccaactgggtggggtggggcatcgccctgtcctccatggtcctggtgcccatctacgtcatctataagttcctcagcacgcagggctctctttgggagagactggcctatggcatcacgccagagaacgagcaccacctggtggctcagagggacatcagacagttccagttgcaacactggctggccatctgagcctgcctggaggagaaggaggaacccccatgccaatgtccaggtcacaggcatccgctgcgctcccacctcggacaccatcttgggattcctcccctggaagttgtcctttctgatcctctcttcttttcccatttacaaatgatttcgtgactgtagtttttgttcaccttctgtgcatctggcctgggggctgttagctcagaggagaggagcaaacaggaaaatgacttctgttctgtccccgctgttttgggggaagtctctcccactttgggatcctgctgaagctaggttcatgaggtcggaaatccccaccacatttgcctagactttgggcacaggagttcttagtccaccaaatcagagagaggatgggcttttgatcagatacccctcccaaaaaaaaaaaaaaactaaaactaaagcaaaaatcaaacaaaatctggctgagtttagtggggtggttggggaaggtacatagaccctcctcttgcccaccctagacagccctctcatgtctgaacctcagcctgggagttagatttatttgtctctaaaatgaagtcagtggatagatgctttgagggattttgagtagaaacattcatagttaattttcactctggccaatctgagtttgatgtgtgtgttctggaacattcctccagcttttggtggtcagatggcccagagatatgggggacaggaggaagagggtaaatgaaccacagtgagcaggttctaggaggtacctgcatcagacaagctggtggaggccacgtggcaagccacatctactgaggcctcatgctgctcttgctctgtaagacacggagcccagaaacccatctgcacttcctgagacctgcctggggaaacgggggcagggaccaagtgaggcctcatgtgtgtcttcaccgtgctgtcctcacaaggccaggtgggtgcccaaagggagcctgacaggctgttgtgttaatttattgttcttgcacacctgcacagcctccctctggggatcccacctggagtggaccaggggtcttgagaaatggagagttggctgcaaaaactctcatgcactagatgtggcaccttggagggcagggtgagacaagcagcccagaaatactctctcaagtggaggggagaattttgagagtggatggaacagtttggtggtttcagagaatttctaggtttctacttggatctacttctgatacaaacttgcacttggtgccctctggtggtgtttagttttagttccgtaagagaaatgattcctagtttgctaaattggtggcatctttgggaggggtttctgtttatggttagagtctcttacacccttgttggagggattcttattctgactgtgggagctcctgttgcaggatcttgggaaaaaataaagaagccgctgcattcgcacgtcaaga

SEQ ID NO: 65776 - DNA, 6266 bp, Homo sapiens
  misc_feature (141)..(141): n is a, c, g, or t
  misc_feature (412)..(412): n is a, c, g, or t
  misc_feature (1310)..(1310): n is a, c, g, or t
  misc_feature (2260)..(2260): n is a, c, g, or t
  misc_feature (2918)..(2918): n is a, c, g, or t
  misc_feature (3734)..(3734): n is a, c, g, or t
  misc_feature (4342)..(4342): n is a, c, g, or t
  misc_feature (5361)..(5361): n is a, c, g, or t
  misc_feature (5394)..(5394): n is a, c, g, or t
aaaggatcgatgagaagggggcattccagttgagagcagtaaagcataaatttcatgaggcaagacagtttgagttttaggaaactgaaagtcaatgtgttgtaatttttaaattaattgcatgggggtgctagatgaggntatgaaattggtaaacagaggtcagaaccctcagatgatgcatttcaaagttgagagagaaaaccctttaatggaaaactgaactatagtgtaaagcccaaaattaaggcctaatactatatactgccaggcaggctaagagctccccttctaatgctgcttgcctaagacagggtcccatagctgtagtgtatcccttatcttttttcctatctattggaagagggggctcaggcaaaacctctgtctcctctttgttattttggcccgntgatagtggggctgagggataaggaggcagtaaggtaggtgatggttcctcttccctcccctttttaggctcttctgtgtataacgggaccaaagccaccctaactaaagcccataatgttaaagatgttactgggacccgttgcccttgcacatgatgctgtttaagatttctcccacttgttcccagagctctacatctagcataccttcttctgggaaccatgggttatgagatacaacagtttgcattaggtcccttaattgagcctgtgaaaccaagcctccactagctttaagcagctgtttcaatacttttatatactgtttcttttgagctgataactgttgtcccatgatgaaaccctagcctgaacaattccctcgaacttggaaatcctgagcaggcaccgatgacttactgatttactgacttactgactgcacagtctccttacctttgttttggagggttccttcatgatttgttgcagcattcctctcacagggcaccacctgccggggtctgacccgcagaccatggccaaatgatggatgaaagaatgcactcagacacagacatccagtgaaagagtgggctaggggaccggccacgcacagaccccacggagggtgctgtaaagagtcagcagctgcagctgctggtgctgcaggcatttattcagcacagatttaatgagaaaggctttgagacaacacacttgtggataattaacatggtggcccctctggagagagcagtcctgcacatggatgattaaaggccaggttccgaggcctaagtaaattaacttatctagatcagtttctttacatccccttgttatctaacctaagctcttaagagaactcagctgccttcagccaaattttctttngaagctttgcaaacccctggctttccaagaaggtttgcatctttctacaatttttcccaccaccctgactgatctcctacaatatattgccttcgatttttcaaatgacctaactagaaattcctctctacactatgcacttgcagattaagtcccttagccaaacaactgtctttactaagagaaccaggcacagatcttgttttctttccctgacagccttcagaattattcacacaagccaatcacgtcttcccatgagaactagaggtcacctctccctcttgatctacaaatcatgcctcccagagaccttattcattcactctgttcctgagtacaacccttgtgtgaccctgtgtggtatgtggtatactgctaccctgggctgtgagtatatgtgattaataaactgctgttgacctcatctgtacagtgcccagtatcatgtgtttgaataccacataaccataatatggaaattccttcctcaccaataaacaggacaccactaaagcatgcttttatgaattactttgagatcatagataatccagaaagaaatctttacatttagactagtggcttacacaacagaagtttattttctcacagttctggaggctgtaagtccaagatcaaggtgccagcagggttggtttcctctgaggcctctctcagcttgcagaaggctgccctcttgcagcctcttcacattgttgtccttttgtgtgtgtgcatccccggtgtttcctagtgtgtcctaacctcttcttttcaggactccagtcagattttataaaagtactctaatggcctcattttaactaatcacctgtttaaagaccttatctccaaatagagtcacattctgaggtactgggggttaggacttgagcctgtgaatttgaggttgggggcaaaattaatttcataatagacaggaattngagatacatttgctcttatctcagtacagtagaacacaatgcacaagctacgttttctatgcaaattgtctccagggagtttccctaaattaagagtgagatgcacgaaagccactgtgttggcttttttttttctttttacctagaattggaagaaagaactagatcctactaggaaaagacattctaatgagattatcctgagtgtaatttggcagattctaagggagggctagattttggtggggaagaaatgaatgaaaatatacggggtttggatggaagtgtagctgggatgcactgaaggagttagtccttaacaaaattctagaagatttgaattgtatccagatggggaagaacccccaacatccaaattaaataatggattccctagtggggaaaatctaattttacttgctacagcaaatttttggatgatttggtgttgtttgagagcattgcattttctctgacatatcctggatttttaaaaaatctcagataagaagataatcataaataatcataaataaatgtcatttattaaacacctaacatttgccagtgactgtgaaagattaagtcttagtgatgaagagaattagattagtgtgtgttttctgacagccacctcctatcccaggacctctgcctngttcttcagcttccccatttcacatcactccacttggacacagacctattctgctcaagatttttcaggagtgtggcatttcccaggaagcttttcattaagagacaggagccaaggatgtcagggccttgctgcaaagggctctcattgaagtaaggctctaagagaagtcaaattgggaatcctctgtgagactgagggaactacccactccagaacagagaaggcaccacagatgtcacccctgcagtcagccttgagaacactttcactgggaatatgggtaggactcacttccacccgagggtcacagaaaggtgagggacgtggcctaaggcaggccaccttagcacacgtgcaagctagcgaggggtcttaggctcaggcagaagtcaaggtgagaatacctaatgagagtaagagaaccacccacctcagaagcatgccccgggccttctcccccaaaaagcctgacccctgttctcagtcttgggaggcactgaacagagtagacaggatgagatgtgtgctcacttctgcctctagggcctcggggaggtgagggtcttagtaaaagtacgtgaacccagagcagctgagggagaaggagcaaaccctagcagcagtcaaggtgaggaaggttaggtggagaatcccatcaagctcttgtttgcagctccctgagtgcccgaacatggatgtcaagtatatgtgagctctcctttcctacttgatgataccgggagctgaggtccttggcctggagtgggcaggggacagagggctaaggtcagcaaaggaaggagtaccatgccnttcagggaatcaacagcagaagcctgcgtgatttctgagggaccactgatctcagaagagtaccgtagcacaaagcctgctcctgccatcaaacttaggaagccctgggccaggctgacttcttcaagggggtctcagagatgtgagggccttggtctaagggaagagtactcaagtcagcaaagaaaagcagccaaggtgcagccaggaatcaaagtaagtgccctacatgaggactgaaggaacccctgctctactggcaccctgggatgcctgtgcactgattacatgacttgcactcatttcctgctgtggtatgggggcgtttattggtaatgatggtgagggattttgtctaaagtagatggcctgaggtctgcagtaggaggatttccaggtattactaggaattaaggtgaagacatggtgtcggaggggaacaccaaattcatcccctattctcagccttggaagaccacaggcaggtgaggtggtacccatatcttactagagagtctcaggagaatctggtgggaatagagaagccctgggccatgccaagagacaaaggaagggttgggaggaccacccaccattgaatagataanaaagcatctgtgccccacccttgcactcagtacttaaaggaccagggcaggactatcaggctgaggctcctccccacttctttatatatataaaatctaaggcagatgaaatctttggtgtatgattgtagccaccagtcagcaaaagggaagtcttccaggaactacctagagatcaggtggattcctagaatgagaactgaagacccaagcatctcatgacagagagacctccatatagctcccagttgggtgccctctgacagagatggtggactgagatcctccttcactttatcgtctggggtctcagggaggtgctggctttggtttgaggtgtcaacttcagagcagcagaagggaggggaaccagggcctgccaacaattgatatgatgattacgattatgaacttagacccccacactccataacagagaacccccattaccagcccctgccaccatctcagtacacctaaggcagggttggcaggctgcagcctaaaactcactctaactttatccacagggttctcagtggagaggctgaccaggagaacaggagctccatgggttcctaaagcagtgctcttggaaacctgtggctgtggcctttgttaaagccatggtagtctctccctgctgctggtgctcacaccatctcattctccctccttcaggtgcccacattgccagccatcctgtccacactttttcctactctgcctaaccagagtcatcatgtcttggtatcagaaaagtaagttccatgtccataagaaatgtcaccagactcaaagtaagactcggggtaatgggggtactcaggcaatagtagtggcagcagaagagtctcctccctcctcacctcttctttgtggaggtgttactgagagcctacctactgctgggtcatgtagcactttgaaggagcctcagaaagcctcatccaccactacttaaataggcattttttgcactagatctgataaatttcccaatggccaagataaggaanagaaaagcacggctgaggccccaccttccagtnagaactcatgcagagaccctcaaaccaggaaagctgggttgttggagcagttcctgctctacaagtataaaatgaaacagcccattacaaaggaagatatgctgaaggttgtcaactaaaaataccgaaatcagtatgctgagatcctcagaagaacttctgagtgcattaaggttgcctttacgttaatatgaaggaagtcaattcaacccatcactcatatgaccttgttatgaccttgtaaagctaaaagttcccaacaatgggagggtgtttggtggcagggggttacccaagactggtctcctgataaatcttctgagtgtgatcttcataaagagcaactgtgccattggggaagacatctggaaattcctagatatgatgtgaacatatgctgggaggaagcactacactatggagagctcaagaagctcatcactcaggatttgatgaggctaaaaagtacctggagtactgctcaacagtgatcctgcacgctatgaattcctttgggatttaagagcacatcttgaaaccagtaagatgaaagtcctgaagttttggcaaaggtcagtgatactgtccctagtgtctccacatcccattatgaagaggctttgtgagatgaggaagagagagcccaagccatagatgcagccatgcctggcgctactgccaaagctagtgcagtttccagagccatatgtccagcatatcttcctacctctactgaggactgaggacttttgatcattcagataagaagatacgacaccacaggaaagattttcttgaaaatttgaaataatcacacagtaaaataagtagggtaatacaatggagaaaaaaataaaacacgattaatcctt

SEQ ID NO: 65777 - DNA, 545 bp, Homo sapiens
tgatagagtgttctgaggctacaaggaaagaagaggtcggccacattttattttaatgcatttccattaaagagttcataaattgttcttttgagaagactcttaagagattaagtttaggaaatattgaaaatggaggaaaacctcccttttaaatatgatctcctgtgttccatgatccatttaacatcaaaccattcttcacttgtcttaacacttttcttaacagtgagacacgcatcaaagtgaattcaaaacaatgttaagagttttaagatacctaatatagctgaaagctatttccttgttatttaataaacgtctgattttaggcaaatcccattcttccttatttttggacatcaaattgtagttttacatttatttgtttagggttatccacaacatgaaacacacacaactcattaaaagtaaattatattttcagaagtccatcagctaatgccaggtaaactgtaccagcaactaagggcagtggacataatggtttggagaataatgtcatgttggaggacaaggttgac

SEQ ID NO: 65778 - DNA, 657 bp, Homo sapiens
tgattacttcaagttctaaaaaacttccaagcaatctcaaataatttgcatagttatattcactctaacatgatcaaactgtcacaaatcatgatgtattagagagtaaaagttaaaactgagcagggtctttttaacatatgttcaaacaaatatagctctattataaaactgttaaaacccatgtagttcattgtcagataaactaaaaataagaaaatatacaaacaaagaatggacagacagctgtgagcaaaggagaaaaagaaaattaatcatctcaaacactctatttacttctattaatagaatgattataacaaaaaaatataaaatttttctacccatcacacagattcttccacttaataaaatccatcacctacctattacataaacattaaaaaaaaacagctaaacgaagtaaagactaaaaattcaaattccctctaaccttatcacccctccctctttgtgcctccaaatgggtatttgaagtcattcttcataaaatgccacttctaactaggtgactgtatacatttttcatctaaccaggacacttttttaaagacctcaccgttaataattacaacagaacagcagaaataagccaaactatcctaagtgggaagtatgatcaccctgtattaaccc

SEQ ID NO: 65779 - DNA, 763 bp, Homo sapiens
aaatactgtggcccatgggtcttctggggtgctctttatccctcccccacccccacccccacccatctctggtggggctcatggtctcccgtgatgtcccagtgtctgcagatggttgagaaggtgtccaagggaggcccaggtgcaatcctccacaccacacctacaggtgaaggaggcagctgccttccaagcctggagaaaaccccaggggaggctccgattgcctggctcaggtctcagtttatccttgagccaatcactgcagccaggggcatctgtgctctgagcacatgggtttcagaccctcccctgagttaggaggaggagttccagtgtcctctcctgctcttagagagtgcaggtgtgggcctggggggccttcagcaacccagaccctgccatccagcctgggttcccggccccatctctctctctgaggtccagagaggccctcagggtggcaagagctgatccgctcacaccctgctagagtcagccagggaacctcactgggtcccacgctgggagcaggtcctacagctgttcttgtgtgtcctagtcccgcttgtggcagtgcctcaaatctgatctcctcaggctgaggtgggtccaaggtcctgttctcccgcctcgtcctccacagagtgggagctttccactgggctgaacatggccacgcacgtccctagcaccccggctcctcgtacctgacccctggggcgtgcttttgtgcttctggatccttctcgatgtagcagag

SEQ ID NO: 65780 - DNA, 543 bp, Homo sapiens
aagaaaaaacccagctggctaaaccggagccacaagctcattcttgaagctgagggagtgcgtccacccccatttgaatcatatggactgatggggagatccccaaagaaaacttaaagaactattagcagaagaagagaaaaacgaaagtacgtcagctaaaatagcaaaggtacatttcagttgatgaacacgcccagcatttctgaaaagcattttgccaagtacctatacaactcctatgcatctctgtaagcctcgctcaagaggccctcccccaaaaagcacccctatcatcacccttcaactttctccttgctctgaattccaatggcacacaatttggcagcctgtcttctctctcccagagaggtcttcagagatgaggaccatatatcaccctcctcttatactgtctgtccaaagcaatgtcagctggaacaaatcagaacacataatgtgcacctggaaaacaagcctctttctaaacagggaggtgaatttcaactcaaactgaggacaggctttccaatatgcagagct

SEQ ID NO: 65781 - DNA, 715 bp, Homo sapiens
ggatttgacgggaatggggctggggactgtcatgttgaagcccggtggagatgtgggacagggacctcgtttgttccagagcctgttccaaccctccctggcttttgtggcatgttttctatgccgtttgctgcaaggatgcgttgggcatggagtaacattcccgagaccgtcctgcagtactgcacgtgtgcgtgtctgtgctttggtttgtctgtgtgtctaccttgttttagagtaaaaaagtgaatctgaggccagatcatcagtctgcacctgcctctccagcagtccctgcatttcctcacctataaaatgggaaggggaacactccttatggagctggttcaagtattgagcgagagaccgggactacaagtgttttctaacacaggggcatgaattcagccgtggcggcggcagcttgttaggagagcgatcagcctaggggctgatggggtggccaggcgtcgggatggcatccagtcttctctgtctgcatgctggagtcatgtgagagatttataacagaatagggatgctgggttccatctcctgaaattctgtgtcattggtctgaggagtgtcctgggcatctggacacgggaaagctccccagcagggtctcctgtgcagccaaggttgaagctgcttcctagtccatttcttgctcttcagatggatttgtgcttctttaggtaggactcatcctagt

SEQ ID NO: 65782 - DNA, 661 bp, Homo sapiens
ggatttgacgggaatggggctggggactgtcatgttgaagcccggtggagatgtgggacagggacctcgtttgttccagagcctgttccaaccctccctggcttttgtggcatgttttctatgccgtttgctgcaaggatgcgttgggcatggagtaacattcccgagaccgtcctgcagtactgcacgtgtgcgtgtctgtgctttggtttgtctgtgtgtctaccttgttttagagtaaaaaagtgaatctgaggccagatcatcagtctgcacctgcctctccagcagtccctgcatttcctcacctatccgggactacaagtgttttctaacacaggggcatgaattcagccgtggcggcggcagcttgttaggagagcgatcagcctaggggctgatggggtggccaggcgtcgggatggcatccagtcttctctgtctgcatgctggagtcatgtgagagatttataacagaatagggatgctgggttccatctcctgaaattctgtgtcattggtctgaggagtgtcctgggcatctggacacgggaaagctccccagcagggtctcctgtgcagccaaggttgaagctgcttcctagtccatttcttgctcttcagatggatttgtgcttctttaggtaggactcatcctagt

SEQ ID NO: 65783 - DNA, 449 bp, Homo sapiens
ctgggtgaatattgtaattgcccacaaccccgaattcactttttccctccagtatgataaaacagattgattcccttttaaagcaataccctttcttctctcccatcttgtcggtatcagagataatggataggtgagaaaaaattaaagaagcttctggattcattgtaatggggacctaaccatcacactatgcagcagcaaatgggatggtctggaaagcagaccagaaccttgtctggtaactttgcttctaatgtctgtctgtgtttcctaaactgaggcctaactcttgactttttgacagtggtgctcataagaaagtttggggctgggcacggtcactcatgcctgtaatgtcagcactttgggaggctaatgcaggaggatcacttgagtctaggagttcaagaccagcttgaacaacatagggagaccctgtctgtatt

SEQ ID NO: 65784 - DNA, 129 bp, Homo sapiens
aactgtgagacctcttgggaccattggtaggctttagcttttactctgagtgacatagggagccattgcaggggttagtttttctgtgtttgagacagagccttgctgtgtcgcccaggctggagtgca

SEQ ID NO: 65785 - DNA, 343 bp, Homo sapiens
gcatgaaaaccgataatgtcagaatatgaaagaagtagtaggtagaactgtcctgaatattgtcagtcatagcagtgtaggatggagattaccagaggctgaaggatgggaacattgggcagacagatgttggtcaaaaggtacaaaatttcagttaggcaggaggaataaattcaagagatctatcttatatcaaggtagctatgactaatagcaatgtattgtatgcttgaaaattgccgagggtagattttaagtgttcttatcacaaaaaaaatgattaatacatatgttaattagtttaatttagccaatacacaatgtgtatatatatatatatatt

SEQ ID NO: 65786 - DNA, 1046 bp, Homo sapiens
atcttaacacaattgaggtgtgtggtcatagcaacactaccatgtcaggaatgtgtgccctctgagtacatttcactggtatgaatagttatcatctgtgcatgcttgctcatttattcaataagcacttgctgagcccttcctcctctggtagaagtattagagtctcagaaaaagacgctgctgcctgtctttataacatatgttggcaaatgttaatgcaaagtagaatgtgccatgtattttggatattctgtttttttttttatttttattttccctcccactgttctcatcaggtggatagtctgaaaatggagggatcagttttgacctcagggggcctgcgagtagctctaagcccagggcagaggtgcatatgcagtatgcagagaaagctaagcaggtggcatttacgctgaatcttgaattattggtaaatgtttaacaggtcagatgttctcttagaaagttatctgttccttaccatctgagggccaatcttagtggttctgccattgtttccgttttattgaaattccttattttcccctttgcccattttctaacatcatgttttaatatcagtgtactgaatggccatggtttgcagtaacttcttagaaatgcttggtaaatacacctggaatttttttttccttccaaaataatcccagaaaaaacatctacatgaactcaaagtgaatatttagaagctttttcaaaaaatttatagagccgagtacagtgggattatggcaacctataatcccagctacctgggaggcttaggcaggagggttgcttgagcccaggagttcaagacaagcctgggcaacatagcaagaccctgtctcaaaaaaaaagttacagataagagttcttatattttaagcatttaggttattagagatattttttcttattataaatagttttatgactgttatttaagactgtttactctttaaattttttttttctttatcgtgatatgtgcagctacactggtacgaacattaaccctcacctcagtattcacatgg

SEQ ID NO: 65787 - DNA, 302 bp, Homo sapiens
aaaagggagaaaggaggaaaagggattgaaaggaggaaaagggattgaaaggaggaaaaggaagaaaaatatgagattattaatgtgaagctcttagtactgtgcttggcatttattaagcattttataaaacgtattattattgccactgctattattattaacattaaaacatacctgttttctatgggatttctttaggacctgacttttaaagatcttaagctatttagattctggagtcaggctctactgtgttctttgctaactgtgtgtgcatgaaaaaataacttaatctttct

SEQ ID NO: 65788 - DNA, 772 bp, Homo sapiens
gctgggatggagacaactatttactatgtctgtgacccctcccttctgcctccctccccttcctctctttcctgtcctctatccttgctgcccctcccccaatatgtcccccaaacccaggggctcagtatttatttatttatataattgcagggtgactgggggcctctctcggcaactcgtagagagcctttggataatggcagggtggggaatgggcgaggagtctttgggaagagcaggggcctgaactttcaactcctttctggcctcttgtcccactgcttccaccatcaccttccaaatccagggctgcactagggcaaggtgaccaccctacttggtaaagacctgattggcgcagcccattctggtgtgggtgtctttcaccacccagaatgaccaggttggaatgggggtgggtgaagttggagggggtggcaagtacaaggcaagggtgcccaggaaccggcatccagaaatcagccctggagtagacctgcctttcctccatccttaccaagttagcctccctttcagttccgtctgacccctgtgttggtagccccttccttcccttcctgtaccccctccgtctcttctcgtggtagcgggttagtgtttcagtgttcttaactccaatctgcttgttcattgtacaatgtgcttcttttaaggccccatttttgtaacttgagtgtgtcattcatctgaacaacaaacatcaaaaaataaaaaattaaaaactgtacagagagaaatgataaaaaaa

SEQ ID NO: 65789 - DNA, 500 bp, Homo sapiens
atacaagagtatgattagccagtataaagtggtaaggaagggtaacaaaagtaaggaataaagaagaggactgatgaaggggaatgccaaatgatgagaagtgggtgttctgttgacaacccaaaaatgaccaggttggaatgggggtgggtgaagttggagggggtggcaagtacaaggcaagggtgcccaggaaccggcatccagaaatcagccctggagtagacctgcctttcctccatccttaccaagttagcctccctttcagttccgtctgacccctgtgttggtagccccttccttcccttcctgtaccccctccgtctcttctcgtggtagcgggttagtgtttcagtgttcttaactccaatctgcttgttcattgtacaatgtgcttcttttaaggccccatttttgtaacttgagtgtgtcattcatctgaacaacaaacatcaaaaaataaaaaattaaaaactgtacagagagaaatgataaaaaaa

SEQ ID NO: 65790 - DNA, 722 bp, Homo sapiens
gctgggatggagacaactatttactatgtctgtgacccctcccttctgcctccctccccttcctctctttcctgtcctctatccttgctgcccctcccccaatatgtcccccaaacccaggggctcagtatttatttatttatataattgcagggtgactgggggcctctctcggcaactcgtagagagcctttggataatggcagggtggggaatgggcgaggagtctttgggaagagcaggggcctgaactttcaactcctttctggcctcttgtcccactgcttccaccatcaccttccaaatccagggctgcactagggcaaggtgaccaccctacttggtaaagacctgattggcgcagcccattctggtgtgggtgtctttcaccacccagaatgaccaggttggaatgggggtgggtgaagttggagggggtggcaagtacaaggcaagggtgcccaggaaccggcatccagaaatcagccctggagtagacctgcctttcctccatccttaccaagttagcctccctttcagttccgtctcttctcgtggtagcgggttagtgtttcagtgttcttaactccaatctgcttgttcattgtacaatgtgcttcttttaaggccccatttttgtaacttgagtgtgtcattcatctgaacaacaaacatcaaaaaataaaaaattaaaaactgtacagagagaaatgataaaaaaa

SEQ ID NO: 65791 - DNA, 297 bp, Homo sapiens
tgtcatctgggcctgttggtgcggcacatggatctaggtgctgtcacgggctgtcagttgtggcacgtcctggcagggcctggctggcccagcctctgctcatgcagtattcatctgcagccagagccttttaagtccatcatctggatacatgcccatgaaccagggtaatcttggggagtcttgccaggagtctgcagtttctgggagcagtgaacggtgcccccgtccagtctctctacacccaatgccacggggatgcctggcatcagagtcatcagaaggggcatgtaacag

SEQ ID NO: 65792 - DNA, 2230 bp, Homo sapiens
cccgattcggactctgatcaccggctcaatggatgccctggcacaagatccctgccctggacccagagaagctcaatgtcttccggacagtacgggagatcacaggttacctgaacatccagtcctggccgccccacatgcacaacttcagtgttttttccaatttgacaaccattggaggcagaagcctctacaaccggggcttctcattgttgatcatgaagaacttgaatgtcacatctctgggcttccgatccctgaaggaaattagtgctgggcgtatctatataagtgccaataggcagctctgctaccaccactctttgaactggaccaaggtgcttcgggggcctacggaagagcgactagacatcaagcataatcggccgcgcagagactgcgtggcagagggcaaagtgtgtgacccactgtgctcctctgggggatgctggggcccaggccctggtcagtgcttgtcctgtcgaaattatagccgaggaggtgtctgtgtgacccactgcaactttctgaatggggagcctcgagaatttgcccatgaggccgaatgcttctcctgccacccggaatgccaacccatggagggcactgccacatgcaatggctcgggctctgatacttgtgctcaatgtgcccattttcgagatgggccccactgtgtgagcagctgcccccatggagtcctaggtgccaagggcccaatctacaagtacccagatgttcagaatgaatgtcggccctgccatgagaactgcacccaggggtgtaaaggaccagagcttcaagactgtttaggacaaacactggtgctgatcggcaaaacccatctgacaatggctttgacagtgatagcaggattggtagtgattttcatgatgctgggcggcacttttctctactggcgtgggcgccggattcagaataaaagggctatgaggcgatacttggaacggggtgagagcatagagcctctggaccccagtgagaaggctaacaaagtcttggccagaatcttcaaagagacagagctaaggaagcttaaagtgcttggctcgggtgtctttggaactgtgcacaaaggagtgtggatccctgagggtgaatcaatcaagattccagtctgcattaaagtcattgaggacaagagtggacggcagagttttcaagctgtgacagatcatatgctggccattggcagcctggaccatgcccacattgtaaggctgctgggactatgcccagggtcatctctgcagcttgtcactcaatatttgcctctgggttctctgctggatcatgtgagacaacaccggggggcactggggccacagctgctgctcaactggggagtacaaattgccaagggaatgtactaccttgaggaacatggtatggtgcatagaaacctggctgcccgaaacgtgctactcaagtcacccagtcaggttcaggtggcagattttggtgtggctgacctgctgcctcctgatgataagcagctgctatacagtgaggccaagactccaattaagtggatggcccttgagagtatccactttgggaaatacacacaccagagtgatgtctggagctatggtgtgacagtttgggagttgatgaccttcggggcagagccctatgcagggctacgattggctgaagtaccagacctgctagagaagggggagcggttggcacagccccagatctgcacaattgatgtctacatggtgatggtcaagtgttggatgattgatgagaacattcgcccaacctttaaagaactagccaatgagttcaccaggatggcccgagacccaccacggtatctggtcataaagagagagagtgggcctggaatagcccctgggccagagccccatggtctgacaaacaagaagctagaggaagtagagctggagccagaactagacctagacctagacttggaagcagaggaggacaacctggcaaccaccacactgggctccgccctcagcctaccagttggaacacttaatcggccacgtgggagccagagccttttaagtccatcatctggatacatgcccatgaaccagggtaatcttggggagtcttgccaggagtctgcagtttctgggagcagtgaacggtgcccccgtccagtctctctacacccaatgccacggggatgcctggcatcagagtcatcagaaggggcatgtaacag

SEQ ID NO: 65793 - DNA, 2442 bp, Homo sapiens
cccgattcggactctgatcaccggctcaatggatgccctggcacaagatccctgccctggacccagagaagctcaatgtcttccggacagtacgggagatcacaggttacctgaacatccagtcctggccgccccacatgcacaacttcagtgttttttccaatttgacaaccattggaggcagaagcctctacaaccggggcttctcattgttgatcatgaagaacttgaatgtcacatctctgggcttccgatccctgaaggaaattagtgctgggcgtatctatataagtgccaataggcagctctgctaccaccactctttgaactggaccaaggtgcttcgggggcctacggaagagcgactagacatcaagcataatcggccgcgcagagactgcgtggcagagggcaaagtgtgtgacccactgtgctcctctgggggatgctggggcccaggccctggtcagtgcttgtcctgtcgaaattatagccgaggaggtgtctgtgtgacccactgcaactttctgaatggggagcctcgagaatttgcccatgaggccgaatgcttctcctgccacccggaatgccaacccatggagggcactgccacatgcaatggctcggtatactagtagcaccaggatctccaagggagacagagaaggggcaatacttggagcatctggggaatgatatggctaaggatagcacagagaggccagataatgctagggcctgcagatagaagatcctgaatgtctgggttggtctttgctgggaggtatggaattgaccttgggatctgattcttcctgaccttctctcttccactcagggctctgatacttgtgctcaatgtgcccattttcgagatgggccccactgtgtgagcagctgcccccatggagtcctaggtgccaagggcccaatctacaagtacccagatgttcagaatgaatgtcggccctgccatgagaactgcacccaggggtgtaaaggaccagagcttcaagactgtttaggacaaacactggtgctgatcggcaaaacccatctgacaatggctttgacagtgatagcaggattggtagtgattttcatgatgctgggcggcacttttctctactggcgtgggcgccggattcagaataaaagggctatgaggcgatacttggaacggggtgagagcatagagcctctggaccccagtgagaaggctaacaaagtcttggccagaatcttcaaagagacagagctaaggaagcttaaagtgcttggctcgggtgtctttggaactgtgcacaaaggagtgtggatccctgagggtgaatcaatcaagattccagtctgcattaaagtcattgaggacaagagtggacggcagagttttcaagctgtgacagatcatatgctggccattggcagcctggaccatgcccacattgtaaggctgctgggactatgcccagggtcatctctgcagcttgtcactcaatatttgcctctgggttctctgctggatcatgtgagacaacaccggggggcactggggccacagctgctgctcaactggggagtacaaattgccaagggaatgtactaccttgaggaacatggtatggtgcatagaaacctggctgcccgaaacgtgctactcaagtcacccagtcaggttcaggtggcagattttggtgtggctgacctgctgcctcctgatgataagcagctgctatacagtgaggccaagactccaattaagtggatggcccttgagagtatccactttgggaaatacacacaccagagtgatgtctggagctatggtgtgacagtttgggagttgatgaccttcggggcagagccctatgcagggctacgattggctgaagtaccagacctgctagagaagggggagcggttggcacagccccagatctgcacaattgatgtctacatggtgatggtcaagtgttggatgattgatgagaacattcgcccaacctttaaagaactagccaatgagttcaccaggatggcccgagacccaccacggtatctggtcataaagagagagagtgggcctggaatagcccctgggccagagccccatggtctgacaaacaagaagctagaggaagtagagctggagccagaactagacctagacctagacttggaagcagaggaggacaacctggcaaccaccacactgggctccgccctcagcctaccagttggaacacttaatcggccacgtgggagccagagccttttaagtccatcatctggatacatgcccatgaaccagggtaatcttggggagtcttgccaggagtctgcagtttctgggagcagtgaacggtgcccccgtccagtctctctacacccaatgccacggggatgcctggcatcagagtcatcagaaggggcatgtaacag

SEQ ID NO: 65794 - DNA, 2178 bp, Homo sapiens
cccgattcggactctgatcaccggctcaatggatgccctggcacaagatccctgccctggacccagagaagctcaatgtcttccggacagtacgggagatcacaggttacctgaacatccagtcctggccgccccacatgcacaacttcagtgttttttccaatttgacaaccattggaggcagaagcctctacaaccggggcttctcattgttgatcatgaagaacttgaatgtcacatctctgggcttccgatccctgaaggaaattagtgctgggcgtatctatataagtgccaataggcagctctgctaccaccactctttgaactggaccaaggtgcttcgggggcctacggaagagcgactagacatcaagcataatcggccgcgcagagactgcgtggcagagggcaaagtgtgtgacccactgtgctcctctgggggatgctggggcccaggccctggtcagtgcttgtcctgtcgaaattatagccgaggaggtgtctgtgtgacccactgcaactttctgaatggggagcctcgagaatttgcccatgaggccgaatgcttctcctgccacccggaatgccaacccatggagggcactgccacatgcaatggctcgggctctgatacttgtgctcaatgtgcccattttcgagatgggccccactgtgtgagcagctgcccccatggagtcctaggtgccaagggcccaatctacaagtacccagatgttcagaatgaatgtcggccctgccatgagaactgcacccaggggtgtaaaggaccagagcttcaagactgtttaggacaaacactggtgctgatcggcaaaacccatctgacaatggctttgacagtgatagcaggattggtagtgattttcatgatgctgggcggcacttttctctactggcgtgggcgccggattcagaataaaagggctatgaggcgatacttggaacggggtgagagcatagagcctctggaccccagtgagaaggctaacaaagtcttggccagaatcttcaaagagacagagctaaggaagcttaaagtgcttggctcgggtgtctttggaactgtgcacaaaggagtgtggatccctgagggtgaatcaatcaagattccagtctgcattaaagtcattgaggacaagagtggacggcagagttttcaagctgtgacagatcatatgctggccattggcagcctggaccatgcccacattgtaaggctgctgggactatgcccagggtcatctctgcagcttgtcactcaatatttgcctctgggttctctgctggatcatgtgagacaacaccggggggcactggggccacagctgctgctcaactggggagtacaaattgccaagggaatgtactaccttgaggaacatggtatggtgcatagaaacctggctgcccgaaacgtgctactcaagtcacccagtcaggttcaggtggcagattttggtgtggctgacctgctgcctcctgatgataagcagctgctatacagtgaggccaagactccaattaagtggatggcccttgagagtatccactttgggaaatacacacaccagagtgatgtctggagctatggtgtgacagtttgggagttgatgaccttcggggcagagccctatgcagggctacgattggctgaagtaccagacctgctagagaagggggagcggttggcacagccccagatctgcacaattgatgtctacatggtgatggtcaagtgttggatgattgatgagaacattcgcccaacctttaaagaactagccaatgagttcaccaggatggcccgagacccaccacggtatctggtcataaagagagagagtgggcctggaatagcccctgggccagagccccatggtctgacaaacaagaagctagaggaagtagagctggagccagaactagacctagacctagacttggaagcagaggaggacaacctggcaaccaccacactgggctccgccctcagcctaccagttggaacacttaatcggccacgtgggagccagagccttttaagtccatcatctggatacatgcccatgaaccagggtaatcttggggagtcttgccaggtaagttctgttgctgagaggctgggttttaggatcagattgatacgagtagtat

SEQ ID NO: 65795 - DNA, 1616 bp, Homo sapiens
ctgtaagggtaaagggggatgatgtatgtgaaagtgctttggaaagcacagagcactgtataaaaggtactcaaggtggtaatagtactaccaactctccctagctgtccccttccccactttgtgctcctccatcaaagggaaaacccaacccctttgattcctgatctcatgagcacaaataacttcctcagttctcagggtctgtacctcaatatgcctataatccattccaggactaacggtgcttcctcttcctgccctttcagctgtgctgcttttggcattcacctatgaggagcgggttggagtgggacatgggaatggcctttcctgagtaactccttcccatttgctcctcagagcatagagcctctggaccccagtgagaaggctaacaaagtcttggccagaatcttcaaagagacagagctaaggaagcttaaagtgcttggctcgggtgtctttggaactgtgcacaaaggagtgtggatccctgagggtgaatcaatcaagattccagtctgcattaaagtcattgaggacaagagtggacggcagagttttcaagctgtgacagatcatatgctggccattggcagcctggaccatgcccacattgtaaggctgctgggactatgcccagggtcatctctgcagcttgtcactcaatatttgcctctgggttctctgctggatcatgtgagacaacaccggggggcactggggccacagctgctgctcaactggggagtacaaattgccaagggaatgtactaccttgaggaacatggtatggtgcatagaaacctggctgcccgaaacgtgctactcaagtcacccagtcaggttcaggtggcagattttggtgtggctgacctgctgcctcctgatgataagcagctgctatacagtgaggccaagactccaattaagtggatggcccttgagagtatccactttgggaaatacacacaccagagtgatgtctggagctatggtgtgacagtttgggagttgatgaccttcggggcagagccctatgcagggctacgattggctgaagtaccagacctgctagagaagggggagcggttggcacagccccagatctgcacaattgatgtctacatggtgatggtcaagtgttggatgattgatgagaacattcgcccaacctttaaagaactagccaatgagttcaccaggatggcccgagacccaccacggtatctggtcataaagagagagagtgggcctggaatagcccctgggccagagccccatggtctgacaaacaagaagctagaggaagtagagctggagccagaactagacctagacctagacttggaagcagaggaggacaacctggcaaccaccacactgggctccgccctcagcctaccagttggaacacttaatcggccacgtgggagccagagccttttaagtccatcatctggatacatgcccatgaaccagggtaatcttggggagtcttgccaggagtctgcagtttctgggagcagtgaacggtgcccccgtccagtctctctacacccaatgccacggggatgcctggcatcagagtcatcagaaggggcatgtaacag

SEQ ID NO: 65796 - DNA, 871 bp, Homo sapiens
atattactctagactgggttcaagggtttgatgagggttgatgagtcatcgaaacctgtagaaacctggctgcccgaaacgtgctactcaagtcacccagtcaggttcaggtggcagattttggtgtggctgacctgctgcctcctgatgataagcagctgctatacagtgaggccaagactccaattaagtggatggcccttgagagtatccactttgggaaatacacacaccagagtgatgtctggagctatggtgtgacagtttgggagttgatgaccttcggggcagagccctatgcagggctacgattggctgaagtaccagacctgctagagaagggggagcggttggcacagccccagatctgcacaattgatgtctacatggtgatggtcaagtgttggatgattgatgagaacattcgcccaacctttaaagaactagccaatgagttcaccaggatggcccgagacccaccacggtatctggtcataaagagagagagtgggcctggaatagcccctgggccagagccccatggtctgacaaacaagaagctagaggaagtagagctggagccagaactagacctagacctagacttggaagcagaggaggacaacctggcaaccaccacactgggctccgccctcagcctaccagttggaacacttaatcggccacgtgggagccagagccttttaagtccatcatctggatacatgcccatgaaccagggtaatcttggggagtcttgccaggagtctgcagtttctgggagcagtgaacggtgcccccgtccagtctctctacacccaatgccacggggatgcctggcatcagagtcatcagaaggggcatgtaacag

SEQ ID NO: 65797 - DNA, 1050 bp, Homo sapiens
tcctgcttcagcctccggagtagctgggattacaggcgcccgccacacctggataactgttacacttttagtagagatggggtttcaccatgttggccaggctggtctcaaactcctgacctcaggtgatccgcctgcctcagcttcccaaagtgctgggattacaggtgtgagccatcatgctcggcctgactgcagccattttctgacttccctctgtactcctcttatggctctattccttttttttttatggagtctcgctctgttgcccatactggagtgcagtagcgtgaccttggctcaccgtgacctccacgttccaggtttaagttcttctgtctcagcctcccagatagctgggactttaggcgtgcaccaccacgcccagctaatttttttttgtctttttagtagagatggggtttcactatgttggccaggctggtctcaaagtcccgacctcaggtgatccacccgccttggcctcccaaagtgctgggattataggtgtgagccaccgcgcccggccatggaatgtattctcttttatgtctctacctcctacatcttatctccaggttggatgattgatgagaacattcgcccaacctttaaagaactagccaatgagttcaccaggatggcccgagacccaccacggtatctggtcataaagagagagagtgggcctggaatagcccctgggccagagccccatggtctgacaaacaagaagctagaggaagtagagctggagccagaactagacctagacctagacttggaagcagaggaggacaacctggcaaccaccacactgggctccgccctcagcctaccagttggaacacttaatcggccacgtgggagccagagccttttaagtccatcatctggatacatgcccatgaaccagggtaatcttggggagtcttgccaggagtctgcagtttctgggagcagtgaacggtgcccccgtccagtctctctacacccaatgccacggggatgcctggcatcagagtcatcagaaggggcatgtaacag

SEQ ID NO: 65798 - DNA, 1517 bp, Homo sapiens
cccgattcggactctgatcaccggctcaatggatgccctggcacaagatccctgccctggacccagagaagctcaatgtcttccggacagtacgggagatcacaggttacctgaacatccagtcctggccgccccacatgcacaacttcagtgttttttccaatttgacaaccattggaggcagaagcctctacaaccggggcttctcattgttgatcatgaagaacttgaatgtcacatctctgggcttccgatccctgaaggaaattagtgctgggcgtatctatataagtgccaataggcagctctgctaccaccactctttgaactggaccaaggtgcttcgggggcctacggaagagcgactagacatcaagcataatcggccgcgcagagactgcgtggcagagggcaaagtgtgtgacccactgtgctcctctgggggatgctggggcccaggccctggtcagtgcttgtcctgtcgaaattatagccgaggaggtgtctgtgtgacccactgcaactttctgaatgggtacagtaaggggagccagtcaaggatgggtgggggtggggccctgcaatggaactgttcaggtggcatacaataaaagtctttagacagctttctgcatgtgccttggtgggattgaggtaggagacctgtggttgtgagatcggagcatgaaggtcaggacttggaagtgacccccccctccctttattccccactacagggagcctcgagaatttgcccatgaggccgaatgcttctcctgccacccggaatgccaacccatggagggcactgccacatgcaatggctcggtatactagtagcaccaggatctccaagggagacagagaaggggcaatacttggagcatctggggaatgatatggctaaggatagcacagagaggccagataatgctagggcctgcagatagaagatcctgaatgtctgggttggtctttgctgggaggtatggaattgaccttgggatctgattcttcctgaccttctctcttccactcagggctctgatacttgtgctcaatgtgcccattttcgagatgggccccactgtgtgagcagctgcccccatggagtcctaggtgccaagggcccaatctacaagtacccagatgttcagaatgaatgtcggccctgccatgagaactgcacccaggggtgtaaaggaccagagcttcaagactgtttaggacaaacactggtgctgatcggcaaaacccatctgacaatggctttgacagtgatagcaggattggtagtgattttcatgatgctgggcggcacttttctctactggcgtgggcgccggattcagaataaaagggctatgaggcgatacttggaacggggtgagagatttgatccctttcttcaaggaagtagtgtggtcccctagaagaacactggtcagagaaatgggaggcatgcattctagtcctgattttgccattaatttgccacatgactttgaagaagttac

SEQ ID NO: 65799 - DNA, 404 bp, Homo sapiens
gtcagtgatgggataataaggagagggggtcaggtggaagggtaggagcacagaactagagtgagggaagcagaaagaagagagaggctgtgattcaagaatcactcccagctggccgggcgcagtggctcacacctgtaatcccagcactgtgggaggccgaggtgggtggatcacctgaggtcgggagttcgagaccagcctgaccaatatggagaaaccctgtctctaccaaaaatttaaaattagcccggcgtggtggcgcatgcctgtaatcccagctacgcgggaggctgaggcaggagaatttcttgaacccaggaggcagaggttgcggtgagctgagattgcatcattgtactccagcctgggcaacaagagtgaaactctgtctcaaaaaaaaa

SEQ ID NO: 65800 - DNA, 333 bp, Homo sapiens
atgaccttatgccaactcctgccccaaacttcccagggagtgtggatccctgagggtgaatcaatcaagattccagtctgcattaaagtcattgaggacaagagtggacggcagagttttcaagctgtgacagatgtaagtgaaggaaattctgtatgccgctaggagagaggacaatattagatacaatcatgtagaagcagggtcctgtgcttctcagcagctactatgttagccagaatgttgggggtgggggggcctgggctggctgtgcacatgctgagtgtatgtgaacctgttggtttcctagataataccttttgtgtctcttag

SEQ ID NO: 65801 - DNA, 463 bp, Homo sapiens
tagtctctcctctcatcctgtctccttattctcagccggggcttctcattgttgatcatgaagaacttgaatgtcacatctctgggcttccgatccctgaaggaaattagtgctgggcgtatctatataagtgccaataggcagctctgctaccaccactctttgaactggaccaaggtgcttcgggggcctacggaagagcgactagacatcaagcataatcggccgcgcagagactgcggtgagggaaagggtctgctaggtggtgagaatagggagtcagggaggagagggctgaaaggactattctgccctagacgtgggagtagggttgagggatggaaccaaggagaagggggctgttaggctggaagcagtaacgaggaagaataatgaagagagggcttgctgggagtcctcagactcctctcctaacccaccccttcctttccagtggcagagg

SEQ ID NO: 65802 - DNA, 2644 bp, Homo sapiens
cccgattcggactctgatcaccggctcaatggatgccctggcacaagatccctgccctggacccagagaagctcaatgtcttccggacagtacgggagatcacaggttacctgaacatccagtcctggccgccccacatgcacaacttcagtgttttttccaatttgacaaccattggaggcagaagcctctacaaccggggcttctcattgttgatcatgaagaacttgaatgtcacatctctgggcttccgatccctgaaggaaattagtgctgggcgtatctatataagtgccaataggcagctctgctaccaccactctttgaactggaccaaggtgcttcgggggcctacggaagagcgactagacatcaagcataatcggccgcgcagagactgcgtggcagagggcaaagtgtgtgacccactgtgctcctctgggggatgctggggcccaggccctggtcagtgcttgtcctgtcgaaattatagccgaggaggtgtctgtgtgacccactgcaactttctgaatgggtacagtaaggggagccagtcaaggatgggtgggggtggggccctgcaatggaactgttcaggtggcatacaataaaagtctttagacagctttctgcatgtgccttggtgggattgaggtaggagacctgtggttgtgagatcggagcatgaaggtcaggacttggaagtgacccccccctccctttattccccactacagggagcctcgagaatttgcccatgaggccgaatgcttctcctgccacccggaatgccaacccatggagggcactgccacatgcaatggctcggtatactagtagcaccaggatctccaagggagacagagaaggggcaatacttggagcatctggggaatgatatggctaaggatagcacagagaggccagataatgctagggcctgcagatagaagatcctgaatgtctgggttggtctttgctgggaggtatggaattgaccttgggatctgattcttcctgaccttctctcttccactcagggctctgatacttgtgctcaatgtgcccattttcgagatgggccccactgtgtgagcagctgcccccatggagtcctaggtgccaagggcccaatctacaagtacccagatgttcagaatgaatgtcggccctgccatgagaactgcacccaggggtgtaaaggaccagagcttcaagactgtttaggacaaacactggtgctgatcggcaaaacccatctgacaatggctttgacagtgatagcaggattggtagtgattttcatgatgctgggcggcacttttctctactggcgtgggcgccggattcagaataaaagggctatgaggcgatacttggaacggggtgagagcatagagcctctggaccccagtgagaaggctaacaaagtcttggccagaatcttcaaagagacagagctaaggaagcttaaagtgcttggctcgggtgtctttggaactgtgcacaaaggagtgtggatccctgagggtgaatcaatcaagattccagtctgcattaaagtcattgaggacaagagtggacggcagagttttcaagctgtgacagatcatatgctggccattggcagcctggaccatgcccacattgtaaggctgctgggactatgcccagggtcatctctgcagcttgtcactcaatatttgcctctgggttctctgctggatcatgtgagacaacaccggggggcactggggccacagctgctgctcaactggggagtacaaattgccaagggaatgtactaccttgaggaacatggtatggtgcatagaaacctggctgcccgaaacgtgctactcaagtcacccagtcaggttcaggtggcagattttggtgtggctgacctgctgcctcctgatgataagcagctgctatacagtgaggccaagactccaattaagtggatggcccttgagagtatccactttgggaaatacacacaccagagtgatgtctggagctatggtgtgacagtttgggagttgatgaccttcggggcagagccctatgcagggctacgattggctgaagtaccagacctgctagagaagggggagcggttggcacagccccagatctgcacaattgatgtctacatggtgatggtcaagtgttggatgattgatgagaacattcgcccaacctttaaagaactagccaatgagttcaccaggatggcccgagacccaccacggtatctggtcataaagagagagagtgggcctggaatagcccctgggccagagccccatggtctgacaaacaagaagctagaggaagtagagctggagccagaactagacctagacctagacttggaagcagaggaggacaacctggcaaccaccacactgggctccgccctcagcctaccagttggaacacttaatcggccacgtgggagccagagccttttaagtccatcatctggatacatgcccatgaaccagggtaatcttggggagtcttgccaggagtctgcagtttctgggagcagtgaacggtgcccccgtccagtctctctacacccaatgccacggggatgcctggcatcagagtcatcagaaggggcatgtaacag

SEQ ID NO: 65803 - DNA, 843 bp, Homo sapiens
cccgattcggactctgatcaccggctcaatggatgccctggcacaagatccctgccctggacccagagaagctcaatgtcttccggacagtacgggagatcacaggttacctgaacatccagtcctggccgccccacatgcacaacttcagtgttttttccaatttgacaaccattggaggcagaagcctctacaaccggggcttctcattgttgatcatgaagaacttgaatgtcacatctctgggcttccgatccctgaaggaaattagtgctgggcgtatctatataagtgccaataggcagctctgctaccaccactctttgaactggaccaaggtgcttcgggggcctacggaagagcgactagacatcaagcataatcggccgcgcagagactgcggtgagggaaagggtctgctaggtggtgagaatagggagtcagggaggagagggctgaaaggactattctgccctagacgtgggagtagggttgagggatggaaccaaggagaagggggctgttaggctggaagcagtaacgaggaagaataatgaagagagggcttgctgggagtcctcagactcctctcctaacccaccccttcctttccagtggcagagggcaaagtgtgtgacccactgtgctcctctgggggatgctggggcccaggccctggtcagtgcttgtcctgtcgaaattatagccgaggaggtgtctgtgtgacccactgcaactttctgaatgggtacagtaaggggagccagtcaaggatgggtgggggtggggccctgcaatggaactgttcaggtggcatacaataaaagtctttagacagctttc

SEQ ID NO: 65804 - DNA, 630 bp, Homo sapiens
cccgattcggactctgatcaccggctcaatggatgccctggcacaagatccctgccctggacccagagaagctcaatgtcttccggacagtacgggagatcacaggttacctgaacatccagtcctggccgccccacatgcacaacttcagtgttttttccaatttgacaaccattggaggcagaagcctctacaaccggggcttctcattgttgatcatgaagaacttgaatgtcacatctctgggcttccgatccctgaaggaaattagtgctgggcgtatctatataagtgccaataggcagctctgctaccaccactctttgaactggaccaaggtgcttcgggggcctacggaagagcgactagacatcaagcataatcggccgcgcagagactgcgtggcagagggcaaagtgtgtgacccactgtgctcctctgggggatgctggggcccaggccctggtcagtgcttgtcctgtcgaaattatagccgaggaggtgtctgtgtgacccactgcaactttctgaatgggtacagtaaggggagccagtcaaggatgggtgggggtggggccctgcaatggaactgttcaggtggcatacaataaaagtctttagacagctttc

SEQ ID NO: 65805 - DNA, 828 bp, Homo sapiens
cccgattcggactctgatcaccggctcaatggatgccctggcacaagatccctgccctggacccagagaagctcaatgtcttccggacagtacgggagatcacaggttacctgaacatccagtcctggccgccccacatgcacaacttcagtgttttttccaatttgacaaccattggaggcagaagcctctacaaccggggcttctcattgttgatcatgaagaacttgaatgtcacatctctgggcttccgatccctgaaggaaattagtgctgggcgtatctatataagtgccaataggcagctctgctaccaccactctttgaactggaccaaggtgcttcgggggcctacggaagagcgactagacatcaagcataatcggccgcgcagagactgcgtggcagagggcaaagtgtgtgacccactgtgctcctctgggggatgctggggcccaggccctggtcagtgcttgtcctgtcgaaattatagccgaggaggtgtctgtgtgacccactgcaactttctgaatggggagcctcgagaatttgcccatgaggccgaatgcttctcctgccacccggaatgccaacccatggagggcactgccacatgcaatggctcggtatactagtagcaccaggatctccaagggagacagagaaggggcaatacttggagcatctggggaatgatatggctaaggatagcacagagaggccagataatgctagggcctgcagatagaagatcctgaatgtctgggttggtctttgctgggaggtatggaattgaccttgggcgtacggggaggggatactctaaag

SEQ ID NO: 65806 - DNA, 637 bp, Homo sapiens
tgacagccgccaacacagagccctggagaggtggggagctgctgaagggcgggagaagttgcggcgtggcgataggaggccaggatggagacagcagttcgaggaatgcccttggaatgccctcctaggccggagcggctcaatgcctacgagcgcgaagtgatggtgaacatgctgaactcactgtcgcggaaccagcagctgccgcggatcacgccccgatgcgggtgcgtggacccgctgcccggccgcctgcccttccatggttacgaaagtgcttgctcgggccgccactactgtctgcgcgggatggactactacgccagcggggcgccctgcaccgaccgccgcctgcggccttggtgccgggagcaaccgactatgtgtacctccctacgagcaccggcccggaatgcagtgtgctgttacaactcccccgccgtcatactacccatatccgaaccttagatgggacacaagtcacttcaagaagtctggtggtccccagagaaacaactatgttatccatcctgagtttgtgtctgagacctatcccgactatcgttgctggtagagcctgggcttgctgtgccaagggggcagagcaataaataaactcttcaaccccaaaaaaaaa

SEQ ID NO: 65807 - DNA, 706 bp, Homo sapiens
atcacaatgggcagtgcccatcctggagggggcatcagtgtggggtgggagcaggaaggctgttggggaaggaagctgagagatcctctgcaggaggggattatagcagctaagggcacctgccaggctggaggtgtggcctgtctaggggaagggtggtcactgatgtccagcaggagcccttgacaggtagagcccaccacggcatctccaagaccacaccatgttcctgttctcccgtaagaccaggacccctatcagtacctacagtgactcctacagggctcccacctccatcaaggaggtctataaggacccacccctgtgtgcctgggaagccaacaagtttctgactccgggtctgactcataccatggagcgacatgtggatcccgaagccctgcagaagatggccaaatgtgctgtacaggactacacttatagggggtccatatcaggccacccctacttgcctgagaagtactggctttctcaagaggaagcagacaaatgcagcccaaactacctgggcagtgactggtacaacacatggaggatggaaccttacaacagcagctgctgcaacaagtataccacctaccttcctcggctgcctaaggtatctgttgcacccagcacagacgtctggggactgggacacgcataccccaccacctcccaaactacagtgactgatatttcacca

SEQ ID NO: 65808 - DNA, 501 bp, Homo sapiens
tgacagccgccaacacagagccctggagaggtggggagctgctgaagggcgggagaagttgcggcgtggcgataggtctgggtgttctgggaggacccctaaaagggagcagctctgccaggtcagagcttgaggtagcatgtgtgccgcttccaggaggccaggatggagacagcagttcgaggaatgcccttggaatgccctcctaggccggagcggctcaatgcctacgagcgcgaagtgatggtgaacatgctgaactcactgtcgcggaaccagcagctgccgcggatcacgccccgatgcgggtgcgtggacccgctgcccggccgcctgcccttccatggttacgaaagtgcttgctcgggccgccactactgtctgcgcgggatggactactacgccagcggggcgccctgcaccgaccgccgcctgcggccttggtgccgggagcaaccgactaaggttcgcagggctccgcccgcctcagccgggctccac

SEQ ID NO: 65809 - DNA, 299 bp, Homo sapiens
aaaggcccaacccctccatgctcgcggcttcctccttctccagatgtgtacctccctacgagcaccggcccggaatgcagtgtgctgttacaactcccccgccgtcatactacccatatccgaaccttagatgggacacaagtcacttcaagaagtctggtggtccccagagaaacaactatgttatccatcctgagtttgtgtctgagacctatcccgactatcgttgctggtagagcctgggcttgctgtgccaagggggcagagcaataaataaactcttcaaccccaaaaaaaaa

SEQ ID NO: 65810 - DNA, 718 bp, Homo sapiens
tgacagccgccaacacagagccctggagaggtggggagctgctgaagggcgggagaagttgcggcgtggcgataggtctgggtgttctgggaggacccctaaaagggagcagctctgccaggtcagagcttgaggtagcatgtgtgccgcttccaggaggccaggatggagacagcagttcgaggaatgcccttggaatgccctcctaggccggagcggctcaatgcctacgagcgcgaagtgatggtgaacatgctgaactcactgtcgcggaaccagcagctgccgcggatcacgccccgatgcgggtgcgtggacccgctgcccggccgcctgcccttccatggttacgaaagtgcttgctcgggccgccactactgtctgcgcgggatggactactacgccagcggggcgccctgcaccgaccgccgcctgcggccttggtgccgggagcaaccgactatgtgtacctccctacgagcaccggcccggaatgcagtgtgctgttacaactcccccgccgtcatactacccatatccgaaccttagatgggacacaagtcacttcaagaagtctggtggtccccagagaaacaactatgttatccatcctgagtttgtgtctgagacctatcccgactatcgttgctggtagagcctgggcttgctgtgccaagggggcagagcaataaataaactcttcaaccccaaaaaaaaa

SEQ ID NO: 65811 - DNA, 1181 bp, Homo sapiens
atcacaatgggcagtgcccatcctggagggggcatcagtgtggggtgggagcaggaaggctgttggggaaggaagctgagagatcctctgcaggaggggattatagcagctaagggcacctgccaggctggaggtgtggcctgtctaggggaagggtggtcactgatgtccagcaggagcccttgacaggtagagcccaccacggcatctccaagaccacaccatgttcctgttctcccgtaagaccaggacccctatcagtacctacagtgactcctacagggctcccacctccatcaaggaggtctataaggacccacccctgtgtgcctgggaagccaacaagtttctgactccgggtctgactcataccatggagcgacatgtggatcccgaagccctgcagaagatggccaaatgtgctgtacaggactacacttatagggggtccatatcaggccacccctacttgcctgagaagtactggctttctcaagaggaagcagacaaatgcagcccaaactacctgggcagtgactggtacaacacatggaggatggaaccttacaacagcagctgctgcaacaagtataccacctaccttcctcggctgcctaaggaggccaggatggagacagcagttcgaggaatgcccttggaatgccctcctaggccggagcggctcaatgcctacgagcgcgaagtgatggtgaacatgctgaactcactgtcgcggaaccagcagctgccgcggatcacgccccgatgcgggtgcgtggacccgctgcccggccgcctgcccttccatggttacgaaagtgcttgctcgggccgccactactgtctgcgcgggatggactactacgccagcggggcgccctgcaccgaccgccgcctgcggccttggtgccgggagcaaccgactatgtgtacctccctacgagcaccggcccggaatgcagtgtgctgttacaactcccccgccgtcatactacccatatccgaaccttagatgggacacaagtcacttcaagaagtctggtggtccccagagaaacaactatgttatccatcctgagtttgtgtctgagacctatcccgactatcgttgctggtagagcctgggcttgctgtgccaagggggcagagcaataaataaactcttcaaccccaaaaaaaaa

SEQ ID NO: 65812 - DNA, 564 bp, Homo sapiens
tgacagccgccaacacagagccctggagaggtggggagctgctgaagggcgggagaagttgcggcgtggcgataggtctgggtgttctgggaggacccctaaaagggagcagctctgccaggtcagagcttgaggtagcatgtgtgccgcttccaggaggccaggatggagacagcagttcgaggaatgcccttggaatgccctcctaggccggagcggctcaatgcctacgagcgcgaagtgatggtgaacatgctgaactcactgtcgcggaaccagcagctgccgcggatcacgccccgatgcggatgtgtacctccctacgagcaccggcccggaatgcagtgtgctgttacaactcccccgccgtcatactacccatatccgaaccttagatgggacacaagtcacttcaagaagtctggtggtccccagagaaacaactatgttatccatcctgagtttgtgtctgagacctatcccgactatcgttgctggtagagcctgggcttgctgtgccaagggggcagagcaataaataaactcttcaaccccaaaaaaaaa

SEQ ID NO: 65813 - DNA, 941 bp, Homo sapiens
acccggcctgccccgcggcaagatggcggcctgaacgcagctggcagcggcggaaagcttagatcagcctttccacagctgttagcagcatctgccccaatttcagctgaagattcaggtgccccagggactggaagaaattacagtgcctacttggaaagaagaagagatagcgacttgccccagtccaaccccagagcgggagctgtggctaaaggaagtggaggggccgtgggatgcggagagccgagggctaactcccggacagcggaacagagagagctgccgacaaacagacgcaggcggaggagccgtcacctcccagaatgactagtgccgcccctgctaagaaaccctaccgtaaggcaccaccagagcatcgggagctgcgtttggaaattcctggatcccggcttgagcaggaggaacccctgactgatgcagaaaggatgaagtgagtatctgctacctgagatactgccctgcctcaactctgtccctcttagctccaggctagactgttggtacagttggactttcccttggattaggtagaaataaaggttgggatgggttgttttagggactctgggaggagtgttgatgttgtggatattttttctggaaaatgggattttattgttccatgggcttcaagagagcgtagaatcaggaggcgaatggctctgagggccctgctcttcttgctaaggagcccttccccagctcctggctcctgtaccagctgccacccttacagccctttagccacatgaggcctctggagaggagggcagtgctgggctggatttccaagagatgaataatggagaagcctgattgtgcagtggggaaactggagctgggggcttggtggccagctgacatgggctgtaaccagagacaggctgggagccatatccctacccccaattctttat

SEQ ID NO: 65814 - DNA, 3731 bp, Homo sapiens
  misc_feature (3731)..(3731): n is a, c, g, or t
acccggcctgccccgcggcaagatggcggcctgaacgcagctggcagcggcggaaagcttagatcagcctttccacagctgttagcagcatctgccccaatttcagctgaagattcaggtgccccagggactggaagaaattacagtgcctacttggaaagaagaagagatagcgacttgccccagtccaaccccagagcgggagctgtggctaaaggaagtggaggggccgtgggatgcggagagccgagggctaactcccggacagcggaacagagagagctgccgacaaacagacgcaggcggaggagccgtcacctcccagaatgactagtgccgcccctgctaagaaaccctaccgtaaggcaccaccagagcatcgggagctgcgtttggaaattcctggatcccggcttgagcaggaggaacccctgactgatgcagaaaggatgaagctcttacaggaggagaatgaagagcttcgccggcgcctggcctccgccaccagacgcactgaggccctggaacgtgagctggaaattgggcaggactgcctggagctggagctgggccagagccgcgaggagctggacaaatttaaggataagttccgcaggctgcagaacagctacacggcttcccagcggaccaaccaggagttggaggacaagctgcacacactgatcaagaaggctgagatggataggaagacgctggactgggagattgtggagctgaccaacaagctgctggatgccaagaacaccatcaacaagctggaagagctcaatgagcggtaccggctggactgcaacctggctgtacagctcctcaagtgcaacaagtcccacttccgaaaccacaagtttgccgatgtgagtagaactcaccccctccctgcccacatagaccattccggccactgtaggactcctctaactccagtttctgcacctctctctgtcctcctcttcccactttgccctcctcttgcctccatgtcacctctcaagccagtcaactctgccactggttggtgtcccgtgtactgtccagggcccatcactagttctggggggccagccctgttggtttctgtaacagagacagagagagaagatcctgggcaggaaggagagggtagtcagagctatctgcccaaagagtactaagagaggattaggcccatctgatcatgttaccccaaggggtaaactctagaccccacagcttcaggcccaaggtttatgtggcctgcagaagtagaagaagtagaggtatttcttttttttttttttttgagacggagtcttgctctgtcacctaggctggagtgcagtggcacaatctcggctcactgcaacctccgcctcccggcttcaagcaattctcctgcttcagcctcccaagtagctggaattataggcgcccaccaccacgccgggctaatttttttgtctttttagtagagatggggtttcatcgtgttagccaggatggtctcgatctcctgacctcgtgatccacccgcctcggcctcccaaagtgctgggattacaggcatgagccactgtgcccggcccagaagtagaggtatttctaaggctactggtctatgcagattctccaaacttaagtatggtttgggcagaagctgggagatagaagtttgagaacatgctggctgcagcagcagatccgggtttaaatcttggccaagttaaccaaagctttgagttgtcttcccctctccaggcctatgtgtctgtgaagtgagggtatacacactggcatgctgtaagaacaggagatagcagagtgctgagtacacagaggtacttaaaggtgggagccattactttcgccatgagtcaagttatctttggctgcgatcattgatgtctctctttcctgctcttttacctcagctgccctgtgagctacaggacatggttcggaaacatttgcacagtggtcaagaggccgccagcccaggtcctgctcccagcctagccccaggggctgtggtgcctacctcagtcattgcccgagtgttagagaagccggagtctctactgctcaattcagcccagtcaggcagcgccgggcgccccttggctgaggatgtctttgtgcatgtggacatgagtgagggtgtcccaggtgatccagccagtcccccggcccctggcagccccaccccacaacccaatggggagtgccactctctgggtactgccaggggctccccggaggaagagctgcccctgccagcctttgagaagctgaacccctacccaaccccgtctccaccacacccactgtatcctggccgcagggtaatagagttctctgaggataaggttcggatcccccgcaacagccccctgcccaactgcacttacgctacccgccaggccatttccctgagcctggtagaggaggggagtgagcgggcccgccccagcccagtgcccagcacccctgcctcagcccaggcctcaccccaccaccagcccagcccagcacccctaacactcagtgccccagctagctctgccagctctgaagaggacctgctggtcagctggcagcgggcatttgtggaccgtactccaccacctgctgctgtggcccagcgcacagcctttggacgcgatgccctccctgagctgcagcgccattttgcccatagccccgctgacagagatgaggtggtccaggcaccttctgcccgacccgaagagagtgagcttttgctacccacagaacctgactctggctttcccagggaggaagaagagctgaacctgcctatcagtcctgaggaagagcgccagagcctgctgcccattaacaggggcacagaggaggggccaggcacttcccacaccgagggcagggcctggccactccccagctccagtcgcccccagcgcagccccaagaggatgggggttcaccacctgcaccgcaaggacagcctgacccaggcccaggagcagggcaacctgctcaactagggcccctgctggccttcctgccattgctgcaccaggactgcaaggagtccccacaccttggcagctcagggtccccagtccaagcccttgacctctcctctatccagacccgcacagctgtttcctgtgtggatggggtcaggttgtgggccatgccaggcctgtcagctgcgttgactgactgcagcagcttgcctcatggttttccctttttcttagaatatttattcttcagaggtaacatgcagttgggtctcaagacctttcctccaatcagcccaacccagcccagactgggcttttctggggagctgaggagtttatcagtattcatcttccatcctttcatagtcacaagttttgttattttgtttttttttgggggtgatggtgtaattgttaacctcatttccgtttcctacctgtttgcttccccccccagtcctccgcatgagctgttgccctccaggggcctggcacagctggccttggggacgagggagaggactgattcagggccccctcagctgtctcctccctccctctggaaaggagggtggggctcaggggcctcaagctgggctctgtgtgaggcctggcccccactcccaaccttggctctagactgttactcttaagctttgagaaattttcacattgatgactattttaaaatcaaataaaactattttactggtaaaaaaaaan

SEQ ID NO: 65815 - DNA, 3783 bp, Homo sapiens
  misc_feature (3783)..(3783): n is a, c, g, or t
acccggcctgccccgcggcaagatggcggcctgaacgcagctggcagcggcggaaagcttagatcagcctttccacagctgttagcagcatctgccccaatttcagctgaagattcaggtgccccagggactggaagaaattacagtgcctacttggaaagaagaagagatagcgacttgccccagtccaaccccagagcgggagctgtggctaaaggaagtggaggggccgtgggatgcggagagccgagggctaactcccggacagcggaacagagagagctgccgacaaacagacgtccagagtccttctggccacatctctgagcctgcctccttcttgcttctcagcaggcggaggagccgtcacctcccagaatgactagtgccgcccctgctaagaaaccctaccgtaaggcaccaccagagcatcgggagctgcgtttggaaattcctggatcccggcttgagcaggaggaacccctgactgatgcagaaaggatgaagctcttacaggaggagaatgaagagcttcgccggcgcctggcctccgccaccagacgcactgaggccctggaacgtgagctggaaattgggcaggactgcctggagctggagctgggccagagccgcgaggagctggacaaatttaaggataagttccgcaggctgcagaacagctacacggcttcccagcggaccaaccaggagttggaggacaagctgcacacactgatcaagaaggctgagatggataggaagacgctggactgggagattgtggagctgaccaacaagctgctggatgccaagaacaccatcaacaagctggaagagctcaatgagcggtaccggctggactgcaacctggctgtacagctcctcaagtgcaacaagtcccacttccgaaaccacaagtttgccgatgtgagtagaactcaccccctccctgcccacatagaccattccggccactgtaggactcctctaactccagtttctgcacctctctctgtcctcctcttcccactttgccctcctcttgcctccatgtcacctctcaagccagtcaactctgccactggttggtgtcccgtgtactgtccagggcccatcactagttctggggggccagccctgttggtttctgtaacagagacagagagagaagatcctgggcaggaaggagagggtagtcagagctatctgcccaaagagtactaagagaggattaggcccatctgatcatgttaccccaaggggtaaactctagaccccacagcttcaggcccaaggtttatgtggcctgcagaagtagaagaagtagaggtatttcttttttttttttttttgagacggagtcttgctctgtcacctaggctggagtgcagtggcacaatctcggctcactgcaacctccgcctcccggcttcaagcaattctcctgcttcagcctcccaagtagctggaattataggcgcccaccaccacgccgggctaatttttttgtctttttagtagagatggggtttcatcgtgttagccaggatggtctcgatctcctgacctcgtgatccacccgcctcggcctcccaaagtgctgggattacaggcatgagccactgtgcccggcccagaagtagaggtatttctaaggctactggtctatgcagattctccaaacttaagtatggtttgggcagaagctgggagatagaagtttgagaacatgctggctgcagcagcagatccgggtttaaatcttggccaagttaaccaaagctttgagttgtcttcccctctccaggcctatgtgtctgtgaagtgagggtatacacactggcatgctgtaagaacaggagatagcagagtgctgagtacacagaggtacttaaaggtgggagccattactttcgccatgagtcaagttatctttggctgcgatcattgatgtctctctttcctgctcttttacctcagctgccctgtgagctacaggacatggttcggaaacatttgcacagtggtcaagaggccgccagcccaggtcctgctcccagcctagccccaggggctgtggtgcctacctcagtcattgcccgagtgttagagaagccggagtctctactgctcaattcagcccagtcaggcagcgccgggcgccccttggctgaggatgtctttgtgcatgtggacatgagtgagggtgtcccaggtgatccagccagtcccccggcccctggcagccccaccccacaacccaatggggagtgccactctctgggtactgccaggggctccccggaggaagagctgcccctgccagcctttgagaagctgaacccctacccaaccccgtctccaccacacccactgtatcctggccgcagggtaatagagttctctgaggataaggttcggatcccccgcaacagccccctgcccaactgcacttacgctacccgccaggccatttccctgagcctggtagaggaggggagtgagcgggcccgccccagcccagtgcccagcacccctgcctcagcccaggcctcaccccaccaccagcccagcccagcacccctaacactcagtgccccagctagctctgccagctctgaagaggacctgctggtcagctggcagcgggcatttgtggaccgtactccaccacctgctgctgtggcccagcgcacagcctttggacgcgatgccctccctgagctgcagcgccattttgcccatagccccgctgacagagatgaggtggtccaggcaccttctgcccgacccgaagagagtgagcttttgctacccacagaacctgactctggctttcccagggaggaagaagagctgaacctgcctatcagtcctgaggaagagcgccagagcctgctgcccattaacaggggcacagaggaggggccaggcacttcccacaccgagggcagggcctggccactccccagctccagtcgcccccagcgcagccccaagaggatgggggttcaccacctgcaccgcaaggacagcctgacccaggcccaggagcagggcaacctgctcaactagggcccctgctggccttcctgccattgctgcaccaggactgcaaggagtccccacaccttggcagctcagggtccccagtccaagcccttgacctctcctctatccagacccgcacagctgtttcctgtgtggatggggtcaggttgtgggccatgccaggcctgtcagctgcgttgactgactgcagcagcttgcctcatggttttccctttttcttagaatatttattcttcagaggtaacatgcagttgggtctcaagacctttcctccaatcagcccaacccagcccagactgggcttttctggggagctgaggagtttatcagtattcatcttccatcctttcatagtcacaagttttgttattttgtttttttttgggggtgatggtgtaattgttaacctcatttccgtttcctacctgtttgcttccccccccagtcctccgcatgagctgttgccctccaggggcctggcacagctggccttggggacgagggagaggactgattcagggccccctcagctgtctcctccctccctctggaaaggagggtggggctcaggggcctcaagctgggctctgtgtgaggcctggcccccactcccaaccttggctctagactgttactcttaagctttgagaaattttcacattgatgactattttaaaatcaaataaaactattttactggtaaaaaaaaan

SEQ ID NO: 65816 - DNA, 3761 bp, Homo sapiens
  misc_feature (3761)..(3761): n is a, c, g, or t
acccggcctgccccgcggcaagatggcggcctgaacgcagctggcagcggcggaaagcttagatcagcctttccacagctgttagcagcatctgccccaatttcagctgaagattcaggtgccccagggactggaagaaattacagtgcctacttggaaagaagaagagatagcgacttgccccagtccaaccccagagcgggagctgtggctaaaggaagtggaggggccgtgggatgcggagagccgagggctaactcccggacagcggaacagagagagctgccgacaaacagacgcaggcggaggagccgtcacctcccagaatgactagtgccgcccctgctaagaaaccctaccgtaaggcaccaccagagcatcgggagctgcgtttggaaattcctggatcccggcttgagcaggaggaacccctgactgatgcagaaaggatgaagctcttacaggaggagaatgaagagcttcgccggcgcctggcctccgccaccagacgcactgaggccctggaacgtgagctggaaattgggcaggactgcctggagctggagctgggccagagccgcgaggagctggacaaatttaaggataagttccgcaggctgcagaacagctacacggcttcccagcggaccaaccaggagttggaggacaagctgcacacactggcctctcttagccacagctggatttttgcaatcaagaaggctgagatggataggaagacgctggactgggagattgtggagctgaccaacaagctgctggatgccaagaacaccatcaacaagctggaagagctcaatgagcggtaccggctggactgcaacctggctgtacagctcctcaagtgcaacaagtcccacttccgaaaccacaagtttgccgatgtgagtagaactcaccccctccctgcccacatagaccattccggccactgtaggactcctctaactccagtttctgcacctctctctgtcctcctcttcccactttgccctcctcttgcctccatgtcacctctcaagccagtcaactctgccactggttggtgtcccgtgtactgtccagggcccatcactagttctggggggccagccctgttggtttctgtaacagagacagagagagaagatcctgggcaggaaggagagggtagtcagagctatctgcccaaagagtactaagagaggattaggcccatctgatcatgttaccccaaggggtaaactctagaccccacagcttcaggcccaaggtttatgtggcctgcagaagtagaagaagtagaggtatttcttttttttttttttttgagacggagtcttgctctgtcacctaggctggagtgcagtggcacaatctcggctcactgcaacctccgcctcccggcttcaagcaattctcctgcttcagcctcccaagtagctggaattataggcgcccaccaccacgccgggctaatttttttgtctttttagtagagatggggtttcatcgtgttagccaggatggtctcgatctcctgacctcgtgatccacccgcctcggcctcccaaagtgctgggattacaggcatgagccactgtgcccggcccagaagtagaggtatttctaaggctactggtctatgcagattctccaaacttaagtatggtttgggcagaagctgggagatagaagtttgagaacatgctggctgcagcagcagatccgggtttaaatcttggccaagttaaccaaagctttgagttgtcttcccctctccaggcctatgtgtctgtgaagtgagggtatacacactggcatgctgtaagaacaggagatagcagagtgctgagtacacagaggtacttaaaggtgggagccattactttcgccatgagtcaagttatctttggctgcgatcattgatgtctctctttcctgctcttttacctcagctgccctgtgagctacaggacatggttcggaaacatttgcacagtggtcaagaggccgccagcccaggtcctgctcccagcctagccccaggggctgtggtgcctacctcagtcattgcccgagtgttagagaagccggagtctctactgctcaattcagcccagtcaggcagcgccgggcgccccttggctgaggatgtctttgtgcatgtggacatgagtgagggtgtcccaggtgatccagccagtcccccggcccctggcagccccaccccacaacccaatggggagtgccactctctgggtactgccaggggctccccggaggaagagctgcccctgccagcctttgagaagctgaacccctacccaaccccgtctccaccacacccactgtatcctggccgcagggtaatagagttctctgaggataaggttcggatcccccgcaacagccccctgcccaactgcacttacgctacccgccaggccatttccctgagcctggtagaggaggggagtgagcgggcccgccccagcccagtgcccagcacccctgcctcagcccaggcctcaccccaccaccagcccagcccagcacccctaacactcagtgccccagctagctctgccagctctgaagaggacctgctggtcagctggcagcgggcatttgtggaccgtactccaccacctgctgctgtggcccagcgcacagcctttggacgcgatgccctccctgagctgcagcgccattttgcccatagccccgctgacagagatgaggtggtccaggcaccttctgcccgacccgaagagagtgagcttttgctacccacagaacctgactctggctttcccagggaggaagaagagctgaacctgcctatcagtcctgaggaagagcgccagagcctgctgcccattaacaggggcacagaggaggggccaggcacttcccacaccgagggcagggcctggccactccccagctccagtcgcccccagcgcagccccaagaggatgggggttcaccacctgcaccgcaaggacagcctgacccaggcccaggagcagggcaacctgctcaactagggcccctgctggccttcctgccattgctgcaccaggactgcaaggagtccccacaccttggcagctcagggtccccagtccaagcccttgacctctcctctatccagacccgcacagctgtttcctgtgtggatggggtcaggttgtgggccatgccaggcctgtcagctgcgttgactgactgcagcagcttgcctcatggttttccctttttcttagaatatttattcttcagaggtaacatgcagttgggtctcaagacctttcctccaatcagcccaacccagcccagactgggcttttctggggagctgaggagtttatcagtattcatcttccatcctttcatagtcacaagttttgttattttgtttttttttgggggtgatggtgtaattgttaacctcatttccgtttcctacctgtttgcttccccccccagtcctccgcatgagctgttgccctccaggggcctggcacagctggccttggggacgagggagaggactgattcagggccccctcagctgtctcctccctccctctggaaaggagggtggggctcaggggcctcaagctgggctctgtgtgaggcctggcccccactcccaaccttggctctagactgttactcttaagctttgagaaattttcacattgatgactattttaaaatcaaataaaactattttactggtaaaaaaaaan

SEQ ID NO: 65817 - DNA, 2708 bp, Homo sapiens
  misc_feature (2708)..(2708): n is a, c, g, or t
acccggcctgccccgcggcaagatggcggcctgaacgcagctggcagcggcggaaagcttagatcagcctttccacagctgttagcagcatctgccccaatttcagctgaagattcaggtgccccagggactggaagaaattacagtgcctacttggaaagaagaagagatagcgacttgccccagtccaaccccagagcgggagctgtggctaaaggaagtggaggggccgtgggatgcggagagccgagggctaactcccggacagcggaacagagagagctgccgacaaacagacgcaggcggaggagccgtcacctcccagaatgactagtgccgcccctgctaagaaaccctaccgtaaggcaccaccagagcatcgggagctgcgtttggaaattcctggatcccggcttgagcaggaggaacccctgactgatgcagaaaggatgaagctcttacaggaggagaatgaagagcttcgccggcgcctggcctccgccaccagacgcactgaggccctggaacgtgagctggaaattgggcaggactgcctggagctggagctgggccagagccgcgaggagctggacaaatttaaggataagttccgcaggctgcagaacagctacacggcttcccagcggaccaaccaggagttggaggacaagctgcacacactggcctctcttagccacagctggatttttgcaatcaagaaggctgagatggataggaagacgctggactgggagattgtggagctgaccaacaagctgctggatgccaagaacaccatcaacaagctggaagagctcaatgagcggtaccggctggactgcaacctggctgtacagctcctcaagtgcaacaagtcccacttccgaaaccacaagtttgccgatctgccctgtgagctacaggacatggttcggaaacatttgcacagtggtcaagaggccgccagcccaggtcctgctcccagcctagccccaggggctgtggtgcctacctcagtcattgcccgagtgttagagaagccggagtctctactgctcaattcagcccagtcaggcagcgccgggcgccccttggctgaggatgtctttgtgcatgtggacatgagtgagggtgtcccaggtgatccagccagtcccccggcccctggcagccccaccccacaacccaatggggagtgccactctctgggtactgccaggggctccccggaggaagagctgcccctgccagcctttgagaagctgaacccctacccaaccccgtctccaccacacccactgtatcctggccgcagggtaatagagttctctgaggataaggttcggatcccccgcaacagccccctgcccaactgcacttacgctacccgccaggccatttccctgagcctggtagaggaggggagtgagcgggcccgccccagcccagtgcccagcacccctgcctcagcccaggcctcaccccaccaccagcccagcccagcacccctaacactcagtgccccagctagctctgccagctctgaagaggacctgctggtcagctggcagcgggcatttgtggaccgtactccaccacctgctgctgtggcccagcgcacagcctttggacgcgatgccctccctgagctgcagcgccattttgcccatagccccgctgacagagatgaggtggtccaggcaccttctgcccgacccgaagagagtgagcttttgctacccacagaacctgactctggctttcccagggaggaagaagagctgaacctgcctatcagtcctgaggaagagcgccagagcctgctgcccattaacaggggcacagaggaggggccaggcacttcccacaccgagggcagggcctggccactccccagctccagtcgcccccagcgcagccccaagaggatgggggttcaccacctgcaccgcaaggacagcctgacccaggcccaggagcagggcaacctgctcaactagggcccctgctggccttcctgccattgctgcaccaggactgcaaggagtccccacaccttggcagctcagggtccccagtccaagcccttgacctctcctctatccagacccgcacagctgtttcctgtgtggatggggtcaggttgtgggccatgccaggcctgtcagctgcgttgactgactgcagcagcttgcctcatggttttccctttttcttagaatatttattcttcagaggtaacatgcagttgggtctcaagacctttcctccaatcagcccaacccagcccagactgggcttttctggggagctgaggagtttatcagtattcatcttccatcctttcatagtcacaagttttgttattttgtttttttttgggggtgatggtgtaattgttaacctcatttccgtttcctacctgtttgcttccccccccagtcctccgcatgagctgttgccctccaggggcctggcacagctggccttggggacgagggagaggactgattcagggccccctcagctgtctcctccctccctctggaaaggagggtggggctcaggggcctcaagctgggctctgtgtgaggcctggcccccactcccaaccttggctctagactgttactcttaagctttgagaaattttcacattgatgactattttaaaatcaaataaaactattttactggtaaaaaaaaan

SEQ ID NO: 65818 - DNA, 3243 bp, Homo sapiens
  misc_feature (3243)..(3243): n is a, c, g, or t
acccggcctgccccgcggcaagatggcggcctgaacgcagctggcagcggcggaaagcttagatcagcctttccacagctgttagcagcatctgccccaatttcagctgaagattcaggtgccccagggactggaagaaattacagtgcctacttggaaagaagaagagatagcgacttgccccagtccaaccccagagcgggagctgtggctaaaggaagtggaggggccgtgggatgcggagagccgagggctaactcccggacagcggaacagagagagctgccgacaaacagacgcaggcggaggagccgtcacctcccagaatgactagtgccgcccctgctaagaaaccctaccgtaaggcaccaccagagcatcgggagctgcgtttggaaattcctggatcccggcttgagcaggaggaacccctgactgatgcagaaaggatgaagctcttacaggaggagaatgaagagcttcgccggcgcctggcctccgccaccagacgcactgaggccctggaacgtgagctggaaattgggcaggactgcctggagctggagctgggccagagccgcgaggagctggacaaatttaaggataagttccgcaggctgcagaacagctacacggcttcccagcggaccaaccaggagttggaggacaagctgcacacactgatcaagaaggctgagatggataggaagacgctggactgggagattgtggagctgaccaacaagctgctggatgccaagaacaccatcaacaagctggaagagctcaatgagcggtaccggctggactgcaacctggctgtacagctcctcaagtgcaacaagtcccacttccgaaaccacaagtttgccgatgtgagtagaactcaccccctccctgcccacatagaccattccggccactgtaggactcctctaactccagtttctgcacctctctctgtcctcctcttcccactttgccctcctcttgcctccatgtcacctctcaagccagtcaactctgccactggttggtgtcccgtgtactgtccagggcccatcactagttctggggggccagccctgttggtttctgtaacagagacagagagagaagatcctgggcaggaaggagagggtagtcagagctatctgcccaaagagtactaagagaggattaggcccatctgatcatgttaccccaaggggtaaactctagaccccacagcttcaggcccaaggtttatgtggcctgcagaagtagaagaagtagaggtatttcttttttttttttttttgagacggagtcttgctctgtcacctaggctggagtgcagtggcacaatctcggctcactgcaacctccgcctcccggcttcaagcaattctcctgcttcagcctcccaagtagctggaattataggcgcccaccaccacgccgggctaatttttttgtctttttagtagagatggggtttcatcgtgttagccaggatggtctcgatctcctgacctcgtgatccacccgcctcggcctcccaaagtgctgggattacaggcatgagccactgtgcccggcccagaagtagaggtatttctaaggctactggtctatgcagattctccaaacttaagtatggtttgggcagaagctgggagatagaagtttgagaacatgctggctgcagcagcagatccgggtttaaatcttggccaagttaaccaaagctttgagttgtcttcccctctccaggcctatgtgtctgtgaagtgagggtatacacactggcatgctgtaagaacaggagatagcagagtgctgagtacacagaggtacttaaaggtgggagccattactttcgccatgagtcaagttatctttggctgcgatcattgatgtctctctttcctgctcttttacctcagctgccctgtgagctacaggacatggttcggaaacatttgcacagtggtcaagaggccgccagcccaggtcctgctcccagcctagccccaggggctgtggtgcctacctcagtcattgccactcagtgccccagctagctctgccagctctgaagaggacctgctggtcagctggcagcgggcatttgtggaccgtactccaccacctgctgctgtggcccagcgcacagcctttggacgcgatgccctccctgagctgcagcgccattttgcccatagccccgctgacagagatgaggtggtccaggcaccttctgcccgacccgaagagagtgagcttttgctacccacagaacctgactctggctttcccagggaggaagaagagctgaacctgcctatcagtcctgaggaagagcgccagagcctgctgcccattaacaggggcacagaggaggggccaggcacttcccacaccgagggcagggcctggccactccccagctccagtcgcccccagcgcagccccaagaggatgggggttcaccacctgcaccgcaaggacagcctgacccaggcccaggagcagggcaacctgctcaactagggcccctgctggccttcctgccattgctgcaccaggactgcaaggagtccccacaccttggcagctcagggtccccagtccaagcccttgacctctcctctatccagacccgcacagctgtttcctgtgtggatggggtcaggttgtgggccatgccaggcctgtcagctgcgttgactgactgcagcagcttgcctcatggttttccctttttcttagaatatttattcttcagaggtaacatgcagttgggtctcaagacctttcctccaatcagcccaacccagcccagactgggcttttctggggagctgaggagtttatcagtattcatcttccatcctttcatagtcacaagttttgttattttgtttttttttgggggtgatggtgtaattgttaacctcatttccgtttcctacctgtttgcttccccccccagtcctccgcatgagctgttgccctccaggggcctggcacagctggccttggggacgagggagaggactgattcagggccccctcagctgtctcctccctccctctggaaaggagggtggggctcaggggcctcaagctgggctctgtgtgaggcctggcccccactcccaaccttggctctagactgttactcttaagctttgagaaattttcacattgatgactattttaaaatcaaataaaactattttactggtaaaaaaaaan

SEQ ID NO: 65819 - DNA, 2917 bp, Homo sapiens
  misc_feature (2917)..(2917): n is a, c, g, or t
acccggcctgccccgcggcaagatggcggcctgaacgcagctggcagcggcggaaagcttagatcagcctttccacagctgttagcagcatctgccccaatttcagctgaagattcaggtgccccagggactggaagaaattacagtgcctacttggaaagaagaagagatagcgacttgccccagtccaaccccagagcgggagctgtggctaaaggaagtggaggggccgtgggatgcggagagccgagggctaactcccggacagcggaacagagagagctgccgacaaacagacgcaggcggaggagccgtcacctcccagaatgactagtgccgcccctgctaagaaaccctaccgtaaggcaccaccagagcatcgggagctgcgtttggaaattcctggatcccggcttgagcaggaggaacccctgactgatgcagaaaggatgaagctcttacaggaggagaatgaagagcttcgccggcgcctggcctccgccaccagacgcactgaggccctggaacgtgagctggaaattgggcaggactgcctggagctggagctgggccagagccgcgaggagctggacaaatttaaggataagttccgcaggctgcagaacagctacacggcttcccagcggaccaaccaggagttggaggacaagctgcacacactgatcaagaaggctgagatggataggaagacgctggactgggagattgtggagctgaccaacaagctgctggatgccaagaacaccatcaacaagctggaagagctcaatgagcggtaccggctggactgcaacctggctgtacagctcctcaagtgcaacaagtcccacttccgaaaccacaagtttgccgatgtgagtagaactcaccccctccctgcccacatagaccattccggccactgtaggactcctctaactccagtttctgcacctctctctgtcctcctcttcccactttgccctcctcttgcctccatgtcacctctcaagccagtcaactctgccactggttggtgtcccgtgtactgtccagggcccatcactagttctggggggccagccctgttggtttctgtaacagagacagagagagaagatcctgggcaggaaggagagggtagtcagagctatctgcccaaagagtactaagagaggattaggcccatctgatcatgttaccccaaggggtaaactctagaccccacagcttcaggcccaaggtttatgtggcctgcagaagtagaagaagtagaggtatttcttttttttttttttttgagacggagtcttgctctgtcacctaggctggagtgcagtggcacaatctcggctcactgcaacctccgcctcccggcttcaagcaattctcctgcttcagcctcccaagtagctggaattataggcgcccaccaccacgccgggctaatttttttgtctttttagtagagatggggtttcatcgtgttagccaggatggtctcgatctcctgacctcgtgatccacccgcctcggcctcccaaagtgctgggattacaggcatgagccactgtgcccggcccagaagtagaggtatttctaaggctactggtctatgcagattctccaaacttaagtatggtttgggcagaagctgggagatagaagtttgagaacatgctggctgcagcagcagatccgggtttaaatcttggccaagttaaccaaagctttgagttgtcttcccctctccaggcctatgtgtctgtgaagtgagggtatacacactggcatgctgtaagaacaggagatagcagagtgctgagtacacagaggtacttaaaggtgggagccattactttcgccatgagtcaagttatctttggctgcgatcattgatgtctctctttcctgctcttttacctcagctgccctgtgagctacaggacatggttcggaaacatttgcacagtggtcaagaggccgccagcccaggtcctgctcccagcctagccccaggggctgtggtgcctacctcagtcattgcccgagtgttagagaagccggagtctctactgctcaattcagcccagtcaggcagcgccgggcgccccttggctgaggatgtctttgtgcatgtggacatgagtgagggtgtcccaggtgatccagccagtcccccggcccctggcagccccaccccacaacccaatggggagtgccactctctgggtactgccaggggctccccggaggaagagctgcccctgccagcctttgagaagctgaacccctacccaaccccgtctccaccacacccactgtatcctggccgcagggtaatagagttctctgaggataaggttcggatcccccgcaacagccccctgcccaactgcacttacgctacccgccaggccatttccctgagcctggtagaggaggggagtgagcgggcccgccccagcccagtgcccagcacccctgcctcagcccaggcctcaccccaccaccagcccagcccagcacccctaactattcatcttccatcctttcatagtcacaagttttgttattttgtttttttttgggggtgatggtgtaattgttaacctcatttccgtttcctacctgtttgcttccccccccagtcctccgcatgagctgttgccctccaggggcctggcacagctggccttggggacgagggagaggactgattcagggccccctcagctgtctcctccctccctctggaaaggagggtggggctcaggggcctcaagctgggctctgtgtgaggcctggcccccactcccaaccttggctctagactgttactcttaagctttgagaaattttcacattgatgactattttaaaatcaaataaaactattttactggtaaaaaaaaan

SEQ ID NO: 65820 - DNA, 338 bp, Homo sapiens
tgggctgggttaacctcaagtctgtgcttcagatcaagaaggctgagatggataggaagacgctggactgggagattgtggagctgaccaacaagctgctggatgccaagaacaccatcaacaagctggaagagctcaatgtatgtgcgcttcactactcgggccttcctcacctggggctagctttgtcctggctcggccctgcttccttggagagggctgggctgggctctgaaacaggtctgtgtctgtaggagcggtaccggctggactgcaacctggctgtacagctcctcaagtgcaacaagtcccacttccgaaaccacaagtttgccgat

SEQ ID NO: 65821 - DNA, 2730 bp, Homo sapiens
  misc_feature (2730)..(2730): n is a, c, g, or t
acccggcctgccccgcggcaagatggcggcctgaacgcagctggcagcggcggaaagcttagatcagcctttccacagctgttagcagcatctgccccaatttcagctgaagattcaggtgccccagggactggaagaaattacagtgcctacttggaaagaagaagagatagcgacttgccccagtccaaccccagagcgggagctgtggctaaaggaagtggaggggccgtgggatgcggagagccgagggctaactcccggacagcggaacagagagagctgccgacaaacagacgtccagagtccttctggccacatctctgagcctgcctccttcttgcttctcagcaggcggaggagccgtcacctcccagaatgactagtgccgcccctgctaagaaaccctaccgtaaggcaccaccagagcatcgggagctgcgtttggaaattcctggatcccggcttgagcaggaggaacccctgactgatgcagaaaggatgaagctcttacaggaggagaatgaagagcttcgccggcgcctggcctccgccaccagacgcactgaggccctggaacgtgagctggaaattgggcaggactgcctggagctggagctgggccagagccgcgaggagctggacaaatttaaggataagttccgcaggctgcagaacagctacacggcttcccagcggaccaaccaggagttggaggacaagctgcacacactgatcaagaaggctgagatggataggaagacgctggactgggagattgtggagctgaccaacaagctgctggatgccaagaacaccatcaacaagctggaagagctcaatgagcggtaccggctggactgcaacctggctgtacagctcctcaagtgcaacaagtcccacttccgaaaccacaagtttgccgatctgccctgtgagctacaggacatggttcggaaacatttgcacagtggtcaagaggccgccagcccaggtcctgctcccagcctagccccaggggctgtggtgcctacctcagtcattgcccgagtgttagagaagccggagtctctactgctcaattcagcccagtcaggcagcgccgggcgccccttggctgaggatgtctttgtgcatgtggacatgagtgagggtgtcccaggtgatccagccagtcccccggcccctggcagccccaccccacaacccaatggggagtgccactctctgggtactgccaggggctccccggaggaagagctgcccctgccagcctttgagaagctgaacccctacccaaccccgtctccaccacacccactgtatcctggccgcagggtaatagagttctctgaggataaggttcggatcccccgcaacagccccctgcccaactgcacttacgctacccgccaggccatttccctgagcctggtagaggaggggagtgagcgggcccgccccagcccagtgcccagcacccctgcctcagcccaggcctcaccccaccaccagcccagcccagcacccctaacactcagtgccccagctagctctgccagctctgaagaggacctgctggtcagctggcagcgggcatttgtggaccgtactccaccacctgctgctgtggcccagcgcacagcctttggacgcgatgccctccctgagctgcagcgccattttgcccatagccccgctgacagagatgaggtggtccaggcaccttctgcccgacccgaagagagtgagcttttgctacccacagaacctgactctggctttcccagggaggaagaagagctgaacctgcctatcagtcctgaggaagagcgccagagcctgctgcccattaacaggggcacagaggaggggccaggcacttcccacaccgagggcagggcctggccactccccagctccagtcgcccccagcgcagccccaagaggatgggggttcaccacctgcaccgcaaggacagcctgacccaggcccaggagcagggcaacctgctcaactagggcccctgctggccttcctgccattgctgcaccaggactgcaaggagtccccacaccttggcagctcagggtccccagtccaagcccttgacctctcctctatccagacccgcacagctgtttcctgtgtggatggggtcaggttgtgggccatgccaggcctgtcagctgcgttgactgactgcagcagcttgcctcatggttttccctttttcttagaatatttattcttcagaggtaacatgcagttgggtctcaagacctttcctccaatcagcccaacccagcccagactgggcttttctggggagctgaggagtttatcagtattcatcttccatcctttcatagtcacaagttttgttattttgtttttttttgggggtgatggtgtaattgttaacctcatttccgtttcctacctgtttgcttccccccccagtcctccgcatgagctgttgccctccaggggcctggcacagctggccttggggacgagggagaggactgattcagggccccctcagctgtctcctccctccctctggaaaggagggtggggctcaggggcctcaagctgggctctgtgtgaggcctggcccccactcccaaccttggctctagactgttactcttaagctttgagaaattttcacattgatgactattttaaaatcaaataaaactattttactggtaaaaaaaaan

SEQ ID NO: 65822 - DNA, 4050 bp, Homo sapiens
  misc_feature (4050)..(4050): n is a, c, g, or t
aatggagtaaggtccgaggcggagaggaaaaaaaggagctggggcggaccggggccctagggtccagtggcagccctaggggagggggatttgggggcggggcagccagaagtaggtgttgtgcaggccctggagaagcagagtcacaagttggaggaaaatttcttagccgcgaataaagaagcctggagcgtgggatagaggcccgactgtatctggccggccagaggggaaagggatctttctagtagagtgggatagtgaggaagagagatctggaggatgccgggcagatctgctaaggagggaactaaagccagtcaaatgaccctcttctaggcttagatcagcctttccacagctgttagcagcatctgccccaatttcagctgaagattcaggtgccccagggactggaagaaattacagtgcctacttggaaagaagaagagatagcgacttgccccagtccaaccccagagcgggagctgtggctaaaggaagtggaggggccgtgggatgcggagagccgagggctaactcccggacagcggaacagagagagctgccgacaaacagacgcaggcggaggagccgtcacctcccagaatgactagtgccgcccctgctaagaaaccctaccgtaaggcaccaccagagcatcgggagctgcgtttggaaattcctggatcccggcttgagcaggaggtcagcaagactggtatcacagcctgaccggcagaggaacccctgactgatgcagaaaggatgaagctcttacaggaggagaatgaagagcttcgccggcgcctggcctccgccaccagacgcactgaggccctggaacgtgagctggaaattgggcaggactgcctggagctggagctgggccagagccgcgaggagctggacaaatttaaggataagttccgcaggctgcagaacagctacacggcttcccagcggaccaaccaggagttggaggacaagctgcacacactgatcaagaaggctgagatggataggaagacgctggactgggagattgtggagctgaccaacaagctgctggatgccaagaacaccatcaacaagctggaagagctcaatgagcggtaccggctggactgcaacctggctgtacagctcctcaagtgcaacaagtcccacttccgaaaccacaagtttgccgatgtgagtagaactcaccccctccctgcccacatagaccattccggccactgtaggactcctctaactccagtttctgcacctctctctgtcctcctcttcccactttgccctcctcttgcctccatgtcacctctcaagccagtcaactctgccactggttggtgtcccgtgtactgtccagggcccatcactagttctggggggccagccctgttggtttctgtaacagagacagagagagaagatcctgggcaggaaggagagggtagtcagagctatctgcccaaagagtactaagagaggattaggcccatctgatcatgttaccccaaggggtaaactctagaccccacagcttcaggcccaaggtttatgtggcctgcagaagtagaagaagtagaggtatttcttttttttttttttttgagacggagtcttgctctgtcacctaggctggagtgcagtggcacaatctcggctcactgcaacctccgcctcccggcttcaagcaattctcctgcttcagcctcccaagtagctggaattataggcgcccaccaccacgccgggctaatttttttgtctttttagtagagatggggtttcatcgtgttagccaggatggtctcgatctcctgacctcgtgatccacccgcctcggcctcccaaagtgctgggattacaggcatgagccactgtgcccggcccagaagtagaggtatttctaaggctactggtctatgcagattctccaaacttaagtatggtttgggcagaagctgggagatagaagtttgagaacatgctggctgcagcagcagatccgggtttaaatcttggccaagttaaccaaagctttgagttgtcttcccctctccaggcctatgtgtctgtgaagtgagggtatacacactggcatgctgtaagaacaggagatagcagagtgctgagtacacagaggtacttaaaggtgggagccattactttcgccatgagtcaagttatctttggctgcgatcattgatgtctctctttcctgctcttttacctcagctgccctgtgagctacaggacatggttcggaaacatttgcacagtggtcaagaggccgccagcccaggtcctgctcccagcctagccccaggggctgtggtgcctacctcagtcattgcccgagtgttagagaagccggagtctctactgctcaattcagcccagtcaggcagcgccgggcgccccttggctgaggatgtctttgtgcatgtggacatgagtgagggtgtcccaggtgatccagccagtcccccggcccctggcagccccaccccacaacccaatggggagtgccactctctgggtactgccaggggctccccggaggaagagctgcccctgccagcctttgagaagctgaacccctacccaaccccgtctccaccacacccactgtatcctggccgcagggtaatagagttctctgaggataaggttcggatcccccgcaacagccccctgcccaactgcacttacgctacccgccaggccatttccctgagcctggtagaggaggggagtgagcgggcccgccccagcccagtgcccagcacccctgcctcagcccaggcctcaccccaccaccagcccagcccagcacccctaacactcagtgccccagctagctctgccagctctgaagaggacctgctggtcagctggcagcgggcatttgtggaccgtactccaccacctgctgctgtggcccagcgcacagcctttggacgcgatgccctccctgagctgcagcgccattttgcccatagccccgctgacagagatgaggtggtccaggcaccttctgcccgacccgaagagagtgagcttttgctacccacagaacctgactctggctttcccagggaggaagaagagctgaacctgcctatcagtcctgaggaagagcgccagagcctgctgcccattaacaggggcacagaggaggggccaggcacttcccacaccgagggcagggcctggccactccccagctccagtcgcccccagcgcagccccaagaggatgggggttcaccacctgcaccgcaaggacagcctgacccaggcccaggagcagggcaacctgctcaactagggcccctgctggccttcctgccattgctgcaccaggactgcaaggagtccccacaccttggcagctcagggtccccagtccaagcccttgacctctcctctatccagacccgcacagctgtttcctgtgtggatggggtcaggttgtgggccatgccaggcctgtcagctgcgttgactgactgcagcagcttgcctcatggttttccctttttcttagaatatttattcttcagaggtaacatgcagttgggtctcaagacctttcctccaatcagcccaacccagcccagactgggcttttctggggagctgaggagtttatcagtattcatcttccatcctttcatagtcacaagttttgttattttgtttttttttgggggtgatggtgtaattgttaacctcatttccgtttcctacctgtttgcttccccccccagtcctccgcatgagctgttgccctccaggggcctggcacagctggccttggggacgagggagaggactgattcagggccccctcagctgtctcctccctccctctggaaaggagggtggggctcaggggcctcaagctgggctctgtgtgaggcctggcccccactcccaaccttggctctagactgttactcttaagctttgagaaattttcacattgatgactattttaaaatcaaataaaactattttactggtaaaaaaaaan

SEQ ID NO: 65823 - DNA, 3480 bp, Homo sapiens
  misc_feature (3480)..(3480): n is a, c, g, or t
ccctccaacccaggctgtgttcccagggccagcaggcctatgaaatatgctgccttagactcagactaagactccaggagtttccctgtcctgtttgcctgtcctcatgtcatcccttccttcctgagcccactctggagctccagggcatgcccttctatctctcatacccctctgcccttgatcccacaacaccctgccaggctcttacaggaggagaatgaagagcttcgccggcgcctggcctccgccaccagacgcactgaggccctggaacgtgagctggaaattgggcaggactgcctggagctggagctgggccagagccgcgaggagctggacaaatttaaggataagttccgcaggctgcagaacagctacacggcttcccagcggaccaaccaggagttggaggacaagctgcacacactgatcaagaaggctgagatggataggaagacgctggactgggagattgtggagctgaccaacaagctgctggatgccaagaacaccatcaacaagctggaagagctcaatgagcggtaccggctggactgcaacctggctgtacagctcctcaagtgcaacaagtcccacttccgaaaccacaagtttgccgatgtgagtagaactcaccccctccctgcccacatagaccattccggccactgtaggactcctctaactccagtttctgcacctctctctgtcctcctcttcccactttgccctcctcttgcctccatgtcacctctcaagccagtcaactctgccactggttggtgtcccgtgtactgtccagggcccatcactagttctggggggccagccctgttggtttctgtaacagagacagagagagaagatcctgggcaggaaggagagggtagtcagagctatctgcccaaagagtactaagagaggattaggcccatctgatcatgttaccccaaggggtaaactctagaccccacagcttcaggcccaaggtttatgtggcctgcagaagtagaagaagtagaggtatttcttttttttttttttttgagacggagtcttgctctgtcacctaggctggagtgcagtggcacaatctcggctcactgcaacctccgcctcccggcttcaagcaattctcctgcttcagcctcccaagtagctggaattataggcgcccaccaccacgccgggctaatttttttgtctttttagtagagatggggtttcatcgtgttagccaggatggtctcgatctcctgacctcgtgatccacccgcctcggcctcccaaagtgctgggattacaggcatgagccactgtgcccggcccagaagtagaggtatttctaaggctactggtctatgcagattctccaaacttaagtatggtttgggcagaagctgggagatagaagtttgagaacatgctggctgcagcagcagatccgggtttaaatcttggccaagttaaccaaagctttgagttgtcttcccctctccaggcctatgtgtctgtgaagtgagggtatacacactggcatgctgtaagaacaggagatagcagagtgctgagtacacagaggtacttaaaggtgggagccattactttcgccatgagtcaagttatctttggctgcgatcattgatgtctctctttcctgctcttttacctcagctgccctgtgagctacaggacatggttcggaaacatttgcacagtggtcaagaggccgccagcccaggtcctgctcccagcctagccccaggggctgtggtgcctacctcagtcattgcccgagtgttagagaagccggagtctctactgctcaattcagcccagtcaggcagcgccgggcgccccttggctgaggatgtctttgtgcatgtggacatgagtgagggtgtcccaggtgatccagccagtcccccggcccctggcagccccaccccacaacccaatggggagtgccactctctgggtactgccaggggctccccggaggaagagctgcccctgccagcctttgagaagctgaacccctacccaaccccgtctccaccacacccactgtatcctggccgcagggtaatagagttctctgaggataaggttcggatcccccgcaacagccccctgcccaactgcacttacgctacccgccaggccatttccctgagcctggtagaggaggggagtgagcgggcccgccccagcccagtgcccagcacccctgcctcagcccaggcctcaccccaccaccagcccagcccagcacccctaacactcagtgccccagctagctctgccagctctgaagaggacctgctggtcagctggcagcgggcatttgtggaccgtactccaccacctgctgctgtggcccagcgcacagcctttggacgcgatgccctccctgagctgcagcgccattttgcccatagccccgctgacagagatgaggtggtccaggcaccttctgcccgacccgaagagagtgagcttttgctacccacagaacctgactctggctttcccagggaggaagaagagctgaacctgcctatcagtcctgaggaagagcgccagagcctgctgcccattaacaggggcacagaggaggggccaggcacttcccacaccgagggcagggcctggccactccccagctccagtcgcccccagcgcagccccaagaggatgggggttcaccacctgcaccgcaaggacagcctgacccaggcccaggagcagggcaacctgctcaactagggcccctgctggccttcctgccattgctgcaccaggactgcaaggagtccccacaccttggcagctcagggtccccagtccaagcccttgacctctcctctatccagacccgcacagctgtttcctgtgtggatggggtcaggttgtgggccatgccaggcctgtcagctgcgttgactgactgcagcagcttgcctcatggttttccctttttcttagaatatttattcttcagaggtaacatgcagttgggtctcaagacctttcctccaatcagcccaacccagcccagactgggcttttctggggagctgaggagtttatcagtattcatcttccatcctttcatagtcacaagttttgttattttgtttttttttgggggtgatggtgtaattgttaacctcatttccgtttcctacctgtttgcttccccccccagtcctccgcatgagctgttgccctccaggggcctggcacagctggccttggggacgagggagaggactgattcagggccccctcagctgtctcctccctccctctggaaaggagggtggggctcaggggcctcaagctgggctctgtgtgaggcctggcccccactcccaaccttggctctagactgttactcttaagctttgagaaattttcacattgatgactattttaaaatcaaataaaactattttactggtaaaaaaaaan

SEQ ID NO: 65824 - DNA, 3096 bp, Homo sapiens
  misc_feature (3096)..(3096): n is a, c, g, or t
aatggagtaaggtccgaggcggagaggaaaaaaaggagctggggcggaccggggccctagggtccagtggcagccctaggggagggggatttgggggcggggcagccagaagtaggtgttgtgcaggccctggagaagcagagtcacaagttggaggaaaatttcttagccgcgaataaagaagcctggagcgtgggatagaggcccgactgtatctggccggccagaggggaaagggatctttctagtagagtgggatagtgaggaagagagatctggaggatgccgggcagatctgctaaggagggaactaaagccagtcaaatgaccctcttctaggcttagatcagcctttccacagctgttagcagcatctgccccaatttcagctgaagattcaggtgccccagggactggaagaaattacagtgcctacttggaaagaagaagagatagcgacttgccccagtccaaccccagagcgggagctgtggctaaaggaagtggaggggccgtgggatgcggagagccgagggctaactcccggacagcggaacagagagagctgccgacaaacagacgcaggcggaggagccgtcacctcccagaatgactagtgccgcccctgctaagaaaccctaccgtaaggcaccaccagagcatcgggagctgcgtttggaaattcctggatcccggcttgagcaggagagagccctgcagccctcttctgctataagagtctttgggcttcacacctgagccttcttgtggctatttggagggtgagccagccgggggtccagtggtccagagctgagcctcaagcctctcttttttgcctaggaacccctgactgatgcagaaaggatgaagctcttacaggaggagaatgaagagcttcgccggcgcctggcctccgccaccagacgcactgaggccctggaacgtgagctggaaattgggcaggactgcctggagctggagctgggccagagccgcgaggagctggacaaatttaaggataagttccgcaggctgcagaacagctacacggcttcccagcggaccaaccaggagttggaggacaagctgcacacactgatcaagaaggctgagatggataggaagacgctggactgggagattgtggagctgaccaacaagctgctggatgccaagaacaccatcaacaagctggaagagctcaatgagcggtaccggctggactgcaacctggctgtacagctcctcaagtgcaacaagtcccacttccgaaaccacaagtttgccgatctgccctgtgagctacaggacatggttcggaaacatttgcacagtggtcaagaggccgccagcccaggtcctgctcccagcctagccccaggggctgtggtgcctacctcagtcattgcccgagtgttagagaagccggagtctctactgctcaattcagcccagtcaggcagcgccgggcgccccttggctgaggatgtctttgtgcatgtggacatgagtgagggtgtcccaggtgatccagccagtcccccggcccctggcagccccaccccacaacccaatggggagtgccactctctgggtactgccaggggctccccggaggaagagctgcccctgccagcctttgagaagctgaacccctacccaaccccgtctccaccacacccactgtatcctggccgcagggtaatagagttctctgaggataaggttcggatcccccgcaacagccccctgcccaactgcacttacgctacccgccaggccatttccctgagcctggtagaggaggggagtgagcgggcccgccccagcccagtgcccagcacccctgcctcagcccaggcctcaccccaccaccagcccagcccagcacccctaacactcagtgccccagctagctctgccagctctgaagaggacctgctggtcagctggcagcgggcatttgtggaccgtactccaccacctgctgctgtggcccagcgcacagcctttggacgcgatgccctccctgagctgcagcgccattttgcccatagccccgctgacagagatgaggtggtccaggcaccttctgcccgacccgaagagagtgagcttttgctacccacagaacctgactctggctttcccagggaggaagaagagctgaacctgcctatcagtcctgaggaagagcgccagagcctgctgcccattaacaggggcacagaggaggggccaggcacttcccacaccgagggcagggcctggccactccccagctccagtcgcccccagcgcagccccaagaggatgggggttcaccacctgcaccgcaaggacagcctgacccaggcccaggagcagggcaacctgctcaactagggcccctgctggccttcctgccattgctgcaccaggactgcaaggagtccccacaccttggcagctcagggtccccagtccaagcccttgacctctcctctatccagacccgcacagctgtttcctgtgtggatggggtcaggttgtgggccatgccaggcctgtcagctgcgttgactgactgcagcagcttgcctcatggttttccctttttcttagaatatttattcttcagaggtaacatgcagttgggtctcaagacctttcctccaatcagcccaacccagcccagactgggcttttctggggagctgaggagtttatcagtattcatcttccatcctttcatagtcacaagttttgttattttgtttttttttgggggtgatggtgtaattgttaacctcatttccgtttcctacctgtttgcttccccccccagtcctccgcatgagctgttgccctccaggggcctggcacagctggccttggggacgagggagaggactgattcagggccccctcagctgtctcctccctccctctggaaaggagggtggggctcaggggcctcaagctgggctctgtgtgaggcctggcccccactcccaaccttggctctagactgttactcttaagctttgagaaattttcacattgatgactattttaaaatcaaataaaactattttactggtaaaaaaaaan

SEQ ID NO: 65825 - DNA, 3510 bp, Homo sapiens
  misc_feature (3510)..(3510): n is a, c, g, or t
acccggcctgccccgcggcaagatggcggcctgaacgcagctggcagcggcggaaagcttagatcagcctttccacagctgttagcagcatctgccccaatttcagctgaagattcaggtgccccagggactggaagaaattacagtgcctacttggaaagaagaagagatagcgacttgccccagtccaaccccagagcgggagctgtggctaaaggaagtggaggggccgtgggatgcggagagccgagggctaactcccggacagcggaacagagagagctgccgacaaacagacgcaggcggaggagccgtcacctcccagaatgactagtgccgcccctgctaagaaaccctaccgtaaggcaccaccagagcatcgggagctgcgtttggaaattcctggatcccggcttgagcaggaggaacccctgactgatgcagaaaggatgaagctcttacaggaggagaatgaagagcttcgccggcgcctggcctccgccaccagacgcactgaggccctggaacgtgagctggaaattgggcaggactgcctggagctggagctgggccagagccgcgaggagctggacaaatttaaggataagttccgcaggctgcagaacagctacacggcttcccagcggaccaaccaggagttggaggacaagctgcacacactgatcaagaaggctgagatggataggaagacgctggactgggagattgtggagctgaccaacaagctgctggatgccaagaacaccatcaacaagctggaagagctcaatgagcggtaccggctggactgcaacctggctgtacagctcctcaagtgcaacaagtcccacttccgaaaccacaagtttgccgatgtgagtagaactcaccccctccctgcccacatagaccattccggccactgtaggactcctctaactccagtttctgcacctctctctgtcctcctcttcccactttgccctcctcttgcctccatgtcacctctcaagccagtcaactctgccactggttggtgtcccgtgtactgtccagggcccatcactagttctggggggccagccctgttggtttctgtaacagagacagagagagaagatcctgggcaggaaggagagggtagtcagagctatctgcccaaagagtactaagagaggattaggcccatctgatcatgttaccccaaggggtaaactctagaccccacagcttcaggcccaaggtttatgtggcctgcagaagtagaagaagtagaggtatttcttttttttttttttttgagacggagtcttgctctgtcacctaggctggagtgcagtggcacaatctcggctcactgcaacctccgcctcccggcttcaagcaattctcctgcttcagcctcccaagtagctggaattataggcgcccaccaccacgccgggctaatttttttgtctttttagtagagatggggtttcatcgtgttagccaggatggtctcgatctcctgacctcgtgatccacccgcctcggcctcccaaagtgctgggattacaggcatgagccactgtgcccggcccagaagtagaggtatttctaaggctactggtctatgcagattctccaaacttaagtatggtttgggcagaagctgggagatagaagtttgagaacatgctggctgcagcagcagatccgggtttaaatcttggccaagttaaccaaagctttgagttgtcttcccctctccaggcctatgtgtctgtgaagtgagggtatacacactggcatgctgtaagaacaggagatagcagagtgctgagtacacagaggtacttaaaggtgggagccattactttcgccatgagtcaagttatctttggctgcgatcattgatgtctctctttcctgctcttttacctcagctgccctgtgagctacaggacatggttcggaaacatttgcacagtggtcaagaggccgccagcccaggtcctgctcccagcctagccccaggggctgtggtgcctacctcagtcattgcccgagtgttagagaagccggagtctctactgctcaattcagcccagtcaggcagcgccgggcgccccttggctgaggatgtctttgtgcatgtggacatgagtgagggtgtcccaggtgatccagccagtcccccggcccctggcagccccaccccacaacccaatggggagtgccactctctgggtactgccaggggctccccggaggaagagctgcccctgccagcctttgagaagctgaacccctacccaaccccgtctccaccaactcagtgccccagctagctctgccagctctgaagaggacctgctggtcagctggcagcgggcatttgtggaccgtactccaccacctgctgctgtggcccagcgcacagcctttggacgcgatgccctccctgagctgcagcgccattttgcccatagccccgctgacagagatgaggtggtccaggcaccttctgcccgacccgaagagagtgagcttttgctacccacagaacctgactctggctttcccagggaggaagaagagctgaacctgcctatcagtcctgaggaagagcgccagagcctgctgcccattaacaggggcacagaggaggggccaggcacttcccacaccgagggcagggcctggccactccccagctccagtcgcccccagcgcagccccaagaggatgggggttcaccacctgcaccgcaaggacagcctgacccaggcccaggagcagggcaacctgctcaactagggcccctgctggccttcctgccattgctgcaccaggactgcaaggagtccccacaccttggcagctcagggtccccagtccaagcccttgacctctcctctatccagacccgcacagctgtttcctgtgtggatggggtcaggttgtgggccatgccaggcctgtcagctgcgttgactgactgcagcagcttgcctcatggttttccctttttcttagaatatttattcttcagaggtaacatgcagttgggtctcaagacctttcctccaatcagcccaacccagcccagactgggcttttctggggagctgaggagtttatcagtattcatcttccatcctttcatagtcacaagttttgttattttgtttttttttgggggtgatggtgtaattgttaacctcatttccgtttcctacctgtttgcttccccccccagtcctccgcatgagctgttgccctccaggggcctggcacagctggccttggggacgagggagaggactgattcagggccccctcagctgtctcctccctccctctggaaaggagggtggggctcaggggcctcaagctgggctctgtgtgaggcctggcccccactcccaaccttggctctagactgttactcttaagctttgagaaattttcacattgatgactattttaaaatcaaataaaactattttactggtaaaaaaaaan

SEQ ID NO: 65826 - DNA, 317 bp, Homo sapiens
  misc_feature (317)..(317): n is a, c, g, or t
gcggccgcctactactactactactgctcgaattcaagcttctaacgatgtacggggacatgagctgttgccctccaggggcctggcacagctggccttggggacgagggagaggactgattcagggccccctcagctgtctcctccctccctctggaaaggagggtggggctcaggggcctcaagctgggctctgtgtgaggcctggcccccactcccaaccttggctctagactgttactcttaagctttgagaaattttcacattgatgactattttaaaatcaaataaaactattttactggtaaaaaaaaan

SEQ ID NO: 65827 - DNA, 1920 bp, Homo sapiens
ccacagttcctttccccgatagcttcaaattctctgccttttgaaataagcctacttttaactggaataaataattggtcaatctctacctcaggtgaagaggaaccaagcctctggaaacacttaggaacaaactgtaaaaaccaaaggcaattgtgtaaccggttaaataagcttgctggactttgtccctgtgtatgagttagacaattctttcagctagtttgagtgacgcactgaccagtgaagcgcagtgaagcagtgggaaccggaatatccaaagagtggtttgaaggagaaagaagcattgtggctttatatcctctgggcctgggtttcctgaagtcaccacacatagaggagagagaaaatggctgagttaaagtacatttctggatttgggaatgagtgttcttcagaggatcctcgctgcccaggttccctgccagaaggacagaataatcctcaggtctgcccctacaatctctatgctgagcagctctcaggatcggctttcacttgtccacggagcaccaataagagaagctggctgtataggattctaccttcagtttctcacaagccctttgaatccattgacgaaggccatgtcactcacaactgggatgaagttgatcctgatcctaaccagcttagatggaaaccatttgagattccaaaagcatctcagaagaaagtagactttgtgagtggcctgcataccttgtgtggagctggagacataaagtctaacaatgggcttgctatccacattttcctctgcaatacctccatggagaacagatgcttttacaattcagatggggacttcttgattgttccgcagaaagggaaccttctcatttacaccgagtttggcaagatgcttgtacagcccaatgagatctgcgtcattcagagaggaatgcggttcagcatagatgtctttgaggagaccaggggctacatcttggaggtctatggtgtccactttgagttacctgaccttggaccaattggggccaatggcttggccaatcctcgtgatttcttgatacccattgcctggtatgaggatcgccaagtaccaggtggttacacggtcattaataaataccagggcaagctgtttgctgccaaacaggatgtctccccgttcaatgttgtggcctggcacgggaattatacaccctacaagtacaacctgaagaatttcatggttatcaactcagtggcctttgaccatgcagacccatccattttcacagtattgactgctaagtctgtccgccctggagtggccattgctgattttgtcatcttcccacctcgatggggggttgctgataagaccttcaggcctccttattaccataggaactgcatgagtgagttcatgggactcatccgaggtcactatgaggcaaagcaaggtgggttcctgccagggggagggagtctacacagcacaatgaccccccatggacctgatgctgactgctttgagaaggccagcaaggtcaagctggcacctgagaggattgccgatggcaccatggcatttatgtttgaatcatctttaagtctggcggtcacaaagtggggactcaaggcctccaggtgtttggatgagaactaccacaagtgctgggagccactcaagagccacttcactcccaactccaggaacccagcagaacctaattgagactggaacattgctaccataattaagagtagatttgtgaagatttcttcagaatctcatgctttctggtagtattggaggagggggttggttaaaatgaaaattcacttttcatagtcaagtaactcagaacttttatggaaacgcatttgcaaagttctatggctgtcaccttaattactcaataaacttgctggtgttctgtggacgta

SEQ ID NO: 65828 - DNA, 655 bp, Homo sapiens
gatggataatcattttaatataacaaaatcacaagtagagcctcacagagggggtagctgtcctttcttttctatgtaattgatgctatttatttagaaggtctatggtttacccttgtgaagtaatttttctgtatgtgtattttttttccagcttagatggaaaccatttgagattccaaaagcatctcagaagaaagtagactttgtgagtgtaagtcagtcccatccacaccctccctactgctctcctctcttctgtggtgagtgagccaaccatttgcagcctgaatgccaagcagaagcagccctatcaggaggcagcagagacaaaaccacctgcgtatgctttgggggctggcggagggatgtcttacttacagaaaccatatggcccctgacaccagagggtattcatgaactatttatatctcagaaaggccaatgacaattgaacattttcttacttaagttcctttcttttggctagaacgggggcttttaacctttttctcactttgatgtctgatgtctgatgatgtctttgtttataaatatataaaataaattatataaaattacaaagaagctaatgatattgaaatataacgataaaaatactattaaaaacaaatttgatttggtttatagtcaa

SEQ ID NO: 65829 - DNA, 544 bp, Homo sapiens
aaatggtaggaccagagccacaactcagggcttgagcctgctctcctcaccactctagcacacaaatctttgatttgttattggaagatttcacctacccataccttctgttgacatctaatcaaatgtgtttattatctatctcacctcttttttctcatccccatcgtcacttcctccaggcatttatgtttgaatcatctttaagtctggcggtcacaaagtggggactcaaggcctccaggtgtttggatgagaactaccacaagtgctgggagccactcaagagccacttcactcccaactccaggaacccagcagaacctaattgagactggaacattgctaccataattaagagtagatttgtgaagatttcttcagaatctcatgctttctggtagtattggaggagggggttggttaaaatgaaaattcacttttcatagtcaagtaactcagaacttttatggaaacgcatttgcaaagttctatggctgtcaccttaattactcaataaacttgctggtgttctgtggacgta

SEQ ID NO: 65830 - DNA, 785 bp, Homo sapiens
aaagcctttctcttcatgcaaccatgggcatctttcctatgttttggaagtttctaaaagacttttgggttactgttttctaggggccaatggcttggccaatcctcgtgatttcttgatacccattgcctggtatgaggatcgccaagtaccaggtggttacacggtcattaataaataccagggcaagctgtttgctgccaaacaggtaaagtaaaagggttggcaggcaagggaggaaatgaagagtgattgagcacttactgattgccaaggcgagtgttacaaactttacatatatcctttcgttgttatcataccactacggcactacaaataaagcaaatagttctagtagtcaattatactttcatagtcatggaaaaggccagtaatgataaataatttaccaatttcacagtaagtggcagaaccagaatttgaacccatatctgtctgactccaaaggttgtgccctttctactcaccaagcaatgaaaatattagcaatatgtaggtttctataagtggtatggaaaacataatatatgggcagcataatatgttcctatttcaaatacaagcaattctacaaaacaagtagaattcagttaattagcttggcttggtttgtaccaccaggctggcaattcaggacacaagcaaaggcacagatattaataaataataataacaacaatgtaatatggactctataacataatatattactaaatgtactgaatatatattagaataaaataatcatataataagaagaaccc

SEQ ID NO: 65831 - DNA, 2179 bp, Homo sapiens
ccacagttcctttccccgatagcttcaaattctctgccttttgaaataagcctacttttaactggaataaataattggtcaatctctacctcaggtgaagaggaaccaagcctctggaaacacttaggaacaaactgtaaaaaccaaaggcaattgtgtaaccggttaaataagcttgctggactttgtccctgtgtatgagttagacaattctttcagctagtttgagtgacgcactgaccagtgaagcgcagtgaagcagtgggaaccggaatatccaaagagtggtttgaaggagaaagaagcattgtggctttatatcctctgggcctgggtttcctgaagtcaccacacatagaggagagagaaaatggctgagttaaagtacatttctggatttgggaatgagtgttcttcagaggatcctcgctgcccaggttccctgccagaaggacagaataatcctcaggtctgcccctacaatctctatgctgagcagctctcaggatcggctttcacttgtccacggagcaccaataagagaagctggctgtataggattctaccttcagtttctcacaagccctttgaatccattgacgaaggccatgtcactcacaactgggatgaagttgatcctgatcctaaccagcttagatggaaaccatttgagattccaaaagcatctcagaagaaagtagactttgtgagtggcctgcataccttgtgtggagctggagacataaagtctaacaatgggcttgctatccacattttcctctgcaatacctccatggagaacagatgcttttacaattcagatggggacttcttgattgttccgcagaaagggaaccttctcatttacaccgagtttggcaagatgcttgtacagcccaatgagatctgcgtcattcagagaggaatgcggttcagcatagatgtctttgaggagaccaggggctacatcttggaggtctatggtgtccactttgagttacctgaccttggaccaattggggccaatggcttggccaatcctcgtgatttcttgatacccattgcctggtatgaggatcgccaagtaccaggtggttacacggtcattaataaataccagggcaagctgtttgctgccaaacaggatgtctccccgttcaatgttgtggcctggcacgggaattatacaccctacaagtacaacctgaagaatttcatggttatcaactcagtggcctttgaccatgcagacccatccattttcacagtattgactgctaagtctgtccgccctggagtggccattgctgattttgtcatcttcccacctcgatggggggttgctgataagaccttcaggcctccttattaccataatctagcctgattcctgtcagagagtggaactcgagacctctgataatccacatggccatggagtagagctgtgcctgccaagaatgccaatatgaatgttttatgattgttcttctgtcaatccatattctttattaatcctatacaatttactagtttctcctgtgttcttggaattctgcagaaataatgtttaaggggctttgtgttttactggtcttgccttggataataaaaataatactgcttcaaccttccggaactgcatgagtgagttcatgggactcatccgaggtcactatgaggcaaagcaaggtgggttcctgccagggggagggagtctacacagcacaatgaccccccatggacctgatgctgactgctttgagaaggccagcaaggtcaagctggcacctgagaggattgccgatggcaccatggcatttatgtttgaatcatctttaagtctggcggtcacaaagtggggactcaaggcctccaggtgtttggatgagaactaccacaagtgctgggagccactcaagagccacttcactcccaactccaggaacccagcagaacctaattgagactggaacattgctaccataattaagagtagatttgtgaagatttcttcagaatctcatgctttctggtagtattggaggagggggttggttaaaatgaaaattcacttttcatagtcaagtaactcagaacttttatggaaacgcatttgcaaagttctatggctgtcaccttaattactcaataaacttgctggtgttctgtggacgta

SEQ ID NO: 65832 - DNA, 2122 bp, Homo sapiens
ccacagttcctttccccgatagcttcaaattctctgccttttgaaataagcctacttttaactggaataaataattggtcaatctctacctcaggtgaagaggaaccaagcctctggaaacacttaggaacaaactgtaaaaaccaaaggcaattgtgtaaccggttaaataagcttgctggactttgtccctgtgtatgagttagacaattctttcagctagtttgagtgacgcactgaccagtgaagcgcagtgaagcagtgggaaccggaatatccaaagagtggtttgaaggagaaagaagcattgtggctttatatcctctgggcctgggtttcctgaagtcaccacacatagaggagagagaaaatggctgagttaaagtacatttctggatttgggaatgagtgttcttcagaggatcctcgctgcccaggttccctgccagaaggacagaataatcctcaggtctgcccctacaatctctatgctgagcagctctcaggatcggctttcacttgtccacggagcaccaataagagaagctggctgtataggattctaccttcagtttctcacaagccctttgaatccattgacgaaggccatgtcactcacaactgggatgaagttgatcctgatcctaaccagcttagatggaaaccatttgagattccaaaagcatctcagaagaaagtagactttgtgagtggcctgcataccttgtgtggagctggagacataaagtctaacaatgggcttgctatccacattttcctctgcaatacctccatggagaacagatgcttttacaattcagatggggacttcttgattgttccgcagaaagggaaccttctcatttacaccgagtttggcaagatgcttgtacagcccaatgagatctgcgtcattcagagaggaatgcggttcagcatagatgtctttgaggagaccaggggctacatcttggaggtctatggtgtccactttgagttacctgaccttggaccaattggggccaatggcttggccaatcctcgtgatttcttgatacccattgcctggtatgaggatcgccaagtaccaggtggttacacggtcattaataaataccagggcaagctgtttgctgccaaacaggatgtctccccgttcaatgttgtggcctggcacgggaattatacaccctacaagtacaacctgaagaatttcatggttatcaactcagtggcctttgaccatgcagacccatccattttcacagtattgactgctaagtctgtccgccctggagtggccattgctgattttgtcatcttcccacctcgatggggggttgctgataagaccttcaggcctccttattaccataatctagcctgattcctgtcagagagtggaactcgagacctctgataatccacatggccatggagtagagctgtgcctgccaagaatgccaatatgaatgttttatgattgttcttctgtcaatccatattctttattaatcctatacaatttactagtttctcctgtgttcttggaattctgcagaaataatgtttaaggggctttgtgttttactggtcttgccttggataataaaaataatactgcttcaaccttccaaaaaaaaaaaaaaaaaaaaaaaaaaaaaaaaaaaaaaaaaaaaaaaaaaaaaaaaaaaaaaaaaaaagagagaggaggaaaaaaaaaaaaaaaaaaaagagaaaagaaaaaaaagaaaaaaaaaaaagaaaaaaaaaaaaaagggaggaaaaagaagtgtcacggcggaggaacaaccaaaacacaacccaccaaacggaacagcagaaaaaaaggagagccactacacgctactcatagggagaaaaaaacaaaagctaacaacaacgagggcgcgcagcacaagattgatcaagccacacacgaggacggcacacaacaaaaaaaacgacggcgagagcactccagacaaaacaccgaacacgatcacatacaagaggcgcacacacgacagacaatagaacaccgagaacaagaaatgcccaacgaaacagcaaaagaaacgagacaaataattacacgaagcacggaacaaagactcaaaga

SEQ ID NO: 65833 - DNA, 1866 bp, Homo sapiens
ccacagttcctttccccgatagcttcaaattctctgccttttgaaataagcctacttttaactggaataaataattggtcaatctctacctcaggtgaagaggaaccaagcctctggaaacacttaggaacaaactgtaaaaaccaaaggcaattgtgtaaccggttaaataagcttgctggactttgtccctgtgtatgagttagacaattctttcagctagtttgagtgacgcactgaccagtgaagcgcagtgaagcagtgggaaccggaatatccaaagagtggtttgaaggagaaagaagcattgtggctttatatcctctgggcctgggtttcctgaagtcaccacacatagaggagagaggatcctcgctgcccaggttccctgccagaaggacagaataatcctcaggtctgcccctacaatctctatgctgagcagctctcaggatcggctttcacttgtccacggagcaccaataagagaagctggctgtataggattctaccttcagtttctcacaagccctttgaatccattgacgaaggccatgtcactcacaactgggatgaagttgatcctgatcctaaccagcttagatggaaaccatttgagattccaaaagcatctcagaagaaagtagactttgtgagtggcctgcataccttgtgtggagctggagacataaagtctaacaatgggcttgctatccacattttcctctgcaatacctccatggagaacagatgcttttacaattcagatggggacttcttgattgttccgcagaaagggaaccttctcatttacaccgagtttggcaagatgcttgtacagcccaatgagatctgcgtcattcagagaggaatgcggttcagcatagatgtctttgaggagaccaggggctacatcttggaggtctatggtgtccactttgagttacctgaccttggaccaattggggccaatggcttggccaatcctcgtgatttcttgatacccattgcctggtatgaggatcgccaagtaccaggtggttacacggtcattaataaataccagggcaagctgtttgctgccaaacaggatgtctccccgttcaatgttgtggcctggcacgggaattatacaccctacaagtacaacctgaagaatttcatggttatcaactcagtggcctttgaccatgcagacccatccattttcacagtattgactgctaagtctgtccgccctggagtggccattgctgattttgtcatcttcccacctcgatggggggttgctgataagaccttcaggcctccttattaccataggaactgcatgagtgagttcatgggactcatccgaggtcactatgaggcaaagcaaggtgggttcctgccagggggagggagtctacacagcacaatgaccccccatggacctgatgctgactgctttgagaaggccagcaaggtcaagctggcacctgagaggattgccgatggcaccatggcatttatgtttgaatcatctttaagtctggcggtcacaaagtggggactcaaggcctccaggtgtttggatgagaactaccacaagtgctgggagccactcaagagccacttcactcccaactccaggaacccagcagaacctaattgagactggaacattgctaccataattaagagtagatttgtgaagatttcttcagaatctcatgctttctggtagtattggaggagggggttggttaaaatgaaaattcacttttcatagtcaagtaactcagaacttttatggaaacgcatttgcaaagttctatggctgtcaccttaattactcaataaacttgctggtgttctgtggacgta

SEQ ID NO: 65834 - DNA, 1861 bp, Homo sapiens
ccacagttcctttccccgatagcttcaaattctctgccttttgaaataagcctacttttaactggaataaataattggtcaatctctacctcaggtgaagaggaaccaagcctctggaaacacttaggaacaaactgtaaaaaccaaaggcaattgtgtaaccggttaaataagcttgctggactttgtccctgtgtatgagttagacaattctttcagctagtttgagtgacgcactgaccagtgaagcgcagtgaagcagtgggaaccggaatatccaaagagtggtttgaaggagaaagaagcattgtggctttatatcctctgggcctgggtttcctgaagtcaccacacatagaggagagagaaaatggctgagttaaagtacatttctggatttgggaatgagtgttcttcagaggatcctcgctgcccaggttccctgccagaaggacagaataatcctcaggtctgcccctacaatctctatgctgagcagctctcaggatcggctttcacttgtccacggagcaccaataagagaagctggctgtataggattctaccttcagtttctcacaagccctttgaatccattgacgaaggccatgtcactcacaactgggatgaagttgatcctgatcctaaccaggtaacctggtcctgtgaattgaactggagacataaagtctaacaatgggcttgctatccacattttcctctgcaatacctccatggagaacagatgcttttacaattcagatggggacttcttgattgttccgcagaaagggaaccttctcatttacaccgagtttggcaagatgcttgtacagcccaatgagatctgcgtcattcagagaggaatgcggttcagcatagatgtctttgaggagaccaggggctacatcttggaggtctatggtgtccactttgagttacctgaccttggaccaattggggccaatggcttggccaatcctcgtgatttcttgatacccattgcctggtatgaggatcgccaagtaccaggtggttacacggtcattaataaataccagggcaagctgtttgctgccaaacaggatgtctccccgttcaatgttgtggcctggcacgggaattatacaccctacaagtacaacctgaagaatttcatggttatcaactcagtggcctttgaccatgcagacccatccattttcacagtattgactgctaagtctgtccgccctggagtggccattgctgattttgtcatcttcccacctcgatggggggttgctgataagaccttcaggcctccttattaccataggaactgcatgagtgagttcatgggactcatccgaggtcactatgaggcaaagcaaggtgggttcctgccagggggagggagtctacacagcacaatgaccccccatggacctgatgctgactgctttgagaaggccagcaaggtcaagctggcacctgagaggattgccgatggcaccatggcatttatgtttgaatcatctttaagtctggcggtcacaaagtggggactcaaggcctccaggtgtttggatgagaactaccacaagtgctgggagccactcaagagccacttcactcccaactccaggaacccagcagaacctaattgagactggaacattgctaccataattaagagtagatttgtgaagatttcttcagaatctcatgctttctggtagtattggaggagggggttggttaaaatgaaaattcacttttcatagtcaagtaactcagaacttttatggaaacgcatttgcaaagttctatggctgtcaccttaattactcaataaacttgctggtgttctgtggacgta

SEQ ID NO: 65835 - DNA, 1949 bp, Homo sapiens
ccacagttcctttccccgatagcttcaaattctctgccttttgaaataagcctacttttaactggaataaataattggtcaatctctacctcaggtgaagaggaaccaagcctctggaaacacttaggaacaaactgtaaaaaccaaaggcaattgtgtaaccggttaaataagcttgctggactttgtccctgtgtatgagttagacaattctttcagctagtttgagtgacgcactgaccagtgaagcgcagtgaagcagtgggaaccggaatatccaaagagtggtttgaaggagaaagaagcattgtggctttatatcctctgggcctgggtttcctgaagtcaccacacatagaggagagagaaaatggctgagttaaagtacatttctggatttgggaatgagtgttcttcagaggatcctcgctgcccaggttccctgccagaaggacagaataatcctcaggtctgcccctacaatctctatgctgagcagctctcaggatcggctttcacttgtccacggagcaccaataagagaagctggctgtataggattctaccttcagtttctcacaagccctttgaatccattgacgaaggccatgtcactcacaactgggatgaagttgatcctgatcctaaccagcttagatggaaaccatttgagattccaaaagcatctcagaagaaagtagactttgtgagtggcctgcataccttgtgtggagctggagacataaagtctaacaatgggcttgctatccacattttcctctgcaatacctccatggagaacagatgcttttacaattcagatggggacttcttgattgttccgcagaaagggaaccttctcatttacaccgagtttggcaagatgcttgtacagcccaatgagatctgcgtcattcagagaggaatgcggttcagcatagatgtctttgaggagaccaggggctacatcttggaggtctatggtgtccactttgagttacctgaccttggaccaattgattccttgggtcttcctaaaaggatgtctccccgttcaatgttgtggcctggcacgggaattatacaccctacaagtacaacctgaagaatttcatggttatcaactcagtggcctttgaccatgcaatctagcctgattcctgtcagagagtggaactcgagacctctgataatccacatggccatggagtagagctgtgcctgccaagaatgccaatatgaatgttttatgattgttcttctgtcaatccatattctttattaatcctatacaatttactagtttctcctgtgttcttggaattctgcagaaataatgtttaaggggctttgtgttttactggtcttgccttggataataaaaataatactgcttcaaccttccggaactgcatgagtgagttcatgggactcatccgaggtcactatgaggcaaagcaaggtgggttcctgccagggggagggagtctacacagcacaatgaccccccatggacctgatgctgactgctttgagaaggccagcaaggtcaagctggcacctgagaggattgccgatggcaccatggcatttatgtttgaatcatctttaagtctggcggtcacaaagtggggactcaaggcctccaggtgtttggatgagaactaccacaagtgctgggagccactcaagagccacttcactcccaactccaggaacccagcagaacctaattgagactggaacattgctaccataattaagagtagatttgtgaagatttcttcagaatctcatgctttctggtagtattggaggagggggttggttaaaatgaaaattcacttttcatagtcaagtaactcagaacttttatggaaacgcatttgcaaagttctatggctgtcaccttaattactcaataaacttgctggtgttctgtggacgta

SEQ ID NO: 65836 - DNA, 1565 bp, Homo sapiens
ccacagttcctttccccgatagcttcaaattctctgccttttgaaataagcctacttttaactggaataaataattggtcaatctctacctcaggtgaagaggaaccaagcctctggaaacacttaggaacaaactgtaaaaaccaaaggcaattgtgtaaccggttaaataagcttgctggactttgtccctgtgtatgagttagacaattctttcagctagtttgagtgacgcactgaccagtgaagcgcagtgaagcagtgggaaccggaatatccaaagagtggtttgaaggagaaagaagcattgtggctttatatcctctgggcctgggtttcctgaagtcaccacacatagaggagagagaaaatggctgagttaaagtacatttctggatttgggaatgagtgttcttcagaggatcctcgctgcccaggttccctgccagaaggacagaataatcctcaggtctgcccctacaatttccgcagaaagggaaccttctcatttacaccgagtttggcaagatgcttgtacagcccaatgagatctgcgtcattcagagaggaatgcggttcagcatagatgtctttgaggagaccaggggctacatcttggaggtctatggtgtccactttgagttacctgaccttggaccaattggggccaatggcttggccaatcctcgtgatttcttgatacccattgcctggtatgaggatcgccaagtaccaggtggttacacggtcattaataaataccagggcaagctgtttgctgccaaacaggatgtctccccgttcaatgttgtggcctggcacgggaattatacaccctacaagtacaacctgaagaatttcatggttatcaactcagtggcctttgaccatgcagacccatccattttcacagtattgactgctaagtctgtccgccctggagtggccattgctgattttgtcatcttcccacctcgatggggggttgctgataagaccttcaggcctccttattaccataggaactgcatgagtgagttcatgggactcatccgaggtcactatgaggcaaagcaaggtgggttcctgccagggggagggagtctacacagcacaatgaccccccatggacctgatgctgactgctttgagaaggccagcaaggtcaagctggcacctgagaggattgccgatggcaccatggcatttatgtttgaatcatctttaagtctggcggtcacaaagtggggactcaaggcctccaggtgtttggatgagaactaccacaagtgctgggagccactcaagagccacttcactcccaactccaggaacccagcagaacctaattgagactggaacattgctaccataattaagagtagatttgtgaagatttcttcagaatctcatgctttctggtagtattggaggagggggttggttaaaatgaaaattcacttttcatagtcaagtaactcagaacttttatggaaacgcatttgcaaagttctatggctgtcaccttaattactcaataaacttgctggtgttctgtggacgta

SEQ ID NO: 65837 - DNA, 1051 bp, Homo sapiens
ggacttgtatcagagttttctctgcaatactccagtggagaacaggagtgctttatacaattcagatggggacttctatgattgtcctgagggagttccgcagaaagggaaccttctcatttacaccgagtttggcaagatgcttgtacagcccaatgagatctgcgtcattcagagaggaatgcggttcagcatagatgtctttgaggagaccaggggctacatcttggaggtctatggtgtccactttgagttacctgaccttggaccaattggatgtctccccgttcaatgttgtggcctggcacgggaattatacaccctacaagtacaacctgaagaatttcatggttatcaactcagtggcctttgaccatgcagacccatccattttcacagtattgactgctaagtctgtccgccctggagtggccattgctgattttgtcatcttcccacctcgatggggggttgctgataagaccttcaggcctccttattaccataggaactgcatgagtgagttcatgggactcatccgaggtcactatgaggcaaagcaaggtgggttcctgccagggggagggagtctacacagcacaatgaccccccatggacctgatgctgactgctttgagaaggccagcaaggtcaagctggcacctgagaggattgccgatggcaccatggcatttatgtttgaatcatctttaagtctggcggtcacaaagtggggactcaaggcctccaggtgtttggatgagaactaccacaagtgctgggagccactcaagagccacttcactcccaactccaggaacccagcagaacctaattgagactggaacattgctaccataattaagagtagatttgtgaagatttcttcagaatctcatgctttctggtagtattggaggagggggttggttaaaatgaaaattcacttttcatagtcaagtaactcagaacttttatggaaacgcatttgcaaagttctatggctgtcaccttaattactcaataaacttgctggtgttctgtggacgta

SEQ ID NO: 65838 - DNA, 466 bp, Homo sapiens
aaaaccacacaccctcaatctaagccttctagattgggaattagaaatatgctgttgctgtgtcctacagtggagctacttgggaaagggttatgatctgggagataagataactttgatacagggctcgtaagcttagatgatagagtacattcgctctctattatgactagcattttaattattattatcttctctgggccctgatatctagcctgattcctgtcagagagtggaactcgagacctctgataatccacatggccatggagtagagctgtgcctgccaagaatgccaatatgaatgttttatgattgttcttctgtcaatccatattctttattaatcctatacaatttactagtttctcctgtgttcttggaattctgcagaaataatgtttaaggggctttgtgttttactggtcttgccttggataataaaaataatactgcttcaaccttc

SEQ ID NO: 65839 - DNA, 788 bp, Homo sapiens
ccacagttcctttccccgatagcttcaaattctctgccttttgaaataagcctacttttaactggaataaataattggtcaatctctacctcaggtgaagaggaaccaagcctctggaaacacttaggaacaaactgtaaaaaccaaaggcaattgtgtaaccggttaaataagcttgctggactttgtccctgtgtatgagttagacaattctttcagctagtttgagtgacgcactgaccagtgaagcgcagtgaagcagtgggaaccggaatatccaaagagtggtttgaaggagaaagaagcattgtggctttatatcctctgggcctgggtttcctgaagtcaccacacatagaggagagagaaaatggctgagttaaagtacatttctggatttgggaatgagtgttcttcagaggatcctcgctgcccaggttccctgccagaaggacagaataatcctcaggtctgcccctacaatctctatgctgagcagctctcaggatcggctttcacttgtccacggagcaccaataagagaagctggctgtataggattctaccttcagtttctcacaagccctttgaatccattgacgaaggccatgtcactcacaactgggatgaagttgatcctgatcctaaccaggtaacctggtcctgtgaattgaagcttatcatatacccaaagccttgactagaaatacctaaatagaataccatggtcattggaaaaaatagatagttttttaaagtattattttaataaatgctaaagtgtgtct

SEQ ID NO: 65840 - DNA, 2358 bp, Homo sapiens
ccacagttcctttccccgatagcttcaaattctctgccttttgaaataagcctacttttaactggaataaataattggtcaatctctacctcaggtgaagaggaaccaagcctctggaaacacttaggaacaaactgtaaaaaccaaaggcaattgtgtaaccggttaaataagcttgctggactttgtccctgtgtatgagttagacaattctttcagctagtttgagtgacgcactgaccagtgaagcgcagtgaagcagtgggaaccggaatatccaaagagtggtttgaaggagaaagaagcattgtggctttatatcctctgggcctgggtttcctgaagtcaccacacatagaggagagagaaaatggctgagttaaagtacatttctggatttgggaatgagtgttcttcagaggatcctcgctgcccaggttccctgccagaaggacagaataatcctcaggtctgcccctacaatctctatgctgagcagctctcaggatcggctttcacttgtccacggagcaccaataagagaagctggctgtataggattctaccttcagtttctcacaagccctttgaatccattgacgaaggccatgtcactcacaactgggatgaagttgatcctgatcctaaccagcttagatggaaaccatttgagattccaaaagcatctcagaagaaagtagactttgtgagtggcctgcataccttgtgtggagctggagacataaagtctaacaatgggcttgctatccacattttcctctgcaatacctccatggagaacagatgcttttacaattcagatggggacttcttgattgttccgcagaaagggaaccttctcatttacaccgagtttggcaagatgcttgtacagcccaatgagatctgcgtcattcagagaggaatgcggttcagcatagatgtctttgaggagaccaggggctacatcttggaggtctatggtgtccactttgagttacctgaccttggaccaattggggccaatggcttggccaatcctcgtgatttcttgatacccattgcctggtatgaggatcgccaagtaccaggtggttacacggtcattaataaataccagggcaagctgtttgctgccaaacaggatgtctccccgttcaatgttgtggcctggcacgggaattatacaccctacaagtacaacctgaagaatttcatggttatcaactcagtggcctttgaccatgcagacccatccattttcacagtattgactgctaagtctgtccgccctggagtggccattgctgattttgtcatcttcccacctcgatggggggttgctgataagaccttcaggcctccttattaccataggaactgcatgagtgagttcatgggactcatccgaggtcactatgaggcaaagcaaggtgggttcctgccagggggagggagtctacacagcacaatgaccccccatggacctgatgctgactgctttgagaaggccagcaaggtcaagctggcacctgagaggattgccgatggcaccatggcatttatgtttgaatcatctttaagtctggcggtcacaaagtggggactcaaggcctccaggtgtttggatgagaactaccacaagtgctgggagccactcaagagccacttcactcccaactccaggaacccagcagaacctaattgagactggaacattgctaccataattaagagtagatttgtgaagatttcttcagaatctcatgctttctggtagtattggaggagggggttggttaaaatgaaaattcacttttcatagtcaagtaactcagaacttttatggaaacgcatttgcaaagttctatggctgtcaccttaattactcaataaacttgctggtgttctgtggacgtaaaaaaacacaaaaaaacacacacagggcgaaaacaaaacaaccgaaccataacaccaccacacaaatttttcgtgcggcggcggctccggcctcgtgaaaaagtttttaaacaaccacatatttttgggagccgcgggcccacaaatgggtaagtgacaacacactggccacagaggagtcgaccccacagagaaaactgctggacaccatagcaatcgacggatgtgtaactcccaccgcaataaaaataatccgcggcgtgcgtcaccagagagcttgttggagaaacacacacacaggaagggcgcatgcgcaggcctaaacagaggagctcataaacagaggggtcacagaggaaggcggagttgtaactaataaagcgcccgcagtagggcttacaacgataacgcacacaactgacaacgagccagccacgc

SEQ ID NO: 65841 - DNA, 1877 bp, Homo sapiens
ccacagttcctttccccgatagcttcaaattctctgccttttgaaataagcctacttttaactggaataaataattggtcaatctctacctcaggtgaagaggaaccaagcctctggaaacacttaggaacaaactgtaaaaaccaaaggcaattgtgtaaccggttaaataagcttgctggactttgtccctgtgtatgagttagacaattctttcagctagtttgagtgacgcactgaccagtgaagcgcagtgaagcagtgggaaccggaatatccaaagagtggtttgaaggagaaagaagcattgtggctttatatcctctgggcctgggtttcctgaagtcaccacacatagaggagagagaaaatggctgagttaaagtacatttctggatttgggaatgagtgttcttcagaggatcctcgctgcccaggttccctgccagaaggacagaataatcctcaggtctgcccctacaatctctatgctgagcagctctcaggatcggctttcacttgtccacggagcaccaataagagaagctggctgtataggattctaccttcagtttctcacaagccctttgaatccattgacgaaggccatgtcactcacaactgggatgaagttgatcctgatcctaaccagcttagatggaaaccatttgagattccaaaagcatctcagaagaaagtagactttgtgagtggcctgcataccttgtgtggagctggagacataaagtctaacaatgggcttgctatccacattttcctctgcaatacctccatggagaacagatgcttttacaattcagatggggacttcttgattgttccgcagaaagggaaccttctcatttacaccgagtttggcaagatgcttgtacagcccaatgagatctgcgtcattcagagaggaatgcggttcagcatagatgtctttgaggagaccaggggctacatcttggaggtctatggtgtccactttgagttacctgaccttggaccaattggggccaatggcttggccaatcctcgtgatttcttgatacccattgcctggtatgaggatcgccaagtaccaggtggttacacggtcattaataaataccagggcaagctgtttgctgccaaacaggatgtctccccgttcaatgttgtggcctggcacgggaattatacaccctacaagtacaacctgaagaatttcatggttatcaactcagtggcctttgaccatgcagacccatccattttcacagtattgactgctaagtctgtccgccctggagtggccattgctgattttgtcatcttcccacctcgatggggggttgctgataagaccttcaggcctccttattaccataatctagcctgattcctgtcagagagtggaactcgagacctctgataatccacatggccatggagtagagctgtgcctgccaagaatgccaatatgaatgttttatgattgttcttctgtcaatccatattctttattaatcctatacaatttactagtttctcctgtgttcttggaattctgcagaaataatgtttaaggggctttgtgttttactggtcttgccttggataataaaaataatactgcttcaaccttccggaactgcatgagtgagttcatgggactcatccgaggtcactatgaggcaaagcaaggtgggttcctgccagggggagggagtctacacagcacaatgaccccccatggacctgatgctgactgctttgagaaggccagcaaggtcaagctggcacctgagaggattgccgatggcaccatgcgcacttgatgttgaatatcttaatacccccacaaagtgagacacaagccctgttaagtg

SEQ ID NO: 65842 - DNA, 2054 bp, Homo sapiens
ccacagttcctttccccgatagcttcaaattctctgccttttgaaataagcctacttttaactggaataaataattggtcaatctctacctcaggtgaagaggaaccaagcctctggaaacacttaggaacaaactgtaaaaaccaaaggcaattgtgtaaccggttaaataagcttgctggactttgtccctgtgtatgagttagacaattctttcagctagtttgagtgacgcactgaccagtgaagcgcagtgaagcagtgggaaccggaatatccaaagagtggtttgaaggagaaagaagcattgtggctttatatcctctgggcctgggtttcctgaagtcaccacacatagaggagagagaaaatggctgagttaaagtacatttctggatttgggaatgagtgttcttcagaggatcctcgctgcccaggttccctgccagaaggacagaataatcctcaggtctgcccctacaatctctatgctgagcagctctcaggatcggctttcacttgtccacggagcaccaataagagaagctggctgtataggattctaccttcagtttctcacaagccctttgaatccattgacgaaggccatgtcactcacaactgggatgaagttgatcctgatcctaaccagcttagatggaaaccatttgagattccaaaagcatctcagaagaaagtagactttgtgagtggcctgcataccttgtgtggagctggagacataaagtctaacaatgggcttgctatccacattttcctctgcaatacctccatggagaacagatgcttttacaattcagatggggacttcttgattgttccgcagaaagggaaccttctcatttacaccgagtttggcaagatgcttgtacagcccaatgagatctgcgtcattcagagaggaatgcggttcagcatagatgtctttgaggagaccaggggctacatcttggaggtctatggtgtccactttgagttacctgaccttggaccaattggatgtctccccgttcaatgttgtggcctggcacgggaattatacaccctacaagtacaacctgaagaatttcatggttatcaactcagtggcctttgaccatgcagacccatccattttcacagtattgactgctaagtctgtccgccctggagtggccattgctgattttgtcatcttcccacctcgatggggggttgctgataagaccttcaggcctccttattaccataatctagcctgattcctgtcagagagtggaactcgagacctctgataatccacatggccatggagtagagctgtgcctgccaagaatgccaatatgaatgttttatgattgttcttctgtcaatccatattctttattaatcctatacaatttactagtttctcctgtgttcttggaattctgcagaaataatgtttaaggggctttgtgttttactggtcttgccttggataataaaaataatactgcttcaaccttccggaactgcatgagtgagttcatgggactcatccgaggtcactatgaggcaaagcaaggtgggttcctgccagggggagggagtctacacagcacaatgaccccccatggacctgatgctgactgctttgagaaggccagcaaggtcaagctggcacctgagaggattgccgatggcaccatggcatttatgtttgaatcatctttaagtctggcggtcacaaagtggggactcaaggcctccaggtgtttggatgagaactaccacaagtgctgggagccactcaagagccacttcactcccaactccaggaacccagcagaacctaattgagactggaacattgctaccataattaagagtagatttgtgaagatttcttcagaatctcatgctttctggtagtattggaggagggggttggttaaaatgaaaattcacttttcatagtcaagtaactcagaacttttatggaaacgcatttgcaaagttctatggctgtcaccttaattactcaataaacttgctggtgttctgtggacgta

SEQ ID NO: 65843 - DNA, 1775 bp, Homo sapiens
ccacagttcctttccccgatagcttcaaattctctgccttttgaaataagcctacttttaactggaataaataattggtcaatctctacctcaggtgaagaggaaccaagcctctggaaacacttaggaacaaactgtaaaaaccaaaggcaattgtgtaaccggttaaataagcttgctggactttgtccctgtgtatgagttagacaattctttcagctagtttgagtgacgcactgaccagtgaagcgcagtgaagcagtgggaaccggaatatccaaagagtggtttgaaggagaaagaagcattgtggctttatatcctctgggcctgggtttcctgaagtcaccacacatagaggagagagaaaatggctgagttaaagtacatttctggatttgggaatgagtgttcttcagaggatcctcgctgcccaggttccctgccagaaggacagaataatcctcaggtctgcccctacaatctctatgctgagcagctctcaggatcggctttcacttgtccacggagcaccaataagagaagctggctgtataggattctaccttcagtttctcacaagccctttgaatccattgacgaaggccatgtcactcacaactgggatgaagttgatcctgatcctaaccagcttagatggaaaccatttgagattccaaaagcatctcagaagaaagtagactttgtgagtggcctgcataccttgtgtggagctggagacataaagtctaacaatgggcttgctatccacattttcctctgcaatacctccatggagaacagatgcttttacaattcagatggggacttcttgattgttccgcagaaagggaaccttctcatttacaccgagtttggcaagatgcttgtacagcccaatgagatctgcgtcattcagagaggaatgcggttcagcatagatgtctttgaggagaccaggggctacatcttggaggtctatggtgtccactttgagttacctgaccttggaccaattggggccaatggcttggccaatcctcgtgatttcttgatacccattgcctggtatgaggatcgccaagtaccaggtggttacacggtcattaataaataccagggcaagctgtttgctgccaaacaggtaaagtaaaagggttggcaggcaagggaggaaatgaagagtgattgagcacttactgattgccaaggcgagtgttacaaactttacatatatcctttcgttgttatcataccactacggcactacaaataaagcaaatagttctagtagtcaattatactttcatagtcatggaaaaggccagtaatgataaataatttaccaatttcacagtaagtggcagaaccagaatttgaacccatatctgtctgactccaaaggttgtgccctttctactcaccaagcaatgaaaatattagcaatatgtaggtttctataagtggtatggaaaacataatatatgggcagcataatatgttctgaaaagtaaatgagttaacagatcagccaagatttatagtctccaataccaccctatttcaaatacaagcaattctacaaaacaagtagaattcagttaattagcttggcttggtttgtaccaccaggctggcaattcaggacacaagcaaaggcacagatattaataaataataataacaacaatgtaatatggactctataacataatatattactaaatgtactgaatatatattagaataaaataatcatataataagaagaaccc

SEQ ID NO: 65844 - DNA, 892 bp, Homo sapiens
aatcgagaacaaaatcaaatcaaaagaagagagaggtatactcagtacatattgtgggatcacagctacaaaagcattagatggtaaaattatcctttcctgctttttgtgtttaggatgtctccccgttcaatgttgtggcctggcacgggaattatacaccctacaagtacaacctgaagaatttcatggttatcaactcagtggcctttgaccatgcagacccatccattttcacagtattgactgctaagtctgtccgccctggagtggccattgctgattttgtcatcttcccacctcgatggggggttgctgataagaccttcaggcctccttattaccataggaactgcatgagtgagttcatgggactcatccgaggtcactatgaggcaaagcaaggtgggttcctgccagggggagggagtctacacagcacaatgaccccccatggacctgatgctgactgctttgagaaggccagcaaggtcaagctggcacctgagaggattgccgatggcaccatggcatttatgtttgaatcatctttaagtctggcggtcacaaagtggggactcaaggcctccaggtgtttggatgagaactaccacaagtgctgggagccactcaagagccacttcactcccaactccaggaacccagcagaacctaattgagactggaacattgctaccataattaagagtagatttgtgaagatttcttcagaatctcatgctttctggtagtattggaggagggggttggttaaaatgaaaattcacttttcatagtcaagtaactcagaacttttatggaaacgcatttgcaaagttctatggctgtcaccttaattactcaataaacttgctggtgttctgtggacgta

SEQ ID NO: 65845 - DNA, 1824 bp, Homo sapiens
ccacagttcctttccccgatagcttcaaattctctgccttttgaaataagcctacttttaactggaataaataattggtcaatctctacctcaggtgaagaggaaccaagcctctggaaacacttaggaacaaactgtaaaaaccaaaggcaattgtgtaaccggttaaataagcttgctggactttgtccctgtgtatgagttagacaattctttcagctagtttgagtgacgcactgaccagtgaagcgcagtgaagcagtgggaaccggaatatccaaagagtggtttgaaggagaaagaagcattgtggctttatatcctctgggcctgggtttcctgaagtcaccacacatagaggagagagaaaatggctgagttaaagtacatttctggatttgggaatgagtgttcttcagaggatcctcgctgcccaggttccctgccagaaggacagaataatcctcaggtctgcccctacaatctctatgctgagcagctctcaggatcggctttcacttgtccacggagcaccaataagagaagctggctgtataggattctaccttcagtttctcacaagccctttgaatccattgacgaaggccatgtcactcacaactgggatgaagttgatcctgatcctaaccagcttagatggaaaccatttgagattccaaaagcatctcagaagaaagtagactttgtgagtggcctgcataccttgtgtggagctggagacataaagtctaacaatgggcttgctatccacattttcctctgcaatacctccatggagaacagatgcttttacaattcagatggggacttcttgattgttccgcagaaagggaaccttctcatttacaccgagtttggcaagatgcttgtacagcccaatgagatctgcgtcattcaggatgtctccccgttcaatgttgtggcctggcacgggaattatacaccctacaagtacaacctgaagaatttcatggttatcaactcagtggcctttgaccatgcagcatttatgtttgaatcatctttaagtctggcggtcacaaagtggggactcaaggcctccaggtgtttggatgagaactaccacaagtgctgggagccactcaagagccacttcactcccaactccaggaacccagcagaacctaattgagactggaacattgctaccataattaagagtagatttgtgaagatttcttcagaatctcatgctttctggtagtattggaggagggggttggttaaaatgaaaattcacttttcatagtcaagtaactcagaacttttatggaaacgcatttgcaaagttctatggctgtcaccttaattactcaataaacttgctggtgttctgtggacgtaaaaaaacacaaaaaaacacacacagggcgaaaacaaaacaaccgaaccataacaccaccacacaaatttttcgtgcggcggcggctccggcctcgtgaaaaagtttttaaacaaccacatatttttgggagccgcgggcccacaaatgggtaagtgacaacacactggccacagaggagtcgaccccacagagaaaactgctggacaccatagcaatcgacggatgtgtaactcccaccgcaataaaaataatccgcggcgtgcgtcaccagagagcttgttggagaaacacacacacaggaagggcgcatgcgcaggcctaaacagaggagctcataaacagaggggtcacagaggaaggcggagttgtaactaataaagcgcccgcagtagggcttacaacgataacgcacacaactgacaacgagccagccacgc

SEQ ID NO: 65846 - DNA, 452 bp, Homo sapiens
ccacactctattcaaaatggagtcactcttgttcaaatgcctctgacaaaagcggtgtgacaagcctgggattcccatagtgatcatgctggtaggagtgaggtgttattatttagaaacactattgcacccgctaaggatatgcatggataaggcagctggagaacaaatacaaaaatcttaattaaaagaccgttttgtgaggtcttcaacttcttctccatttcaccaacacgctgcacagtctgtgtattcagcgtcaccaaagagatttttaattcatcagcctggtttttgtggattgttcgttgccttctcagtgctgtaacacatagagacactggtacaggcattaggaaggatgggagaagataccaaatggtataagacatggtctggtatttccagggataggatcatccatttaggaaaacagctacatagagacatgc

SEQ ID NO: 65847 - DNA, 759 bp, Homo sapiens
gttcaagaccagtctgaccaacatggagaaaccccatctctactaaaaatacaaaaaattagctaggcctagtggcgcatgcctgtaatcccagctacttgggaggctgaggtaggagaatcgcttgaacctgggaggcgggggttgtggtaagccgagactgtgtcattgcactccagcctgggcgacaagagcgaaactctgtctcaaaaaaaaaaaaaaacacattacagtgtttgccaacatcctaaaacaaaaaataatgatttttgggaaaaacaaaaaattatttaactattttgattgactatagggatcttagcttggctaaatcaacaatatagcaatgtatcttaatgctctaaaaagtaacaatacctaggactgactgaatgttaatttctggaattcatttatcttgttttatttgccttgttcagtatttttcatttaccatatgaagtttagaaataacaatttccttaagttaacttcaataagacagttttgatggtgggaccttggcagaagtatattgagtcagtgccggctgcgttcatggcttcttgtcagggtagtaacattttgcaaccaaatctgcacagatttgtagccaagtctacaaagtgcttaacagctcttttcattgcatcctgtgagatggttgtgatgatccaggaaatggggtctcaggaatctgaagaagctgcctgagccaaggtgatttctaggagtttttttgtttgtggtatgtgaatt

SEQ ID NO: 65848 - DNA, 293 bp, Homo sapiens
aattgaatcctgtcaacaacgatactcatcactcacttcagatgttactttaagacattctggagcagcgtcatgtgcaggaacaataaggaagtgagtgcttttgtaattcctgaacaactgtgtcttacacttactaagggattcatgggcaatatgactgaataggaacagctccagtctgaagctcccagtgagaccaacatagaaggcaatctgggtgttatgaaagatgtagaccaacagaaacactcatacctttctggtgacaataaaactttgtacatttattt

SEQ ID NO: 65849 - DNA, 600 bp, Homo sapiens
  misc_feature (1)..(4): n is a, c, g, or t
  misc_feature (227)..(227): n is a, c, g, or t
  misc_feature (349)..(349): n is a, c, g, or t
nnnnacttcactaagcagatggagacccccagctgcacacctcttcctctcctctcctctgcacctcaacatgtttccctgtcttctgattcagagaaagaaatgtctgctttcaaggtcagccttgcctcatcctcaggcttcctcagaaaccttgttttctttttcttacagtttcaagctgtctcttgctggcttccccccttgcactacaagtgtgttcacgnctctgctaccttagaaaatgactttctctgatctttattcttcttaactcccgttataccataaggatccattggatccaattttatgttttcagtttctttcttgagtagttctatttgtnaggattgatacttcataaattttattctttcttggaggtcttccaaagaacaaagagaaaatgcacttttaaaaaatacacagaataaaactcattctgtcttggaattaccacatggatccagtgaatcaacctaagttacattacaagatcttaataactaacttgtttttctatatcctgaaacatttagcgatttcatcattctaaaaattatttcatcactactcatcaattattcctaaatacgc

SEQ ID NO: 65850 - DNA, 396 bp, Homo sapiens
gaaaacagactatagggattatcaggagaacaagaaaaaaatgccaagtgttgaatttggaaaagtcgtaacaagttagtctgtagccataaacagaaagtaaaacagaaaatgctccctctacaaaagattccctgtgtgattgaaatgaaatccaaggaaatgtacgaagacataactttgatttagccttcaccagggaaggtagaaaatctcaggaaccaaaattaaataacttgtgatatctctttcctaggacactctttactgaaaagcagtagtgtcagaaatatacccctagtatgaatatatgtatatgtacatatataaacttgtgtttatgtatgtgggtgtggacatacatatgtaggcatggctgtgtgtgtatatactcaa

SEQ ID NO: 65851 - DNA, 423 bp, Homo sapiens
ggatggttgaggggaagaccagggggctggtatgtagttggtccccaacagcagtgtattggtgtactcgaccctccagtgtgattctgggcatgagacaagactcttgttctcatgaagcagggcatcagggaatgggagttggtgaggaaattacattaacatttattgagcaccattctcactataaacctgaacgtaaatattattattattattattattattattattattattattattattattattttagtagagatgaggccttgctgtgttgcctagactggtcttgaactcctgggctcaagcaatcctctcaccttggcctctcaaagtgcctctcaaaggtgtgagccaccatgcccagcctattcgtttttaatttctgaagaaactgaggctaacagctgggtctgg

SEQ ID NO: 65852 - DNA, 626 bp, Homo sapiens
tcaactgagaaaaacaagacaagggcctatgtgtgtctcaggaaaggttaaaagctcagtgccaatgcaagggatttttacaagcaaaagtctcattattaatgaggccagaaaaccaaaatgacaatgatctttgatgatctgtactgacacgcaggggaggtgacttaatcagaaacacacatttactggcaccccctttgtgcccagtccctgctcctcgaaactgatgtttgtatttcagagtttagctgtctttgagtttgctgcagtgaaaagaaatatcccaagtgtgactgggaagagaagacccgggacaggccagaaactggagtgaggaagaaagaaccacagaatattaatgtaatgaataactttcaagtcctatctggtccgtgtcctggcaaagtcccttggggtctctcccctgctttccgttcatcaggatgactgagctcagtaattgtaacaaagggagtgtagtaggcaaggggacaaaacccatagtatcccacccctgattgacttattaactcaatgaacacttattgaatacctacgatatgccagaagcagttccgggtactggaaatacatcagtgaataaaacagccactcatcctagt

SEQ ID NO: 65853 - DNA, 417 bp, Homo sapiens
ctactactactaaattcgcggccgcgtcgacctgaggtgggaggatcatgtgagcccccaggatgtggaagctgcagtgggctatgatcacgccattgcattccagtccagcctagtgacatagcaaggctctgtctgttagaaaaaaataaggccaggtgtgatggttcaggcctgtaatcccagcactgtgggaagctaaggctgaggtttgagaccagctggcgcaacatggcgaaatcctgtttctactaaaaatacaaaatattagccaggtgtggtggtgcatgcttgtagttccagctactcaggatactaaggtgggaggatcgcttgagcctggaaggtcaaggctacggcgagctttgatggttccactgcactccagcctgggcaacgcagccagactctgtctca

SEQ ID NO: 65854 - DNA, 817 bp, Homo sapiens
  misc_feature (13)..(13): n is a, c, g, or t
  misc_feature (16)..(16): n is a, c, g, or t
  misc_feature (28)..(28): n is a, c, g, or t
  misc_feature (31)..(31): n is a, c, g, or t
ttttcggatgtgnaanaaaagtaatagnaanacctttctgagattcacttctacttaaggcataattaatgctcacagcttcttgggtgctttctcacgggtaaagccatggcatccgtaccttccattggttgccttctagccagaaatcagtattatcgaaagtccagtgtttcttcagttagttctttaactagctctgattctgttaacttcatagatgacgacaaaccacagcaagggttgcctgaagtggcagaatccacctggtggtttaaatcgtttttccattctgaacctgtgctttcaaatgtgagaataaaagatctgtctgctactggattacagatgagcactttgtagctgatcatctttgcactgccatttgatgaacatgttggtaacggttgcctgccttatgtagcatgaacagttgattctgacaatcaagatcctctgcctgctgcagtggtccatacatgaacagctccccttcagcgccccagctattccaggactcttctccattgtaagaagacaaaaatgtgtctgagatctcatttatgagacaagatcacagcagccactgatataacaaaagtttaggcatttttctcaacacaaagactatcgctggaagtggcacttgctacctggtgcatctttgaaaagtgtgcctttagaaacaagacacccttttaaagtaatatgtcttcaaatgttgtgacttacataaagtagctctttcattacttatatcatttttattaaaaaaacttaagttagactctttttctgtctgttgagtgatttattt

SEQ ID NO: 65855 - DNA, 929 bp, Homo sapiens
gacggacctaccactggccctgcgtatgtggtgcagcctctcttcaatccctaagaactggttctttcaaagcatgtattttctgaagaaactttagaaccacgtttattttaaaagaacgaattggagaaaacaaatcgattaatgctcacagcttcttgggtgctttctcacgggtaaagccatggcatccgtaccttccattggttgccttctagccagaaatcagtattatcgaaagtccagtgtttcttcagttagttctttaactagctctgattctgttaacttcatagatgacgacaaaccacagcaagggttgcctgaagtggcagaatccacctggtggtttaaatcgtttttccattctgaacctgtgctttcaaatgtgagaataaaagatctgtctgctactggattacagatgagcactttgtagctgatcatctttgcactgccatttgatgaacatgttggtaacggttgcctgccttatgtagcatgaacagttgattctgacaatcaagatcctctgcctgctgcagtggtccatacatgaacagctccccttcagcgccccagctattccaggactcttctccattgtaagaagacaaaaatgtgtctgagatctcatttatgagacaagatcacagcagccactgatataacaaaagtttaggcatttttctcaacacaaagactatcgctggaagtggcacttgctacctggtgcatctttgaaaagtgtgcctttagaaacaagacacccttttaaagtaatatgttccagtggctcataagagcctccatttatatttttaaaactgttgtcttaaaaaaaaagaaatataaaaaagaaaagggcgcgcaaaaaagggggcggaaagagtaacggaggtcaaaccgcaggtgagatatcgcctggg

SEQ ID NO: 65856 - DNA, 810 bp, Homo sapiens
gacggacctaccactggccctgcgtatgtggtgcagcctctcttcaatccctaagaactggttctttcaaagcatgtattttctgaagaaactttagaaccacgtttattttaaaagaacgaattggagaaaacaaatcgattaatgctcacagcttcttgggtgctttctcacgggtaaagccatggcatccgtaccttccattggttgccttctagccagaaatcagtattatcgaaagtccagtgtttcttcagttagttctttaactagctctgattctgttaacttcatagatgacgacaaaccacagcaagggttgcctgaagtggcagaatccacctggtggtttaaatcgtttttccattctgaacctgtgctttcaaatgtgagaataaaagatctgtctgctactggcatgaacagttgattctgacaatcaagatcctctgcctgctgcagtggtccatacatgaacagctccccttcagcgccccagctattccaggactcttctccattgtaagaagacaaaaatgtgtctgagatctcatttatgagacaagatcacagcagccactgatataacaaaagtttaggcatttttctcaacacaaagactatcgctggaagtggcacttgctacctggtgcatctttgaaaagtgtgcctttagaaacaagacacccttttaaagtaatatgtcttcaaatgttgtgacttacataaagtagctctttcattacttatatcatttttattaaaaaaacttaagttagactctttttctgtctgttgagtgatttattt

SEQ ID NO: 65857 - DNA, 893 bp, Homo sapiens
gacggacctaccactggccctgcgtatgtggtgcagcctctcttcaatccctaagaactggttctttcaaagcatgtattttctgaagaaactttagaaccacgtttattttaaaagaacgaattggagaaaacaaatcgattaatgctcacagcttcttgggtgctttctcacgggtaaagccatggcatccgtaccttccattggttgccttctagccagaaatcagtattatcgaaagtccagtgtttcttcagttagttctttaactagctctgattctgttaacttcatagatgacgacaaaccacagcaagggttgcctgaagtggcagaatccacctggtggtttaaatcgtttttccattctgaacctgtgctttcaaatgtgagaataaaagatctgtctgctactggattacagatgagcactttgtagctgatcatctttgcactgccatttgatgaacatgttggtaacggttgcctgccttatgtagcatgaacagttgattctgacaatcaagatcctctgcctgctgcagtggtccatacatgaacagctccccttcagcgccccagctattccaggactcttctccattgtaagaagacaaaaatgtgtctgagatctcatttatgagacaagatcacagcagccactgatataacaaaagtttaggcatttttctcaacacaaagactatcgctggaagtggcacttgctacctggtgcatctttgaaaagtgtgcctttagaaacaagacacccttttaaagtaatatgtcttcaaatgttgtgacttacataaagtagctctttcattacttatatcatttttattaaaaaaacttaagttagactctttttctgtctgttgagtgatttattt

SEQ ID NO: 65858 - DNA, 177 bp, Homo sapiens
acaagccaggaataaatgatttcaaaccatgctacttgacagtttgtatataaatgatgcggatttgcttgtctggttgccagttatttatttgtttaatatcatttgtttcctacagagtccagtgtttcttcagttagttctttaactagctctgattctgttaacttcatagat

SEQ ID NO: 65859 - DNA, 2759 bp, Homo sapiens
ttttttgtcctcagccccagcagccgcccggctggctgcagaggccgaggggccgagggcaccggagcgcaagggattccgcggcaccacgtgtccaagccgggctaaggcgggcggagcgggccgggcccggctccccgggcctgagcgcaaaccagcagcgacgcggggtcccgtccgcaccggcacccggcccagccggggcccggtctcccgggcgcacgtaggctgcctcctcctggacagcgcgatggggcccttctgggcgagaaaggatgacacaggctgtcctagcagccagtcagtgtctcctgtgaagacaccctcagatgctggaaacagccccattggcttttgccctggaagtgatgaaggcttcaccagaaagaaatgcacgattggaatggttggtgaaggaagcattcagtcctctcgatataagaaggaatcaaagtcaggccttgtgaaaccaggtagtgaagctgattttagctcctcgagcagcacaggcagcatttccgctcctgaggtccatatgtcgactgcgggaagcaagcggtcttcttcttcacgcaatcgaggtcctcatgggcggagtaatggagcttcgtcacacaagcctggcagcagcccatcatccccgcgggaaaaggaccttctgtccatgctgtgcaggaatcagctgagccctgtcaatatccatcccagttatgcaccttcttccccaagcagtagcaactcaggctcctacaaaggaagcgactgtagccccatcatgaggcgttctggaaggtacatgtcttgcggtgaaaatcatggtgtcagacccccaaacccagagcagtatttgactccactgcagcagaaagaggtgacagtgagacacctcaaaaccaagctgaaggaatctgagcgccgactccatgaaagggaaagtgaaatcgtggagcttaagtcccagctggcccgcatgcgagaggactggattgaggaggagtgtcaccgggtagaggcccagttggcactcaaagaagccaggaaagagattaaacagctcaaacaggtcatcgaaaccatgcggagcagcttggctgataaagataaaggcattcagaaatattttgtggacataaacatccaaaacaagaagctggagtctctccttcagagcatggagatggcacacagtggctctctgagggacgaactgtgcctagactttccatgtgattccccagagaagagcttaaccctcaacccccctcttgacacaatggcagatgggttatctctggaagagcaggtcacgggggaaggggctgacagggagctactggtaggagatagcatagccaacagcacagatttgttcgatgagatagtgacagccaccaccacagaatctggtgacctggagcttgtgcattccacccctggggctaacgtcctggagctgctgcccatagtcatgggtcaggaggagggcagtgtggtggtggagcgagccgttcagaccgacgtggtgccctacagcccagccatctcagagctcattcagagtgtgctgcagaagctccaggacccctgtccctcgagcttggcgtcccctgatgagtctgaaccagactcgatggagagcttcccagagtccctctctgccttagtggttgatttaactccaagaaatccaaactcagccatccttttgtctcccgtggagaccccctacgccaatgtggatgcagaagttcatgcaaaccgcctcatgagagagctggattttgcagcctgcgtggaagagaggttggatggtgtcatcccactggctcgcgggggcgtcgtgaggcagtactggagcagcagcttcctggtggatctcctggctgtggctgcccccgtggtccccacggttctgtgggcattcagtactcagagagggggaacggatcctgtgtataacatcggggccttgctcaggggctgttgcgtggttgccctgcattcgctccgccgcaccgccttccgtatcaaaacctaaatagaagttgttgttaccgtgtgccaatgtgtcccatgtgggttgtgccaggtagagaaacaggaagtcaatcatctgtgacagtctctattctgtcgttttgctccttggtatttgatttgcactatatttagttgaagcctgttcactgtttaaaaccggaggtatcttcaaaggcatggagacctggttccagtaaatgtcccaccagtggggtatagaaagcatgctcatgaccctgccgtgtcgtctgaggtacccgttcttatcctagtggttcaggaagagaaaacgcagtttgcactttcaagacagcttctctaaggctggcatgttatctccttgctttgctttttgccgttttaaaatgtgtaattgttccagcattccaatggtcttgtgcatagcaggggactgtaaccaaaaataaacatgtatttgtgtaattggtttgaagaagtcttgaatagctctttactgtcttacttggggttgataagatttgagtgtttgcaattttttactaaatgtagctccaaagtcttaaatggcttgtttgttcttaaactgttaattgatgaaactgtgcataagtttacaatgtactaacttattttgcttattatatatagtgttttattggaaattgtaaccacacacttcagcatgatgaaaataaagattagtgtttccatttaaataaatgttttatcctcccata

SEQ ID NO: 65860 - DNA, 347 bp, Homo sapiens
  misc_feature (43)..(43): n is a, c, g, or t
  misc_feature (340)..(340): n is a, c, g, or t
accacctagcatatttcctattctgatggagagaaactccatnccaagcagctgtactttttcaacttgaaaatctccaaggaaaagagccttttccttctgttgactaaggtttagatgcagaccagggaatctttcctgtcacttggctgtttaaaaccggaggtatcttcaaaggcatggagacctggttccagtaaatgtcccaccagtggggtatagaaagcatgctcatgaccctgccgtgtcgtctgaggggcttctttacttaaacctcatgaaccaacctcttctagtttcaaatgattcttctgcagctttgtcacctctcccagatttnagaaaat

SEQ ID NO: 65861 - DNA, 2852 bp, Homo sapiens
ggcggcgcgttggagcctcaccaagagccgccgcccgcagcccgcgccggctcagcgcagtctcctcgctccgtgctcgcaggtgcctcctcctggacggcggcagcggcggcgcgaggagccggcgggcagcggcgcgatggggcccctccgcgagagcaagaaggagcacagagtgcagcatcatgacaaggagatttctcgaagccgaattccccggttgattcttcggccccatatgccccaacaacagcacaaagtgtccccagcctctgagtctcctttctctgaggaagagagcagagagttcaaccccagcagctctgggcgctcagcgaggaccgttagcagcaacagcttctgctcagatgacacaggctgtcctagcagccagtcagtgtctcctgtgaagacaccctcagatgctggaaacagccccattggcttttgccctggaagtgatgaaggcttcaccagaaagaaatgcacgattggaatggttggtgaaggaagcattcagtcctctcgatataagaaggaatcaaagtcaggccttgtgaaaccaggtagtgaagctgattttagctcctcgagcagcacaggcagcatttccgctcctgaggtccatatgtcgactgcgggaagcaagcggtcttcttcttcacgcaatcgaggtcctcatgggcggagtaatggagcttcgtcacacaagcctggcagcagcccatcatccccgcgggaaaaggaccttctgtccatgctgtgcaggaatcagctgagccctgtcaatatccatcccagttatgcaccttcttccccaagcagtagcaactcaggctcctacaaaggaagcgactgtagccccatcatgaggcgttctggaaggtacatgtcttgcggtgaaaatcatggtgtcagacccccaaacccagagcagtatttgactccactgcagcagaaagaggtgacagtgagacacctcaaaaccaagctgaaggaatctgagcgccgactccatgaaagggaaagtgaaatcgtggagcttaagtcccagctggcccgcatgcgagaggactggattgaggaggagtgtcaccgggtagaggcccagttggcactcaaagaagccaggaaagagattaaacagctcaaacaggtcatcgaaaccatgcggagcagcttggctgataaagataaaggcattcagaaatattttgtggacataaacatccaaaacaagaagctggagtctctccttcagagcatggagatggcacacagtggctctctgagggacgaactgtgcctagactttccatgtgattccccagagaagagcttaaccctcaacccccctcttgacacaatggcagatgggttatctctggaagagcaggtcacgggggaaggggctgacagggagctactggtaggagatagcatagccaacagcacagatttgttcgatgagatagtgacagccaccaccacagaatctggtgacctggagcttgtgcattccacccctggggctaacgtcctggagctgctgcccatagtcatgggtcaggaggagggcagtgtggtggtggagcgagccgttcagaccgacgtggtgccctacagcccagccatctcagagctcattcagagtgtgctgcagaagctccaggacccctgtccctcgagcttggcgtcccctgatgagtctgaaccagactcgatggagagcttcccagagtccctctctgccttagtggttgatttaactccaagaaatccaaactcagccatccttttgtctcccgtggagaccccctacgccaatgtggatgcagaagttcatgcaaaccgcctcatgagagagctggattttgcagcctgcgtggaagagaggttggatggtgtcatcccactggctcgcgggggcgtcgtgaggcagtactggagcagcagcttcctggtggatctcctggctgtggctgcccccgtggtccccacggttctgtgggcattcagtactcagagagggggaacggatcctgtgtataacatcggggccttgctcaggggctgttgcgtggttgccctgcattcgctccgccgcaccgccttccgtatcaaaacctaaatagaagttgttgttaccgtgtgccaatgtgtcccatgtgggttgtgccaggtagagaaacaggaagtcaatcatctgtgacagtctctattctgtcgttttgctccttggtatttgatttgcactatatttagttgaagcctgttcactgtttaaaaccggaggtatcttcaaaggcatggagacctggttccagtaaatgtcccaccagtggggtatagaaagcatgctcatgaccctgccgtgtcgtctgaggtacccgttcttatcctagtggttcaggaagagaaaacgcagtttgcactttcaagacagcttctctaaggctggcatgttatctccttgctttgctttttgccgttttaaaatgtgtaattgttccagcattccaatggtcttgtgcatagcaggggactgtaaccaaaaataaacatgtatttgtgtaattggtttgaagaagtcttgaatagctctttactgtcttacttggggttgataagatttgagtgtttgcaattttttactaaatgtagctccaaagtcttaaatggcttgtttgttcttaaactgttaattgatgaaactgtgcataagtttacaatgtactaacttattttgcttattatatatagtgttttattggaaattgtaaccacacacttcagcatgatgaaaataaagattagtgtttccatttaaataaatgttttatcctcccata

SEQ ID NO: 65862 - DNA, 3002 bp, Homo sapiens
aacattaggtcaccgagagagacagcagctcttgctcacacagctgataggattaggagatggtgctttgtcagccctgattgagcccaagaaaaccccctgcatacacaggcatcaacaaatattgactggatcatctggacctgacttagctgccctttggaaagttctgttcaatcagctggatagagctgtttgttttcctcacctaaccctcacagctatcctagaggtgcctcctcctggacggcggcagcggcggcgcgaggagccggcgggcagcggcgcgatggggcccctccgcgagagcaagaaggagcacagagtgcagcatcatgacaaggagatttctcgaagccgaattccccggttgattcttcggccccatatgccccaacaacagcacaaagtgtccccagcctctgagtctcctttctctgaggaagagagcagagagttcaaccccagcagctctgggcgctcagcgaggaccgttagcagcaacagcttctgctcagatgacacaggctgtcctagcagccagtcagtgtctcctgtgaagacaccctcagatgctggaaacagccccattggcttttgccctggaagtgatgaaggcttcaccagaaagaaatgcacgattggaatggttggtgaaggaagcattcagtcctctcgatataagaaggaatcaaagtcaggccttgtgaaaccaggtagtgaagctgattttagctcctcgagcagcacaggcagcatttccgctcctgaggtccatatgtcgactgcgggaagcaagcggtcttcttcttcacgcaatcgaggtcctcatgggcggagtaatggagcttcgtcacacaagcctggcagcagcccatcatccccgcgggaaaaggaccttctgtccatgctgtgcaggaatcagctgagccctgtcaatatccatcccagttatgcaccttcttccccaagcagtagcaactcaggctcctacaaaggaagcgactgtagccccatcatgaggcgttctggaaggtacatgtcttgcggtgaaaatcatggtgtcagacccccaaacccagagcagtatttgactccactgcagcagaaagaggtgacagtgagacacctcaaaaccaagctgaaggaatctgagcgccgactccatgaaagggaaagtgaaatcgtggagcttaagtcccagctggcccgcatgcgagaggactggattgaggaggagtgtcaccgggtagaggcccagttggcactcaaagaagccaggaaagagattaaacagctcaaacaggtcatcgaaaccatgcggagcagcttggctgataaagataaaggcattcagaaatattttgtggacataaacatccaaaacaagaagctggagtctctccttcagagcatggagatggcacacagtggctctctgagggacgaactgtgcctagactttccatgtgattccccagagaagagcttaaccctcaacccccctcttgacacaatggcagatgggttatctctggaagagcaggtcacgggggaaggggctgacagggagctactggtaggagatagcatagccaacagcacagatttgttcgatgagatagtgacagccaccaccacagaatctggtgacctggagcttgtgcattccacccctggggctaacgtcctggagctgctgcccatagtcatgggtcaggaggagggcagtgtggtggtggagcgagccgttcagaccgacgtggtgccctacagcccagccatctcagagctcattcagagtgtgctgcagaagctccaggacccctgtccctcgagcttggcgtcccctgatgagtctgaaccagactcgatggagagcttcccagagtccctctctgccttagtggttgatttaactccaagaaatccaaactcagccatccttttgtctcccgtggagaccccctacgccaatgtggatgcagaagttcatgcaaaccgcctcatgagagagctggattttgcagcctgcgtggaagagaggttggatggtgtcatcccactggctcgcgggggcgtcgtgaggcagtactggagcagcagcttcctggtggatctcctggctgtggctgcccccgtggtccccacggttctgtgggcattcagtactcagagagggggaacggatcctgtgtataacatcggggccttgctcaggggctgttgcgtggttgccctgcattcgctccgccgcaccgccttccgtatcaaaacctaaatagaagttgttgttaccgtgtgccaatgtgtcccatgtgggttgtgccaggtagagaaacaggaagtcaatcatctgtgacagtctctattctgtcgttttgctccttggtatttgatttgcactatatttagttgaagcctgttcactgtttaaaaccggaggtatcttcaaaggcatggagacctggttccagtaaatgtcccaccagtggggtatagaaagcatgctcatgaccctgccgtgtcgtctgaggtacccgttcttatcctagtggttcaggaagagaaaacgcagtttgcactttcaagacagcttctctaaggctggcatgttatctccttgctttgctttttgccgttttaaaatgtgtaattgttccagcattccaatggtcttgtgcatagcaggggactgtaaccaaaaataaacatgtatttgtgtaattggtttgaagaagtcttgaatagctctttactgtcttacttggggttgataagatttgagtgtttgcaattttttactaaatgtagctccaaagtcttaaatggcttgtttgttcttaaactgttaattgatgaaactgtgcataagtttacaatgtactaacttattttgcttattatatatagtgttttattggaaattgtaaccacacacttcagcatgatgaaaataaagattagtgtttccatttaaataaatgttttatcctcccata

SEQ ID NO: 65863 - DNA, 2416 bp, Homo sapiens
tgagactgtactctactgagatatgagctgcacacactgtatttctgcaaaagacataccccagcctgtgctgggaggctgtttgcagaggcaatgtttgccatgaaagtctatggagcttaccttctaagtagtgaagctgattttagctcctcgagcagcacaggcagcatttccgctcctgaggtccatatgtcgactgcgggaagcaagcggtcttcttcttcacgcaatcgaggtcctcatgggcggagtaatggagcttcgtcacacaagcctggcagcagcccatcatccccgcgggaaaaggaccttctgtccatgctgtgcaggaatcagctgagccctgtcaatatccatcccagttatgcaccttcttccccaagcagtagcaactcaggctcctacaaaggaagcgactgtagccccatcatgaggcgttctggaaggtacatgtcttgcggtgaaaatcatggtgtcagacccccaaacccagagcagtatttgactccactgcagcagaaagaggtgacagtgagacacctcaaaaccaagctgaaggaatctgagcgccgactccatgaaagggaaagtgaaatcgtggagcttaagtcccagctggcccgcatgcgagaggactggattgaggaggagtgtcaccgggtagaggcccagttggcactcaaagaagccaggaaagagattaaacagctcaaacaggtcatcgaaaccatgcggagcagcttggctgataaagataaaggcattcagaaatattttgtggacataaacatccaaaacaagaagctggagtctctccttcagagcatggagatggcacacagtggctctctgagggacgaactgtgcctagactttccatgtgattccccagagaagagcttaaccctcaacccccctcttgacacaatggcagatgggttatctctggaagagcaggtcacgggggaaggggctgacagggagctactggtaggagatagcatagccaacagcacagatttgttcgatgagatagtgacagccaccaccacagaatctggtgacctggagcttgtgcattccacccctggggctaacgtcctggagctgctgcccatagtcatgggtcaggaggagggcagtgtggtggtggagcgagccgttcagaccgacgtggtgccctacagcccagccatctcagagctcattcagagtgtgctgcagaagctccaggacccctgtccctcgagcttggcgtcccctgatgagtctgaaccagactcgatggagagcttcccagagtccctctctgccttagtggttgatttaactccaagaaatccaaactcagccatccttttgtctcccgtggagaccccctacgccaatgtggatgcagaagttcatgcaaaccgcctcatgagagagctggattttgcagcctgcgtggaagagaggttggatggtgtcatcccactggctcgcgggggcgtcgtgaggcagtactggagcagcagcttcctggtggatctcctggctgtggctgcccccgtggtccccacggttctgtgggcattcagtactcagagagggggaacggatcctgtgtataacatcggggccttgctcaggggctgttgcgtggttgccctgcattcgctccgccgcaccgccttccgtatcaaaacctaaatagaagttgttgttaccgtgtgccaatgtgtcccatgtgggttgtgccaggtagagaaacaggaagtcaatcatctgtgacagtctctattctgtcgttttgctccttggtatttgatttgcactatatttagttgaagcctgttcactgtttaaaaccggaggtatcttcaaaggcatggagacctggttccagtaaatgtcccaccagtggggtatagaaagcatgctcatgaccctgccgtgtcgtctgaggtacccgttcttatcctagtggttcaggaagagaaaacgcagtttgcactttcaagacagcttctctaaggctggcatgttatctccttgctttgctttttgccgttttaaaatgtgtaattgttccagcattccaatggtcttgtgcatagcaggggactgtaaccaaaaataaacatgtatttgtgtaattggtttgaagaagtcttgaatagctctttactgtcttacttggggttgataagatttgagtgtttgcaattttttactaaatgtagctccaaagtcttaaatggcttgtttgttcttaaactgttaattgatgaaactgtgcataagtttacaatgtactaacttattttgcttattatatatagtgttttattggaaattgtaaccacacacttcagcatgatgaaaataaagattagtgtttccatttaaataaatgttttatcctcccata

SEQ ID NO: 65864 - DNA, 520 bp, Homo sapiens
tctgagcgccgactccatgaaaggtgaatctgccttccttgaacggtggggtgtaggacaacttctttctccataaaatgaaatatgaacccaaactatagaaagatagaaaagaaaaaatgattgtattcaattttggtcaaatttttaaagtcagcctctgaaaagagtcatttcataactctgtgtgatatggctgtttcaggagttcagggaggcccgtaggttagaggggaacctttgtttttcgttgttgttgtcgttttttgttgttgttgttttgcagtgtatacagctttgatgtgaaataatcaggtgtgtgcatgactatttttaaatggcaaaaacacgtgcgggaacaatcccatacttccagcagaatgggtcacaaccgtggaccaattaagccgtgtttatatccgtgcatgaatggatatctgtgtgcattgtgattcctgcatgctatttctgtgccgaaggaaggggctcattgttcttggccaagtgttaaggctgaaaa

SEQ ID NO: 65865 - DNA, 2647 bp, Homo sapiens
ggcggcgcgttggagcctcaccaagagccgccgcccgcagcccgcgccggctcagcgcagtctcctcgctccgtgctcgcaggtgcctcctcctggacggcggcagcggcggcgcgaggagccggcgggcagcggcgcgatggggcccctccgcgagagcaagatgacacaggctgtcctagcagccagtcagtgtctcctgtgaagacaccctcagatgctggaaacagccccattggcttttgccctggaagtgatgaaggcttcaccagaaagaaatgcacgattggaatggttggtgaaggaagcattcagtcctctcgatataagaaggaatcaaagtcaggccttgtgaaaccaggtagtgaagctgattttagctcctcgagcagcacaggcagcatttccgctcctgaggtccatatgtcgactgcgggaagcaagcggtcttcttcttcacgcaatcgaggtcctcatgggcggagtaatggagcttcgtcacacaagcctggcagcagcccatcatccccgcgggaaaaggaccttctgtccatgctgtgcaggaatcagctgagccctgtcaatatccatcccagttatgcaccttcttccccaagcagtagcaactcaggctcctacaaaggaagcgactgtagccccatcatgaggcgttctggaaggtacatgtcttgcggtgaaaatcatggtgtcagacccccaaacccagagcagtatttgactccactgcagcagaaagaggtgacagtgagacacctcaaaaccaagctgaaggaatctgagcgccgactccatgaaagggaaagtgaaatcgtggagcttaagtcccagctggcccgcatgcgagaggactggattgaggaggagtgtcaccgggtagaggcccagttggcactcaaagaagccaggaaagagattaaacagctcaaacaggtcatcgaaaccatgcggagcagcttggctgataaagataaaggcattcagaaatattttgtggacataaacatccaaaacaagaagctggagtctctccttcagagcatggagatggcacacagtggctctctgagggacgaactgtgcctagactttccatgtgattccccagagaagagcttaaccctcaacccccctcttgacacaatggcagatgggttatctctggaagagcaggtcacgggggaaggggctgacagggagctactggtaggagatagcatagccaacagcacagatttgttcgatgagatagtgacagccaccaccacagaatctggtgacctggagcttgtgcattccacccctggggctaacgtcctggagctgctgcccatagtcatgggtcaggaggagggcagtgtggtggtggagcgagccgttcagaccgacgtggtgccctacagcccagccatctcagagctcattcagagtgtgctgcagaagctccaggacccctgtccctcgagcttggcgtcccctgatgagtctgaaccagactcgatggagagcttcccagagtccctctctgccttagtggttgatttaactccaagaaatccaaactcagccatccttttgtctcccgtggagaccccctacgccaatgtggatgcagaagttcatgcaaaccgcctcatgagagagctggattttgcagcctgcgtggaagagaggttggatggtgtcatcccactggctcgcgggggcgtcgtgaggcagtactggagcagcagcttcctggtggatctcctggctgtggctgcccccgtggtccccacggttctgtgggcattcagtactcagagagggggaacggatcctgtgtataacatcggggccttgctcaggggctgttgcgtggttgccctgcattcgctccgccgcaccgccttccgtatcaaaacctaaatagaagttgttgttaccgtgtgccaatgtgtcccatgtgggttgtgccaggtagagaaacaggaagtcaatcatctgtgacagtctctattctgtcgttttgctccttggtatttgatttgcactatatttagttgaagcctgttcactgtttaaaaccggaggtatcttcaaaggcatggagacctggttccagtaaatgtcccaccagtggggtatagaaagcatgctcatgaccctgccgtgtcgtctgaggtacccgttcttatcctagtggttcaggaagagaaaacgcagtttgcactttcaagacagcttctctaaggctggcatgttatctccttgctttgctttttgccgttttaaaatgtgtaattgttccagcattccaatggtcttgtgcatagcaggggactgtaaccaaaaataaacatgtatttgtgtaattggtttgaagaagtcttgaatagctctttactgtcttacttggggttgataagatttgagtgtttgcaattttttactaaatgtagctccaaagtcttaaatggcttgtttgttcttaaactgttaattgatgaaactgtgcataagtttacaatgtactaacttattttgcttattatatatagtgttttattggaaattgtaaccacacacttcagcatgatgaaaataaagattagtgtttccatttaaataaatgttttatcctcccata

SEQ ID NO: 65866 - DNA, 3045 bp, Homo sapiens
ttttttgtcctcagccccagcagccgcccggctggctgcagaggccgaggggccgagggcaccggagcgcaagggattccgcggcaccacgtgtccaagccgggctaaggcgggcggagcgggccgggcccggctccccgggcctgagcgcaaaccagcagcgacgcggggtcccgtccgcaccggcacccggcccagccggggcccggtctcccgggcgcacgtaggctgcctcctcctggacagcgcgatggggcccttctgggcgagaaagggtgcctcctcctggacggcggcagcggcggcgcgaggagccggcgggcagcggcgcgatggggcccctccgcgagagcaagaaggagcacagagtgcagcatcatgacaaggagatttctcgaagccgaattccccggttgattcttcggccccatatgccccaacaacagcacaaagtgtccccagcctctgagtctcctttctctgaggaagagagcagagagttcaaccccagcagctctgggcgctcagcgaggaccgttagcagcaacagcttctgctcagatgacacaggctgtcctagcagccagtcagtgtctcctgtgaagacaccctcagatgctggaaacagccccattggcttttgccctggaagtgatgaaggcttcaccagaaagaaatgcacgattggaatggttggtgaaggaagcattcagtcctctcgatataagaaggaatcaaagtcaggccttgtgaaaccaggtagtgaagctgattttagctcctcgagcagcacaggcagcatttccgctcctgaggtccatatgtcgactgcgggaagcaagcggtcttcttcttcacgcaatcgaggtcctcatgggcggagtaatggagcttcgtcacacaagcctggcagcagcccatcatccccgcgggaaaaggaccttctgtccatgctgtgcaggaatcagctgagccctgtcaatatccatcccagttatgcaccttcttccccaagcagtagcaactcaggctcctacaaaggaagcgactgtagccccatcatgaggcgttctggaaggtacatgtcttgcggtgaaaatcatggtgtcagacccccaaacccagagcagtatttgactccactgcagcagaaagaggtgacagtgagacacctcaaaaccaagctgaaggaatctgagcgccgactccatgaaagggaaagtgaaatcgtggagcttaagtcccagctggcccgcatgcgagaggactggattgaggaggagtgtcaccgggtagaggcccagttggcactcaaagaagccaggaaagagattaaacagctcaaacaggtcatcgaaaccatgcggagcagcttggctgataaagataaaggcattcagaaatattttgtggacataaacatccaaaacaagaagctggagtctctccttcagagcatggagatggcacacagtggctctctgagggacgaactgtgcctagactttccatgtgattccccagagaagagcttaaccctcaacccccctcttgacacaatggcagatgggttatctctggaagagcaggtcacgggggaaggggctgacagggagctactggtaggagatagcatagccaacagcacagatttgttcgatgagatagtgacagccaccaccacagaatctggtgacctggagcttgtgcattccacccctggggctaacgtcctggagctgctgcccatagtcatgggtcaggaggagggcagtgtggtggtggagcgagccgttcagaccgacgtggtgccctacagcccagccatctcagagctcattcagagtgtgctgcagaagctccaggacccctgtccctcgagcttggcgtcccctgatgagtctgaaccagactcgatggagagcttcccagagtccctctctgccttagtggttgatttaactccaagaaatccaaactcagccatccttttgtctcccgtggagaccccctacgccaatgtggatgcagaagttcatgcaaaccgcctcatgagagagctggattttgcagcctgcgtggaagagaggttggatggtgtcatcccactggctcgcgggggcgtcgtgaggcagtactggagcagcagcttcctggtggatctcctggctgtggctgcccccgtggtccccacggttctgtgggcattcagtactcagagagggggaacggatcctgtgtataacatcggggccttgctcaggggctgttgcgtggttgccctgcattcgctccgccgcaccgccttccgtatcaaaacctaaatagaagttgttgttaccgtgtgccaatgtgtcccatgtgggttgtgccaggtagagaaacaggaagtcaatcatctgtgacagtctctattctgtcgttttgctccttggtatttgatttgcactatatttagttgaagcctgttcactgtttaaaaccggaggtatcttcaaaggcatggagacctggttccagtaaatgtcccaccagtggggtatagaaagcatgctcatgaccctgccgtgtcgtctgaggtacccgttcttatcctagtggttcaggaagagaaaacgcagtttgcactttcaagacagcttctctaaggctggcatgttatctccttgctttgctttttgccgttttaaaatgtgtaattgttccagcattccaatggtcttgtgcatagcaggggactgtaaccaaaaataaacatgtatttgtgtaattggtttgaagaagtcttgaatagctctttactgtcttacttggggttgataagatttgagtgtttgcaattttttactaaatgtagctccaaagtcttaaatggcttgtttgttcttaaactgttaattgatgaaactgtgcataagtttacaatgtactaacttattttgcttattatatatagtgttttattggaaattgtaaccacacacttcagcatgatgaaaataaagattagtgtttccatttaaataaatgttttatcctcccata

SEQ ID NO: 65867 - DNA, 3068 bp, Homo sapiens
ggcggcgcgttggagcctcaccaagagccgccgcccgcagcccgcgccggctcagcgcagtctcctcgctccgtgctcgcaggtgcctcctcctggacggcggcagcggcggcgcgaggagccggcgggcagcggcgcgatggggcccctccgcgagagcaagaaggagcacagagtgcagcatcatgacaaggagatttctcgaagccgaattccccggttgattcttcggccccatatgccccaacaacagcacaaagtgtccccagcctctgagtctcctttctctgaggaagagagcagagagttcaaccccagcagctctgggcgctcagcgaggaccgttagcagcaacagcttctgctcagatgacacaggctgtcctagcagccagtcagtgtctcctgtgaagacaccctcagatgctggaaacagccccattggcttttgccctggaagtgatgaaggcttcaccagaaagaaatgcacgattggaatggttggtgaaggaagcattcagtcctctcgatataagaaggaatcaaagtcaggccttgtgaaaccaggtagtgaagctgattttagctcctcgagcagcacaggcagcatttccgctcctgaggtccatatgtcgactgcgggaagcaagcggtcttcttcttcacgcaatcgaggtcctcatgggcggagtaatggagcttcgtcacacaagcctggcagcagcccatcatccccgcgggaaaaggaccttctgtccatgctgtgcaggaatcagctgagccctgtcaatatccatcccagttatgcaccttcttccccaagcagtagcaactcaggctcctacaaaggaagcgactgtagccccatcatgaggcgttctggaaggtacatgtcttgcggtgaaaatcatggtgtcagacccccaaacccagagcagtatttgactccactgcagcagaaagaggtgacagtgagacacctcaaaaccaagctgaaggaatctgagcgccgactccatgaaagggaaagtgaaatcgtggagcttaagtcccagctggcccgcatgcgagaggactggattgaggaggagtgtcaccgggtagaggcccagttggcactcaaagaagccaggaaagagattaaacagctcaaacaggtcatcgaaaccatgcggagcagcttggctgataaagataaaggcattcagaaatattttgtggacataaacatccaaaacaagaagctggagtctctccttcagagcatggagatggcacacagtggctctctgagggacgaactgtgcctagactttccatgtgattccccagagaagagcttaaccctcaacccccctcttgacacaatggcagatgggttatctctggaagagcaggtcacgggggaaggggctgacagggagctactggtaggagatagcatagccaacagcacagatttgttcgatgagatagtgacagccaccaccacagaatctggtgacctggagcttgtgcattccacccctggggctaacgtcctggagctgctgcccatagtcatgggtcaggaggagggcagtgtggtggtggagcgagccgttcagaccgacgtggtgccctacagcccagccatctcagagctcattcagagtgtgctgcagaagctccaggacccctgtccctcgagcttggcgtcccctgatgagtctgaaccagactcgatggagagcttcccagagtccctctctgccttagtggttgatttaactccaagaaatccaaactcagccatccttttgtctcccgtggagaccccctacgccaatgtggatgcagaagttcatgcaaaccgcctcatgagagagctggattttgcagcctgcgtggaagagaggttggatggtgtcatcccactggctcgcgggggcgtcgtgaggcagtactggagcagcagcttcctggtggatctcctggctgtggctgcccccgtggtccccacggttctgtgggcattcagtactcagagagggggaacggatcctgtgtataacatcggggccttgctcaggggctgttgcgtggttgccctgcattcgctccgccgcaccgccttccgtatcaaaacctaaatagaagttgttgttaccgtgtgccaatgtgtcccatgtgggttgtgccaggtagagaaacaggaagtcaatcatctgtgacagtctctattctgtcgttttgctccttggtatttgatttgcactatatttagttgaagcctgttcactgtttaaaaccggaggtatcttcaaaggcatggagacctggttccagtaaatgtcccaccagtggggtatagaaagcatgctcatgaccctgccgtgtcgtctgaggtacccgttcttatcctagtggttcaggaagagaaaacgcagtttgcactttcaagacagcttctctaaggctggcatgttatctccttgctttgctttttgccgttttaaaatgtgtaattgttccagcattccaatggtcttgtgcatagcaggggactgtaaccaaaaataaacatgtatttgtgtaattggtttgaagaagtcttgaatagctctttactgtcttacttggggttgataagatttgagtgtttgcaattttttactaaatgtagctccaaagtcttaaatggcttgtttgttcttaaactgttaattgatgaaactgtgcataagtttacaatgtactaacttattttgcttattatatatagtgttttattggaaattgtaaccacacacttcagcatgatgaaaataaagattagtgtttccatttaaataaatgttttatcctcccataaaataataattatttctgtgattttacttctatgtataagaaagacaatgaatagcagatcttacatctttatcaatagggggtctgtaaaaattgaattaaattaggaagagggaaaaagagttagttattaaagaaaatgaagatttcctacccttacttaaaaagcatcatttctgaataaaagtagatttgtttacttttaaattgcccata

SEQ ID NO: 65868 - DNA, 316 bp, Homo sapiens
gatcttccctgtcctacatttggatattgccttaaggaaggaaaaaaaaaaaaaaaagcagggctttccaattttgcaattttgtgtttgggagcagaatgaatactgatcctgccttccatgagccagctaccctcatctgataagcatggatgagacaaggatgctagggcctcacttatgtaactgtacccaaaggatttacgggcaccatcatgttgaagcccccagagcaaacttttctttctcaacacaggctacactcctgggaaacacatgacggcaggttgcacccaccaccaagataaagttaact

SEQ ID NO: 65869 - DNA, 539 bp, Homo sapiens
cgttttcaaatataacttttcttttctttccgtaacttctatgtctttttaatgtggacaaattaaattatgactgaaggagtgattctaagggtggcaccaaatgtcaggcaatttttgttttgttggtttatgcttcaatatactttgttgatttctaggctgacttatattcagtaaaattgtatgccttactacaaggtgacgtaccgggtgcagtttatttttgagataatattggcaccttctgtacctcataattcgcagaacttattcatagtctgtataatgcataatgatctgcctcatctagagttatccagtatagtacccactagccacatgacatgtgactattggcaagtgaaacgggctagtctgaattgacatatgttgaatatgtaaaatacacaccagatttcagtgagcaagcatgacaaatacaacacaaaaagtctcagtgataatttttgaatatttattaaatgttaaaatgatatttttaatatattggattaataaaaatatattattggaat

SEQ ID NO: 65870 - DNA, 491 bp, Homo sapiens
ttgggatgacgttatataacactttcatggtacttaatgacttcagtgagatgtaagtaacacattttgaagcagctcacttcggttgaaagaattatttttcaacctggagttgatttcttcaatttcgcatcattcctagcaaattgtaacattaaggtcatattatttgtccagtcttttctaaatgctgtaacgttttgtcatgaaatcatgggaaaatgttacttttgcattgtgaggagtgagtaggaatttgtttaggacagaaaaccaaatcttagaattgtggactttgcttatgacttctacctctttagttaaaatcaaagttgcgcagttacctgtttgagttgcataaaacagttctgtgggatgatcctctcaaccatggttatccagccttttggcttccctggaccatgttggaagaagaattgtcttgggctacacataaaatatgctaacactaatgataactcatgagctta

SEQ ID NO: 65871 - DNA, 2467 bp, Homo sapiens
  misc_feature (1404)..(1404): n is a, c, g, or t
gcttctatgaggagaccatgtgccgaggtcgtgtgctaggaagccagttgctgtgagaaatgaccagtgtcatgtctgtctttcagccaccctacatcatgtagcagttcttctgagatcatgtctgtgctgttcttctacatcatgaggtacaagcagtcagatccagagaatccggacaacgaccgatttgtcctcgcaaagagactgtcgtttgtggatgtggcaacaggatggctcggacaaggactgggagttgcatgtggaatggcatatactggcaagtacttcgacagggccagctaccgggtgttctgcctcatgagtgatggcgagtcctcagaaggctctgtctgggaggcaatggcctttgcttcctactacagtctggacaatcttgtggcaatctttgatgtgaaccgcctgggacacagtggtgcattgcccgccgagcactgcataaacatctatcagaggcgctgcgaagcctttgggtggaacacttatgtggtggacggccgggacgtggaggcactgtgccaggtattctggcaggcttctcaggtgaagcacaagcccactgctgtggtggccaagaccttcaagggccggggcaccccaagtattgaggatgcagaaagttggcatgcaaagccaatgccgagagaaagagcagatgccattatcaaattaattgagagccagatacagaccagcaggaatcttgacccacagccccccattgaggactcacctgaagtcaacatcacagatgtaaggatgacctctccacctgattacagagttggtgacaagatagctactcggaaagcatgcggtctggctctggctaagctgggctacgcgaacaacagagtcgttgtgctggatggtgacaccaggtactctactttctctgagatattcaacaaggagtaccctgagcgcttcatcgagtgctttatggctgaacaaaacatggtgagcgtggctctgggctgtgcctcccgtggacggaccattgcttttgctagcacctttgctgcctttctgactcgagcatttgatcacatccggataggaggcctcgctgagagcaacatcaacattattggttcccactgtggggtatctgttggtgacgatggtgcttcccagatggccctggaggatatagccatgttccgaaccattcccaagtgcacgatcttctacccaactgatgccgtctccacggagcatgctgttgctctggcagccaatgccaaggggatgtgcttcattcggaccacccgaccagaaactatggttatttacaccccacaagaacgctttgagatcggacaggccaagggcgtatccatgctccaggacagctggagcagtgtaatttcctatcaaaangtcctccgccactgtgtcagtgacaaggtcacagttattggagctggaattactgtgtatgaagccttagcagctgctgatgagctttcgaaacaagatatttttatccgtgtcatcgacctgtttaccattaaacctctggatgtcgccaccatcgtctccagtgcaaaagccacagagggccggatcattacagtggaggatcactacccgcaaggtggcatcggggaagctgtctgcgcagccgtctccatggatcctgacattcaggttcattcgctggcagtgtcgggagtgccccagagtgggaagtccgaggaattgctggatatgtatggaattagtgccagacatatcatagtggccgtgaaatgcatgttgctgaactaaaatagctgttagctttggtcttttggcctctttaccctgtgtttatgtttgttccaaaaccatcatttaaatctctactgtcacattttgtttcttaaaagcaaagccagctaacaccttcattcatccctagttcggaaattcaagctaactacttaccctttaaactgtcactgcatatgcaagtaccgctctaatttttggatcattaaagggagttacacaacttttaagtgaaaaaaataggtaacaaaacaaccacctgatagtaagttttctgataagactatagataagtggtagaggtaatcaattcttccgaagtgtttccttcgtgaataactggtagaggtaatagttttttcaatgtatttccttcatgagtaaagaaaatgtggattgaagtatagattccagtagcctagtttccacagcacgataacaccatgacgcctactgctgttcccaccttgggattctgtgtgctgccatcccacctgcagctgccctggaattcccttcgctgtttgccttcatctccctccacgtttgagaggctgtcaggcagcagcgaaagcttgttaggatgtcctgtgctgcttgtgatgagagcctccacactgtactgttcaagtcaatgttaataaagcatttcaaaaccaaaaaatttatt

SEQ ID NO: 65872 - DNA, 2416 bp, Homo sapiens
gcttctatgaggagaccatgtgccgaggtcgtgtgctaggaagccagttgctgtgagaaatgaccagtgtcatgtctgtctttcagccaccctacatcatgtagcagttcttctgagatcatgtctgtgctgttcttctacatcatgaggtacaagcagtcagatccagagaatccggacaacgaccgatttgtcctcgcaaagagactgtcgtttgtggatgtggcaacaggatggctcggacaaggactgggagttgcatgtggaatggcatatactggcaagtacttcgacagggccagctaccgggtgttctgcctcatgagtgatggcgagtcctcagaaggctctgtctgggaggcaatggcctttgcttcctactacagtctggacaatcttgtggcaatctttgatgtgaaccgcctgggacacagtggtgcattgcccgccgagcactgcataaacatctatcagaggcgctgcgaagcctttgggtggaacacttatgtggtggacggccgggacgtggaggcactgtgccaggtattctggcaggcttctcaggtgaagcacaagcccactgctgtggtggccaagaccttcaagggccggggcaccccaagtattgaggatgcagaaagttggcatgcaaagccaatgccgagagaaagagcagatgccattatcaaattaattgagagccagatacagaccagcaggaatcttgacccacagccccccattgaggactcacctgaagtcaacatcacagatgtaaggatgacctctccacctgattacagagttggtgacaagatagctactcggaaagcatgcggtctggctctggctaagctgggctacgcgaacaacagagtcgttgtgctggatggtgacaccaggtactctactttctctgagatattcaacaaggagtaccctgagcgcttcatcgagtgctttatggctgaacaaaacatggtgagcgtggctctgggctgtgcctcccgtggacggaccattgcttttgctagcacctttgctgcctttctgactcgagcatttgatcacatccggataggaggcctcgctgagagcaacatcaacattattggttcccactgtggggtatctgttggtgacgatggtgcttcccagatggccctggaggatatagccatgttccgaaccattcccaagtgcacgatcttctacccaactgatgccgtctccacggagcatgctgttgctctggcagccaatgccaaggggatgtgcttcattcggaccacccgaccagaaactatggttatttacaccccacaagaacgctttgagatcggacaggccaaggtcctccgccactgtgtcagtgacaaggtcacagttattggagctggaattactgtgtatgaagccttagcagctgctgatgagctttcgaaacaagatatttttatccgtgtcatcgacctgtttaccattaaacctctggatgtcgccaccatcgtctccagtgcaaaagccacagagggccggatcattacagtggaggatcactacccgcaaggtggcatcggggaagctgtctgcgcagccgtctccatggatcctgacattcaggttcattcgctggcagtgtcgggagtgccccagagtgggaagtccgaggaattgctggatatgtatggaattagtgccagacatatcatagtggccgtgaaatgcatgttgctgaactaaaatagctgttagctttggtcttttggcctctttaccctgtgtttatgtttgttccaaaaccatcatttaaatctctactgtcacattttgtttcttaaaagcaaagccagctaacaccttcattcatccctagttcggaaattcaagctaactacttaccctttaaactgtcactgcatatgcaagtaccgctctaatttttggatcattaaagggagttacacaacttttaagtgaaaaaaataggtaacaaaacaaccacctgatagtaagttttctgataagactatagataagtggtagaggtaatcaattcttccgaagtgtttccttcgtgaataactggtagaggtaatagttttttcaatgtatttccttcatgagtaaagaaaatgtggattgaagtatagattccagtagcctagtttccacagcacgataacaccatgacgcctactgctgttcccaccttgggattctgtgtgctgccatcccacctgcagctgccctggaattcccttcgctgtttgccttcatctccctccacgtttgagaggctgtcaggcagcagcgaaagcttgttaggatgtcctgtgctgcttgtgatgagagcctccacactgtactgttcaagtcaatgttaataaagcatttcaaaaccaaaaaatttatt

SEQ ID NO: 65873 - DNA, 2709 bp, Homo sapiens
  misc_feature (1646)..(1646): n is a, c, g, or t
attccagatcccttgacttgcttgcggagggagcggccggcggagggagcggcaggtggagggagtggcacgaggcatgcggagggagctgcaccgacatcacataaacgcactgggcagctcgcaggcgccattcgctcttcagacgccggagacgtaggagtgggtcttcagactccaaaggggttggactaatggcggatgctgaggcgagggctgagttcccggaggaggccagacctgacaggggcaccttgcaggtgttgcaagatatggccagccgcttgcgaatccattccatcagggccacatgctccacgagctccggccaccctacatcatgtagcagttcttctgagatcatgtctgtgctgttcttctacatcatgaggtacaagcagtcagatccagagaatccggacaacgaccgatttgtcctcgcaaagagactgtcgtttgtggatgtggcaacaggatggctcggacaaggactgggagttgcatgtggaatggcatatactggcaagtacttcgacagggccagctaccgggtgttctgcctcatgagtgatggcgagtcctcagaaggctctgtctgggaggcaatggcctttgcttcctactacagtctggacaatcttgtggcaatctttgatgtgaaccgcctgggacacagtggtgcattgcccgccgagcactgcataaacatctatcagaggcgctgcgaagcctttgggtggaacacttatgtggtggacggccgggacgtggaggcactgtgccaggtattctggcaggcttctcaggtgaagcacaagcccactgctgtggtggccaagaccttcaagggccggggcaccccaagtattgaggatgcagaaagttggcatgcaaagccaatgccgagagaaagagcagatgccattatcaaattaattgagagccagatacagaccagcaggaatcttgacccacagccccccattgaggactcacctgaagtcaacatcacagatgtaaggatgacctctccacctgattacagagttggtgacaagatagctactcggaaagcatgcggtctggctctggctaagctgggctacgcgaacaacagagtcgttgtgctggatggtgacaccaggtactctactttctctgagatattcaacaaggagtaccctgagcgcttcatcgagtgctttatggctgaacaaaacatggtgagcgtggctctgggctgtgcctcccgtggacggaccattgcttttgctagcacctttgctgcctttctgactcgagcatttgatcacatccggataggaggcctcgctgagagcaacatcaacattattggttcccactgtggggtatctgttggtgacgatggtgcttcccagatggccctggaggatatagccatgttccgaaccattcccaagtgcacgatcttctacccaactgatgccgtctccacggagcatgctgttgctctggcagccaatgccaaggggatgtgcttcattcggaccacccgaccagaaactatggttatttacaccccacaagaacgctttgagatcggacaggccaagggcgtatccatgctccaggacagctggagcagtgtaatttcctatcaaaangtcctccgccactgtgtcagtgacaaggtcacagttattggagctggaattactgtgtatgaagccttagcagctgctgatgagctttcgaaacaagatatttttatccgtgtcatcgacctgtttaccattaaacctctggatgtcgccaccatcgtctccagtgcaaaagccacagagggccggatcattacagtggaggatcactacccgcaaggtggcatcggggaagctgtctgcgcagccgtctccatggatcctgacattcaggttcattcgctggcagtgtcgggagtgccccagagtgggaagtccgaggaattgctggatatgtatggaattagtgccagacatatcatagtggccgtgaaatgcatgttgctgaactaaaatagctgttagctttggtcttttggcctctttaccctgtgtttatgtttgttccaaaaccatcatttaaatctctactgtcacattttgtttcttaaaagcaaagccagctaacaccttcattcatccctagttcggaaattcaagctaactacttaccctttaaactgtcactgcatatgcaagtaccgctctaatttttggatcattaaagggagttacacaacttttaagtgaaaaaaataggtaacaaaacaaccacctgatagtaagttttctgataagactatagataagtggtagaggtaatcaattcttccgaagtgtttccttcgtgaataactggtagaggtaatagttttttcaatgtatttccttcatgagtaaagaaaatgtggattgaagtatagattccagtagcctagtttccacagcacgataacaccatgacgcctactgctgttcccaccttgggattctgtgtgctgccatcccacctgcagctgccctggaattcccttcgctgtttgccttcatctccctccacgtttgagaggctgtcaggcagcagcgaaagcttgttaggatgtcctgtgctgcttgtgatgagagcctccacactgtactgttcaagtcaatgttaataaagcatttcaaaaccaaaaaatttatt

SEQ ID NO: 65874 - DNA, 403 bp, Homo sapiens
gacctgtttaccattaaacctctggatgtcgccaccatcgtctccagtgcaaaagccacagagggccggatcattacagtggaggatcactacccgcaaggtgtgtgtgggcattgagaatgctttggaaggttttggtgtttttgtttccttgattggccacatggcatgctctcaggcatcacctatagtctacctctcacccagcatggctttgttatttgatgttcactaagcgtggggccatactcatacacatctgtgtgtccccaacagagtgcacagtgcccagtcaccagggcgggtcagtggcaacacagaggagtggctattgcaggcaagcgaggtgtcatgaaaagcatcgcagtttctttgggtttggaatgatgaatagtatgcccca

SEQ ID NO: 65875 - DNA, 2250 bp, Homo sapiens
gcgagatattgctgggcaggccctggcttttgttcaggatcttgtgacggctcttctaaactttcatacctacacagaacagaggattcaaatttttcctgttgattctgccattgacactatatctccattgaatcagaagttctcacaataccttcatgaaaatgcgtcctatgtccgccctcttgaggaaggaatgcttcatttatttgaaagtatcactgaggatactgtgactgtcttggagacaactgtgaaattgaaaactttttcagaacacttaacctcctacatatgttttcttaggaagattcttccctatcagttaaaaagtttagaagaagaatgtgaatcctctctttgcacatctgcgttaagagccaggaatctagagctgtcccaggacatgaaaaaaatgacagctgtgtttgagaagctgcagacttacatagctcttcttgccttgccaagtacagagccagatggactccttcggacaaactacagttctgtgttaacaaatgttggtgctgctctgcatggatttcatgacgttatgaaagatatttccaaacattatagtcaaaaagctgcaatagagcatgaacttccaacagcaacacagaagctgataacaactaatgactgtatcctgtcatcagtagtggcattaacaaatggagcaggaaagattgcatccttcttcagcaacaatttggactacttcattgcttcactgagctatggacctaaggcagcgagtggattcattagtcctctttcagctgaatgcatgctacagtataagaaaaaagctgctgcctatatgaagtctttgagaaagcccctcttggagtctgtgccttatgaagaagcactggcaaaccgccgcatccttctcagctctactgaaagtcgagaaggccttgcacagcaagttcaacagagtttggaaaagatttctaaactggagcaggaaaaagaacattggatgttggaagcacaattagccaaaatcaagctagagaaagaaaaccagcgaattgcagataagctgaagaatacaggtagtgcccagctggttgggctggcccaggaaaatgctgctgtgtcaaatactgctggccaggatgaagccacagctaaggctgtgttggagcccattcagagcaccagtctaattgggactttaaccaggacatctgacagtgaggttccagatgtggaatctcgtgaagacttaattaaaaatcactacatggcaaggatagtggaacttacgtctcagttgcagctggctgacagtaagtcagtgcatttttatgccgagtgccgagcactgtctaaaagactggccttggctgaaaagtctaaggaagcattgacagaagaaatgaaacttgccagtcagaacatcagcagacttcaggatgagctgacaactaccaagaggagttacgaggatcagttaagtatgatgagtgaccacctgtgcagcatgaatgagacattatctaaacagagagaagagattgacacactaaagatgtccagtaaggggaattctaaaaagaacaagagtcgatagttttgaaatagctggttggcgactgttctttccagacctgctcctgctgcacagagccgcagggctgagaccacgtccatgctggctgccttcaggaagctaaagtattgttggacctagtaaactagtcagtgttggaaacggccttgaaatatttaaaacatatttgtaaccagtgaggcaaatacagaagttgatgtcggcagtaaatggaaaacaatacgtatgtcatggatattgtaggtttccttatgctgtttttactgtgcactttttaaaattaggttttaatttcagtatgtaagaacaaatattttgtatactttcaaactcaattatatggtaatcgatttggtatctatggaatagatatatgtttctggaaaaaaatgcttaaattgtcaaactgtcattacttcttattatagttgaaggcattctccagattctttttaaaagatttgttcatattttctctctctctctctctctctctctctctctctctctcttctttctctctgagggagagggagccctccaaacttcagatcctgtgggtttagtatcattatcttcagctctttgataccctgtgttagagtaatagctaaaggaagttcatgtcaataaattcatacttatatcacactttcagtctc

SEQ ID NO: 65876 - DNA, 1889 bp, Homo sapiens
cagcagcccccggtctccttggtctgcctctttcagggtggaactcctgttgatgagctggggcaagggtgatcagggccccacttttcttggcagcaccacgcccaaggtacagagccagatggactccttcggacaaactacagttctgtgttaacaaatgttggtgctgctctgcatggatttcatgacgttatgaaagatatttccaaacattatagtcaaaaagctgcaatagagcatgaacttccaacagcaacacagaagctgataacaactaatgactgtatcctgtcatcagtagtggcattaacaaatggagcaggaaagattgcatccttcttcagcaacaatttggactacttcattgcttcactgagctatggacctaaggcagcgagtggattcattagtcctctttcagctgaatgcatgctacagtataagaaaaaagctgctgcctatatgaagtctttgagaaagcccctcttggagtctgtgccttatgaagaagcactggcaaaccgccgcatccttctcagctctactgaaagtcgagaaggccttgcacagcaagttcaacagagtttggaaaagatttctaaactggagcaggaaaaagaacattggatgttggaagcacaattagccaaaatcaagctagagaaagaaaaccagcgaattgcagataagctgaagaatacaggtagtgcccagctggttgggctggcccaggaaaatgctgctgtgtcaaatactgctggccaggatgaagccacagctaaggctgtgttggagcccattcagagcaccagtctaattgggactttaaccaggacatctgacagtgaggttccagatgtggaatctcgtgaagacttaattaaaaatcactacatggcaaggatagtggaacttacgtctcagttgcagctggctgacagtaagtcagtgcatttttatgccgagtgccgagcactgtctaaaagactggccttggctgaaaagtctaaggaagcattgacagaagaaatgaaacttgccagtcagaacatcagcagacttcaggatgagctgacaactaccaagaggagttacgaggatcagttaagtatgatgagtgaccacctgtgcagcatgaatgagacattatctaaacagagagaagagattgacacactaaagatgtccagtaaggggaattctaaaaagaacaagagtcgatagttttgaaatagctggttggcgactgttctttccagacctgctcctgctgcacagagccgcagggctgagaccacgtccatgctggctgccttcaggaagctaaagtattgttggacctagtaaactagtcagtgttggaaacggccttgaaatatttaaaacatatttgtaaccagtgaggcaaatacagaagttgatgtcggcagtaaatggaaaacaatacgtatgtcatggatattgtaggtttccttatgctgtttttactgtgcactttttaaaattaggttttaatttcagtatgtaagaacaaatattttgtatactttcaaactcaattatatggtaatcgatttggtatctatggaatagatatatgtttctggaaaaaaatgcttaaattgtcaaactgtcattacttcttattatagttgaaggcattctccagattctttttaaaagatttgttcatattttctctctctctctctctctctctctctctctctctctcttctttctctctgagggagagggagccctccaaacttcagatcctgtgggtttagtatcattatcttcagctctttgataccctgtgttagagtaatagctaaaggaagttcatgtcaataaattcatacttatatcacactttcagtctc

SEQ ID NO: 65877 - DNA, 1658 bp, Homo sapiens
taatgatgcatatgcaattcttggcatctttgtatatgaaagcaaaactcaggaaaagtcaatatttaggaaataaacctatcctttatttatatattttgagctgaagatgtgaaaaagtgctgaagagtttgtacacaaccttttatcaattctatgataaaaatgtacaagaggcatgacaatgagagatggctgaattagtaaagaagtagtgtagtactgaagtctgaccatccatttgttcacagtaggaaatagtaattaacatgtgattaaaggcaatgaatttgaatgaactgaaatgactttttatctttatttttatattttaatcttcaaatagttcaacagagtttggaaaagatttctaaactggagcaggaaaaagaacattggatgttggaagcacaattagccaaaatcaagctagagaaagaaaaccagcgaattgcagataagctgaagaatacaggtagtgcccagctggttgggctggcccaggaaaatgctgctgtgtcaaatactgctggccaggatgaagccacagctaaggctgtgttggagcccattcagagcaccagtctaattgggactttaaccaggacatctgacagtgaggttccagatgtggaatctcgtgaagacttaattaaaaatcactacatggcaaggatagtggaacttacgtctcagttgcagctggctgacagtaagtcagtgcatttttatgccgagtgccgagcactgtctaaaagactggccttggctgaaaagtctaaggaagcattgacagaagaaatgaaacttgccagtcagaacatcagcagacttcaggatgagctgacaactaccaagaggagttacgaggatcagttaagtatgatgagtgaccacctgtgcagcatgaatgagacattatctaaacagagagaagagattgacacactaaagatgtccagtaaggggaattctaaaaagaacaagagtcgatagttttgaaatagctggttggcgactgttctttccagacctgctcctgctgcacagagccgcagggctgagaccacgtccatgctggctgccttcaggaagctaaagtattgttggacctagtaaactagtcagtgttggaaacggccttgaaatatttaaaacatatttgtaaccagtgaggcaaatacagaagttgatgtcggcagtaaatggaaaacaatacgtatgtcatggatattgtaggtttccttatgctgtttttactgtgcactttttaaaattaggttttaatttcagtatgtaagaacaaatattttgtatactttcaaactcaattatatggtaatcgatttggtatctatggaatagatatatgtttctggaaaaaaatgcttaaattgtcaaactgtcattacttcttattatagttgaaggcattctccagattctttttaaaagatttgttcatattttctctctctctctctctctctctctctctctctctctcttctttctctctgagggagagggagccctccaaacttcagatcctgtgggtttagtatcattatcttcagctctttgataccctgtgttagagtaatagctaaaggaagttcatgtcaataaattcatacttatatcacactttcagtctc

SEQ ID NO: 65878 - DNA, 2217 bp, Homo sapiens
gcgagatattgctgggcaggccctggcttttgttcaggatcttgtgacggctcttctaaactttcatacctacacagaacagaggattcaaatttttcctgttgattctgccattgacactatatctccattgaatcagaagttctcacaataccttcatgaaaatgcgtcctatgtccgccctcttgaggaaggaatgcttcatttatttgaaagtatcactgaggatactgtgactgtcttggagacaactgtgaaattgaaaactttttcagaacacttaacctcctacatatgttttcttaggaagattcttccctatcagttaaaaagtttagaagaagaatgtgaatcctctctttgcacatctgcgttaagagccaggaatctagagctgtcccaggacatgaaaaaaatgacagctgtgtttgagaagctgcagacttacatagctcttcttgccttgccaagtacagagccagatggactccttcggacaaactacagttctgtgttaacaaatgttggtgctgctctgcatggatttcatgacgttatgaaagatatttccaaacattatagtcaaaaagctgcaatagagcatgaacttccaacagcaacacagaagctgataacaactaatgactgtatcctgtcatcagtagtggcattaacaaatggagcaggaaagattgcatccttcttcagcaacaatttggactacttcattgcttcactgagctatggacctaaggcagcgagtggattcattagtcctctttcagctgaatgcatgctacagtataagaaaaaagctgctgcctatatgaagtctttgagaaagcccctcttggagtctgtgccttatgaagaagcactggcaaaccgccgcatccttctcagctctactgaaagtcgagaaggccttgcacagcaagttcaacagagtttggaaaagatttctaaactggagcaggaaaaagaacattggatgttggaagcacaattagccaaaatcaagctagagaaagaaaaccagcgaattgcagataagctgaagaatacaggtagtgcccagctggttgggctggcccaggaaaatgctgctgtgtcaaatactgctggccaggatgaagccacagctaaggctgtgttggagcccattcagagcaccagtctagttccagatgtggaatctcgtgaagacttaattaaaaatcactacatggcaaggatagtggaacttacgtctcagttgcagctggctgacagtaagtcagtgcatttttatgccgagtgccgagcactgtctaaaagactggccttggctgaaaagtctaaggaagcattgacagaagaaatgaaacttgccagtcagaacatcagcagacttcaggatgagctgacaactaccaagaggagttacgaggatcagttaagtatgatgagtgaccacctgtgcagcatgaatgagacattatctaaacagagagaagagattgacacactaaagatgtccagtaaggggaattctaaaaagaacaagagtcgatagttttgaaatagctggttggcgactgttctttccagacctgctcctgctgcacagagccgcagggctgagaccacgtccatgctggctgccttcaggaagctaaagtattgttggacctagtaaactagtcagtgttggaaacggccttgaaatatttaaaacatatttgtaaccagtgaggcaaatacagaagttgatgtcggcagtaaatggaaaacaatacgtatgtcatggatattgtaggtttccttatgctgtttttactgtgcactttttaaaattaggttttaatttcagtatgtaagaacaaatattttgtatactttcaaactcaattatatggtaatcgatttggtatctatggaatagatatatgtttctggaaaaaaatgcttaaattgtcaaactgtcattacttcttattatagttgaaggcattctccagattctttttaaaagatttgttcatattttctctctctctctctctctctctctctctctctctctcttctttctctctgagggagagggagccctccaaacttcagatcctgtgggtttagtatcattatcttcagctctttgataccctgtgttagagtaatagctaaaggaagttcatgtcaataaattcatacttatatcacactttcagtctc

SEQ ID NO: 65879 - DNA, 1096 bp, Homo sapiens
ctagaaatgcttcatctcactggtacttgtttatttatgtgtatttgtgttctatttaggttccagatgtggaatctcgtgaagacttaattaaaaatcactacatggcaaggatagtggaacttacgtctcagttgcagctggctgacagtaagtcagtgcatttttatgccgagtgccgagcactgtctaaaagactggccttggctgaaaagtctaaggaagcattgacagaagaaatgaaacttgccagtcagaacatcagcagacttcaggatgagctgacaactaccaagaggagttacgaggatcagttaagtatgatgagtgaccacctgtgcagcatgaatgagacattatctaaacagagagaagagattgacacactaaagatgtccagtaaggggaattctaaaaagaacaagagtcgatagttttgaaatagctggttggcgactgttctttccagacctgctcctgctgcacagagccgcagggctgagaccacgtccatgctggctgccttcaggaagctaaagtattgttggacctagtaaactagtcagtgttggaaacggccttgaaatatttaaaacatatttgtaaccagtgaggcaaatacagaagttgatgtcggcagtaaatggaaaacaatacgtatgtcatggatattgtaggtttccttatgctgtttttactgtgcactttttaaaattaggttttaatttcagtatgtaagaacaaatattttgtatactttcaaactcaattatatggtaatcgatttggtatctatggaatagatatatgtttctggaaaaaaatgcttaaattgtcaaactgtcattacttcttattatagttgaaggcattctccagattctttttaaaagatttgttcatattttctctctctctctctctctctctctctctctctctctcttctttctctctgagggagagggagccctccaaacttcagatcctgtgggtttagtatcattatcttcagctctttgataccctgtgttagagtaatagctaaaggaagttcatgtcaataaattcatacttatatcacactttcagtctc

SEQ ID NO: 65880 - DNA, 1788 bp, Homo sapiens
gcgagatattgctgggcaggccctggcttttgttcaggatcttgtgacggctcttctaaactttcatacctacacagaacagaggattcaaatttttcctgttgattctgccattgacactatatctccattgaatcagaagttctcacaataccttcatgaaaatgcgtcctatgtccgccctcttgaggaaggaatgcttcatttatttgaaagtatcactgaggatactgtgactgtcttggagacaactgtgaaattgaaaactttttcagaacacttaacctcctacatatgttttcttaggaagattcttccctatcagttaaaaagtttagaagaagaatgtgaatcctctctttgcacatctgcgttaagagccaggaatctagagctgtcccaggacatgaaaaaaatgacagctgtgtttgagaagctgcagacttacatagctcttcttgccttgccaagtacagagccagatggactccttcggacaaactacagttctgtgttaacaaatgttggtgctgctctgcatggatttcatgacgttatgaaagatatttccaaacattatagtcaaaaagctgcaatagagcatgaacttccaacagcaacacagaagctgataacaactaatgactgtatcctgtcatcagtagtggcattaacaaatggagcaggaaagattgcatccttcttcagcaacaatttggactacttcattgcttcactgagctatggacctaaggcagcgagtggattcattagtcctctttcagctgaatgcatgctacagtataagaaaaaagctgctgcctatatgaagtctttgagaaagcccctcttggagtctgtgccttatgaagaagcactggcaaaccgccgcatccttctcagctctactgaaagtcgagaaggccttgcacagcaagttcaacagagtttggaaaagatttctaaactggagcaggaaaaagaacattggatgttggaagcacaattagccaaaatcaagctagagaaagaaaaccagcgaattgcagataagctgaagaatacaggtagtgcccagctggttgggctggcccaggaaaatgctgctgtgtcaaatactgctggccaggatgaagccacagctaaggctgtgttggagcccattcagagcaccagtctaattgggactttaaccaggacatctgacagtgaggttccagatgtggaatctcgtgaagacttaattaaaaatcactacatggcaaggatagtggaacttacgtctcagttgcagctggctgacagtaagtcagtgcatttttatgccgagtgccgagcactgtctaaaagactggccttggctgaaaagtctaaggaagcattgacagaagaaatgaaacttgccagtcagaacatcagcagacttcaggatgagctgacaactaccaagaggagttacgaggatcagttaagtatgatgagtgaccacctgtgcagcatgaatgagacattatctaaacagagagaagagattgacacactaaagatgtccagtaaggtatgtgaggtgaggtgaggtagtctctctgcaatataatatttaatgtgaggtattttattgttatgcatttcaggaggaagaggacataagatttaaagtgtttgtaagggccaggggcagtggcttaagcctgtaatcccagtactttgggaggctgaggtgggaggatcccttgaggccaggagttggagagcagagtgggcaatatagtgatacttcatctctac

SEQ ID NO: 65881 - DNA, 904 bp, Homo sapiens
gcgagatattgctgggcaggccctggcttttgttcaggatcttgtgacggctcttctaaactttcatacctacacagaacagaggattcaaatttttcctgttgattctgccattgacactatatctccattgaatcagaagttctcacaataccttcatgaaaatgcgtcctatgtccgccctcttgaggaaggaatgcttcatttatttgaaagtatcactgaggatactgtgactgtcttggagacaactgtgaaattgaaaactttttcagaacacttaacctcctacatatgttttcttaggaagattcttccctatcagttaaaaagtttagaagaagaatgtgaatcctctctttgcacatctgcgttaagagccaggaatctagagctgtcccaggacatgaaaaaaatgacagctgtgtttgagaagctgcagacttacatagctcttcttgccttgccaagtacagagccagatggactccttcggacaaactacagttctgtgttaacaaatgttggtgctgctctgcatggatttcatgacgttatgaaaggtaggccttgaaaaagaacgtaagcttaaaacctttgccccactttcttcgatctgcctgaataagatttaaacaaacactgccaagggtaatagaccccagataaaggcttattagcatttggcttatgttgagtgcacagctcactgccttctgcttttcccatctgttttatttctggaggtaaacaaagtgctgaagagaaatccttgtgtacagtccttgtgtacagtactttagccagaaatacgttacactgactttaggcaggtgtgtgaattgtacaaaaccagacatgctattcagaggccttttgcaaaatacgttgcgcttcttagagc

SEQ ID NO: 65882 - DNA, 300 bp, Homo sapiens
cttgagcacaggagtttgaggctgcagtgagccattatcaggtttacaatttaggtttataatttggtgggtccatttagaaatgtgttgatgtttgttattttccagtgatttaattcacaatactttccctcctgtttagttctcacaataccttcatgaaaatgcgtcctatgtccgccctcttgaggaaggaatgcttcatttatttgaaagtatcactgaggatactgtgactgtcttggtaattttcttccttgttttacttctggaaactgggagctcctctttgtccagtag

SEQ ID NO: 65883 - DNA, 2247 bp, Homo sapiens
tgctctccttgttttgctttcgatctggactgttctcaggcaagccggggagtaacttttagttttgctcctgcgattattcaactgacgggctttcatttccatttcacacaccctagcaacacttataccttgcggaattgtattggtagcgtgaaaaaagcacactgagagggcaccatgccggtggaaaggatgcgcatgcgcccgtggctggaggagcagataaactccaacacgatcccggggctcaagtggcttaacaaggaaaagaagatttttcagatcccctggatgcatgcggctagacatgggtgggatgtggaaaaagatgcaccactctttagaaactgggcaatccatacaggaaagcatcaaccaggagtagataaacctgatcccaaaacatggaaggcgaatttcagatgcgccatgaattccttgcctgatattgaagaagtcaaggataaaagcataaagaaaggaaataatgccttcagggtctaccgaatgctgcccctatcagaacggccttctaagaaaggaaagaaaccaaagacagaaaaagaagacaaagttaagcacatcaagcaagaaccagttgagtcatctctggggcttagtaatggagtaagtgatctttctcctgagtatgcggtcctgacttcaactataaaaaatgaagtggatagtacggtgaacatcatagttgtaggacagtcccatctggacagcaacattgagaatcaagagattgtcaccaatccgccagacatttgccaagttgtagaggtgaccactgagagcgacgagcagccggtcagcatgagcgagctctaccctctgcagatctcccccgtgtcttcctatgcagaaagcgaaacgactgatagtgtgcccagcgatgaagagagtgccgaggggcggccacactggcggaagaggaatattgaaggcaaacagtacctcagcaacatggggactcgaggctcctacctgctgcccggcatggcgtccttcgtcacttccaacaaaccggacctccaggtcaccatcaaagaggagagcaatccggtgccttacaacagctcctggcccccttttcaagacctccccctttcttcctccatgaccccagcatccagcagcagtcggccagaccgggagacccgggccagcgtcatcaagaaaacatcggatatcacccaggcccgcgtcaagagctgttaagcctctgactctccgcggtggttgttggggcttcttggctttgttttgttgtttgtttgtattttatttttttctctctgacacctattttagacaaatctaagggaaaaagccttgacaatagaacattgattgctgtgtccaactccagtactggagcttctctttaactcaggactccagcccattggtagacgtgtgtttctagagcctgctggatctcccagggctactcactcaagttcaaggaccaacaagggcagtggaggtgctgcattgcctgcggtcaaggccagcaaggtggagtggatgcctcagaacggacgagataatgtgaactagctggaattttttattcttgtgaatatgtacataggcagcactagcgacattgcagtctgcttctgcaccttatcttaaagcacttacagataggccttcttgtgatcttgctctatctcacagcacactcagcacccccttctctgcccattccccagcctctcttcctatcccatcccatcccatcccatcccatcccatcccgctcttttcctacttttccttccctcaaagcttccattccacatccggaggagaagaaggaaatgaatttctctacagatgtcccattttcagactgctttaaaaaaaatccttctaatctgctatgcttgaatgccacgcggtacaaaggaaaaagtatcatggaaatattatgcaaattcccagatttgaagacaaaaatactctaattctaaccagagcaagcttttttattttttatacaggggaatattttattcaaggtaaaattctaaataaaatataattgttttttatcttttctacagcaaatttataattttaagattccttttcttgtttatcagcagttgttattacatccttgtggcacatttttttttttaattttgtaaaggtgaaaaaagcttttatgagctcatgtagcaatcagattttcctgtggattgataataaatgaatatgatatat

SEQ ID NO: 65884 - DNA, 636 bp, Homo sapiens
ttctccaatggacatctcttccacagacctcaacgtgagaactgctctagtttctataaactgtaaacctgtggtggtctgattatcctgatattggattttcttgttttctgttacaccttgagtcatttgcctttaggattctagacaaatctaagggaaaaagccttgacaatagaacattgattgctgtgtccaactccagtactggagcttctctttaactcaggactccagcccattggtagacgtgtgtttctagagcctgctggatctcccagggctactcactcaagttcaaggaccaacaagggcagtggaggtgctgcattgcctgcggtcaaggccagcaaggtggagtggatgcctcagaacggacgagataatgtgaactagctggaattttttattcttgtgaatatgtacataggcagcactagcgacattgcagtctgcttctgcaccttatcttaaagcacttacagataggccttcttgtgatcttgctctatctcacagcacactcagcacccccttctctgcccattccccagcctctcttcctatcccatcccatcccatcccatcccatcccgctctttttttacttataacctagggatacctctaggaaca

SEQ ID NO: 65885 - DNA, 289 bp, Homo sapiens
tgctctccttgttttgctttcgatctggactgttctcaggcaagccggggagtaacttttagttttgctcctgcgattattcaactgacgggctttcatttccatttcacacaccctagcaacacttataccttgcggaattgtattggtagcgtgaaaaaagcacactgagagggcaccatgccggtggaaaggatgcgcatgcgcccgtggctggaggagcagataaactccaacacgatcccggggctcaagtggcttaacaagacaaggtctccctctgtcaccc

SEQ ID NO: 65886 - DNA, 2323 bp, Homo sapiens
tgctctccttgttttgctttcgatctggactgttctcaggcaagccggggagtaacttttagttttgctcctgcgattattcaactgacgggctttcatttccatttcacacaccctagcaacacttataccttgcggaattgtattggtagcgtgaaaaaagcacactgagaggggcaaaacacaccttttgaggtctgtggagctcaaaaatgaagtcaaaggtgactgggtgacacaaacagctcagggcaccatgccggtggaaaggatgcgcatgcgcccgtggctggaggagcagataaactccaacacgatcccggggctcaagtggcttaacaaggaaaagaagatttttcagatcccctggatgcatgcggctagacatgggtgggatgtggaaaaagatgcaccactctttagaaactgggcaatccatacaggaaagcatcaaccaggagtagataaacctgatcccaaaacatggaaggcgaatttcagatgcgccatgaattccttgcctgatattgaagaagtcaaggataaaagcataaagaaaggaaataatgccttcagggtctaccgaatgctgcccctatcagaacggccttctaagaaaggaaagaaaccaaagacagaaaaagaagacaaagttaagcacatcaagcaagaaccagttgagtcatctctggggcttagtaatggagtaagtgatctttctcctgagtatgcggtcctgacttcaactataaaaaatgaagtggatagtacggtgaacatcatagttgtaggacagtcccatctggacagcaacattgagaatcaagagattgtcaccaatccgccagacatttgccaagttgtagaggtgaccactgagagcgacgagcagccggtcagcatgagcgagctctaccctctgcagatctcccccgtgtcttcctatgcagaaagcgaaacgactgatagtgtgcccagcgatgaagagagtgccgaggggcggccacactggcggaagaggaatattgaaggcaaacagtacctcagcaacatggggactcgaggctcctacctgctgcccggcatggcgtccttcgtcacttccaacaaaccggacctccaggtcaccatcaaagaggagagcaatccggtgccttacaacagctcctggcccccttttcaagacctccccctttcttcctccatgaccccagcatccagcagcagtcggccagaccgggagacccgggccagcgtcatcaagaaaacatcggatatcacccaggcccgcgtcaagagctgttaagcctctgactctccgcggtggttgttggggcttcttggctttgttttgttgtttgtttgtattttatttttttctctctgacacctattttagacaaatctaagggaaaaagccttgacaatagaacattgattgctgtgtccaactccagtactggagcttctctttaactcaggactccagcccattggtagacgtgtgtttctagagcctgctggatctcccagggctactcactcaagttcaaggaccaacaagggcagtggaggtgctgcattgcctgcggtcaaggccagcaaggtggagtggatgcctcagaacggacgagataatgtgaactagctggaattttttattcttgtgaatatgtacataggcagcactagcgacattgcagtctgcttctgcaccttatcttaaagcacttacagataggccttcttgtgatcttgctctatctcacagcacactcagcacccccttctctgcccattccccagcctctcttcctatcccatcccatcccatcccatcccatcccatcccgctcttttcctacttttccttccctcaaagcttccattccacatccggaggagaagaaggaaatgaatttctctacagatgtcccattttcagactgctttaaaaaaaatccttctaatctgctatgcttgaatgccacgcggtacaaaggaaaaagtatcatggaaatattatgcaaattcccagatttgaagacaaaaatactctaattctaaccagagcaagcttttttattttttatacaggggaatattttattcaaggtaaaattctaaataaaatataattgttttttatcttttctacagcaaatttataattttaagattccttttcttgtttatcagcagttgttattacatccttgtggcacatttttttttttaattttgtaaaggtgaaaaaagcttttatgagctcatgtagcaatcagattttcctgtggattgataataaatgaatatgatatat

SEQ ID NO: 65887 - DNA, 2130 bp, Homo sapiens
tgctctccttgttttgctttcgatctggactgttctcaggcaagccggggagtaacttttagttttgctcctgcgattattcaactgacgggctttcatttccatttcacacaccctagcaacacttataccttgcggaattgtattggtagcgtgaaaaaagcacactgagagggcaccatgccggtggaaaggatgcgcatgcgcccgtggctggaggagcagataaactccaacacgatcccggggctcaagtggcttaacaaggaaaagaagatttttcagatcccctggatgcatgcggctagacatgggtgggatgtggaaaaagatgcaccactctttagaaactgggcaatccatacaggaaagcatcaaccaggagtagataaacctgatcccaaaacatggaaggcgaatttcagatgcgccatgaattccttgcctgatattgaagaagtcaaggataaaagcataaagaaaggaaataatgccttcagggtctaccgaatgctgcccctatcagaacggccttctaagaaaggaaagaaaccaaagacagaaaaagaagacaaagttaagcacatcaagcaagaaccagttgagtcatctctggggcttagtaatggagtaagtgatctttctcctgagtatgcggtcctgacttcaactataaaaaatgaagtggatagtacggtgaacatcatagttgtaggacagtcccatctggacagcaacattgagaatcaagagattgtcaccaatccgccagacatttgccaagttgtagaggtgaccactgagagcgacgagcagccggtcagcatgagcgagctctaccctctgcagatctcccccgtgtcttcctatgcagaaagcgaaacgactgatagtgtgcccagcgatgaagagagtgccgaggggcggccacactggcggaagaggaatattgaaggcaaacagtacctcagcaacatggggactcgaggctcctacctgctgcccggcatggcgtccttcgtcacttccaacaaaccggacctccaggtcaccatcaaagaggagagcaatccggtgccttacaacagctcctggcccccttttcaagacctccccctttcttcctccatgaccccagcatccagcagcagtcggccagaccgggagacccgggccagcgtcatcaagaaaacatcggatatcacccaggcccgcgtcaagagctgttaagcctctgactctccgcggtggttgttggggcttcttggctttgttttgttgtttgtttgtattttatttttttctctctgacacctattttagacaaatctaagggaaaaagccttgacaatagaacattgattgctgtgtccaactccagtactggagcttctctttaactcaggactccagcccattggtagacgtgtgtttctagagcctgctggatctcccagggctactcactcaagttcaaggaccaacaagggcagtggaggtgctgcattgcctgcggtcaaggccagcaaggtggagtggatgcctcagaacggacgagataatgtgaactagctggaattttttattcttgtgaatatgtacataggcagcactagcgacattgcagtctgcttctgcaccttatcttaaagcacttacagataggccttcttgtgatcttgctctatctcacagcacactcagcacccccttctctgcccattccccagcctctcttcctatcccatcccatcccatcccatcccatcccatcccgctcttttcctacttttccttccctcaaagcttccattccacatccggaggagaagaaggaaatgaatttctctacagatgtcccattttcagactgctttaaaaaaaatccttctaatctgctatgcttgaatgccacgcggtacaaaggaaaaagtatcatggaaatattatgcaaattcccagatttgaagacaaaaatactctaattctaaccagagcaagcttttttattttttatacaggggaatattttattcaaggtaaaattctaaataaaatataattgttttttataagtaattttaatgggacactgctacaccccttcatgtctgcatacttgtttcatga

SEQ ID NO: 65888 - DNA, 1550 bp, Homo sapiens
gatcggtatagggtcatagctgttccagagtaccctcagtatacatttgccaagttgtagaggtgaccactgagagcgacgagcagccggtcagcatgagcgagctctaccctctgcagatctcccccgtgtcttcctatgcagaaagcgaaacgactgatagtgtgcccagcgatgaagagagtgccgaggggcggccacactggcggaagaggaatattgaaggcaaacagtacctcagcaacatggggactcgaggctcctacctgctgcccggcatggcgtccttcgtcacttccaacaaaccggacctccaggtcaccatcaaagaggagagcaatccggtgccttacaacagctcctggcccccttttcaagacctccccctttcttcctccatgaccccagcatccagcagcagtcggccagaccgggagacccgggccagcgtcatcaagaaaacatcggatatcacccaggcccgcgtcaagagctgttaagcctctgactctccgcggtggttgttggggcttcttggctttgttttgttgtttgtttgtattttatttttttctctctgacacctattttagacaaatctaagggaaaaagccttgacaatagaacattgattgctgtgtccaactccagtactggagcttctctttaactcaggactccagcccattggtagacgtgtgtttctagagcctgctggatctcccagggctactcactcaagttcaaggaccaacaagggcagtggaggtgctgcattgcctgcggtcaaggccagcaaggtggagtggatgcctcagaacggacgagataatgtgaactagctggaattttttattcttgtgaatatgtacataggcagcactagcgacattgcagtctgcttctgcaccttatcttaaagcacttacagataggccttcttgtgatcttgctctatctcacagcacactcagcacccccttctctgcccattccccagcctctcttcctatcccatcccatcccatcccatcccatcccatcccgctcttttcctacttttccttccctcaaagcttccattccacatccggaggagaagaaggaaatgaatttctctacagatgtcccattttcagactgctttaaaaaaaatccttctaatctgctatgcttgaatgccacgcggtacaaaggaaaaagtatcatggaaatattatgcaaattcccagatttgaagacaaaaatactctaattctaaccagagcaagcttttttattttttatacaggggaatattttattcaaggtaaaattctaaataaaatataattgttttttatcttttctacagcaaatttataattttaagattccttttcttgtttatcagcagttgttattacatccttgtggcacatttttttttttaattttgtaaaggtgaaaaaagcttttatgagctcatgtagcaatcagattttcctgtggattgataataaatgaatatgatatatagttaaatttttaaggggcatcactcctggctt

SEQ ID NO: 65889 - DNA, 1784 bp, Homo sapiens
tgctctccttgttttgctttcgatctggactgttctcaggcaagccggggagtaacttttagttttgctcctgcgattattcaactgacgggctttcatttccatttcacacaccctagcaacacttataccttgcggaattgtattggtagcgtgaaaaaagcacactgagagggcaccatgccggtggaaaggatgcgcatgcgcccgtggctggaggagcagataaactccaacacgatcccggggctcaagtggcttaacaaggaaaagaagatttttcagatcccctggatgcatgcggctagacatgggtgggatgtggaaaaagatgcaccactctttagaaactgggcaatccatacaggaaagcatcaaccaggagtagataaacctgatcccaaaacatggaaggcgaatttcagatgcgccatgaattccttgcctgatattgaagaagtcaaggataaaagcataaagaaaggaaataatgccttcagggtctaccgaatgctgcccctatcagaacggccttctaagaaaggaaagaaaccaaagacagaaaaagaagacaaagttaagcacatcaagcaagaaccagttgagtcatctctggggcttagtaatggagtaagtgatctttctcctgagtatgcggtcctgacttcaactataaaaaatgaagtggatagtacggtgaacatcatagttgtaggacagtcccatctggacagcaacattgagaatcaagagattgtcaccaatccgccagacatttgccaagttgtagaggtgaccactgagagcgacgagcagccggtcagcatgagcgagctctaccctctgcagatctcccccgtgtcttcctatgcagaaagcgaaacgactgatagtgtgcccagcgatgaagagagtgccgaggggcggccacactggcggaagaggaatattgaaggcaaacagtacctcagcaacatggggactcgaggctcctacctgctgcccggcatggcgtccttcgtcacttccaacaaaccggacctccaggtcaccatcaaagaggagagcaatccggtgccttacaacagctcctggcccccttttcaagacctccccctttcttcctccatgaccccagcatccagcagcagtcggccagaccgggagacccgggccagcgtcatcaagaaaacatcggatatcacccaggcccgcgtcaagagctgttaagcctctgactctccgcggtggttgttggggcttcttggctttgttttgttgtttgtttgtattttatttttttctctctgacacctattttagacaaatctaagggaaaaagccttgacaatagaacattgattgctgtgtccaactccagtactggagcttctctttaactcaggactccagcccattggtagacgtgtgtttctagagcctgctggatctcccagggctactcactcaagttcaaggaccaacaagggcagtggaggtgctgcattgcctgcggtcaaggccagcaaggtggagtggatgcctcagaacggacgagataatgtgaactagctggaattttttattcttgtgaatatgtacataggcagcactagcgacattgcagtctgcttctgcaccttatcttaaagcacttacagataggccttcttgtgatcttgctctatctcacagcacactcagcacccccttctctgcccattccccagcctctcttcctatcgggggatactctagaatcagctaacacccaagcaccgtcc

SEQ ID NO: 65890 - DNA, 1404 bp, Homo sapiens
taaattcgcggccgctcgaccttacaacagctcctgatccccttttaaagacctccccctttcttcctccatgaccccagcatccagcagcagtcggccagaccgggagacccgtttgttggaagtgacgaaggacgccatgcggcatgcttgtcattcacagacctccaggtcaccatcaaagaggagagcaatccggtgccttacaacagctcctggcccccttttcaagacctccccctttcttcctccatgaccccagcatccagcagcagtcggccagaccgggagacccgggccagcgtcatcaagaaaacatcggatatcacccaggcccgcgtcaagagctgttaagcctctgactctccgcggtggttgttggggcttcttggctttgttttgttgtttgtttgtattttatttttttctctctgacacctattttagacaaatctaagggaaaaagccttgacaatagaacattgattgctgtgtccaactccagtactggagcttctctttaactcaggactccagcccattggtagacgtgtgtttctagagcctgctggatctcccagggctactcactcaagttcaaggaccaacaagggcagtggaggtgctgcattgcctgcggtcaaggccagcaaggtggagtggatgcctcagaacggacgagataatgtgaactagctggaattttttattcttgtgaatatgtacataggcagcactagcgacattgcagtctgcttctgcaccttatcttaaagcacttacagataggccttcttgtgatcttgctctatctcacagcacactcagcacccccttctctgcccattccccagcctctcttcctatcccatcccatcccatcccatcccatcccatcccgctcttttcctacttttccttccctcaaagcttccattccacatccggaggagaagaaggaaatgaatttctctacagatgtcccattttcagactgctttaaaaaaaatccttctaatctgctatgcttgaatgccacgcggtacaaaggaaaaagtatcatggaaatattatgcaaattcccagatttgaagacaaaaatactctaattctaaccagagcaagcttttttattttttatacaggggaatattttattcaaggtaaaattctaaataaaatataattgttttttatcttttctacagcaaatttataattttaagattccttttcttgtttatcagcagttgttattacatccttgtggcacatttttttttttaattttgtaaaggtgaaaaaagcttttatgagctcatgtagcaatcagattttcctgtggattgataataaatgaatatgatatatagttaaatttttaaggggcatcactcctggctt

SEQ ID NO: 65891 - DNA, 1104 bp, Homo sapiens
ttctccaatggacatctcttccacagacctcaacgtgagaactgctctagtttctataaactgtaaacctgtggtggtctgattatcctgatattggattttcttgttttctgttacaccttgagtcatttgcctttaggattctagacaaatctaagggaaaaagccttgacaatagaacattgattgctgtgtccaactccagtactggagcttctctttaactcaggactccagcccattggtagacgtgtgtttctagagcctgctggatctcccagggctactcactcaagttcaaggaccaacaagggcagtggaggtgctgcattgcctgcggtcaaggccagcaaggtggagtggatgcctcagaacggacgagataatgtgaactagctggaattttttattcttgtgaatatgtacataggcagcactagcgacattgcagtctgcttctgcaccttatcttaaagcacttacagataggccttcttgtgatcttgctctatctcacagcacactcagcacccccttctctgcccattccccagcctctcttcctatcccatcccatcccatcccatcccatcccatcccgctcttttcctacttttccttccctcaaagcttccattccacatccggaggagaagaaggaaatgaatttctctacagatgtcccattttcagactgctttaaaaaaaatccttctaatctgctatgcttgaatgccacgcggtacaaaggaaaaagtatcatggaaatattatgcaaattcccagatttgaagacaaaaatactctaattctaaccagagcaagcttttttattttttatacaggggaatattttattcaaggtaaaattctaaataaaatataattgttttttatcttttctacagcaaatttataattttaagattccttttcttgtttatcagcagttgttattacatccttgtggcacatttttttttttaattttgtaaaggtgaaaaaagcttttatgagctcatgtagcaatcagattttcctgtggattgataataaatgaatatgatatatagttaaatttttaaggggcatcactcctggctt

SEQ ID NO: 65892 - DNA, 1455 bp, Homo sapiens
tgctctccttgttttgctttcgatctggactgttctcaggcaagccggggagtaacttttagttttgctcctgcgattattcaactgacgggctttcatttccatttcacacaccctagcaacacttataccttgcggaattgtattggtagcgtgaaaaaagcacactgagagggcaccatgccggtggaaaggatgcgcatgcgcccgtggctggaggagcagataaactccaacacgatcccggggctcaagtggcttaacaaggacctccaggtcaccatcaaagaggagagcaatccggtgccttacaacagctcctggcccccttttcaagacctccccctttcttcctccatgaccccagcatccagcagcagtcggccagaccgggagacccgggccagcgtcatcaagaaaacatcggatatcacccaggcccgcgtcaagagctgttaagcctctgactctccgcggtggttgttggggcttcttggctttgttttgttgtttgtttgtattttatttttttctctctgacacctattttagacaaatctaagggatctctttaactcaggactccagcccattggtagacgtgtgtttctagagcctgctggatctcccagggctactcactcaagttcaaggaccaacaagggcagtggaggtgctgcattgcctgcggtcaaggccagcaaggtggagtggatgcctcagaacggacgagataatgtgaactagctggaattttttattcttgtgaatatgtacataggcagcactagcgacattgcagtctgcttctgcaccttatcttaaagcacttacagataggccttcttgtgatcttgctctatctcacagcacactcagcacccccttctctgcccattccccagcctctcttcctatcccatcccatcccatcccatcccatcccatcccgctcttttcctacttttccttccctcaaagcttccattccacatccggaggagaagaaggaaatgaatttctctacagatgtcccattttcagactgctttaaaaaaaatccttctaatctgctatgcttgaatgccacgcggtacaaaggaaaaagtatcatggaaatattatgcaaattcccagatttgaagacaaaaatactctaattctaaccagagcaagcttttttattttttatacaggggaatattttattcaaggtaaaattctaaataaaatataattgttttttatcttttctacagcaaatttataattttaagattccttttcttgtttatcagcagttgttattacatccttgtggcacatttttttttttaattttgtaaaggtgaaaaaagcttttatgagctcatgtagcaatcagattttcctgtggattgataataaatgaatatgatatatagttaaatttttaaggggcatcactcctggctt

SEQ ID NO: 65893 - DNA, 810 bp, Homo sapiens
tgctctccttgttttgctttcgatctggactgttctcaggcaagccggggagtaacttttagttttgctcctgcgattattcaactgacgggctttcatttccatttcacacaccctagcaacacttataccttgcggaattgtattggtagcgtgaaaaaagcacactgagagggcaccatgccggtggaaaggatgcgcatgcgcccgtggctggaggagcagataaactccaacacgatcccggggctcaagtggcttaacaaggaaaagaagatttttcagatccccatcccatcccatcccgctcttttcctacttttccttccctcaaagcttccattccacatccggaggagaagaaggaaatgaatttctctacagatgtcccattttcagactgctttaaaaaaaatccttctaatctgctatgcttgaatgccacgcggtacaaaggaaaaagtatcatggaaatattatgcaaattcccagatttgaagacaaaaatactctaattctaaccagagcaagcttttttattttttatacaggggaatattttattcaaggtaaaattctaaataaaatataattgttttttatcttttctacagcaaatttataattttaagattccttttcttgtttatcagcagttgttattacatccttgtggcacatttttttttttaattttgtaaaggtgaaaaaagcttttatgagctcatgtagcaatcagattttcctgtggattgataataaatgaatatgatatatagttaaatttttaaggggcatcactcctggctt

SEQ ID NO: 65894 - DNA, 622 bp, Homo sapiens
catattgcttgtctgaccttgcgatctctgaatgcttggagcttctctcgtttggacctgtcttgtggttttcacgctaaatgacgggctctcctttcgatttatcccatcccatcccgctcttttcctacttttccttccctcaaagcttccattccacatccggaggagaagaaggaaatgaatttctctacagatgtcccattttcagactgctttaaaaaaaatccttctaatctgctatgcttgaatgccacgcggtacaaaggaaaaagtatcatggaaatattatgcaaattcccagatttgaagacaaaaatactctaattctaaccagagcaagcttttttattttttatacaggggaatattttattcaaggtaaaattctaaataaaatataattgttttttatcttttctacagcaaatttataattttaagattccttttcttgtttatcagcagttgttattacatccttgtggcacatttttttttttaattttgtaaaggtgaaaaaagcttttatgagctcatgtagcaatcagattttcctgtggattgataataaatgaatatgatatatagttaaatttttaaggggcatcactcctggctt

SEQ ID NO: 65895 - DNA, 1052 bp, Homo sapiens
  misc_feature (759)..(759): n is a, c, g, or t
tgctctccttgttttgctttcgatctggactgttctcaggcaagccggggagtaacttttagttttgctcctgcgattattcaactgacgggctttcatttccatttcacacaccctagcaacacttataccttgcggaattgtattggtagcgtgaaaaaagcacactgagagggcaccatgccggtggaaaggatgcgcatgcgcccgtggctggaggagcagataaactccaacacgatcccggggctcaagtggcttaacaaggaaaagaagatttttcagatcccctggatgcatgcggctagacatgggtgggatgtggaaaaagatgcaccactctttagaaactgggcaatccatacaggaaagcatcaaccaggagtagataaacctgatcccaaaacatggaaggcgaatttcagatgcgccatgaattccttgcctgatattgaagaagtcaaggataaaagcataaagaaaggaaataatgccttcagggtctaccgaatgctgcccctatcagaacggccttctaagaaagttgtaggacagtcccatctggacagcaacattgagaatcaagagattgtcaccaatccgccagacatttgccaagttgtagaggtgaccactgagagcgacgagcagccggtcagcatgagcgagctctaccctctgcagatctcccccgtgtcttcctatgcagaaagcgaaacgactgatagtgtgcccagcgatgaagagagtgccgagggncggccacactggcggaagagcgggaatccgtgggcccactgcgggaggacttctgtctgagtagcagtgctctcattggcctgctggtcatcgcagtggccattgccacggtcatcgtcatcagcctggtgatgctgaggaagaggcagtatggcaccatcagccacgggatcgtggaggttgatccaatgctcaccccagaagagcgtcacctgtacaagatgcagaaccatggctatgagaacccctacctacatacctggagctaattcgctggggatcctctaggcaac

SEQ ID NO: 65896 - DNA, 894 bp, Homo sapiens
tgctctccttgttttgctttcgatctggactgttctcaggcaagccggggagtaacttttagttttgctcctgcgattattcaactgacgggctttcatttccatttcacacaccctagcaacacttataccttgcggaattgtattggtagcgtgaaaaaagcacactgagagggcaccatgccggtggaaaggatgcgcatgcgcccgtggctggaggagcagataaactccaacacgatcccggggctcaagtggcttaacaaggaaaagaagatttttcagatcccctggatgcatgcggctagacatgggtgggatgtggaaaaagatgcaccactctttagaaactgggcaatccatacaggtactaaaactccctgcggcgtttatagaggaaggcactcttgcttagttttgtttttattacacataaaatagcctggcttatgacctcatgaagatggctctgaaaaacctgtgacttgtccctaggcacatccaggacacatggggtacaaactgcagccctcagaagtaatgctcccctcatcccatacactcttagtccttcaatttcctataaatgtggtattctaagaagttccctaggtgttaccggggaatagaaactcagttgttctgatgctataaactttggtcaaatttatctcccccccaaaaaggtagtcagaaatacctgtatttattacaacctttacgtagggagctgtttacaggaatggactttgttggagcgtcagatgaaaaagaggcactcagcttccctctgcctgttgactttgcagcctctcagtcttctatatttttcttacgctgatgctccattcttccagcatttatagtttcctcaagctgttcagtagaaccagg

SEQ ID NO: 65897 - DNA, 467 bp, Homo sapiens
ttgaccttatatagggaagggagggggtgcctgtggggtttttaaaaaattttcctttgcagaggcatttcatccttctaatctgctatgcttgaatgccacgcggtacaaaggaaaaagtatcatggaaatattatgcaaattcccagatttgaagacaaaaatactctaattctaaccagagcaagcttttttattttttatacaggggaatattttattcaaggtaaaattctaaataaaatataattgttttttatcttttctacagcaaatttataattttaagattccttttcttgtttatcagcagttgttattacatccttgtggcacatttttttttttaattttgtaaaggtgaaaaaagcttttatgagctcatgtagcaatcagattttcctgtggattgataataaatgaatatgatatatagttaaatttttaaggggcatcactcctggctt

SEQ ID NO: 65898 - DNA, 2280 bp, Homo sapiens
tgctctccttgttttgctttcgatctggactgttctcaggcaagccggggagtaacttttagttttgctcctgcgattattcaactgacgggctttcatttccatttcacacaccctagcaacacttataccttgcggaattgtattggtagcgtgaaaaaagcacactgagagggcaccatgccggtggaaaggatgcgcatgcgcccgtggctggaggagcagataaactccaacacgatcccggggctcaagtggcttaacaaggaaaagaagatttttcagatcccctggatgcatgcggctagacatgggtgggatgtggaaaaagatgcaccactctttagaaactgggcaatccatacaggaaagcatcaaccaggagtagataaacctgatcccaaaacatggaaggcgaatttcagatgcgccatgaattccttgcctgatattgaagaagtcaaggataaaagcataaagaaaggaaataatgccttcagggtctaccgaatgctgcccctatcagaacggccttctaagaaaggaaagaaaccaaagacagaaaaagaagacaaagttaagcacatcaagcaagaaccagttgagtcatctctggggcttagtaatggagtaagtgatctttctcctgagtatgcggtcctgacttcaactataaaaaatgaagtggatagtacggtgaacatcatagttgtaggacagtcccatctggacagcaacattgagaatcaagagattgtcaccaatccgccagacatttgccaagttgtagaggtgaccactgagagcgacgagcagccggtcagcatgagcgagctctaccctctgcagatctcccccgtgtcttcctatgcagaaagcgaaacgactgatagtgtgcccagcgatgaagagagtgccgaggggcggccacactggcggaagaggaatattgaaggcaaacagtacctcagcaacatggggactcgaggctcctacctgctgcccggcatggcgtccttcgtcacttccaacaaaccggacctccaggtcaccatcaaagaggagagcaatccggtgccttacaacagctcctggcccccttttcaagacctccccctttcttcctccatgaccccagcatccagcagcagtcggccagaccgggagacccgggccagcgtcatcaagaaaacatcggatatcacccaggcccgcgtcaagagctgttaagcctctgactctccgcggtggttgttggggcttcttggctttgttttgttgtttgtttgtattttatttttttctctctgacacctattttagacaaatctaagggaaaaagccttgacaatagaacattgattgctgtgtccaactccagtactggagcttctctttaactcaggactccagcccattggtagacgtgtgtttctagagcctgctggatctcccagggctactcactcaagttcaaggaccaacaagggcagtggaggtgctgcattgcctgcggtcaaggccagcaaggtggagtggatgcctcagaacggacgagataatgtgaactagctggaattttttattcttgtgaatatgtacataggcagcactagcgacattgcagtctgcttctgcaccttatcttaaagcacttacagataggccttcttgtgatcttgctctatctcacagcacactcagcacccccttctctgcccattccccagcctctcttcctatcccatcccatcccatcccatcccatcccatcccgctcttttcctacttttccttccctcaaagcttccattccacatccggaggagaagaaggaaatgaatttctctacagatgtcccattttcagactgctttaaaaaaaatccttctaatctgctatgcttgaatgccacgcggtacaaaggaaaaagtatcatggaaatattatgcaaattcccagatttgaagacaaaaatactctaattctaaccagagcaagcttttttattttttatacaggggaatattttattcaaggtaaaattctaaataaaatataattgttttttatcttttctacagcaaatttataattttaagattccttttcttgtttatcagcagttgttattacatccttgtggcacatttttttttttaattttgtaaaggtgaaaaaagcttttatgagctcatgtagcaatcagattttcctgtggattgataataaatgaatatgatatatagttaaatttttaaggggcatcactcctggctt

SEQ ID NO: 65899 - DNA, 2228 bp, Homo sapiens
ctctagaggatctcgcgtttaatccgtaccaactgacgggctttcatttccatttcacacaccctagcaacacttataccttgcggaattgtattggtagcgtgaaaaaagcacactgagagggcaccatgccggtggaaaggatgcgcatgcgcccgtggctggaggagcagataaactccaacacgatcccggggctcaagtggcttaacaaggaaaagaagatttttcagatcccctggatgcatgcggctagacatgggtgggatgtggaaaaagatgcaccactctttagaaactgggcaatccatacaggaaagcatcaaccaggagtagataaacctgatcccaaaacatggaaggcgaatttcagatgcgccatgaattccttgcctgatattgaagaagtcaaggataaaagcataaagaaaggaaataatgccttcagggtctaccgaatgctgcccctatcagaacggccttctaagaaaggaaagaaaccaaagacagaaaaagaagacaaagttaagcacatcaagcaagaaccagttgagtcatctctggggcttagtaatggagtaagtgatctttctcctgagtatgcggtcctgacttcaactataaaaaatgaagtggatagtacggtgaacatcatagttgtaggacagtcccatctggacagcaacattgagaatcaagagattgtcaccaatccgccagacatttgccaagttgtagaggtgaccactgagagcgacgagcagccggtcagcatgagcgagctctaccctctgcagatctcccccgtgtcttcctatgcagaaagcgaaacgactgatagtgtgcccagcgatgaagagagtgccgaggggcggccacactggcggaagaggaatattgaaggcaaacagtacctcagcaacatggggactcgaggctcctacctgctgcccggcatggcgtccttcgtcacttccaacaaaccggacctccaggtcaccatcaaagaggagagcaatccggtgccttacaacagctcctggcccccttttcaagacctccccctttcttcctccatgaccccagcatccagcagcagtcggccagaccgggagacccgggccagcgtcatcaagaaaacatcggatatcacccaggcccgcgtcaagagctgttaagcctctgactctccgcggtggttgttggggcttcttggctttgttttgttgtttgtttgtattttatttttttctctctgacacctattttagacaaatctaagggaaaaagccttgacaatagaacattgattgctgtgtccaactccagtactggagcttctctttaactcaggactccagcccattggtagacgtgtgtttctagagcctgctggatctcccagggctactcactcaagttcaaggaccaacaagggcagtggaggtgctgcattgcctgcggtcaaggccagcaaggtggagtggatgcctcagaacggacgagataatgtgaactagctggaattttttattcttgtgaatatgtacataggcagcactagcgacattgcagtctgcttctgcaccttatcttaaagcacttacagataggccttcttgtgatcttgctctatctcacagcacactcagcacccccttctctgcccattccccagcctctcttcctatcccatcccatcccatcccatcccatcccatcccgctcttttcctacttttccttccctcaaagcttccattccacatccggaggagaagaaggaaatgaatttctctacagatgtcccattttcagactgctttaaaaaaaatccttctaatctgctatgcttgaatgccacgcggtacaaaggaaaaagtatcatggaaatattatgcaaattcccagatttgaagacaaaaatactctaattctaaccagagcaagcttttttattttttatacaggggaatattttattcaaggtaaaattctaaataaaatataattgttttttatcttttctacagcaaatttataattttaagattccttttcttgtttatcagcagttgttattacatccttgtggcacatttttttttttaattttgtaaaggtgaaaaaagcttttatgagctcatgtagcaatcagattttcctgtggattgataataaatgaatatgatatatagttaaatttttaaggggcatcactcctggctt

SEQ ID NO: 65900 - DNA, 2233 bp, Homo sapiens
tgctctccttgttttgctttcgatctggactgttctcaggcaagccggggagtaacttttagttttgctcctgcgattattcaactgacgggctttcatttccatttcacacaccctagcaacacttataccttgcggaattgtattggtagcgtgaaaaaagcacactgagagggcaccatgccggtggaaaggatgcgcatgcgcccgtggctggaggagcagataaactccaacacgatcccggggctcaagtggcttaacaaggaaaagaagatttttcagatcccctggatgcatgcggctagacatgggtgggatgtggaaaaagatgcaccactctttagaaactgggcaatccatacaggaaagcatcaaccaggagtagataaacctgatcccaaaacatggaaggcgaatttcagatgcgccatgaattccttgcctgatattgaagaagtcaaggataaaagcataaagaaaggaaataatgccttcagggtctaccgaatgctgcccctatcagaacggccttctaagaaagcaagaaccagttgagtcatctctggggcttagtaatggagtaagtgatctttctcctgagtatgcggtcctgacttcaactataaaaaatgaagtggatagtacggtgaacatcatagttgtaggacagtcccatctggacagcaacattgagaatcaagagattgtcaccaatccgccagacatttgccaagttgtagaggtgaccactgagagcgacgagcagccggtcagcatgagcgagctctaccctctgcagatctcccccgtgtcttcctatgcagaaagcgaaacgactgatagtgtgcccagcgatgaagagagtgccgaggggcggccacactggcggaagaggaatattgaaggcaaacagtacctcagcaacatggggactcgaggctcctacctgctgcccggcatggcgtccttcgtcacttccaacaaaccggacctccaggtcaccatcaaagaggagagcaatccggtgccttacaacagctcctggcccccttttcaagacctccccctttcttcctccatgaccccagcatccagcagcagtcggccagaccgggagacccgggccagcgtcatcaagaaaacatcggatatcacccaggcccgcgtcaagagctgttaagcctctgactctccgcggtggttgttggggcttcttggctttgttttgttgtttgtttgtattttatttttttctctctgacacctattttagacaaatctaagggaaaaagccttgacaatagaacattgattgctgtgtccaactccagtactggagcttctctttaactcaggactccagcccattggtagacgtgtgtttctagagcctgctggatctcccagggctactcactcaagttcaaggaccaacaagggcagtggaggtgctgcattgcctgcggtcaaggccagcaaggtggagtggatgcctcagaacggacgagataatgtgaactagctggaattttttattcttgtgaatatgtacataggcagcactagcgacattgcagtctgcttctgcaccttatcttaaagcacttacagataggccttcttgtgatcttgctctatctcacagcacactcagcacccccttctctgcccattccccagcctctcttcctatcccatcccatcccatcccatcccatcccatcccgctcttttcctacttttccttccctcaaagcttccattccacatccggaggagaagaaggaaatgaatttctctacagatgtcccattttcagactgctttaaaaaaaatccttctaatctgctatgcttgaatgccacgcggtacaaaggaaaaagtatcatggaaatattatgcaaattcccagatttgaagacaaaaatactctaattctaaccagagcaagcttttttattttttatacaggggaatattttattcaaggtaaaattctaaataaaatataattgttttttatcttttctacagcaaatttataattttaagattccttttcttgtttatcagcagttgttattacatccttgtggcacatttttttttttaattttgtaaaggtgaaaaaagcttttatgagctcatgtagcaatcagattttcctgtggattgataataaatgaatatgatatatagttaaatttttaaggggcatcactcctggctt

SEQ ID NO: 65901 - DNA, 2226 bp, Homo sapiens
tgctctccttgttttgctttcgatctggactgttctcaggcaagccggggagtaacttttagttttgctcctgcgattattcaactgacgggctttcatttccatttcacacaccctagcaacacttataccttgcggaattgtattggtagcgtgaaaaaagcacactgagagggcaccatgccggtggaaaggatgcgcatgcgcccgtggctggaggagcagataaactccaacacgatcccggggctcaagtggcttaacaaggaaaagaagatttttcagatcccctggatgcatgcggctagacatgggtgggatgtggaaaaagatgcaccactctttagaaactgggcaatccatacaggaaagcatcaaccaggagtagataaacctgatcccaaaacatggaaggcgaatttcagatgcgccatgaattccttgcctgatattgaagaagtcaaggataaaagcataaagaaaggaaataatgccttcagggtctaccgaatgctgcccctatcagaacggccttctaagaaaggaaagaaaccaaagacagaaaaagaagacaaagttaagcacatcaagcaagaaccagttgagtcatctctggggcttagtaatggagtaagtgatctttctcctgagtatgcggtcctgacttcaactataaaaaatgaagtggatagtacggtgaacatcatagttgtaggacagtcccatctggacagcaacattgagaatcaagagattgtcaccaatccgccagacatttgccaagttgtagaggtgaccactgagagcgacgagcagccggtcagcatgagcgagctctaccctctgcagatctcccccgtgtcttcctatgcagaaagcgaaacgactgatagtgtgcccagcgatgaagagagtgccgaggggcggccacactggcggaagaggaatattgaaggcaaacagtacctcagcaacatggggactcgaggctcctacctgctgcccggcatggcgtccttcgtcacttccaacaaaccggacctccaggtcaccatcaaagaggagagcaatccggtgccttacaacagctcctggcccccttttcaagacctccccctttcttcctccatgaccccagcatccagcagcagtcggccagaccgggagacccgggccagcgtcatcaagaaaacatcggatatcacccaggcccgcgtcaagagctgttaagcctctgactctccgcggtggttgttggggcttcttggctttgttttgttgtttgtttgtattttatttttttctctctgacacctattttagacaaatctaagggatctctttaactcaggactccagcccattggtagacgtgtgtttctagagcctgctggatctcccagggctactcactcaagttcaaggaccaacaagggcagtggaggtgctgcattgcctgcggtcaaggccagcaaggtggagtggatgcctcagaacggacgagataatgtgaactagctggaattttttattcttgtgaatatgtacataggcagcactagcgacattgcagtctgcttctgcaccttatcttaaagcacttacagataggccttcttgtgatcttgctctatctcacagcacactcagcacccccttctctgcccattccccagcctctcttcctatcccatcccatcccatcccatcccatcccatcccgctcttttcctacttttccttccctcaaagcttccattccacatccggaggagaagaaggaaatgaatttctctacagatgtcccattttcagactgctttaaaaaaaatccttctaatctgctatgcttgaatgccacgcggtacaaaggaaaaagtatcatggaaatattatgcaaattcccagatttgaagacaaaaatactctaattctaaccagagcaagcttttttattttttatacaggggaatattttattcaaggtaaaattctaaataaaatataattgttttttatcttttctacagcaaatttataattttaagattccttttcttgtttatcagcagttgttattacatccttgtggcacatttttttttttaattttgtaaaggtgaaaaaagcttttatgagctcatgtagcaatcagattttcctgtggattgataataaatgaatatgatatatagttaaatttttaaggggcatcactcctggctt

SEQ ID NO: 65902 - DNA, 2061 bp, Homo sapiens
tgctctccttgttttgctttcgatctggactgttctcaggcaagccggggagtaacttttagttttgctcctgcgattattcaactgacgggctttcatttccatttcacacaccctagcaacacttataccttgcggaattgtattggtagcgtgaaaaaagcacactgagagggcaccatgccggtggaaaggatgcgcatgcgcccgtggctggaggagcagataaactccaacacgatcccggggctcaagtggcttaacaaggaaaagaagatttttcagatcccctggatgcatgcggctagacatgggtgggatgtggaaaaagatgcaccactctttagaaactgggcaatccatacaggaaagcatcaaccaggagtagataaacctgatcccaaaacatggaaggcgaatttcagatgcgccatgaattccttgcctgatattgaagaagtcaaggataaaagcataaagaaaggaaataatgccttcagggtctaccgaatgctgcccctatcagaacggccttctaagaaaggaaagaaaccaaagacagaaaaagaagacaaagttaagcacatcaagcaagaaccagttgagtcatctctggggcttagtaatggagtaagtgatctttctcctgagtatgcggtcctgacttcaactataaaaaatgaagtggatagtacggtgaacatcatagttgtaggacagtcccatctggacagcaacattgagaatcaagagattgtcaccaatccgccagacatttgccaagttgtagaggtgaccactgagagcgacgagcagccggacctccaggtcaccatcaaagaggagagcaatccggtgccttacaacagctcctggcccccttttcaagacctccccctttcttcctccatgaccccagcatccagcagcagtcggccagaccgggagacccgggccagcgtcatcaagaaaacatcggatatcacccaggcccgcgtcaagagctgttaagcctctgactctccgcggtggttgttggggcttcttggctttgttttgttgtttgtttgtattttatttttttctctctgacacctattttagacaaatctaagggaaaaagccttgacaatagaacattgattgctgtgtccaactccagtactggagcttctctttaactcaggactccagcccattggtagacgtgtgtttctagagcctgctggatctcccagggctactcactcaagttcaaggaccaacaagggcagtggaggtgctgcattgcctgcggtcaaggccagcaaggtggagtggatgcctcagaacggacgagataatgtgaactagctggaattttttattcttgtgaatatgtacataggcagcactagcgacattgcagtctgcttctgcaccttatcttaaagcacttacagataggccttcttgtgatcttgctctatctcacagcacactcagcacccccttctctgcccattccccagcctctcttcctatcccatcccatcccatcccatcccatcccatcccgctcttttcctacttttccttccctcaaagcttccattccacatccggaggagaagaaggaaatgaatttctctacagatgtcccattttcagactgctttaaaaaaaatccttctaatctgctatgcttgaatgccacgcggtacaaaggaaaaagtatcatggaaatattatgcaaattcccagatttgaagacaaaaatactctaattctaaccagagcaagcttttttattttttatacaggggaatattttattcaaggtaaaattctaaataaaatataattgttttttatcttttctacagcaaatttataattttaagattccttttcttgtttatcagcagttgttattacatccttgtggcacatttttttttttaattttgtaaaggtgaaaaaagcttttatgagctcatgtagcaatcagattttcctgtggattgataataaatgaatatgatatatagttaaatttttaaggggcatcactcctggctt

SEQ ID NO: 65903 - DNA, 1217 bp, Homo sapiens
  misc_feature (924)..(924): n is a, c, g, or t
tgctctccttgttttgctttcgatctggactgttctcaggcaagccggggagtaacttttagttttgctcctgcgattattcaactgacgggctttcatttccatttcacacaccctagcaacacttataccttgcggaattgtattggtagcgtgaaaaaagcacactgagagggcaccatgccggtggaaaggatgcgcatgcgcccgtggctggaggagcagataaactccaacacgatcccggggctcaagtggcttaacaaggaaaagaagatttttcagatcccctggatgcatgcggctagacatgggtgggatgtggaaaaagatgcaccactctttagaaactgggcaatccatacaggaaagcatcaaccaggagtagataaacctgatcccaaaacatggaaggcgaatttcagatgcgccatgaattccttgcctgatattgaagaagtcaaggataaaagcataaagaaaggaaataatgccttcagggtctaccgaatgctgcccctatcagaacggccttctaagaaaggaaagaaaccaaagacagaaaaagaagacaaagttaagcacatcaagcaagaaccagttgagtcatctctggggcttagtaatggagtaagtgatctttctcctgagtatgcggtcctgacttcaactataaaaaatgaagtggatagtacggtgaacatcatagttgtaggacagtcccatctggacagcaacattgagaatcaagagattgtcaccaatccgccagacatttgccaagttgtagaggtgaccactgagagcgacgagcagccggtcagcatgagcgagctctaccctctgcagatctcccccgtgtcttcctatgcagaaagcgaaacgactgatagtgtgcccagcgatgaagagagtgccgagggncggccacactggcggaagagcgggaatccgtgggcccactgcgggaggacttctgtctgagtagcagtgctctcattggcctgctggtcatcgcagtggccattgccacggtcatcgtcatcagcctggtgatgctgaggaagaggcagtatggcaccatcagccacgggatcgtggaggttgatccaatgctcaccccagaagagcgtcacctgtacaagatgcagaaccatggctatgagaacccctacctacatacctggagctaattcgctggggatcctctaggcaac

SEQ ID NO: 65904 - DNA, 4983 bp, Homo sapiens
cggacgcgtgggtcgacccacgcgtccggagacaccgcggaaccctgcagatgctgtggccgacccggcagtgcgggccagagcccctccgcccccatagccacaattcagtagtcgtagggtaggtttgagctactaagcaaataccacactaaccactttttcgataattaaaagaatcatttgaaatattttttttaattgaaaaagatattttaatttcagctcttttattctgcaggtgtattattctgcatgtttttaaatgatataaaacatttatatagacaataagcaacttagaaaaaataagattttgcatttctaaaattataattgaaaacaaaatctgacattctctgctaagtcttatctgaatgcttcagataatggtagtgtagtcagtgactaaaatatttttatcaaatttcctctctgtagacgcctgcaggtattgacgtctgtcagatctcgtcacattggctggtgccgcagctgttggagagtatttttctttatgattattttagaaaaaaaattttcttttccacaatgtggttctcttagaagaatgacgtatcttcttttcctcagcgagttggacacattgtgcccagggcagccctgtccttgggcagcgaccgcacaccaaagctgggaggaggctggtccggggggcctgggcagaagacagtgatttgcaggggtggctcccagacaccctgcccagggatgggctgggcaccacctgggggcggagcgtgagctccagacgagctcctgcgtgcgcgtgtgagtgtgtctgcgcccagccatgtgaccctgctcgtcccgtctgaaggactctcctaggaggccaggttgcccctccagacccctcccaacgtcagggggaaggaaacgttgactttcactgcactttgattcgtctctaaaccatttgctggggattcctgagagcagagctcccagcgggccctgcctcccaagtcccgccgcaaggctacctcgggtgtgtggatgtgcgagggcctcccccgcttgcgaaggggacatgcgtgctggaacctgtcggaactccatgccttcctcgcctgctcacctgctcgacgctggaatcgggacaggtgcaaagggacgcagacgtctgggacagctaaggcccgtgtcaccggagggctccgcacagtcgttctggtttcaacgaataagcaaaactcgggcaagtactgcagctatttggaaatgttttccaaaccacagtctctttagaactaagcctatttgaaacggtcggtgtaggcttactgagatcaggagacagggaggccccgcacatcacacagataaagtcagacaattgtaattaatacttttgctgcctcaagttgttttttaaataaagtactttgaaatgcatgagaatcatgctgcaatatgatcattctagagcaaatatatatatacacgtatatatatttcaagatgaaactaaagcagtttttaaataaattacttgaattttctgtgtatttaaaggaacgactgtttaatgtacttgatgggcctctggtcttgccgtgtctcctgccgctggtggcactttgtagattgtgtgtttgtgtccgggtggcagttgggtacctgctcacgcacggtgtgtctgccaggccacggtgtcccaggatcgcagagggctgactttcaagacttcaagaacattttctggatgtgtggaaacttgagaatggccttgtgaatctcgtgcttggacagggcaagtccgactactgaaagtgctgccagctttgctgcgagccctccggccagcgggagccccgtgggctgggcactgtggcccttcttctctgggggacggcacccctggcttcctcacctcggccgggcgtccgtggcagctcactctatgcaacttgatcctctagcggctttaagactgtagatcccctctctgagacctggctgtacttgtcaggatctcgaggcgcagctcccgtcttagctggtttctccggcttctcgtcctgacgactataaaacagttggaggcaagaaagcagcggatgtggggtggcagtggcctgacccgaatcaagatccgacccaaaccacaccaaatgtgggttcatctgggggccaccccttgcctgaggcttcccaccctcatctgaaggcccaggggccggatccagggctcaccaaagccgattcctcgccagctgggagtgcagaagtctcagggcctggctgcgacttgatttttaggaggaagaggggcttcgcaacccccctctgaatagtgtgttaacccttgagatcccagcctcgactaatctgaagtaaggacaacaaaggccattcagtgccctccacatggccttgccacagtcactgtcagggtatgaacgtgccggaagccagtgccagccagggacaggcgtgactgttgtgtgctcctcggtgacaggagtcggtggctgcacactttgtagactcgtcaagctgtcagcacttcaggtgtttgcaagcaaagcccttcttagtgtgcaggtcagtgtgcagagcccaaatgaggggaccgcaggggctggggtccagggtcagtagagtcggtttctggagctgccttcctgggaggcaggtgtgggtgaccggggctctggcggtgcgtgtgggcccggcctggccacagcggggaccaggtcacgacatctttggcctcaacccctcccctgcactgagattatttccagattgcactcacttgaaaccgtccgtgtcgtcaccttgtgtcttaagggaagccgagaagaagggcagacgggcaggctgtcttgtctgcaaagcgccattgcgcccgcagcttgtgtgggtcaggctgcagctcgggtgtctgtggcttctaaccttgtacctcagacggatgcagtaacaaggcggggctggggacgccggtcagtgtcaaaggggaggtgctctggctgatagccttgcccgagagggacgaggaggccgtgcgggtgccccctggggaagctggccagccatccagtgctgaggacgcagctggagttgggctcgtggcacccttggggtgtgggctgtgcaggctggtggcctgggtgcctctgcacactgagtggagtgtcaggcagggtgtgtcggttggtcgagtcttgtgtaatgtgcgcagaccagttaccaaactaggataatgttggtctcatttgtggtggttttgttccctatacaagtcagctaagtaaagactcttttaacgagcttccccttaacacatggcagaagtttccaggtgcaggaatgcgagctggcgggaaggggcagaggccgtgagctctcagctgggccggcctgcctgtgtcccctttcctgggtctgtcggcagactggcatcatgacgttccctggtggctgaagagctagctttggagtgttgtttttctcactctcaggcaggggccttagctggaatcctccaacctgccactgaacacgtcagtgctgtgtgctgcctcttggacacctgcccttgaaagcctcaggcccctgggagaagcactctgtccagtcctgtccccgggggggaggcagggccactgagccctcctcagatggttagtggcttccaacagccatcaggagtgtttcttgaatgccccaggtgtggaggacttggtctgtgaccacctagaaccccagagctgaacaggaagccgtccctgcagcaacaagagggctggaagggggagctgcaggccaccctcggctctcccactgctggggcggtgatgttcgggtgacatgtttgaaaaatactcttaaagataccaactgttcccttatatggctaatggtttgtgcagccaccagcgatggcggcccctattagagaccaggtttgttaaaacaccaaatattgctgtccacactagacattaaccggcttcagaaaagatggacaccttttcccacgctgtttcgcttcttaactttggtccagctttagccaccacacagcgtgtgagggactgctgctgcggagtcagcctcgtttgtccctccgcctcccaccagcacgcgccgcttctgagagacaccagctccctgcctccaagcctggtgccacaggcctgtcgtgagggacccctgcttccgagagctcctgggggggttctgcccttcaccacctgggagaggtgtcagttcagttccgagttgaacaaggcccgtgcacacagcatgttgggggcccagcccaaagttcttgtcacctcctcatgcaaagccagccatcaccctccggccagagctcaaggtggccccttggccagcccctccttgggtcctccaggaggactgagcacccctcctagcggcatcccttgccctccacagtgctgccaggggcacgtcgctctgtgccgtggactgagaccatcccctggtgacagaatgacccgtttgttggaaatgcctcgttgccagagaaactccccaggcatctcggaacgaaactatttagttccattgtgaactggccacgggacagctttttatcaacttattaagttggagcactgtaatcgcgcttgctgagttagcagtggtggtaagcgtgtgttaaacacataatgttacgttttaggagagagaggtcgtaaggaagtgtcgtgtcgctcatgactctcttctattagttgggtaacagtggcctcatgtttgtgtctgtgtgtacacagagcccttaggttctgctctgtttctttgccaggtgaatgtttgtggcatgcgctgctgtccgcgcccctctgtcctgcgcagggttcagctgtgcggcgccctgatttcctccatgcacacagaacctccttgtgtctgtttctctgttcctctgtggctgactcaataaacttttccctctgacatgatgaaaaaaaagtg

SEQ ID NO: 65905 - DNA, 6850 bp, Homo sapiens
  misc_feature (959)..(959): n is a, c, g, or t
ctgagaggctttctgatggaagggcggggacttcaggagcggccctcccttgttgagatggggtgctctgacagcacctttaactttaaagacctccagggcccagccctgacagccacagtgggtcttatttgagtcggtgatgcagaaacagaggcctgtgcttcttcagcttctgggaaacctacttccaagagtctactcaccgggccggctgtgttgtggaaaatagtctaatgcggcctctgacatgtaattcatttaccgagagccttccggagcagtactacagcctcacctggttcctgagccccatccttggcctcatcttcacacctctcattgggtctgcgagtgaccggtgcaccctgagctggggccgccggcggcccttcatcctcgccctctgcgttggcgtcctctttggcgttgcacttttccttaacggctctgccatcggtctggccctcggcgatgtccccaaccggcagcccatcggcatcgtgctcacggtgctgggagtggtggtcctggacttcagcgccgatgccaccgaggggcccatccgtgcctatctgctggacgtggtggacagcgaggagcaggacatggccctcaacatccacgccttctctgccggcctcggcggagccatcggctacgtgctgggtgggctggactggacccagaccttcctgggcagctggttccggacccagaaccaggtgctcttcttctttgccgccatcatcttcacggtgtccgtggccctgcacctgttcagcatcgacgaggagcagtacagcccgcagcaggagcgcagcgctgaggagcccggcgccctggatgggggcgagccgcacggcgtccctgccttcccagacgaggtacagtcggagcacgagctggccctggactacccggacgtggacatcatgcgcagcaaaagcgactcggcnttgcacgtgccggacaccgcgctggacctggagcccgagctgctgttcctgcacgacatcgagccctccatcttccacgacgcctcctaccccgccaccccccgcagcaccagccaggagctcgccaagaccaagctgccccgcctggccaccttcctcaaggaagccgccaaggaggacgagaccttgctggataatcacttgaatgaagctaaagtcccaaacggaagtggctcccccacaaaagacgccctcggcggctacaccagggtggacacgaagccctcggccacgtcgagctccatgcggcggcggcggcacgcgttccgcaggcaggcctccagcaccttctcctactacggcaagcttgggtcccactgctaccgctaccggcgcgccaacgccgtggtgctgatcaagccgtcgcgcagcatgagcgacctgtacgacatgcagaagcggcagcggcagcaccggcaccggaaccagagcggggccaccacctccagcggggacaccgagagtgaggagggggagggcgagaccacggtgcgcctgctgtggctctccatgctgaagatgcccagggagctgatgcggctgtgcctctgccacctcctcacctggttctctgtcatcgccgaggccgtgttctacaccgacttcatgggccaggtcatcttcgaaggcgaccccaaggccccctcgaactcgaccgcctggcaagcctacaacgccggggtcaagatgggctgctggggcctggtcatttatgccgccactggtgctatttgttcagccctgttacagaagtacttggacaactacgacctgagcgtcagggtgatctacgtgctggggacgctgggcttctctgtcggcacagccgtgatggccatgtttcccaacgtctacgtcgccatggtcaccatcagcaccatgggcatcgtctccatgagcatctcctactgcccgtacgccctgctgggccagtaccatgacatcaagcagtacatccaccacagccccgggaactccaagcgagggtttggcatagattgtgccatcctgtcctgccaagtgtacatctcgcagatcctggtggcctctgcccttgggggcgtggtcgacgccgtggggactgtccgcgtcatccccatggtggcctctgtgggctctttcctgggcttcctgacggccacattcctggtgatctatcccgacgtgtcagaggaggccaaggaggagcagaaaggcctgtcttccccgttggccggcgaaggcagggccggcgggaacagcgaaaagcccaccgtgctgaagctcacgcggaaggagggcctgcagggaccggtggagacagagtccgtggtctgagccgcactcccgtttacacacattccagcgggcgggtgggcgggcgggcgggcggcggggccaggccatgggcgggagcagagacaccgcggaaccctgcagatgctgtggccgacccggcagtgcgggccagagcccctccgcccccatagccacaattcagtagtcgtagggtaggtttgagctactaagcaaataccacactaaccactttttcgataattaaaagaatcatttgaaatattttttttaattgaaaaagatattttaatttcagctcttttattctgcaggtgtattattctgcatgtttttaaatgatataaaacatttatatagacaataagcaacttagaaaaaataagattttgcatttctaaaattataattgaaaacaaaatctgacattctctgctaagtcttatctgaatgcttcagataatggtagtgtagtcagtgactaaaatatttttatcaaatttcctctctgtagacgcctgcaggtattgacgtctgtcagatctcgtcacattggctggtgccgcagctgttggagagtatttttctttatgattattttagaaaaaaaattttcttttccacaatgtggttctcttagaagaatgacgtatcttcttttcctcagcgagttggacacattgtgcccagggcagccctgtccttgggcagcgaccgcacaccaaagctgggaggaggctggtccggggggcctgggcagaagacagtgatttgcaggggtggctcccagacaccctgcccagggatgggctgggcaccacctgggggcggagcgtgagctccagacgagctcctgcgtgcgcgtgtgagtgtgtctgcgcccagccatgtgaccctgctcgtcccgtctgaaggactctcctaggaggccaggttgcccctccagacccctcccaacgtcagggggaaggaaacgttgactttcactgcactttgattcgtctctaaaccatttgctggggattcctgagagcagagctcccagcgggccctgcctcccaagtcccgccgcaaggctacctcgggtgtgtggatgtgcgagggcctcccccgcttgcgaaggggacatgcgtgctggaacctgtcggaactccatgccttcctcgcctgctcacctgctcgacgctggaatcgggacaggtgcaaagggacgcagacgtctgggacagctaaggcccgtgtcaccggagggctccgcacagtcgttctggtttcaacgaataagcaaaactcgggcaagtactgcagctatttggaaatgttttccaaaccacagtctctttagaactaagcctatttgaaacggtcggtgtaggcttactgagatcaggagacagggaggccccgcacatcacacagataaagtcagacaattgtaattaatacttttgctgcctcaagttgttttttaaataaagtactttgaaatgcatgagaatcatgctgcaatatgatcattctagagcaaatatatatatacacgtatatatatttcaagatgaaactaaagcagtttttaaataaattacttgaattttctgtgtatttaaaggaacgactgtttaatgtacttgatgggcctctggtcttgccgtgtctcctgccgctggtggcactttgtagattgtgtgtttgtgtccgggtggcagttgggtacctgctcacgcacggtgtgtctgccaggccacggtgtcccaggatcgcagagggctgactttcaagacttcaagaacattttctggatgtgtggaaacttgagaatggccttgtgaatctcgtgcttggacagggcaagtccgactactgaaagtgctgccagctttgctgcgagccctccggccagcgggagccccgtgggctgggcactgtggcccttcttctctgggggacggcacccctggcttcctcacctcggccgggcgtccgtggcagctcactctatgcaacttgatcctctagcggctttaagactgtagatcccctctctgagacctggctgtacttgtcaggatctcgaggcgcagctcccgtcttagctggtttctccggcttctcgtcctgacgactataaaacagttggaggcaagaaagcagcggatgtggggtggcagtggcctgacccgaatcaagatccgacccaaaccacaccaaatgtgggttcatctgggggccaccccttgcctgaggcttcccaccctcatctgaaggcccaggggccggatccagggctcaccaaagccgattcctcgccagctgggagtgcagaagtctcagggcctggctgcgacttgatttttaggaggaagaggggcttcgcaacccccctctgaatagtgtgttaacccttgagatcccagcctcgactaatctgaagtaaggacaacaaaggccattcagtgccctccacatggccttgccacagtcactgtcagggtatgaacgtgccggaagccagtgccagccagggacaggcgtgactgttgtgtgctcctcggtgacaggagtcggtggctgcacactttgtagactcgtcaagctgtcagcacttcaggtgtttgcaagcaaagcccttcttagtgtgcaggtcagtgtgcagagcccaaatgaggggaccgcaggggctggggtccagggtcagtagagtcggtttctggagctgccttcctgggaggcaggtgtgggtgaccggggctctggcggtgcgtgtgggcccggcctggccacagcggggaccaggtcacgacatctttggcctcaacccctcccctgcactgagattatttccagattgcactcacttgaaaccgtccgtgtcgtcaccttgtgtcttaagggaagccgagaagaagggcagacgggcaggctgtcttgtctgcaaagcgccattgcgcccgcagcttgtgtgggtcaggctgcagctcgggtgtctgtggcttctaaccttgtacctcagacggatgcagtaacaaggcggggctggggacgccggtcagtgtcaaaggggaggtgctctggctgatagccttgcccgagagggacgaggaggccgtgcgggtgccccctggggaagctggccagccatccagtgctgaggacgcagctggagttgggctcgtggcacccttggggtgtgggctgtgcaggctggtggcctgggtgcctctgcacactgagtggagtgtcaggcagggtgtgtcggttggtcgagtcttgtgtaatgtgcgcagaccagttaccaaactaggataatgttggtctcatttgtggtggttttgttccctatacaagtcagctaagtaaagactcttttaacgagcttccccttaacacatggcagaagtttccaggtgcaggaatgcgagctggcgggaaggggcagaggccgtgagctctcagctgggccggcctgcctgtgtcccctttcctgggtctgtcggcagactggcatcatgacgttccctggtggctgaagagctagctttggagtgttgtttttctcactctcaggcaggggccttagctggaatcctccaacctgccactgaacacgtcagtgctgtgtgctgcctcttggacacctgcccttgaaagcctcaggcccctgggagaagcactctgtccagtcctgtccccgggggggaggcagggccactgagccctcctcagatggttagtggcttccaacagccatcaggagtgtttcttgaatgccccaggtgtggaggacttggtctgtgaccacctagaaccccagagctgaacaggaagccgtccctgcagcaacaagagggctggaagggggagctgcaggccaccctcggctctcccactgctggggcggtgatgttcgggtgacatgtttgaaaaatactcttaaagataccaactgttcccttatatggctaatggtttgtgcagccaccagcgatggcggcccctattagagaccaggtttgttaaaacaccaaatattgctgtccacactagacattaaccggcttcagaaaagatggacaccttttcccacgctgtttcgcttcttaactttggtccagctttagccaccacacagcgtgtgagggactgctgctgcggagtcagcctcgtttgtccctccgcctcccaccagcacgcgccgcttctgagagacaccagctccctgcctccaagcctggtgccacaggcctgtcgtgagggacccctgcttccgagagctcctgggggggttctgcccttcaccacctgggagaggtgtcagttcagttccgagttgaacccttaggttctgctctgtttctttgccaggtgaatgtttgtggcatgcgctgctgtccgcgcccctctgtcctgcgcagggttcagctgtgcggcgccctgatttcctccatgcacacagaacctccttgtgtctgtttctctgttcctctgtggctgactcaataaacttttccctctgacatgatgaaaaaaaagtg

SEQ ID NO: 65906 - DNA, 2469 bp, Homo sapiens
  misc_feature (959)..(959): n is a, c, g, or t
ctgagaggctttctgatggaagggcggggacttcaggagcggccctcccttgttgagatggggtgctctgacagcacctttaactttaaagacctccagggcccagccctgacagccacagtgggtcttatttgagtcggtgatgcagaaacagaggcctgtgcttcttcagcttctgggaaacctacttccaagagtctactcaccgggccggctgtgttgtggaaaatagtctaatgcggcctctgacatgtaattcatttaccgagagccttccggagcagtactacagcctcacctggttcctgagccccatccttggcctcatcttcacacctctcattgggtctgcgagtgaccggtgcaccctgagctggggccgccggcggcccttcatcctcgccctctgcgttggcgtcctctttggcgttgcacttttccttaacggctctgccatcggtctggccctcggcgatgtccccaaccggcagcccatcggcatcgtgctcacggtgctgggagtggtggtcctggacttcagcgccgatgccaccgaggggcccatccgtgcctatctgctggacgtggtggacagcgaggagcaggacatggccctcaacatccacgccttctctgccggcctcggcggagccatcggctacgtgctgggtgggctggactggacccagaccttcctgggcagctggttccggacccagaaccaggtgctcttcttctttgccgccatcatcttcacggtgtccgtggccctgcacctgttcagcatcgacgaggagcagtacagcccgcagcaggagcgcagcgctgaggagcccggcgccctggatgggggcgagccgcacggcgtccctgccttcccagacgaggtacagtcggagcacgagctggccctggactacccggacgtggacatcatgcgcagcaaaagcgactcggcnttgcacgtgccggacaccgcgctggacctggagcccgagctgctgttcctgcacgacatcgagccctccatcttccacgacgcctcctaccccgccaccccccgcagcaccagccaggagctcgccaagaccaagctgccccgcctggccaccttcctcaaggaagccgccaaggaggacgagaccttgctggataatcacttgaatgaagctaaagtcccaaacggaagtggctcccccacaaaagacgccctcggcggctacaccagggtggacacgaagccctcggccacgtcgagctccatgcggcggcggcggcacgcgttccgcaggcaggcctccagcaccttctcctactacggcaagcttgggtcccactgctaccgctaccggcgcgccaacgccgtggtgctgatcaagccgtcgcgcagcatgagcgacctgtacgacatgcagaagcggcagcggcagcaccggcaccggaaccagagcggggccaccacctccagcggggacaccgagagtgaggagggggagggcgagaccacggtgcgcctgctgtggctctccatgctgaagatgcccagggagctgatgcggctgtgcctctgccacctcctcacctggttctctgtcatcgccgaggccgtgttctacaccgacttcatgggccaggtcatcttcgaaggcgaccccaaggccccctcgaactcgaccgcctggcaagcctacaacgccggggtcaagatgggctgctggggcctggtcatttatgccgccactggtgctatttgttcagccctgttacagaagtacttggacaactacgacctgagcgtcagggtgatctacgtgctggggacgctgggcttctctgtcggcacagccgtgatggccatgtttcccaacgtctacgtcgccatggtcaccatcagcaccatgggcatcgtctccatgagcatctcctactgcccgtacgccctgctgggccagtaccatgacatcaagcaggtgcgtccaccgtagccctgagatctgcgctccagcctcctgagtgccttccctccatacagagcagagccctgtgcttccccggggggacgttcacgacacagatggccctccttcctctccggttctgagatggccccttccaaagcccacagagccaccacctgcccctgatcggtccctggccacaaagggtcttctccttcagccgcccccacccccctagcacctccagaggcttctggaggcaaaagcactgtccctgcccctttggtcccctcaggcccagtcacatttccctgagggggaagctccagccccgtgttttccacttggatgggaggaaagccacccaggtatgcctagacttcctggcggccacgtttagaaagtgaaaaggccagtgaaggccattttcatagcatatttattcaacctggtgtatctaaaacattatttcagcatgtactctatatgaaaaaagtcatcgagatacctt

SEQ ID NO: 65907 - DNA, 461 bp, Homo sapiens
ctgagaggctttctgatggaagggcggggacttcaggagcggccctcccttgttgagatggggtgctctgacagcacctttaactttaaagacctccagggcccagccctgacagccacagtgggtcttatttgagtcggtgatgcagaaacagaggcctgtgcttcttcagcttctgggaaacctacttccaagagtctactcaccgggccggctgtgttgtggaaaatagtctaatgcggcctctgacatgtaattcatttaccgagagtaagtagacttgcagagaactttcttatcatcgtgtaatggtgctgtggtgttgtccttccagcattttgaactcactgcccatggatgtcatcagagcaccacggcctcgggagtgcaggcagggatctagtgtccagcgctgagctgtgcgcaccatgttctcctttaatctccataatgcccacctt

SEQ ID NO: 65908 - DNA, 7371 bp, Homo sapiens
  misc_feature (959)..(959): n is a, c, g, or t
ctgagaggctttctgatggaagggcggggacttcaggagcggccctcccttgttgagatggggtgctctgacagcacctttaactttaaagacctccagggcccagccctgacagccacagtgggtcttatttgagtcggtgatgcagaaacagaggcctgtgcttcttcagcttctgggaaacctacttccaagagtctactcaccgggccggctgtgttgtggaaaatagtctaatgcggcctctgacatgtaattcatttaccgagagccttccggagcagtactacagcctcacctggttcctgagccccatccttggcctcatcttcacacctctcattgggtctgcgagtgaccggtgcaccctgagctggggccgccggcggcccttcatcctcgccctctgcgttggcgtcctctttggcgttgcacttttccttaacggctctgccatcggtctggccctcggcgatgtccccaaccggcagcccatcggcatcgtgctcacggtgctgggagtggtggtcctggacttcagcgccgatgccaccgaggggcccatccgtgcctatctgctggacgtggtggacagcgaggagcaggacatggccctcaacatccacgccttctctgccggcctcggcggagccatcggctacgtgctgggtgggctggactggacccagaccttcctgggcagctggttccggacccagaaccaggtgctcttcttctttgccgccatcatcttcacggtgtccgtggccctgcacctgttcagcatcgacgaggagcagtacagcccgcagcaggagcgcagcgctgaggagcccggcgccctggatgggggcgagccgcacggcgtccctgccttcccagacgaggtacagtcggagcacgagctggccctggactacccggacgtggacatcatgcgcagcaaaagcgactcggcnttgcacgtgccggacaccgcgctggacctggagcccgagctgctgttcctgcacgacatcgagccctccatcttccacgacgcctcctaccccgccaccccccgcagcaccagccaggagctcgccaagaccaagctgccccgcctggccaccttcctcaaggaagccgccaaggaggacgagaccttgctggataatcacttgaatgaagctaaagtcccaaacggaagtggctcccccacaaaagacgccctcggcggctacaccagggtggacacgaagccctcggccacgtcgagctccatgcggcggcggcggcacgcgttccgcaggcaggcctccagcaccttctcctactacggcaagcttgggtcccactgctaccgctaccggcgcgccaacgccgtggtgctgatcaagccgtcgcgcagcatgagcgacctgtacgacatgcagaagcggcagcggcagcaccggcaccggaaccagagcggggccaccacctccagcggggacaccgagagtgaggagggggagggcgagaccacggtgcgcctgctgtggctctccatgctgaagatgcccagggagctgatgcggctgtgcctctgccacctcctcacctggttctctgtcatcgccgaggccgtgttctacaccgacttcatgggccaggtcatcttcgaaggcgaccccaaggccccctcgaactcgaccgcctggcaagcctacaacgccggggtcaagatgggctgctggggcctggtcatttatgccgccactggtgctatttgttcagccctgttacagaagtacttggacaactacgacctgagcgtcagggtgatctacgtgctggggacgctgggcttctctgtcggcacagccgtgatggccatgtttcccaacgtctacgtcgccatggtcaccatcagcaccatgggcatcgtctccatgagcatctcctactgcccgtacgccctgctgggccagtaccatgacatcaagcagtacatccaccacagccccgggaactccaagcgagggtttggcatagattgtgccatcctgtcctgccaagtgtacatctcgcagatcctggtggcctctgcccttgggggcgtggtcgacgccgtggggactgtccgcgtcatccccatggtggcctctgtgggctctttcctgggcttcctgacggccacattcctggtgatctatcccgacgtgtcagaggaggccaaggaggagcagaaaggcctgtcttccccgttggccggcgaaggcagggccggcgggaacagcgaaaagcccaccgtgctgaagctcacgcggaaggagggcctgcagggaccggtggagacagagtccgtggtctgagccgcactcccgtttacacacattccagcgggcgggtgggcgggcgggcgggcggcggggccaggccatgggcgggagcagagacaccgcggaaccctgcagatgctgtggccgacccggcagtgcgggccagagcccctccgcccccatagccacaattcagtagtcgtagggtaggtttgagctactaagcaaataccacactaaccactttttcgataattaaaagaatcatttgaaatattttttttaattgaaaaagatattttaatttcagctcttttattctgcaggtgtattattctgcatgtttttaaatgatataaaacatttatatagacaataagcaacttagaaaaaataagattttgcatttctaaaattataattgaaaacaaaatctgacattctctgctaagtcttatctgaatgcttcagataatggtagtgtagtcagtgactaaaatatttttatcaaatttcctctctgtagacgcctgcaggtattgacgtctgtcagatctcgtcacattggctggtgccgcagctgttggagagtatttttctttatgattattttagaaaaaaaattttcttttccacaatgtggttctcttagaagaatgacgtatcttcttttcctcagcgagttggacacattgtgcccagggcagccctgtccttgggcagcgaccgcacaccaaagctgggaggaggctggtccggggggcctgggcagaagacagtgatttgcaggggtggctcccagacaccctgcccagggatgggctgggcaccacctgggggcggagcgtgagctccagacgagctcctgcgtgcgcgtgtgagtgtgtctgcgcccagccatgtgaccctgctcgtcccgtctgaaggactctcctaggaggccaggttgcccctccagacccctcccaacgtcagggggaaggaaacgttgactttcactgcactttgattcgtctctaaaccatttgctggggattcctgagagcagagctcccagcgggccctgcctcccaagtcccgccgcaaggctacctcgggtgtgtggatgtgcgagggcctcccccgcttgcgaaggggacatgcgtgctggaacctgtcggaactccatgccttcctcgcctgctcacctgctcgacgctggaatcgggacaggtgcaaagggacgcagacgtctgggacagctaaggcccgtgtcaccggagggctccgcacagtcgttctggtttcaacgaataagcaaaactcgggcaagtactgcagctatttggaaatgttttccaaaccacagtctctttagaactaagcctatttgaaacggtcggtgtaggcttactgagatcaggagacagggaggccccgcacatcacacagataaagtcagacaattgtaattaatacttttgctgcctcaagttgttttttaaataaagtactttgaaatgcatgagaatcatgctgcaatatgatcattctagagcaaatatatatatacacgtatatatatttcaagatgaaactaaagcagtttttaaataaattacttgaattttctgtgtatttaaaggaacgactgtttaatgtacttgatgggcctctggtcttgccgtgtctcctgccgctggtggcactttgtagattgtgtgtttgtgtccgggtggcagttgggtacctgctcacgcacggtgtgtctgccaggccacggtgtcccaggatcgcagagggctgactttcaagacttcaagaacattttctggatgtgtggaaacttgagaatggccttgtgaatctcgtgcttggacagggcaagtccgactactgaaagtgctgccagctttgctgcgagccctccggccagcgggagccccgtgggctgggcactgtggcccttcttctctgggggacggcacccctggcttcctcacctcggccgggcgtccgtggcagctcactctatgcaacttgatcctctagcggctttaagactgtagatcccctctctgagacctggctgtacttgtcaggatctcgaggcgcagctcccgtcttagctggtttctccggcttctcgtcctgacgactataaaacagttggaggcaagaaagcagcggatgtggggtggcagtggcctgacccgaatcaagatccgacccaaaccacaccaaatgtgggttcatctgggggccaccccttgcctgaggcttcccaccctcatctgaaggcccaggggccggatccagggctcaccaaagccgattcctcgccagctgggagtgcagaagtctcagggcctggctgcgacttgatttttaggaggaagaggggcttcgcaacccccctctgaatagtgtgttaacccttgagatcccagcctcgactaatctgaagtaaggacaacaaaggccattcagtgccctccacatggccttgccacagtcactgtcagggtatgaacgtgccggaagccagtgccagccagggacaggcgtgactgttgtgtgctcctcggtgacaggagtcggtggctgcacactttgtagactcgtcaagctgtcagcacttcaggtgtttgcaagcaaagcccttcttagtgtgcaggtcagtgtgcagagcccaaatgaggggaccgcaggggctggggtccagggtcagtagagtcggtttctggagctgccttcctgggaggcaggtgtgggtgaccggggctctggcggtgcgtgtgggcccggcctggccacagcggggaccaggtcacgacatctttggcctcaacccctcccctgcactgagattatttccagattgcactcacttgaaaccgtccgtgtcgtcaccttgtgtcttaagggaagccgagaagaagggcagacgggcaggctgtcttgtctgcaaagcgccattgcgcccgcagcttgtgtgggtcaggctgcagctcgggtgtctgtggcttctaaccttgtacctcagacggatgcagtaacaaggcggggctggggacgccggtcagtgtcaaaggggaggtgctctggctgatagccttgcccgagagggacgaggaggccgtgcgggtgccccctggggaagctggccagccatccagtgctgaggacgcagctggagttgggctcgtggcacccttggggtgtgggctgtgcaggctggtggcctgggtgcctctgcacactgagtggagtgtcaggcagggtgtgtcggttggtcgagtcttgtgtaatgtgcgcagaccagttaccaaactaggataatgttggtctcatttgtggtggttttgttccctatacaagtcagctaagtaaagactcttttaacgagcttccccttaacacatggcagaagtttccaggtgcaggaatgcgagctggcgggaaggggcagaggccgtgagctctcagctgggccggcctgcctgtgtcccctttcctgggtctgtcggcagactggcatcatgacgttccctggtggctgaagagctagctttggagtgttgtttttctcactctcaggcaggggccttagctggaatcctccaacctgccactgaacacgtcagtgctgtgtgctgcctcttggacacctgcccttgaaagcctcaggcccctgggagaagcactctgtccagtcctgtccccgggggggaggcagggccactgagccctcctcagatggttagtggcttccaacagccatcaggagtgtttcttgaatgccccaggtgtggaggacttggtctgtgaccacctagaaccccagagctgaacaggaagccgtccctgcagcaacaagagggctggaagggggagctgcaggccaccctcggctctcccactgctggggcggtgatgttcgggtgacatgtttgaaaaatactcttaaagataccaactgttcccttatatggctaatggtttgtgcagccaccagcgatggcggcccctattagagaccaggtttgttaaaacaccaaatattgctgtccacactagacattaaccggcttcagaaaagatggacaccttttcccacgctgtttcgcttcttaactttggtccagctttagccaccacacagcgtgtgagggactgctgctgcggagtcagcctcgtttgtccctccgcctcccaccagcacgcgccgcttctgagagacaccagctccctgcctccaagcctggtgccacaggcctgtcgtgagggacccctgcttccgagagctcctgggggggttctgcccttcaccacctgggagaggtgtcagttcagttccgagttgaacaaggcccgtgcacacagcatgttgggggcccagcccaaagttcttgtcacctcctcatgcaaagccagccatcaccctccggccagagctcaaggtggccccttggccagcccctccttgggtcctccaggaggactgagcacccctcctagcggcatcccttgccctccacagtgctgccaggggcacgtcgctctgtgccgtggactgagaccatcccctggtgacagaatgacccgtttgttggaaatgcctcgttgccagagaaactccccaggcatctcggaacgaaactatttagttccattgtgaactggccacgggacagctttttatcaacttattaagttggagcactgtaatcgcgcttgctgagttagcagtggtggtaagcgtgtgttaaacacataatgttacgttttaggagagagaggtcgtaaggaagtgtcgtgtcgctcatgactctcttctattagttgggtaacagtggcctcatgtttgtgtctgtgtgtacacagagcccttaggttctgctctgtttctttgccaggtgaatgtttgtggcatgcgctgctgtccgcgcccctctgtcctgcgcagggttcagctgtgcggcgccctgatttcctccatgcacacagaacctccttgtgtctgtttctctgttcctctgtggctgactcaataaacttttccctctgacatgatgaaaaaaaagtg

SEQ ID NO: 65909 - DNA, 5693 bp, Homo sapiens
ttgactctagagcatccccctatgaaggatggggcgaaggggcctggtcatttatgccggcactggtgctatttgttcggccctgttacagaagtacttggacaactacgacctgagcgtcagggtgatctacgtgctggggacgctgggcttctctgtcggcacagccgtgatggccatgtttcccaacgtctacgtcgccatggtcaccatcagcaccatgggcatcgtctccatgagcatctcctactgcccgtacgccctgctgggccagtaccatgacatcaagcagtacatccaccacagccccgggaactccaagcgagggtttggcatagattgtgccatcctgtcctgccaagtgtacatctcgcagatcctggtggcctctgcccttgggggcgtggtcgacgccgtggggactgtccgcgtcatccccatggtggcctctgtgggctctttcctgggcttcctgacggccacattcctggtgatctatcccgacgtgtcagaggaggccaaggaggagcagaaaggcctgtcttccccgttggccggcgaaggcagggccggcgggaacagcgaaaagcccaccgtgctgaagctcacgcggaaggagggcctgcagggaccggtggagacagagtccgtggtctgagccgcactcccgtttacacacattccagcgggcgggtgggcgggcgggcgggcggcggggccaggccatgggcgggagcagagacaccgcggaaccctgcagatgctgtggccgacccggcagtgcgggccagagcccctccgcccccatagccacaattcagtagtcgtagggtaggtttgagctactaagcaaataccacactaaccactttttcgataattaaaagaatcatttgaaatattttttttaattgaaaaagatattttaatttcagctcttttattctgcaggtgtattattctgcatgtttttaaatgatataaaacatttatatagacaataagcaacttagaaaaaataagattttgcatttctaaaattataattgaaaacaaaatctgacattctctgctaagtcttatctgaatgcttcagataatggtagtgtagtcagtgactaaaatatttttatcaaatttcctctctgtagacgcctgcaggtattgacgtctgtcagatctcgtcacattggctggtgccgcagctgttggagagtatttttctttatgattattttagaaaaaaaattttcttttccacaatgtggttctcttagaagaatgacgtatcttcttttcctcagcgagttggacacattgtgcccagggcagccctgtccttgggcagcgaccgcacaccaaagctgggaggaggctggtccggggggcctgggcagaagacagtgatttgcaggggtggctcccagacaccctgcccagggatgggctgggcaccacctgggggcggagcgtgagctccagacgagctcctgcgtgcgcgtgtgagtgtgtctgcgcccagccatgtgaccctgctcgtcccgtctgaaggactctcctaggaggccaggttgcccctccagacccctcccaacgtcagggggaaggaaacgttgactttcactgcactttgattcgtctctaaaccatttgctggggattcctgagagcagagctcccagcgggccctgcctcccaagtcccgccgcaaggctacctcgggtgtgtggatgtgcgagggcctcccccgcttgcgaaggggacatgcgtgctggaacctgtcggaactccatgccttcctcgcctgctcacctgctcgacgctggaatcgggacaggtgcaaagggacgcagacgtctgggacagctaaggcccgtgtcaccggagggctccgcacagtcgttctggtttcaacgaataagcaaaactcgggcaagtactgcagctatttggaaatgttttccaaaccacagtctctttagaactaagcctatttgaaacggtcggtgtaggcttactgagatcaggagacagggaggccccgcacatcacacagataaagtcagacaattgtaattaatacttttgctgcctcaagttgttttttaaataaagtactttgaaatgcatgagaatcatgctgcaatatgatcattctagagcaaatatatatatacacgtatatatatttcaagatgaaactaaagcagtttttaaataaattacttgaattttctgtgtatttaaaggaacgactgtttaatgtacttgatgggcctctggtcttgccgtgtctcctgccgctggtggcactttgtagattgtgtgtttgtgtccgggtggcagttgggtacctgctcacgcacggtgtgtctgccaggccacggtgtcccaggatcgcagagggctgactttcaagacttcaagaacattttctggatgtgtggaaacttgagaatggccttgtgaatctcgtgcttggacagggcaagtccgactactgaaagtgctgccagctttgctgcgagccctccggccagcgggagccccgtgggctgggcactgtggcccttcttctctgggggacggcacccctggcttcctcacctcggccgggcgtccgtggcagctcactctatgcaacttgatcctctagcggctttaagactgtagatcccctctctgagacctggctgtacttgtcaggatctcgaggcgcagctcccgtcttagctggtttctccggcttctcgtcctgacgactataaaacagttggaggcaagaaagcagcggatgtggggtggcagtggcctgacccgaatcaagatccgacccaaaccacaccaaatgtgggttcatctgggggccaccccttgcctgaggcttcccaccctcatctgaaggcccaggggccggatccagggctcaccaaagccgattcctcgccagctgggagtgcagaagtctcagggcctggctgcgacttgatttttaggaggaagaggggcttcgcaacccccctctgaatagtgtgttaacccttgagatcccagcctcgactaatctgaagtaaggacaacaaaggccattcagtgccctccacatggccttgccacagtcactgtcagggtatgaacgtgccggaagccagtgccagccagggacaggcgtgactgttgtgtgctcctcggtgacaggagtcggtggctgcacactttgtagactcgtcaagctgtcagcacttcaggtgtttgcaagcaaagcccttcttagtgtgcaggtcagtgtgcagagcccaaatgaggggaccgcaggggctggggtccagggtcagtagagtcggtttctggagctgccttcctgggaggcaggtgtgggtgaccggggctctggcggtgcgtgtgggcccggcctggccacagcggggaccaggtcacgacatctttggcctcaacccctcccctgcactgagattatttccagattgcactcacttgaaaccgtccgtgtcgtcaccttgtgtcttaagggaagccgagaagaagggcagacgggcaggctgtcttgtctgcaaagcgccattgcgcccgcagcttgtgtgggtcaggctgcagctcgggtgtctgtggcttctaaccttgtacctcagacggatgcagtaacaaggcggggctggggacgccggtcagtgtcaaaggggaggtgctctggctgatagccttgcccgagagggacgaggaggccgtgcgggtgccccctggggaagctggccagccatccagtgctgaggacgcagctggagttgggctcgtggcacccttggggtgtgggctgtgcaggctggtggcctgggtgcctctgcacactgagtggagtgtcaggcagggtgtgtcggttggtcgagtcttgtgtaatgtgcgcagaccagttaccaaactaggataatgttggtctcatttgtggtggttttgttccctatacaagtcagctaagtaaagactcttttaacgagcttccccttaacacatggcagaagtttccaggtgcaggaatgcgagctggcgggaaggggcagaggccgtgagctctcagctgggccggcctgcctgtgtcccctttcctgggtctgtcggcagactggcatcatgacgttccctggtggctgaagagctagctttggagtgttgtttttctcactctcaggcaggggccttagctggaatcctccaacctgccactgaacacgtcagtgctgtgtgctgcctcttggacacctgcccttgaaagcctcaggcccctgggagaagcactctgtccagtcctgtccccgggggggaggcagggccactgagccctcctcagatggttagtggcttccaacagccatcaggagtgtttcttgaatgccccaggtgtggaggacttggtctgtgaccacctagaaccccagagctgaacaggaagccgtccctgcagcaacaagagggctggaagggggagctgcaggccaccctcggctctcccactgctggggcggtgatgttcgggtgacatgtttgaaaaatactcttaaagataccaactgttcccttatatggctaatggtttgtgcagccaccagcgatggcggcccctattagagaccaggtttgttaaaacaccaaatattgctgtccacactagacattaaccggcttcagaaaagatggacaccttttcccacgctgtttcgcttcttaactttggtccagctttagccaccacacagcgtgtgagggactgctgctgcggagtcagcctcgtttgtccctccgcctcccaccagcacgcgccgcttctgagagacaccagctccctgcctccaagcctggtgccacaggcctgtcgtgagggacccctgcttccgagagctcctgggggggttctgcccttcaccacctgggagaggtgtcagttcagttccgagttgaacaaggcccgtgcacacagcatgttgggggcccagcccaaagttcttgtcacctcctcatgcaaagccagccatcaccctccggccagagctcaaggtggccccttggccagcccctccttgggtcctccaggaggactgagcacccctcctagcggcatcccttgccctccacagtgctgccaggggcacgtcgctctgtgccgtggactgagaccatcccctggtgacagaatgacccgtttgttggaaatgcctcgttgccagagaaactccccaggcatctcggaacgaaactatttagttccattgtgaactggccacgggacagctttttatcaacttattaagttggagcactgtaatcgcgcttgctgagttagcagtggtggtaagcgtgtgttaaacacataatgttacgttttaggagagagaggtcgtaaggaagtgtcgtgtcgctcatgactctcttctattagttgggtaacagtggcctcatgtttgtgtctgtgtgtacacagagcccttaggttctgctctgtttctttgccaggtgaatgtttgtggcatgcgctgctgtccgcgcccctctgtcctgcgcagggttcagctgtgcggcgccctgatttcctccatgcacacagaacctccttgtgtctgtttctctgttcctctgtggctgactcaataaacttttccctctgacatgatgaaaaaaaagtg

SEQ ID NO: 65910 - DNA, 4660 bp, Homo sapiens
  misc_feature (1)..(1): n is a, c, g, or t
  misc_feature (556)..(556): n is a, c, g, or t
  misc_feature (4641)..(4641): n is a, c, g, or t
  misc_feature (4644)..(4644): n is a, c, g, or t
  misc_feature (4647)..(4647): n is a, c, g, or t
  misc_feature (4651)..(4651): n is a, c, g, or t
  misc_feature (4653)..(4653): n is a, c, g, or t
  misc_feature (4656)..(4656): n is a, c, g, or t
  misc_feature (4660)..(4660): n is a, c, g, or t
ncttcgacaatttttaaagtgctttaagtgactactttaaacaacctgcagactaaggaagttctcgtagctctggaaatggaaacagctggactagttcagtggggatgattcagcctgagtcacaggcccacacccaaatggaaagtgtaaaccctgaaggccttaggggatccctagagccaggaatcccctctgggacctaccacagtctctggactggctcaggtttcagtgattatttttagctcctctttatttatcctatggttctccatccttttcatcataatttatagtatcctttatttacatttccaataagtactggtgagtatgagtaattgcagaataaattaagatatgtccagtggacacttgacatgacacaaccctaaagaaaacatcaacctaccccgtatcttcacttagtctaaaagtctggaggagtccggatattcttggagtccccagaggcaacagcacttcatgtttaacttataggcaagcagacttaatgagatacagcatacaggatacacagcacatttccccncccactcaaaaatactttcataaaaacagtgaccagtgtttactctggccaggaactccaaaacataccctttgggcttgttcttcattaatatatcacaactgctctgtgagatggacatggttattatctccatgctcacacagctcataattggtggagccaaaaaatgaacacaagatctttgactccaaagcccaagttcttaccatttatgatgactaaaaaccagttgtatgttttttcctgaatatattcaacaaacttgtgttgagcaaaaactgtgttcaagcactgtgctagttacagagaattcaacaataaataaaactgacaaatgacataatggacttacatctcatgaggaaagtaaataatacaaatgagtagaataaattgtattgtgtaaatgtgataaagaaaaaactcaagaaaagcaagtggggtcattgagatgataacatttaaatcctatgattagtaatgatctttgcgagaaggtgataattaaaccaagaactgtaggaggtgaagaaacaagcccttctccatcctcaaccaacctagcctccagggaaaatagcattccaggccaaagggacaagtttaaaggctgtgaagcacctgggagcattgctagaatgacccaagaagagcaagaagacagatgggttgtagtgaattgacaagtaggagaggctaggaaaagatgagacctgagagagaataaggcaaagaagtggaggcttcttgtcagacgagaataaaagcaattgtctttcaaatagagttgagacataatctgatttatgtttttaaagggatactctggcttttgtattgaaaacagactgggaacataaggagagaagaacgatcaatctggtatacctgttaggaaactgttacaattcagaaaaaaaataatgtttgcttggaccaaagagagtattgaaactgatggaaaatgattgatgtacgtattttataggtggaactgatagaatttgctaatcaattgtatgtaaagtaaatagctgggtcaggcctgaacatttggaagaatggagatttattagctgagatgcagaaagcagtaggtgtagtaggtttaggtattttgctaagcatatatagtgaagaaagagagacaagagagtagagagagtatccagaaaaatgatcataaagattgaccatagactgtcactgggctgcagaagaatgatcaaggtggactgggaggggagtgtagaggtggtaggatcaagggctgtaggtctgtgtgaggctgcagggttgctggagtcagtactggaggggtgaggaatttaatcaacaccaactctagattcctgaagtcaaaaaacttattagaacatgtcctagcagagctcttaagagaggctagcttctgggactctcctatagtctatttcaatattagctttagataacttttttaaaaaaattattaatttaagggctgaatgattttctaattatctaaaaattaaagtcttcaccacttaatatttgaatactttataagataggatttgcctatttgggatatatttgagaattcccagaataaaatagattgtcccatgttagcagtcaaagcacatctttgggccatgagttaccgtattataaaaagatttcaaaatgaaataaaatgtattaatatagagattaaaggttaattattaatttgtgttattttcaaaaatagaacacacattcagaatttaaaattttcatattaatctaatgattggcaatcttttatgaaatcattttaccaacatcacttaattcttacaaagtagattatgataaaattatattttcctaaagtatatttttaaaataaacaaatgtgaatagttcatattcagaccatacaaatactttatatgtataattcagaccatacaaatactgtatatatataaccaatctcataggaagggggttggattcttatctccgtatgtttaatttgagataccagatagctcacctttccaaaatatgacctccccgagcactgaaatataaacgactaaatccatttctgttgtgtgtccaaagatccctagttcaaaacctacacattacttttgaggtttaagatacccccaatttattttctattgtcattatctattaataaagcagaaaagtcatggagaaattaagcattgatcaagtaagctttgttggagcatatgggaagaaaaagatctcaagaaaaagaaatgggctgggtgcagtggctcatgtttgtaatcctagcactttgggaggccgaggcaggtggattgctggattgcttgagcccaagagttgaagaccagcctaggcaatggggcaaaaccccatctctataaaaaacacaaaaatgagccaggtgtagtggtgcacacctgtagtctcagctatttgggaggctgaggtgtgacgatgacttgagcttgagaggcagaggttacagtgagccaagcctgtgccgttgcactccagcctgggaccctgtctcaaaaaaaaaaaaaaaaaaaaaaaggaatgacctaagggaggcagttcccaagtgagataatacaaggacaatgtggtgtcaatgagttgagatactcatttggaagaagaaaagaaagacaacatttctaccttttttttttttcctttttgagacaaggatctcactctgttgcacaggctggaaggctggagtgtggtggcatgattatagctcaacctcccgggctcaagcaatcctcccacctcagcctcttgagtagctgggactacagacacatgccaccttgcttggctgtttccctttttgtggagacagaggtctcactatattgcccaagctgctcttgaacacctgggctcaagcaatcctcctgcctcaccatcttaaagtgctgggattacaggcatgagccacggagcccgtcattgtttctactttaacagttaacctcatcaacattagtagcaattcttttgattaaaatacagcagatatattttttattaaatgattatgatcttggtttaaaaaaatttttttagaaaagcaaacaaattacataatacctttaatgataaaggtataaagagactttcagccatatgtatttctgtaacaatgtaagtgattatttttgtaatggaaagaatatatttttggaggggaaaggaacatacatgtttaattttatgaataatgaaggtggagtaaaggccaagaaaacttattattatgtataaaaatgttatttcaacattattattatctacaaaaccaaaatggatttaattaaggtgggcaaggaaggacatattttaaatgaaagaattttcttatgcctaaattggatactaaaaacattcaatactgtttatctgtattattttattaactttgaaaattattattatattgtcattcatttacatcctgatttaaagaaaagttttataactatttttggaaaagacctattagatccctgctaaggtcagttcttcaggataagacttattttattccttttgaataatcttgtatacttatgaggtcgaatgggtagtcaaggaaataaccatgttctcaagatgtggccactgtggtgaccatacagtaggctccagcgtttgcactgtagtccagctcattcaagcaaagctaactccagtagggaatttcccctgtagagagcatgtgcattttgattttacctgtcctctgactgaactatgctcattataacagtaaaaaacacaccctggatggagatttaaagtgctaatgagacatgtgatgtatgaataagcatgtacagcaactgcacatgtggactacccagaccatgcttactagtaacacttctttctacctccttatgaataattacgtaaaactcacataaagggagtctccctcgtgccagtctctcctgtctcatccttatgagcagcctaccctgaatactctctctcagtgtgtactgtatattctgcacctaactttcaaaatattattttcctttgcaataaattgntgntgntgcntnttntttn

SEQ ID NO: 65911 - DNA, 844 bp, Homo sapiens
aggactcagactgccccagagttatgcaatctaagagtatattaaccacttttaagtattatatgtttttctcttttttgagcttttgtcgatttgacacgttcatttcatttgaatgttggttctgaaaatgaagcatgtagttacttttccgttaacatacataacagcattttaaagtacctaaattccttttggaaggccgaggcggacggatcacctgaggtcagaagttccagaccagcctgaccaacatggtgaaacccgtttctactaaaaatacaaaacctagccccgggcgtggtggcacgcgcctgtaatcccagctactcaagagcctgatgcaggagaatcgcttgaaaccgggaggcggaggttgcagtgagctgagatcgcgccactgcactcagcctgggccaaagagtgagactccgtatcaaaaaataataataaagtacctggccgggcgcggtggctcacgcttgttatcccagcactttgggaggccgagacgggcagatcacgaggtcaggagatcgagaccatggtgaatggcgtgaacccgggaggcggagcttgcagtgagctaagatcgcgccactgcactccagcctgggcgacagagcgagactccgtctcaaaaataaataaataaagtacctacattcctaaaagcagtgcttaattctgcagcacatatactaaaattagaataatataaagattagcatggccccttcccaaggataacacgcaaattcgtgaagcgttccgtatttttaaatatatacacttactatgtaaccaaaaaaattaaaaataaacatataaattcctgaaagct

SEQ ID NO: 65912 - DNA, 440 bp, Homo sapiens
cagaaattaattagaacacttcatttaaaagaatttctttgatgcatcaacttctttcctctcagctccaaatctctgcactgctctgttctgtgatgctggagctgggccctgtaaacatttctcctttgcagctggcagaatgttaagctttgtctacagggctgggaggccactgcaggaggaaagtgcttctctcttctttgttcccatgtgattttccttctcttggggtacttggcagccagtgggtgcaggaatcccaaaagtgctcagctgcccagggagtctcacaggcaacccggaaggtggtttcttgcatcctgacgctgacttgcagaacctcggtgaacttctttaccatctaggaggtgatagctacatccgagtgaagtgactccagtgaagtcagtcttgaagagagggctcttccgaatttg

SEQ ID NO: 65913 - DNA, 155 bp, Homo sapiens
gtcattgaagctacatgtagaacgtgagagtattaaataactgaacagccttggcatgcctaggcagatatcccaaaacttgtattctctaccttctgctgacctatttggcaagacatttctgcccaacattaaagaaaatcttttattggaaa

SEQ ID NO: 65914 - DNA, 413 bp, Homo sapiens
aaaaaagacccaaatcaataagatcagagatgcagagatgaaaaagaagacattacaacaaataccacagaaattcaaaggattattagaggctgctgtgagcaactgtatgccaataaattggaaaacctagaagaaatggataaattcctaccaagattgaactatgaacaaatctaaaacctgaatagaccaataacaagtaatgagagcaaagctgtaataaaatgtctcccagcaaagaaagcccaggacatgattatttcactgttgaattttaccaaacatttacagaagaactaatactgattcattcacactattctgaaaaatagaggaggaggaaatacttccaaaaatgtattctacaaggctgatattacactgatactaaagctagatgaagacacatt

SEQ ID NO: 65915 - DNA, 267 bp, Homo sapiens
taaatgatggagttaaatgatgttgtcagtgcctatttaaaaaactactcttccccttctctatgagttctactttggtaaatattaatatttaaccagttagtaaaactaacaccactatttcaattctcttttgtgcatagtaagtaaattttgctttacttactttataaaaaaatactttacattttataaagcaggttttagaaaaacggtttacaagaaagtttgcctccatttcactgccaatttaatcacagggaaaat

SEQ ID NO: 65916 - DNA, 3040 bp, Homo sapiens
accagctttcccgtcccgggccagcgcaggcgctcaggcctcggaggcggggcgatggccacctcccaccgagtggcgaagctggtggcctccagtctccagaccccggtaaatcccatcactggagcgcgggtcgcccagtacgaacgcgaagaccccttaaaggccctggcggcagcggaggcgatcttggaggacgaagaggaggagaaagtggcgcagcccgctggggcatcgagatggggtttcaccatgttggccagattggtcttggattcctgacctcaagtgacccaaagtgctgggattacaggcatgaaccactgtgcctggccaattctgttgatttttcgagtgaaaactgcatactggattcagacactgctactaaaacgaactgctgctgcccagatgaataaccgttgctagactgacacaagccgacaggaagcagtcagagggctaacagaaaggagctgatttgaacaccagcttttctggggtggatgaacatgcaccgataagctatgaggactttgtgaactttcctgatattcaccactctaatgaggagtatttcaagaaagtagaagagttgaaggctgcccacatagaaactatggcaaaattagagaaaatgtaccaggataaattacatttaaaggaagttcagccagtggtcatcagagaagactctcttagtgactcttccagatctgtatcagaaaagaactcctatcaccctgtctcattaatgacatcattttcagagcctgatttaggccagtcttcctccttgtatgtgtcctcctctgaagaggagttacccaacctagaaaaagagtatcctaggaaaaacagaatgatgacctatgctaaggagctcatcaacaatatgtggacagacttttgtgttgaggattatattcgctgtaaagatactggcttccatgcagctgaaaaaagaaggaagaaacgaaaagaatgggtgcccacaattacagtaccggagccttttcaaatgatgataagagaacagaagaaaaaagaagagtccatgaaatctaaatcagatatcgaaatggtacataaagcgctcaaaaaacaagaagaggatccagagtataagaagaaattccgagccaatccagttcctgcatctgtctttctccccctttaccatgatttagtcaagcaaaaagaagaacggagaaggtctctgaaggagaaaagcaaagaagctcttttggcctcacaaaagccatttaaatttatagcaagggaggaacagaagcgagcagcccgggaaaagcagctgagagactttcttaagtataaaaagaaaacaaatcgatttaaagccagacccattcctcgatctacttatggttcaactaccaatgacaagttaaaagaagaagagctctatcgaaaccttaggacacagctgagagcccaggagcatttacagaactcatctcctctgccttgtaggtcagcttgcggatgcaggaaccccaggtgtcctgaacaggctgtaaagttgaagtgtaaacacaaggttaggtgcccaactcctgattttgaggaccttcctgagagataccagaaacacctctcagaacacaagtctccaaaactcttaacagtgtgtaaaccatttgatcttcatgcatctccacatgcatctattaaaagagaaaaaattttggcagacatcgaagcagatgaagaaaatttaaaagaaacacgttggccttatttgtctccaaggcgtaagtcaccagtaagatgtgcaggtgtaaaccctgtgccttgtaactgcaaccctcccgtgcccacggtatcttccagaggacgagaacaagccgtaagaaagagcgaaaaggaaaggatgagagaataccaacgagaactagaagaaagagaagaaaaattaaaaaagaggccactgctatttgaaagagttgctcagaaaaatgcaagaatggcagcagaaaagcattattctaataccctaaaagcactaggaatatctgatgagtttgtttcaaagaaaggccaaagtggaaaagtacttgagtacttcaacaatcaagagacgaaaagtgtcactgaagacaaagaaagctttaatgaagaagaaaaaatagaagaaagagagaatggggaagaaaattattttattgataccaacagccaggattcttacaaggaaaaagatgaagccaatgaggaaagtgaagaagagaaatctgttgaagaatcacactgaatcatcaaggtctcctctctatgcccttgctgttgtttgcgtcagggtgtcagcagccgcatttgtgtttagaacatctgtggggacgcttctgatatgtgcagggctgttgatcaaagtcatctgtagcctgaaaagcctgaatccagctgattggtcatttgatcagttagagtaaggctttgcctattcagttttaaaaatcattgtgtattatctgtttgcaactatgattttgtatttttaaaaagtgagaaccacagctgtcacaaactgattagttataaaaatatacactatttcattaattttactggaaaaaatggcttagtattgaaaggagagagaagtattggtctttggtggtttactttttaaaaattttggaaagtgtgaatcaataactatttttaattatactatttgcccattctttttctctgcagtgcatttcacagaataaatcctctaacttgttttgctgctctgagccatttttaaaagtatagaaaaaacgccgggtatggtggctcatgcctgtaatcccagcattttgggaggccgagacgggtggatcacgaggtcaggagatcgagaccatcctggctaacacgatgaaaccccgtctctactaaaatcaaaatagcagcgggggggggccgaggccagtattggaggcgagggagatggtgaccggagaagctgctggccggacggccaggccacggaaaggggccggccaaaaaaaggtgaaaggtccgccta

SEQ ID NO: 65917 - DNA, 2746 bp, Homo sapiens
accagctttcccgtcccgggccagcgcaggcgctcaggcctcggaggcggggcgatggccacctcccaccgagtggcgaagctggtggcctccagtctccagaccccggtaaatcccatcactggagcgcgggtcgcccagtacgaacgcgaagaccccttaaaggccctggcggcagcggaggcgatcttggaggacgaagaggaggagaaagtggcgcagcccgctggggcatcggctgatttgaacaccagcttttctggggtggatgaacatgcaccgataagctatgaggactttgtgaactttcctgatattcaccactctaatgaggagtatttcaagaaagtagaagagttgaaggctgcccacatagaaactatggcaaaattagagaaaatgtaccaggataaattacatttaaaggaagttcagccagtggtcatcagagaagactctcttagtgactcttccagagcctgatttaggccagtcttcctccttgtatgtgtcctcctctgaagaggagttacccaacctagaaaaagagtatcctaggaaaaacagaatgatgacctatgctaaggagctcatcaacaatatgtggacagacttttgtgttgaggattatattcgctgtaaagatactggcttccatgcagctgaaaaaagaaggaagaaacgaaaagaatgggtgcccacaattacagtaccggagccttttcaaatgatgataagagaacagaagaaaaaagaagagtccatgaaatctaaatcagatatcgaaatggtacataaagcgctcaaaaaacaagaagaggatccagagtataagaagaaattccgagccaatccagttcctgcatctgtctttctccccctttaccatgatttagtcaagcaaaaagaagaacggagaaggtctctgaaggagaaaagcaaagaagctcttttggcctcacaaaagccatttaaatttatagcaagggaggaacagaagcgagcagcccgggaaaagcagctgagagactttcttaagtataaaaagaaaacaaatcgatttaaagccagacccattcctcgatctacttatggttcaactaccaatgacaagttaaaagaagaagagctctatcgaaaccttaggacacagctgagagcccaggagcatttacagaactcatctcctctgccttgtaggtcagcttgcggatgcaggaaccccaggtgtcctgaacaggctgtaaagttgaagtgtaaacacaaggttaggtgcccaactcctgattttgaggaccttcctgagagataccagaaacacctctcagaacacaagtctccaaaactcttaacagtgtgtaaaccatttgatcttcatgcatctccacatgcatctattaaaagagaaaaaattttggcagacatcgaagcagatgaagaaaatttaaaagaaacacgttggccttatttgtctccaaggcgtaagtcaccagtaagatgtgcaggtgtaaaccctgtgccttgtaactgcaaccctcccgtgcccacggtatcttccagaggacgagaacaagccgtaagaaagagcgaaaaggaaaggatgagagaataccaacgagaactagaagaaagagaagaaaaattaaaaaagaggccactgctatttgaaagagttgctcagaaaaatgcaagaatggcagcagaaaagcattattctaataccctaaaagcactaggaatatctgatgagtttgtttcaaagaaaggccaaagtggaaaagtacttgagtacttcaacaatcaagagacgaaaagtgtcactgaagacaaagaaagctttaatgaagaagaaaaaatagaagaaagagagaatggggaagaaaattattttattgataccaacagccaggattcttacaaggaaaaagatgaagccaatgaggaaagtgaagaagagaaatctgttgaagaatcacactgaatcatcaaggtctcctctctatgcccttgctgttgtttgcgtcagggtgtcagcagccgcatttgtgtttagaacatctgtggggacgcttctgatatgtgcagggctgttgatcaaagtcatctgtagcctgaaaagcctgaatccagctgattggtcatttgatcagttagagtaaggctttgcctattcagttttaaaaatcattgtgtattatctgtttgcaactatgattttgtatttttaaaaagtgagaaccacagctgtcacaaactgattagttataaaaatatacactatttcattaattttactggaaaaaatggcttagtattgaaaggagagagaagtattggtctttggtggtttactttttaaaaattttggaaagtgtgaatcaataactatttttaattatactatttgcccattctttttctctgcagtgcatttcacagaataaatcctctaacttgttttgctgctctgagccatttttaaaagtatagaaaaaacgccgggtatggtggctcatgcctgtaatcccagcattttgggaggccgagacgggtggatcacgaggtcaggagatcgagaccatcctggctaacacgatgaaaccccgtctctactaaaatcaaaatagcagcgggggggggccgaggccagtattggaggcgagggagatggtgaccggagaagctgctggccggacggccaggccacggaaaggggccggccaaaaaaaggtgaaaggtccgccta

SEQ ID NO: 65918 - DNA, 2505 bp, Homo sapiens
gagaattgcttgaacctgggaggtggaggttgcagtgagccgatatcacaccactgcactccaacctgggcaacagagtgagactctgtctcagaaaaaaaaagaaaatatgtaactcttaatttttatatttggtcacatacaactgaaagtataacatagttattcttctcatttagatctgtatcagaaaagaactcctatcaccctgtctcattaatgacatcattttcagagcctgatttaggccagtcttcctccttgtatgtgtcctcctctgaagaggagttacccaacctagaaaaagagtatcctaggaaaaacagaatgatgacctatgctaaggagctcatcaacaatatgtggacagacttttgtgttgaggattatattcgctgtaaagatactggcttccatgcagctgaaaaaagaaggaagaaacgaaaagaatgggtgcccacaattacagtaccggagccttttcaaatgatgataagagaacagaagaaaaaagaagagtccatgaaatctaaatcagatatcgaaatggtacataaagcgctcaaaaaacaagaagaggatccagagtataagaagaaattccgagccaatccagttcctgcatctgtctttctccccctttaccatgatttagtcaagcaaaaagaagaacggagaaggtctctgaaggagaaaagcaaagaagctcttttggcctcacaaaagccatttaaatttatagcaagggaggaacagaagcgagcagcccgggaaaagcagctgagagactttcttaagtataaaaagaaaacaaatcgatttaaagccagacccattcctcgatctacttatggttcaactaccaatgacaagttaaaagaagaagagctctatcgaaaccttaggacacagctgagagcccaggagcatttacagaactcatctcctctgccttgtaggtcagcttgcggatgcaggaaccccaggtgtcctgaacaggctgtaaagttgaagtgtaaacacaaggttaggtgcccaactcctgattttgaggaccttcctgagagataccagaaacacctctcagaacacaagtctccaaaactcttaacagtgtgtaaaccatttgatcttcatgcatctccacatgcatctattaaaagagaaaaaattttggcagacatcgaagcagatgaagaaaatttaaaagaaacacgttggccttatttgtctccaaggcgtaagtcaccagtaagatgtgcaggtgtaaaccctgtgccttgtaactgcaaccctcccgtgcccacggtatcttccagaggacgagaacaagccgtaagaaagagcgaaaaggaaaggatgagagaataccaacgagaactagaagaaagagaagaaaaattaaaaaagaggccactgctatttgaaagagttgctcagaaaaatgcaagaatggcagcagaaaagcattattctaataccctaaaagcactaggaatatctgatgagtttgtttcaaagaaaggccaaagtggaaaagtacttgagtacttcaacaatcaagagacgaaaagtgtcactgaagacaaagaaagctttaatgaagaagaaaaaatagaagaaagagagaatggggaagaaaattattttattgataccaacagccaggattcttacaaggaaaaagatgaagccaatgaggaaagtgaagaagagaaatctgttgaagaatcacactgaatcatcaaggtctcctctctatgcccttgctgttgtttgcgtcagggtgtcagcagccgcatttgtgtttagaacatctgtggggacgcttctgatatgtgcagggctgttgatcaaagtcatctgtagcctgaaaagcctgaatccagctgattggtcatttgatcagttagagtaaggctttgcctattcagttttaaaaatcattgtgtattatctgtttgcaactatgattttgtatttttaaaaagtgagaaccacagctgtcacaaactgattagttataaaaatatacactatttcattaattttactggaaaaaatggcttagtattgaaaggagagagaagtattggtctttggtggtttactttttaaaaattttggaaagtgtgaatcaataactatttttaattatactatttgcccattctttttctctgcagtgcatttcacagaataaatcctctaacttgttttgctgctctgagccatttttaaaagtatagaaaaaacgccgggtatggtggctcatgcctgtaatcccagcattttgggaggccgagacgggtggatcacgaggtcaggagatcgagaccatcctggctaacacgatgaaaccccgtctctactaaaatcaaaatagcagcgggggggggccgaggccagtattggaggcgagggagatggtgaccggagaagctgctggccggacggccaggccacggaaaggggccggccaaaaaaaggtgaaaggtccgccta

SEQ ID NO: 65919 - DNA, 1543 bp, Homo sapiens
attttcttggttttatacacttataaatgagacaagaggactttccattcatcttttcagggcagtttgaaagtccccttaaaatatttatgccttgaggatttcagaaattaaagtgtccagactattcctagagcataatatgtgtgatctcagaacctaggattttattctgcattccatgagaattaaccggtatagaagaggaatcgaggtaaactgtgaactgtgcttataatttctgatttgtcagctaagctaaatgttatttcttttttttcattgactttgtacaagttgataagttaaatgttacatatgtaagttcttatttcttagatgatcttttaaaattccattgcttttctttaattttagaaagagcgaaaaggaaaggatgagagaataccaacgagaactagaagaaagagaagaaaaattaaaaaagaggccactgctatttgaaagagttgctcagaaaaatgcaagaatggcagcagaaaagcattattctaataccctaaaagcactaggaatatctgatgagtttgtttcaaagaaaggccaaagtggaaaagtacttgagtacttcaacaatcaagagacgaaaagtgtcactgaagacaaagaaagctttaatgaagaagaaaaaatagaagaaagagagaatggggaagaaaattattttattgataccaacagccaggattcttacaaggaaaaagatgaagccaatgaggaaagtgaagaagagaaatctgttgaagaatcacactgaatcatcaaggtctcctctctatgcccttgctgttgtttgcgtcagggtgtcagcagccgcatttgtgtttagaacatctgtggggacgcttctgatatgtgcagggctgttgatcaaagtcatctgtagcctgaaaagcctgaatccagctgattggtcatttgatcagttagagtaaggctttgcctattcagttttaaaaatcattgtgtattatctgtttgcaactatgattttgtatttttaaaaagtgagaaccacagctgtcacaaactgattagttataaaaatatacactatttcattaattttactggaaaaaatggcttagtattgaaaggagagagaagtattggtctttggtggtttactttttaaaaattttggaaagtgtgaatcaataactatttttaattatactatttgcccattctttttctctgcagtgcatttcacagaataaatcctctaacttgttttgctgctctgagccatttttaaaagtatagaaaaaacgccgggtatggtggctcatgcctgtaatcccagcattttgggaggccgagacgggtggatcacgaggtcaggagatcgagaccatcctggctaacacgatgaaaccccgtctctactaaaatcaaaatagcagcgggggggggccgaggccagtattggaggcgagggagatggtgaccggagaagctgctggccggacggccaggccacggaaaggggccggccaaaaaaaggtgaaaggtccgccta

SEQ ID NO: 65920 - DNA, 2975 bp, Homo sapiens
gggctgtggttgcctggtttacagcaggtagaaccgtgttcctcttcatctcagttaaaacttacaactcaggaggctccttatagaaatactttgtaaagggttgttgggttctatcctattataccttttgttggttgatctgggaattgaaccatcctttatcaaatggattaaataacatttattttctgacagtttggtcttgctccctctcgttcttaaaatatcactggggaaaatgtacatagcccacaaataacctataactcattctatatgcataagcccataattaatgtataacctaactaggtggactctttaagaagcagcattttgggatcagtgtcagcttaatttgtctttcagctccagtcactatatatcaagtgttttctccccaccaggctgatttgaacaccagcttttctggggtggatgaacatgcaccgataagctatgaggactttgtgaactttcctgatattcaccactctaatgaggagtatttcaagaaagtagaagagttgaaggctgcccacatagaaactatggcaaaattagagaaaatgtaccaggataaattacatttaaaggaagttcagccagtggtcatcagagaagactctcttagtgactcttccagatctgtatcagaaaagaactcctatcaccctgtctcattaatgacatcattttcagagcctgatttaggccagtcttcctccttgtatgtgtcctcctctgaagaggagttacccaacctagaaaaagagtatcctaggaaaaacagaatgatgacctatgctaaggagctcatcaacaatatgtggacagacttttgtgttgaggattatattcgctgtaaagatactggcttccatgcagctgaaaaaagaaggaagaaacgaaaagaatgggtgcccacaattacagtaccggagccttttcaaatgatgataagagaacagaagaaaaaagaagagtccatgaaatctaaatcagatatcgaaatggtacataaagcgctcaaaaaacaagaagaggatccagagtataagaagaaattccgagccaatccagttcctgcatctgtctttctccccctttaccatgatttagtcaagcaaaaagaagaacggagaaggtctctgaaggagaaaagcaaagaagctcttttggcctcacaaaagccatttaaatttatagcaagggaggaacagaagcgagcagcccgggaaaagcagctgagagactttcttaagtataaaaagaaaacaaatcgatttaaagccagacccattcctcgatctacttatggttcaactaccaatgacaagttaaaagaagaagagctctatcgaaaccttaggacacagctgagagcccaggagcatttacagaactcatctcctctgccttgtaggtcagcttgcggatgcaggaaccccaggtgtcctgaacaggctgtaaagttgaagtgtaaacacaaggttaggtgcccaactcctgattttgaggaccttcctgagagataccagaaacacctctcagaacacaagtctccaaaactcttaacagtgtgtaaaccatttgatcttcatgcatctccacatgcatctattaaaagagaaaaaattttggcagacatcgaagcagatgaagaaaatttaaaagaaacacgttggccttatttgtctccaaggcgtaagtcaccagtaagatgtgcaggtgtaaaccctgtgccttgtaactgcaaccctcccgtgcccacggtatcttccagaggacgagaacaagccgtaagaaagagcgaaaaggaaaggatgagagaataccaacgagaactagaagaaagagaagaaaaattaaaaaagaggccactgctatttgaaagagttgctcagaaaaatgcaagaatggcagcagaaaagcattattctaataccctaaaagcactaggaatatctgatgagtttgtttcaaagaaaggccaaagtggaaaagtacttgagtacttcaacaatcaagagacgaaaagtgtcactgaagacaaagaaagctttaatgaagaagaaaaaatagaagaaagagagaatggggaagaaaattattttattgataccaacagccaggattcttacaaggaaaaagatgaagccaatgaggaaagtgaagaagagaaatctgttgaagaatcacactgaatcatcaaggtctcctctctatgcccttgctgttgtttgcgtcagggtgtcagcagccgcatttgtgtttagaacatctgtggggacgcttctgatatgtgcagggctgttgatcaaagtcatctgtagcctgaaaagcctgaatccagctgattggtcatttgatcagttagagtaaggctttgcctattcagttttaaaaatcattgtgtattatctgtttgcaactatgattttgtatttttaaaaagtgagaaccacagctgtcacaaactgattagttataaaaatatacactatttcattaattttactggaaaaaatggcttagtattgaaaggagagagaagtattggtctttggtggtttactttttaaaaattttggaaagtgtgaatcaataactatttttaattatactatttgcccattctttttctctgcagtgcatttcacagaataaatcctctaacttgttttgctgctctgagccatttttaaaagtatagaaaaaacgccgggtatggtggctcatgcctgtaatcccagcattttgggaggccgagacgggtggatcacgaggtcaggagatcgagaccatcctggctaacacgatgaaaccccgtctctactaaaatcaaaatagcagcgggggggggccgaggccagtattggaggcgagggagatggtgaccggagaagctgctggccggacggccaggccacggaaaggggccggccaaaaaaaggtgaaaggtccgccta

SEQ ID NO: 65921 - DNA, 317 bp, Homo sapiens
acaaccatatataggactcagcacacagtaagccaggcatttgcgggacatggaggagatccccacgcttttgtttccctattaaagctctaccaatttttttagggaagctcaaacctcttcaccactgtctctctgcaatagctcactatttccacctattcggattatgtcttctctggtcacactaattcctttgagttaattattttgcttcagataccaactgcccaagatgagatgagtgaggccatcattggtcaggaaatggggtgaggtgtgtggtactactgaaaggtggcagatagatgcatcag

SEQ ID NO: 65922 - DNA, 4416 bp, Homo sapiens
  misc_feature (1)..(3): n is a, c, g, or t
  misc_feature (389)..(389): n is a, c, g, or t
  misc_feature (665)..(665): n is a, c, g, or t
  misc_feature (1859)..(1859): n is a, c, g, or t
  misc_feature (2174)..(2174): n is a, c, g, or t
  misc_feature (2244)..(2244): n is a, c, g, or t
  misc_feature (2890)..(2890): n is a, c, g, or t
  misc_feature (4380)..(4380): n is a, c, g, or t
  misc_feature (4413)..(4414): n is a, c, g, or t
  misc_feature (4416)..(4416): n is a, c, g, or t
nnncaatcccatgtatataattccttatgtgccaggttagatataataatataacttgagaatgtatatttcattttatttttgaaaatatacgtatcttaagattttcttcccaaggtttcatattataaatgaataacaatcatgactgcagaagaaatttaattataagcactgtccatctctccccattcccaaagtaaaataactgctttcagtttgaataggtaaattaaatgtttctctgctccttctattatagcttttaagaaacagtattaaatgattccttgagttgatttcactttaagattattttaatccattactcatttgagtttgcatcattgaattttctttatcaaggacgtaagcaggttaaatgtgtnttggggaaatgtcttaaatgtcagtactatggtctggctgccttgtgagtacctcatcattggaggtgttaataaggtgtgactggatggctagaaatattttaggtggatatcatacatcatgtagagctgaagactggaaaactgctaattctatgctgtgatccttacttatgtttattttccaatttagatgattaacagatacaaatagttatttccttcaaacattgcttgtttcacttcaaaactttgggaatgcatgctacggaaaantctacttcagtagcatgtgaaaaaatacatcttatttgccttaccatcagttttctaagcattttttttctcttttgaatactcataatattttatgtttgtcttataccatttatctcattctatctaataaatactaacttgtttatttctcttattgtccttattgggttttaaagttcttctggggagatatttaacaatctccgtataccccacatgagctatacagagccaacactatataaaataaagttatcaaatttcatttattgtcattagtgcctaaaacttggggaaaagttgctattgaataaaatagcgtacacttggtttctttcttatctgccagtcacagaatctactcttagcaaatgtcattctgatttagagtaattttctaatatagaaatctcatttacccaaataccattaaaattatctaataaggtaacgatttttaaaaggtcccatttcactatttccaaatggtatccaaaagtacttgtaaataaaaaatttaccctaagtgagctgtaggcatagcttccccatccaaaacataaagttatagaggctaatctcacgaacttttctgtggatttttaaggttaaactactggtaaagaagcaattggtaatttgttcagactggatgccagaatagctccgttgtctgttagctgatgtctttgaatctttgggctcactttttatcaatgtgagtttatgagaagccttaaactctggcatacttcaaagtctggtaactttttttaggcctctcacctcctttctgcaacctttcttaactctcacattagggggaaaaaacatatgggatctcaaaaaaactaagtaagcatattttattgtttatcttaaaaaatgcatttttttaaatcaaggaaaatcattaactacatcagtatcgatgaattacatgttgtagtcatcatattttaatgagtcttctctaatatttttagttctgagtttgtagaaagtggcagatgctgttctggttaaaaggctttccaactgattaacgtgttcatccctaatttaattttttaagaaagacacttatgacagcgagaagaaaacgtttcatcttcataggaaatctggcaaaatatcttggcttttgctcaaaatttgaaagcaaatgggaatcagtttcaaatattgganaagtcaagaaaacgattctagctctggctctgtcattggctctctatttcttcatgtataaaatgatggaaatagattaatttctaatacctctttcaactccactaacattcttttattgatagcatttgttagggagaaataacaagatttgtttatggattgtgataggatatcaataagggggtataacaaagatacctaaaattttcatccttggactagtaaagaatggtcagtccacaaaaacaaaataggggttttgtgttaagggtagccaggtcgaagataacttctgttttgaaatgttaaagnaatatcttctacaagtttatgagactcatgggagtggccattgcatggtaatatggcatagtattatatngtttacatacaatttaaaaagtacaggtagtactgaaaaacatctgttcctgtcctcatcccttttgactcctagatcagtttttccagggcaaaagttgcaaataatttttgctttatcaacattttttattaacttcatgctatgatagatgatgtactctttgtgctacttcccttatccctcttccaccatctcctcccaatgtgttactgtttttaattaaatcaataagcaatgtttacattattttgaatatgtacatattataaatatgttgcttattgtattgtcaggtaatactctatggttctatttctttttatcttttccctatagtttctaattacatttcttttattcctgtaatacatttcttatactatttgggtttttcttaatgctccatgatatccactttcctcactttttccctgagagactacactgggaaccaaattgtcagtggtctttttttattttctgattttgtttatggtacataaaaatagaattcactttaacatattggtttcatatccagcaactttgctaaaattcattaattctaatttctttgtagattcttttgaattttctctgtatgcaatcatatcacctgtgaataacatttttgtttcttttntttaaacaaactttttcttttctttcaataatggctaggccctaggttaaatccaactttatcacattttatttaatatttttgcatctgtattcattggtaagattggcctgtaatttttctttcagactcagttctgtttaggtttgatataatggttatgctaggtttatctctcctcttctgttttctggaagagtttggttaggtttaatgctttttgttctagcttaattacattatggttagagatcatgttctgtacaaattccatccttcgagatttgtttagacaagccttaaggtccagtatatggttagtttttataaatatcccggatgtgcctgatataaatgtgtgtctttcatttcatgaggcattgtattatatatgtccattagaacacgtttcttagtcatgttcaaatctttctacatttttacagtttattttctttacatgttcaatcagccattagaggtctgtttaaaatctccgactctgattgtggatttgtttatttcaatttgtttatttcaatttattttaatatcttccttgggaaccaaaccttttatcattctgaagtggccttgtttcagcttttgcaacacttgtgcctcaaaatctactttgactgaaattaatacagctatactagcttcttttggttattatttgtgtatgacttttaaaatttttaattccaacctttctgtgtaactgtatgtttttgatatctctgatgaatggctcaaatgttgaaatttgcccctgtttttgcagtctgaaggtatttgtctctagaatgtttctcaatgtacttacctaactttttagtaaccagattttcaaaaaatttaaagacgatataatgaacaccattgtatattcatctagattcaacacttgttagtattttgccatatttgtttgtctcttgctttccagggtatctatgtgtgtgcatgtgtttaatgattatgtaagtatatgtgtgtttatacacattttgctaagccatttaaaagtaagttgcagaaatcagacactttatatgcataaatacctgagcatgcatcatgcctcacctaaggaaacataaacatgacataattatcaaacataagaaaatcaacagcaatcttaaagtgttatttaatattcaagtcataaacaaatttccctaatggtcctaaaaagtctttcatagctgttcatgtactgcatttatttattctcttacaaatttgaatatctagaatgcgttggaggaaaattttccgtggatctttcatgtctctgtacatcctgagaagagaggcattgtcattgttctgaactctcttttcaaggatctgttataatgaataactcggaaaattgagatagtatctcactttggaggaaaggccaggtttgtctaccttctagtacaataaagatattaaaaatatctctgggcaaagataaagcaagcttactgccnactataaaatatatggattccctaaacacccanntn

SEQ ID NO: 65923 - DNA, 252 bp, Homo sapiens
tggaagaatggccaggaggagagggaaggggcctgtgatctccctggaagcttgtctgttctcaccaagtggctgttgaacaaaggctgttctccacattccttttcctctccatccaagtggtaaatatctctttgtttgtcttcacatttccttctgtgattctccttggctatggtattcttcattctgtcattctatcactctttcctgctcactcttctttattctctttgaaaataactgatttgg

SEQ ID NO: 65924 - DNA, 305 bp, Homo sapiens
atgttaaattaatcccaaaacaagaagatataggtaggagtacgtagctagctcactgcttctcctaggggcctgtctcagtcaatcccaatttccttataaaaacaaaaacaaaaacaaaaacaccagtgtacaaatcctcccctttctcttcaagtgtgcttgtcacttcccggacatgccctcttctgctcatctctctgagttatctctcctcccctgcctgggtctgaccccgggaaaatttaccctgcagatgtaaagctttgttttcataagcaaaaccactgactccacatggctag

SEQ ID NO: 65925 - DNA, 320 bp, Homo sapiens
gtggaatcgtcctcctcatactgtttatccattcattcagcagtggacacctgggttgcttctagcttttggctattgtgaataattcttctgtgaacgtggatttacaaaactctgctttcagttattttcgttgtatactcagaagtgagatcgctgtatcctaggataagactatttttgtaattttgagaaactgctgtactgtttttccatagtggctgcaccattttgcattctgggatgtgacgtggagcagaattaccttcagagtgaagttcaaaaactcactgggaataagtacagagaaatgatgctgc

SEQ ID NO: 65926 - DNA, 1016 bp, Homo sapiens
tccagccccattgcctccaaattccattgcatcttagaccagcaaacacaagtgaattctacttaaccccagaattctgtatgaaaatcttactgcctttttttttctaatcatgtgtcaaagtgtgggaagaacttttatttatgttttaataaattgtcagtataaccatttttacttgaaaatattataatttttcaagtaaacaaattgtttctctaagttgaaaattttatgatggaataaaagtatttttcctcaaaacacatagaaattttacaacaatattttagagttaactaaatgtttctttagtagtttagtcacttaaaaagtgatatgattatgaaaatacttaaactttgtcttttaactatttctaataatgctattgggtataatttcatatttttatactgatcttttctccaaactttaggtaaaacatacttctgtaaacccctgcccacaaaactgaagtccacatttacttctgaatgactgataagtttgtaaaagtatgcatgaatttcgttattaaattaaagtttttattatattttatgcacaatggtataaattattaaattaattttcaagcttatagaacattgataaagattgtcattagaaaaaccccctgagttgattgttatacattaccataaccctttcattggtggattagtgaatatgttatagggtgacccatgaatcccaaagaatcaaagctggctacagcaaacagagggtcaaaaggatatggaactatgcatgatccagcaaaacactcaatatctgttttccctggaatgttaaaagacaaagaagaaaacttggggaacactagatgcatatagttctggttctttaagaataaaaatatgggccgggcccggtgctcatgcctgtaatcccagcactttgtgggaggccaaggcgggtggatcacaaggttaggagttcaagaccagccaggccaacatagtgaaaccctgtctctactaaaaatacaa

SEQ ID NO: 65927 - DNA, 450 bp, Homo sapiens
gagccagttgcaaggagagactagggaagggcattgggtaactttgttgctaaaagctcttctggataaagacatttgggaaaagaagcaaatagagttcatcagaagaggtaagaaagtaagtttatgtttggccaggcacggtggctcacgcctgtgataccagcacttgggaaggccgaggcgggcagatcacgaagtcaagagatcggactatcctggccaacatggtgaagccacgtctgtactaaaaattcaaaaattaggtgggcatgatggcgcatgcctgtagtcccagttactcgggagcctgaagcaggagaatcacttgagcccaggaggtggaggttgcagtgagcggagatcatgccactgcaccccagcctgggcaatagagtaagactctgtcttaaaaaaaataaaaataaataaatggtatccccaatattt

SEQ ID NO: 65928 - DNA, 358 bp, Homo sapiens
gactctgtgaatctgtccattgctggtgggaatgtaaatgggcacaaatactctggcattacctagtaaagcttaagatgcccgtatcttagtacctagcagttccactcctcggtatggagcctagagagaaagtcttacgaagaatgctcatagcagcattgctcctggtggcctaagattggaaaccacccaaatgttcattggcagcgaagggataaataagttcctgtatagttacatatttacatagtaagtactgatatttacataatggaatgctacaaagcagtgaaatcaaagccactccaaatacgtgcacgaagaagaataaacccagaatatacagttgagcaaa

SEQ ID NO: 65929 - DNA, 173 bp, Homo sapiens
ttacagagttaagttcatgatctttggcattgcatactaggtctttcatacttgattcctgttcacttctttgtcttatcttgatcacttcctctattctctaagtttcattacatcacgtgactttaagtatttgtatatatttcttcctctgaaggcctgtggtgatcttt

SEQ ID NO: 65930 - DNA, 278 bp, Homo sapiens
gatgaacaagtattatattttgagttctttcctacactgtctcattttctataaacatactaatgcatgcttttaaattgttaataaattggagttttgctgcaaatttaaagaaaaagaaacatttcctcattttggtctttctttttttgcccttacacatgaaattctagatctctggaagggactcaacaaagctttcctaaattaattggctctgacggtaccttcttaaggatttctggtgtggctctgacatataagcaactcagataact

SEQ ID NO: 65931 - DNA, 369 bp, Homo sapiens
cggtaccctggcttgtggaagtcgggtaggctgtggaggagaggggcagggcagattcttgcaatggaggctctctcaggctcctggctgtgccttaggtgaggtcccccggctcagggcaggatgcatgccctaagctctctcctcatcctacctttccaggaactggcccatctcgggcagaagctggcagtggtgggcctggcttcaccttcaccttccgcagccccgaggaggtcttccgggaattctttgggagtggagacccttttgcagagctctttggtgagtggactctggaagcctctgaatggctcaacttccccctccaggcctgtccttccatcagctgggaggccctgaggtgga

SEQ ID NO: 65932 - DNA, 1950 bp, Homo sapiens
ggagccggccttctccccgtctctagtagtttccgcaccgctgacgcatgcctgcgcgcacagctgggccgggcgcgtcctacgcagcagccgcgagccgggctgcgggtgccagacggttcccggcggggggcaggggcggggcgccgcaggaggccgggactcctggcggaggagccccaaggaggcccgcctgacgactgaccagttgccatggcatcctactacgagatcctagacgtgccgcgaagtgcgtccgctgatgacatcaagaaggcgtatcggcgcaaggctctccagtggcacccagacaaaaacccagataataaagagtttgctgagaagaaatttaaggaggtggccgaggcatatgaagtgctgtctgacaagcacaagcgggagatttacgaccgctatggccgggaagggctgacagggacaggaactggcccatctcgggcagaagctggcagtggtgggcctggcttcaccttcaccttccgcagccccgaggaggtcttccgggaattctttgggagtggagacccttttgcagagctctttgatgacctgggccccttctcagagcttcagaaccggggttcccgacactcaggccccttctttaccttctcttcctccttccctgggcactccgatttctcctcctcatctttctccttcagtcctggggctggtgcttttcgctctgtttctacatctaccacctttgtccaaggacgccgcatcaccacacgcagaatcatggagaacgggcaggagcgggtggaagtggaggaggatgggcagctgaagtcagtcacaatcaatggtgtcccagatgacctggcactgggcttggagctgagccgtcgcgagcagcagccgtcagtcacttccaggtctgggggcactcaggtccagcagacccctgcctcatgccccttggacagcgacctctctgaggatgaggacctgcagctggccatggcctacagcctgtcagagatggaggcagctgggaagaaacccgcagatgtgttctgagctggatgccgggttccagaatcgctgcacagttccaacaggacagcgccttcccccatgcgctgggaggggaccctccatttctccccctcacccatgctgagtgtagagccggggcctgggtggcgggtgggggccgggtgggaggtggcagtagtcttagcctgtgcactctcttccttgggtgtttggtgctggctcctggggactacaaatcccagagtgcggtgtgcccggcctcatttctgatagatcccgcttgggggaggtggtgtatggttacggagctgtgcatcttgggacatgtagtagcccaggtcggcttgtcactcgctgtgagatggggagattttgtcttttgatttatccctgtagggctggcagggttgtagatgaagggggaatgatctgagccttggttcccctgacacgtcttgctagccccagggttagagtgggcagggcagagccgcgcagcacctgggagcggtacctttcccttgggcagcctggggtcccaggaacaagccagggcgagtggcatgtctgcctgagcagggtgtggccccagaaagctgaggagtgtgggctggcagagagcttcgagggcaaggccacccgcgggggcgtgtgtgtggtggggcttggcatgtgatggcagctccaggcatgccgctgcttgtatggctttctttggcctctgaccctgctgcccattctttccaacatcacagatgaactgcctctcctcctccctgcctggggagcccagtggccagggaggggagtggtggagccagtcgctgtaacactgagcctcagagacgaaccaaaaccagctgggctgagctcagatccagggggaaatgctggaagtcaataaaactgagttttgagagcttg

SEQ ID NO: 65933 - DNA, 3101 bp, Homo sapiens
ggagccggccttctccccgtctctagtagtttccgcaccgctgacgcatgcctgcgcgcacagctgggccgggcgcgtcctacgcagcagccgcgagccgggctgcgggtgccagacggttcccggcggggggcaggggcggggcgccgcaggaggccgggactcctggcggaggagccccaaggaggcccgcctgacgactgaccagttgccatggcatcctactacgagatcctagacgtgccgcgaagtgcgtccgctgatgacatcaagaaggcgtatcggcgcaaggctctccagtggcacccagacaaaaacccagataataaagagtttgctgagaagaaatttaaggaggtggccgaggcatatgaagtgctgtctgacaagcacaagcgggagatttacgaccgctatggccgggaagggctgacagggacaggaactggcccatctcgggcagaagctggcagtggtgggcctggcttcaccttcaccttccgcagccccgaggaggtcttccgggaattctttgggagtggagacccttttgcagagctctttgatgacctgggccccttctcagagcttcagaaccggggttcccgacactcaggccccttctttaccttctcttcctccttccctgggcactccgatttctcctcctcatctttctccttcagtcctggggctggtgcttttcgctctgtttctacatctaccacctttgtccaaggacgccgcatcaccacacgcagaatcatggagaacgggcaggagcgggtggaagtggaggaggatgggcagctgaagtcagtcacaatcaatggtgtcccagatgacctggcactgggcttggagctgagccgtcgcgagcagcagccgtcagtcacttccaggtctgggggcactcaggtccagcagacccctgcctcatgccccttggacagcgacctctctgaggatgaggacctgcagctggccatggcctacagcctgtcagagatggaggcagctgggaagaaacccgcaggtgggcgggaggcacagcaccgacggcaggggcggcccaaggcccagcaccaagatccaggcttgggggggacccaggagggtgcgaggggtgaagcaaccaaacgcagtccatccccagaggagaaggcctctcgctgcctcatcctctgaacaccgggcccaacctgatctgatccagatcttgactggggggtctgactcactgtgggaagagaagaggggagtatcctgagttgtaggaactgctttccaactccaagctccctccacaagtttccctcccaggccccccacaccccagtgtggacttgggatttgctgtgctcagcccagggctgataggtccctggtgaagcccagggtggggggtgtcagggcagtggaggggcccgaggagccaggttgcatttattggatggggagctccaaggggcattagtggtttgggctgggccttttgtgccctggtactctgccacctgtgttgctgatggtgtcaaggaaggaggacttggcctagggttgtctgagccggagccggcagctccactggagagcagtgcaggcagagtggagcctcctgctctcctggaccagctgcagacccccaaccctggtttctgtgccatgttgcgctctgaccgtctctgttgcttctcttctggtgttgcttctcctccctcccattctctctgcaactccctgcgggccgcatcgcttgctttcactgccgtctggctaggactcccttcttccttccttccccgagaaggcctcaatgtggcgaggaagatgctggggccggtagggctgtgagatcttctggggaggctagccgggtggggcgggagcctctcagctgtccagattcagaactggagcccactcctcctccctctcgttgcctcagcctgccctcaccctcaggactaggcagaggtgaggctggctcaccctgaagaggtgggataggaccgggggaccccagagggaggcctaggaggggactgcacccatactgcttccctaccacaaatcagggctcagggagaggccatgcggccagcccaggtctgcatgctgagccccatcctccacagcttgccgctgacgctctctcctgtcaccccgcccctgctctctccccagatgtgttctgagctggatgccgggttccagaatcgctgcacagttccaacaggacagcgccttcccccatgcgctgggaggggaccctccatttctccccctcacccatgctgagtgtagagccggggcctgggtggcgggtgggggccgggtgggaggtggcagtagtcttagcctgtgcactctcttccttgggtgtttggtgctggctcctggggactacaaatcccagagtgcggtgtgcccggcctcatttctgatagatcccgcttgggggaggtggtgtatggttacggagctgtgcatcttgggacatgtagtagcccaggtcggcttgtcactcgctgtgagatggggagattttgtcttttgatttatccctgtagggctggcagggttgtagatgaagggggaatgatctgagccttggttcccctgacacgtcttgctagccccagggttagagtgggcagggcagagccgcgcagcacctgggagcggtacctttcccttgggcagcctggggtcccaggaacaagccagggcgagtggcatgtctgcctgagcagggtgtggccccagaaagctgaggagtgtgggctggcagagagcttcgagggcaaggccacccgcgggggcgtgtgtgtggtggggcttggcatgtgatggcagctccaggcatgccgctgcttgtatggctttctttggcctctgaccctgctgcccattctttccaacatcacagatgaactgcctctcctcctccctgcctggggagcccagtggccagggaggggagtggtggagccagtcgctgtaacactgagcctcagagacgaaccaaaaccagctgggctgagctcagatccagggggaaatgctggaagtcaataaaactgagttttgagagcttg

SEQ ID NO: 65934 - DNA, 2296 bp, Homo sapiens
ggagccggccttctccccgtctctagtagtttccgcaccgctgacgcatgcctgcgcgcacagctgggccgggcgcgtcctacgcagcagccgcgagccgggctgcgggtgccagacggttcccggcggggggcaggggcggggcgccgcaggaggccgggactcctggcggaggagccccaaggaggcccgcctgacgactgaccagttgccatggcatcctactacgagatcctagacgtgccgcgaagtgcgtccgctgatgacatcaagaaggcgtatcggcgcaaggctctccagtggcacccagacaaaaacccagataataaagagtttgctgagaagaaatttaaggaggtggccgaggcatatgaagtgctgtctgacaagcacaagcgggagatttacgaccgctatggccgggaagggctgacagggacaggaactggcccatctcgggcagaagctggcagtggtgggcctggcttcaccttcaccttccgcagccccgaggaggtcttccgggaattctttgggagtggagacccttttgcagagctctttgatgacctgggccccttctcagagcttcagaaccggggttcccgacactcaggccccttctttaccttctcttcctccttccctgggcactccgatttctcctcctcatctttctccttcagtcctggggctggtgcttttcgctctgtttctacatctaccacctttgtccaaggacgccgcatcaccacacgcagaatcatggagaacgggcaggagcgggtggaagtggaggaggatgggcagctgaagtcagtcacaatcaatggtgtcccagatgacctggcactgggcttggagctgagccgtcgcgagcagcagccgtcagtcacttccaggtctgggggcactcaggtccagcagacccctgcctcatgccccttggacagcgacctctctgaggatgaggacctgcagctggccatggcctacagcctgtcagagatggaggcagctgggaagaaacccgcagatgtgttctgagctggatgccgggttccagaatcgctgcacagttccaacaggacagcgccttcccccatgcgctgggaggggaccctccatttctccccctcacccatgctgagtgtagagccggggcctgggtggcgggtgggggccgggtgggaggtggcagtagtcttagcctgtgcactctcttccttgggtgtttggtgctggctcctggggactacaaatcccagagtgcggtgtgcccggcctcatttctgatagatcccgcttgggggaggtggtgtatggttacggagctgtgcatcttgggacatgtagtagcccaggtcggcttgtcactcgctgtgagatggggagattttgtcttttgatttatccctgtagggctggcagggttgtagatgaagggggaatgatctgagccttggttcccctgacacgtcttgctagccccagggttagagtgggcagggcagagccgcgcagcacctgggagcggtacctttcccttgggcagcctggggtcccaggaacaagccagggcgagtggcatgtctgcctgagcagggtgtggccccagaaagctgaggagtgtgggctggcagagagcttcgagggcaaggccacccgcgggggcgtgtgtgtggtggggcttggcatgtgatggcagctccaggcatgccgctgcttgtatggctttctttggcctctgaccctgctgcccattctttccaacatcacagatgaactgcctctcctcctccctgcctggggagcccagtggccagggaggggagtggtggagccagtcgctgtaacactgagcctcagagacgaaccaaaaccagctgggctgagctcagatccagggggaaatgctggaagtcaataaaactgagttttgagagcttgaaaaaaaaaaagaaaaaaaaaagggggggccggcacaaaaagtattcccttgcggggggcgcaatggtatataccgcgtcccccaggctttttcgttggtaccagaaggtgtggccccctattagtgtggacgccgtatttatgacgctaaaaggcactgggccgtcctgttttatccaacgctcgttgaacggggagaaaccttgcatcactttggggaccctgtggggagaggagaaccctctaaaatgacggggggcggaggccatagatcgggacaaacgtatcccctacggaagaattttaagcccctaagggaaacttataaatttaaaggtgttctacg

SEQ ID NO: 65935 - DNA, 1979 bp, Homo sapiens
ggagccggccttctccccgtctctagtagtttccgcaccgctgacgcatgcctgcgcgcacagctgggccgggcgcgtcctacgcagcagccgcgagccgggctgcgggtgccagacggttcccggcggggggcaggggcggggcgccgcaggaggccgggactcctggcggaggagccccaaggaggcccgcctgacgactgaccagttgccatggcatcctactacgagatcctagacgtgccgcgaagtgcgtccgctgatgacatcaagaaggcgtatcggcgcaaggctctccagtggcacccagacaaaaacccagataataaagagtttgctgagaagaaatttaaggaggtggccgaggcatatgaagtgctgtctgacaagcacaagcgggagatttacgaccgctatggccgggaagggctgacagggacaggaactggcccatctcgggcagaagctggcagtggtgggcctggcttcaccttcaccttccgcagccccgaggaggtcttccgggaattctttgggagtggagacccttttgcagagctctttgatgacctgggccccttctcagagcttcagaaccggggttcccgacactcaggccccttctttaccttctcttcctccttccctgggcactccgatttctcctcctcatctttctccttcagtcctggggctggtgcttttcgctctgtttctacatctaccacctttgtccaaggacgccgcatcaccacacgcagaatcatggagaacgggcaggagcgggtggaagtggaggaggatgggcagctgaagtcagtcacaatcaatggtgtcccagatgacctggcactgggcttggagctgagccgtcgcgagcagcagccgtcagtcacttccaggtctgggggcactcaggtccagcagacccctgcctcatgccccttggacagcgacctctctgaggatgaggacctgcagctggccatggcctacagcctgtcagagatggaggcagctgggaagaaacccgcagatgtgttctgagctggatgccgggttccagaatcgctgcacagttccaacaggacagcgccttcccccatgcgctgggaggggaccctccatttctccccctcacccatgctgagtgtagagccggggcctgggtggcgggtgggggccgggtgggaggtggcagtagtcttagcctgtgcactctcttccttgggtgtttggtgctggctcctggggactacaaatcccagagtgcggtgtgcccggcctcatttctgatagatcccgcttgggggaggtggtgtatggttacggagctgtgcatcttgggacatgtagtagcccaggtcggcttgtcactcgctgtgagatggggagattttgtcttttgatttatccctgtagggctggcagggttgtagatgaagggggaatgatctgagccttggttcccctgacacgtcttgctagccccagggttagagtgggcagggcagagccgcgcagcacctgggagcggtacctttcccttgggcagcctggggtcccaggaacaagccagggcgagtggcatgtctgcctgagcagggtgtggccccagaaagctgaggagtgtgggctggcagagagcttcgagggcaaggccacccgcgggggcgtgtgtgtggtggggcttggcatgtgatggcagctccaggcatgccgctgcttgtatggctttctttggcctctgaccctgctgcccattctttccaacatcacagatgaactgcctctcctcctccctgcctggggagcccagtggccagggaggggagtggtggagccagtcgctgtaacactgagcctcagagacgaaccaaaaccagctgggctgagctcagatccagggggaaatgctggaagtcaataaaactgagttttgagagcttgaaaaactagagaaacaaagtaaaaatgaa

SEQ ID NO: 65936 - DNA, 1456 bp, Homo sapiens
gtgggttgaccgtggcttgtgggttgaccgtggcttgtgggttgaccgtggcttgtggacagaattaaccaatgacctgggccccttctcagagcttcagaaccggggttcccgacactcaggccccttctttaccttctcttcctccttccctgggcactccgatttctcctcctcatctttctccttcagtcctggggctggtgcttttcgctctgtttctacatctaccacctttgtccaaggacgccgcatcaccacacgcagaatcatggagaacgggcaggagcgggtggaagtggaggaggatgggcagctgaagtcagtcacaatcaatggtgtcccagatgacctggcactgggcttggagctgagccgtcgcgagcagcagccgtcagtcacttccaggtctgggggcactcaggtccagcagacccctgcctcatgccccttggacagcgacctctctgaggatgaggacctgcagctggccatggcctacagcctgtcagagatggaggcagctgggaagaaacccgcagatgtgttctgagctggatgccgggttccagaatcgctgcacagttccaacaggacagcgccttcccccatgcgctgggaggggaccctccatttctccccctcacccatgctgagtgtagagccggggcctgggtggcgggtgggggccgggtgggaggtggcagtagtcttagcctgtgcactctcttccttgggtgtttggtgctggctcctggggactacaaatcccagagtgcggtgtgcccggcctcatttctgatagatcccgcttgggggaggtggtgtatggttacggagctgtgcatcttgggacatgtagtagcccaggtcggcttgtcactcgctgtgagatggggagattttgtcttttgatttatccctgtagggctggcagggttgtagatgaagggggaatgatctgagccttggttcccctgacacgtcttgctagccccagggttagagtgggcagggcagagccgcgcagcacctgggagcggtacctttcccttgggcagcctggggtcccaggaacaagccagggcgagtggcatgtctgcctgagcagggtgtggccccagaaagctgaggagtgtgggctggcagagagcttcgagggcaaggccacccgcgggggcgtgtgtgtggtggggcttggcatgtgatggcagctccaggcatgccgctgcttgtatggctttctttggcctctgaccctgctgcccattctttccaacatcacagatgaactgcctctcctcctccctgcctggggagcccagtggccagggaggggagtggtggagccagtcgctgtaacactgagcctcagagacgaaccaaaaccagctgggctgagctcagatccagggggaaatgctggaagtcaataaaactgagttttgagagcttg

SEQ ID NO: 65937 - DNA, 1223 bp, Homo sapiens
atcctcaaagatctttgagcttaccacacgcaggaatcatggagaacgggcaggagcgggtggaagtggaggaggatgggcagctgaagtcagtcacaatcaatggtgtcccagatgacctggcactgggcttggagctgagccgtcgcgagcagcagccgtcagtcacttccaggtctgggggcactcaggtccagcagacccctgcctcatgccccttggacagcgacctctctgaggatgaggacctgcagctggccatggcctacagcctgtcagagatggaggcagctgggaagaaacccgcagatgtgttctgagctggatgccgggttccagaatcgctgcacagttccaacaggacagcgccttcccccatgcgctgggaggggaccctccatttctccccctcacccatgctgagtgtagagccggggcctgggtggcgggtgggggccgggtgggaggtggcagtagtcttagcctgtgcactctcttccttgggtgtttggtgctggctcctggggactacaaatcccagagtgcggtgtgcccggcctcatttctgatagatcccgcttgggggaggtggtgtatggttacggagctgtgcatcttgggacatgtagtagcccaggtcggcttgtcactcgctgtgagatggggagattttgtcttttgatttatccctgtagggctggcagggttgtagatgaagggggaatgatctgagccttggttcccctgacacgtcttgctagccccagggttagagtgggcagggcagagccgcgcagcacctgggagcggtacctttcccttgggcagcctggggtcccaggaacaagccagggcgagtggcatgtctgcctgagcagggtgtggccccagaaagctgaggagtgtgggctggcagagagcttcgagggcaaggccacccgcgggggcgtgtgtgtggtggggcttggcatgtgatggcagctccaggcatgccgctgcttgtatggctttctttggcctctgaccctgctgcccattctttccaacatcacagatgaactgcctctcctcctccctgcctggggagcccagtggccagggaggggagtggtggagccagtcgctgtaacactgagcctcagagacgaaccaaaaccagctgggctgagctcagatccagggggaaatgctggaagtcaataaaactgagttttgagagcttg

SEQ ID NO: 65938 - DNA, 1120 bp, Homo sapiens
ttatgggctatcgtcgatccaggcgctcgggagactgagccgtcgcgagcagcagccgtcagtcacttccaggtctgggggcactcaggtccagcagacccctgcctcatgccccttggacagcgacctctctgaggatgaggacctgcagctggccatggcctacagcctgtcagagatggaggcagctgggaagaaacccgcagatgtgttctgagctggatgccgggttccagaatcgctgcacagttccaacaggacagcgccttcccccatgcgctgggaggggaccctccatttctccccctcacccatgctgagtgtagagccggggcctgggtggcgggtgggggccgggtgggaggtggcagtagtcttagcctgtgcactctcttccttgggtgtttggtgctggctcctggggactacaaatcccagagtgcggtgtgcccggcctcatttctgatagatcccgcttgggggaggtggtgtatggttacggagctgtgcatcttgggacatgtagtagcccaggtcggcttgtcactcgctgtgagatggggagattttgtcttttgatttatccctgtagggctggcagggttgtagatgaagggggaatgatctgagccttggttcccctgacacgtcttgctagccccagggttagagtgggcagggcagagccgcgcagcacctgggagcggtacctttcccttgggcagcctggggtcccaggaacaagccagggcgagtggcatgtctgcctgagcagggtgtggccccagaaagctgaggagtgtgggctggcagagagcttcgagggcaaggccacccgcgggggcgtgtgtgtggtggggcttggcatgtgatggcagctccaggcatgccgctgcttgtatggctttctttggcctctgaccctgctgcccattctttccaacatcacagatgaactgcctctcctcctccctgcctggggagcccagtggccagggaggggagtggtggagccagtcgctgtaacactgagcctcagagacgaaccaaaaccagctgggctgagctcagatccagggggaaatgctggaagtcaataaaactgagttttgagagcttg

SEQ ID NO: 65939 - DNA, 1583 bp, Homo sapiens
tggtacggtccggaagttcgtttggatacggttcccggcggggggcaggggcggggcgccgcaggaggccgggactcctggcggaggaggtgcggccgggggcccgggtcaggctgggggccctggatcggactgctggagttggggggccccgatagggctcctgggcctgggcgtcgagatagctcttggccccggcctgcgggggcagataaggctgccggagggagcctagtcaccggccgcaagcagagcccgctgtgctccgcttccaactgggagcgccttccgccacccggggagggggactgctgcagccacagggtagggctgtgagatcttctggggaggctagccgggtggggcgggagcctctcagctgtccagattcagaactggagcccactcctcctccctctcgttgcctcagcctgccctcaccctcaggactaggcagaggtgaggctggctcaccctgaagaggtgggataggaccgggggaccccagagggaggcctaggaggggactgcacccatactgcttccctaccacaaatcagggctcagggagaggccatgcggccagcccaggtctgcatgctgagccccatcctccacagcttgccgctgacgctctctcctgtcaccccgcccctgctctctccccagatgtgttctgagctggatgccgggttccagaatcgctgcacagttccaacaggacagcgccttcccccatgcgctgggaggggaccctccatttctccccctcacccatgctgagtgtagagccggggcctgggtggcgggtgggggccgggtgggaggtggcagtagtcttagcctgtgcactctcttccttgggtgtttggtgctggctcctggggactacaaatcccagagtgcggtgtgcccggcctcatttctgatagatcccgcttgggggaggtggtgtatggttacggagctgtgcatcttgggacatgtagtagcccaggtcggcttgtcactcgctgtgagatggggagattttgtcttttgatttatccctgtagggctggcagggttgtagatgaagggggaatgatctgagccttggttcccctgacacgtcttgctagccccagggttagagtgggcagggcagagccgcgcagcacctgggagcggtacctttcccttgggcagcctggggtcccaggaacaagccagggcgagtggcatgtctgcctgagcagggtgtggccccagaaagctgaggagtgtgggctggcagagagcttcgagggcaaggccacccgcgggggcgtgtgtgtggtggggcttggcatgtgatggcagctccaggcatgccgctgcttgtatggctttctttggcctctgaccctgctgcccattctttccaacatcacagatgaactgcctctcctcctccctgcctggggagcccagtggccagggaggggagtggtggagccagtcgctgtaacactgagcctcagagacgaaccaaaaccagctgggctgagctcagatccagggggaaatgctggaagtcaataaaactgagttttgagagcttg

SEQ ID NO: 65940 - DNA, 2231 bp, Homo sapiens
ggagccggccttctccccgtctctagtagtttccgcaccgctgacgcatgcctgcgcgcacagctgggccgggcgcgtcctacgcagcagccgcgagccgggctgcgggtgccagacggttcccggcggggggcaggggcggggcgccgcaggaggccgggactcctggcggaggagccccaaggaggcccgcctgacgactgaccagttgccatggcatcctactacgagatcctagacgtgccgcgaagtgcgtccgctgatgacatcaagaaggcgtatcggcgcaaggctctccagtggcacccagacaaaaacccagataataaagagtttgctgagaagaaatttaaggaggtggccgaggcatatgaagtgctgtctgacaagcacaagcgggagatttacgaccgctatggccgggaagggctgacagggacaggaactggcccatctcgggcagaagctggcagtggtgggcctggcttcaccttcaccttccgcagccccgaggaggtcttccgggaattctttgggagtggagacccttttgcagagctctttgatgacctgggccccttctcagagcttcagaaccggggttcccgacactcaggccccttctttaccttctcttcctccttccctgggcactccgatttctcctcctcatctttctccttcagtcctggggctggtgcttttcgctctgtttctacatctaccacctttgtccaaggacgccgcatcaccacacgcagaatcatggagaacgggcaggagcgggtggaagtggaggaggatgggcagctgaagtcagtcacaatcaatggtgtcccagatgacctggcactgggcttggagctgagccgtcgcgagcagcagccgtcagtcacttccaggtctgggggcactcaggtccagcagacccctgcctcatgccccttggacagcgacctctctgaggatgaggacctgcagctggccatggcctacagcctgtcagagatggaggcagctgggaagaaacccgcaggtgggcgggaggcacagcaccgacggcaggggcggcccaaggcccagcaccaagatccaggcttgggggggacccaggagggtgcgaggggtgaagcaaccaaacgcagtccatccccagaggagaaggcctctcgctgcctcatcctctgaacaccgggcccaacctgatctgatccagatcttgactggggggtctgactcactgtgggaagagaagaggggagtatcctgagttgtaggaactgctttccaactccaagctccctccacaagtttccctcccaggccccccacaccccagtgtggacttgggatttgctgtgctcagcccagggctgataggtccctggtgaagcccagggtggggggtgtcagggcagtggaggggcccgaggagccaggttgcatttattggatggggagctccaaggggcattagtggtttgggctgggccttttgtgccctggtactctgccacctgtgttgctgatggtgtcaaggaaggaggacttggcctagggttgtctgagccggagccggcagctccactggagagcagtgcaggcagagtggagcctcctgctctcctggaccagctgcagacccccaaccctggtttctgtgccatgttgcgctctgaccgtctctgttgcttctcttctggtgttgcttctcctccctcccattctctctgcaactccctgcgggccgcatcgcttgctttcactgccgtctggctaggactcccttcttccttccttccccgagaaggcctcaatgtggcgaggaagatgctggggccggtagggctgtgagatcttctggggaggctagccgggtggggcgggagcctctcagctgtccagattcagaactggagcccactcctcctccctctcgttgcctcagcctgccctcaccctcaggactaggcagaggtgaggctggctcaccctgaagaggtgggataggaccgggggaccccagagggaggcctaggaggggactgcacccatactgcttccctaccacaaatcagggctcagggagaggccatgcggccagcccaggtctgcatgtgagctcagatccagggggaaatgctggaagtcaataaaactgagttttgagagcttgcaaaaaaagaaaaaagtcgaccgccccgaaaaatattattgtgctagtagtagta

SEQ ID NO: 65941 - DNA, 725 bp, Homo sapiens
atctcacagcgagtgacaagccgacctggactacaaatcccagagtgcggtgtgcccggcctcatttctgatagatcccgcttgggggaggtggtgtatggttacggagctgtgcatcttgggacatgtagtagcccaggtcggcttgtcactcgctgtgagatggggagattttgtcttttgatttatccctgtagggctggcagggttgtagatgaagggggaatgatctgagccttggttcccctgacacgtcttgctagccccagggttagagtgggcagggcagagccgcgcagcacctgggagcggtacctttcccttgggcagcctggggtcccaggaacaagccagggcgagtggcatgtctgcctgagcagggtgtggccccagaaagctgaggagtgtgggctggcagagagcttcgagggcaaggccacccgcgggggcgtgtgtgtggtggggcttggcatgtgatggcagctccaggcatgccgctgcttgtatggctttctttggcctctgaccctgctgcccattctttccaacatcacagatgaactgcctctcctcctccctgcctggggagcccagtggccagggaggggagtggtggagccagtcgctgtaacactgagcctcagagacgaaccaaaaccagctgggctgagctcagatccagggggaaatgctggaagtcaataaaactgagttttgagagcttg

SEQ ID NO: 65942 - DNA, 1205 bp, Homo sapiens
ggagccggccttctccccgtctctagtagtttccgcaccgctgacgcatgcctgcgcgcacagctgggccgggcgcgtcctacgcagcagccgcgagccgggctgcgggtgccagacggttcccggcggggggcaggggcggggcgccgcaggaggccgggactcctggcggaggagccccaaggaggcccgcctgacgactgaccagttgccatggcatcctactacgagatcctagacgtgccgcgaagtgcgtccgctgatgacatcaagaaggcgtatcggcgcaaggctctccagtggcacccagacaaaaacccagataataaagagtttgctgagaagaaatttaaggaggtggccgaggcatatgaagtgctgtctgacaagcacaagcgggagatttacgaccgctatggccgggaagggctgacagggacaggaactggcccatctcgggcagaagctggcagtggtgggcctggcttcaccttcaccttccgcagccccgaggaggtcttccgggaattctttgggagtggagacccttttgcagagctctttgatgacctgggccccttctcagagcttcagaaccggggttcccgacactcaggccccttctttaccttctcttcctccttccctgggcactccgatttctcctcctcatctttctccttcagtcctggggctggtgcttttcgctctgtttctacatctaccacctttgtccaaggacgccgcatcaccacacgcagaatcatggagaacgggcaggagcgggtggaagtggaggaggatgggcagctgaagtcagtcacaatcaatggtgtcccagatgacctggcactgggcttggagctgagccgtcgcgagcagcagccgtcagtcacttccaggtctgggggcactcaggtccagcagacccctgcctcatgccccttggacagcgacctctctgaggatgaggacctgcagctggccatggcctacagcctgtcagagatggaggcagctgggaagaaacccgcagatgaactgcctctcctcctccctgcctggggagcccagtggccagggaggggagtggtggagccagtcgctgtaacactgagcctcagagacgaaccaaaaccagctgggctgagctcagatccagggggaaatgctggaagtcaataaaactgagttttgagagcttg

SEQ ID NO: 65943 - DNA, 891 bp, Homo sapiens
ggagccggccttctccccgtctctagtagtttccgcaccgctgacgcatgcctgcgcgcacagctgggccgggcgcgtcctacgcagcagccgcgagccgggctgcgggtgccagacggttcccggcggggggcaggggcggggcgccgcaggaggccgggactcctggcggaggagccccaaggaggcccgcctgacgactgaccagttgccatggcatcctactacgagatcctagacgtgccgcgaagtgcgtccgctgatgacatcaagaaggcgtatcggcgcaaggctctccagtggcacccagacaaaaacccagataataaagagtttgctgagaagaaatttaaggaggtggccgaggcatatgaagtgctgtctgacaagcacaagcgggagatttacgaccgctatggccgggaagggctgacagggacaggaactggcccatctcgggcagaagctggcagtggtgggcctggcttcaccttcaccttccgcagccccgaggaggtcttccgggaattctttgggagtggagacccttttgcagagctctttgatgagaaaactgaggcacagttaatagcccagagtcacataacacatggcagagctggactcctagctgtgtctgcctgtcatcgcgtcatgatgatttgcctgtactgaaagagccatctgtcctccatccctcttccccctccttccttcctttattctttattgtggacagaattaaccagtgagtgttttcgaattcaacattaaaaaggaatttataaataagcccaactaaaaagcggaaaagaaaaaccctacccagttgcttagtggtttatacttccagacttgggctcacccatatacggaatcctctagagtcac

SEQ ID NO: 65944 - DNA, 837 bp, Homo sapiens
ggagccggccttctccccgtctctagtagtttccgcaccgctgacgcatgcctgcgcgcacagctgggccgggcgcgtcctacgcagcagccgcgagccgggctgcgggtgccagacggttcccggcggggggcaggggcggggcgccgcaggaggccgggactcctggcggaggagccccaaggaggcccgcctgacgactgaccagttgccatggcatcctactacgagatcctagacgtgccgcgaagtgcgtccgctgatgacatcaagaaggcgtatcggcgcaaggctctccagtggcacccagacaaaaacccagataataaagagtttgctgagaagaaatttaaggaggtggccgaggcatatgaagtgctgtctgacagtaagggccggggtcaggcaggacccagcacatcaccccctacttcatgccccagctcacattttcttaaagcaatgtctctgccacctagtttcctctgtgcctttttccagcctgacatttaagctcccccctcccacagggacagctcagtgtctgctccccagagtctggtaggagtggctggcatgagacctgaaaggggaaggaagcagggcaggtaactcatgtgagctgagcctcctgcgtgccaggcattggtgggtgtcatctccatgagttctcacagccgtcctatgaggcaggttctatcacccctattttacaggcaaggaaactgaggctgagagaggtgaagtaacttgctcaaggccacgcagagctggaatacgaatccaggtctgcctttttattgattcattcgaaaagtaattcagtgaatggtgaca

SEQ ID NO: 65945 - DNA, 164 bp, Homo sapiens
atgacctgggccccttctcagagcttcagaaccggggttcccgacactcaggccccttctttaccttctcttcctccttccctgggcactccggtaagttctgccccttcccacgtttgcaagctccgattcctggaacccctggcttgagcttgttgcttttc

SEQ ID NO: 65946 - DNA, 3028 bp, Homo sapiens
ggagccggccttctccccgtctctagtagtttccgcaccgctgacgcatgcctgcgcgcacagctgggccgggcgcgtcctacgcagcagccgcgagccgggctgcgggtgccagacggttcccggcggggggcaggggcggggcgccgcaggaggccgggactcctggcggaggagccccaaggaggcccgcctgacgactgaccagttgccatggcatcctactacgagatcctagacgtgccgcgaagtgcgtccgctgatgacatcaagaaggcgtatcggcgcaaggctctccagtggcacccagacaaaaacccagataataaagagtttgctgagaagaaatttaaggaggtggccgaggcatatgaagtgctgtctgacaagcacaagcgggagatttacgaccgctatggccgggaagggctgacagggacaggaactggcccatctcgggcagaagctggcagtggtgggcctggcttcaccttcaccttccgcagccccgaggaggtcttccgggaattctttgggagtggagacccttttgcagagctctttgatgacctgggccccttctcagagcttcagaaccggggttcccgacactcaggccccttctttaccttctcttcctccttccctgggcactccgatttctcctcctcatctttctccttcagtcctggggctggtgcttttcgctctgtttctacatctaccacctttgtccaaggacgccgcatcaccacacgcagaatcatggagaacgggcaggagcgggtggaagtggaggaggatgggcagctgaagtcagtcacaatcaatggtgtcccagatgacctggcactgggcttggagctgagccgtcgcgagcagcagccgtcagtcacttccaggtctgggggcactcaggtccagcagacccctgcctcatgccccttggacagcgacctctctgaggatgaggacctgcagctggccatggcctacagcctgtcagagatggaggcagctgggaagaaacccgcaggtgggcgggaggcacagcaccgacggcaggggcggcccaaggcccagcaccaagatccaggcttgggggggacccaggagggtgcgaggggtgaagcaaccaaacgcagtccatccccagaggagaaggcctctcgctgcctcatcctctgaacaccgggcccaacctgatctgatccagatcttgactggggggtctgactcactgtgggaagagaagaggggagtatcctgagttgtaggaactgctttccaactccaagctccctccacaagtttccctcccaggccccccacaccccagtgtggacttgggatttgctgtgctcagcccagggctgataggtccctggtgaagcccagggtggggggtgtcagggcagtggaggggcccgaggagccaggttgcatttattggatggggagctccaaggggcattagtggtttgggctgggccttttgtgccctggtactctgccacctgtgttgctgatggtgtcaaggaaggaggacttggcctagggttgtctgagccggagccggcagctccactggagagcagtgcaggcagagtggagcctcctgctctcctggaccagctgcagacccccaaccctggtttctgtgccatgttgcgctctgaccgtctctgttgcttctcttctggtgttgcttctcctccctcccattctctctgcaactccctgcgggccgcatcgcttgctttcactgccgtctggctaggactcccttcttccttccttccccgagaaggcctcaatgtggcgaggaagatgctggggccggtagggctgtgagatcttctggggaggctagccgggtggggcgggagcctctcagctgtccagattcagaactggagcccactcctcctccctctcgttgcctcagcctgccctcaccctcaggactaggcagaggtgaggctggctcaccctgaagaggtgggataggaccgggggaccccagagggaggcctaggaggggactgcacccatactgcttccctaccacaaatcagggctcagggagaggccatgcggccagcccaggtctgcatgctgagccccatcctccacagcttgccgctgacgctctctcctgtcaccccgcccctgctctctccccagatgtgttctgagctggatgccgggttccagaatcgctgcacagttccaacaggacagcgccttcccccatgcgctgggaggggaccctccatttctccccctcacccatgctgagtgtagagccggggcctgggtggcgggtgggggccgggtgggaggtggcagtagtcttagcctgtgcactctcttccttgggtgtttggtgctggctcctggggactacaaatcccagagtgcggtgtgcccggcctcatttctgatagatcccgcttgggggaggtggtgtatggttacggagctgtgcatcttgggacatgtagtagcccaggtcggcttgtcactcgctgtgagatggggagattttgtcttttgatttatcccccagggttagagtgggcagggcagagccgcgcagcacctgggagcggtacctttcccttgggcagcctggggtcccaggaacaagccagggcgagtggcatgtctgcctgagcagggtgtggccccagaaagctgaggagtgtgggctggcagagagcttcgagggcaaggccacccgcgggggcgtgtgtgtggtggggcttggcatgtgatggcagctccaggcatgccgctgcttgtatggctttctttggcctctgaccctgctgcccattctttccaacatcacagatgaactgcctctcctcctccctgcctggggagcccagtggccagggaggggagtggtggagccagtcgctgtaacactgagcctcagagacgaaccaaaaccagctgggctgagctcagatccagggggaaatgctggaagtcaataaaactgagttttgagagcttg

SEQ ID NO: 65947 - DNA, 3073 bp, Homo sapiens
ggagccggccttctccccgtctctagtagtttccgcaccgctgacgcatgcctgcgcgcacagctgggccgggcgcgtcctacgcagcagccgcgagccgggctgcgggtgccagacggttcccggcggggggcaggggcggggcgccgcaggaggccgggactcctggcggaggagccccaaggaggcccgcctgacgactgaccagttgccatggcatcctactacgagatcctagacgtgccgcgaagtgcgtccgctgatgacatcaagaaggcgtatcggcgcaaggctctccagtggcacccagacaaaaacccagataataaagagtttgctgagaagaaatttaaggaggtggccgaggcatatgaagtgctgtctgacaagcacaagcgggagatttacgaccgctatggccgggaagggctgacagggacaggaactggcccatctcgggcagaagctggcagtggtgggcctggcttcaccttcaccttccgcagccccgaggaggtcttccgggaattctttgggagtggagacccttttgcagagctctttgatgacctgggccccttctcagagcttcagaaccggggttcccgacactcaggccccttctttaccttctcttcctccttccctgggcactccgatttctcctcctcatctttctccttcagtcctggggctggtgcttttcgctctgtttctacatctaccacctttgtccaaggacgccgcatcaccacacgcagaatcatggagaacgggcaggagcgggtggaagtggaggaggatgggcagctgaagtcagtcacaatcaatggtgtcccagatgacctggcactgggcttggagctgagccgtcgcgagcagcagccgtcagtcacttccaggtctgggggcactcaggtccagcagacccctgcctcatgccccttggacagcgacctctctgaggatgaggacctgcagctggccatggcctacagcctgtcagagatggaggcagctgggaagaaacccgcaggtgggcgggaggcacagcaccgacggcaggggcggcccaaggcccagcaccaagatccaggcttgggggggacccaggagggtgcgaggggtgaagcaaccaaacgcagtccatccccagaggagaaggcctctcgctgcctcatcctctgaacaccgggcccaacctgatctgatccagatcttgactggggggtctgactcactgtgggaagagaagaggggagtatcctgagttgtaggaactgctttccaactccaagctccctccacaagtttccctcccaggccccccacaccccagtgtggacttgggatttgctgtgctcagcccagggctgataggtccctggtgaagcccagggtggggggtgtcagggcagtggaggggcccgaggagccaggttgcatttattggatggggagctccaaggggcattagtggtttgggctgggccttttgtgccctggtactctgccacctgtgttgctgatggtgtcaaggaaggaggacttggcctagggttgtctgagccggagccggcagctccactggagagcagtgcaggcagagtggagcctcctgctctcctggaccagctgcagacccccaaccctggtttctgtgccatgttgcgctctgaccgtctctgttgcttctcttctggtgttgcttctcctccctcccattctctctgcaactccctgcgggccgcatcgcttgctttcactgccgtctggctaggactcccttcttccttccttccccgagaaggcctcaatgtggcgaggaagatgctggggccggtagggctgtgagatcttctggggaggctagccgggtggggcgggagcctctcagctgtccagattcagaactggagcccactcctcctccctctcgttgcctcagcctgccctcaccctcaggactaggcagaggtgaggctggctcaccctgaagaggtgggataggaggggactgcacccatactgcttccctaccacaaatcagggctcagggagaggccatgcggccagcccaggtctgcatgctgagccccatcctccacagcttgccgctgacgctctctcctgtcaccccgcccctgctctctccccagatgtgttctgagctggatgccgggttccagaatcgctgcacagttccaacaggacagcgccttcccccatgcgctgggaggggaccctccatttctccccctcacccatgctgagtgtagagccggggcctgggtggcgggtgggggccgggtgggaggtggcagtagtcttagcctgtgcactctcttccttgggtgtttggtgctggctcctggggactacaaatcccagagtgcggtgtgcccggcctcatttctgatagatcccgcttgggggaggtggtgtatggttacggagctgtgcatcttgggacatgtagtagcccaggtcggcttgtcactcgctgtgagatggggagattttgtcttttgatttatccctgtagggctggcagggttgtagatgaagggggaatgatctgagccttggttcccctgacacgtcttgctagccccagggttagagtgggcagggcagagccgcgcagcacctgggagcggtacctttcccttgggcagcctggggtcccaggaacaagccagggcgagtggcatgtctgcctgagcagggtgtggccccagaaagctgaggagtgtgggctggcagagagcttcgagggcaaggccacccgcgggggcgtgtgtgtggtggggcttggcatgtgatggcagctccaggcatgccgctgcttgtatggctttctttggcctctgaccctgctgcccattctttccaacatcacagatgaactgcctctcctcctccctgcctggggagcccagtggccagggaggggagtggtggagccagtcgctgtaacactgagcctcagagacgaaccaaaaccagctgggctgagctcagatccagggggaaatgctggaagtcaataaaactgagttttgagagcttg

SEQ ID NO: 65948 - DNA, 3011 bp, Homo sapiens
ggagccggccttctccccgtctctagtagtttccgcaccgctgacgcatgcctgcgcgcacagctgggccgggcgcgtcctacgcagcagccgcgagccgggctgcgggtgccagccccaaggaggcccgcctgacgactgaccagttgccatggcatcctactacgagatcctagacgtgccgcgaagtgcgtccgctgatgacatcaagaaggcgtatcggcgcaaggctctccagtggcacccagacaaaaacccagataataaagagtttgctgagaagaaatttaaggaggtggccgaggcatatgaagtgctgtctgacaagcacaagcgggagatttacgaccgctatggccgggaagggctgacagggacaggaactggcccatctcgggcagaagctggcagtggtgggcctggcttcaccttcaccttccgcagccccgaggaggtcttccgggaattctttgggagtggagacccttttgcagagctctttgatgacctgggccccttctcagagcttcagaaccggggttcccgacactcaggccccttctttaccttctcttcctccttccctgggcactccgatttctcctcctcatctttctccttcagtcctggggctggtgcttttcgctctgtttctacatctaccacctttgtccaaggacgccgcatcaccacacgcagaatcatggagaacgggcaggagcgggtggaagtggaggaggatgggcagctgaagtcagtcacaatcaatggtgtcccagatgacctggcactgggcttggagctgagccgtcgcgagcagcagccgtcagtcacttccaggtctgggggcactcaggtccagcagacccctgcctcatgccccttggacagcgacctctctgaggatgaggacctgcagctggccatggcctacagcctgtcagagatggaggcagctgggaagaaacccgcaggtgggcgggaggcacagcaccgacggcaggggcggcccaaggcccagcaccaagatccaggcttgggggggacccaggagggtgcgaggggtgaagcaaccaaacgcagtccatccccagaggagaaggcctctcgctgcctcatcctctgaacaccgggcccaacctgatctgatccagatcttgactggggggtctgactcactgtgggaagagaagaggggagtatcctgagttgtaggaactgctttccaactccaagctccctccacaagtttccctcccaggccccccacaccccagtgtggacttgggatttgctgtgctcagcccagggctgataggtccctggtgaagcccagggtggggggtgtcagggcagtggaggggcccgaggagccaggttgcatttattggatggggagctccaaggggcattagtggtttgggctgggccttttgtgccctggtactctgccacctgtgttgctgatggtgtcaaggaaggaggacttggcctagggttgtctgagccggagccggcagctccactggagagcagtgcaggcagagtggagcctcctgctctcctggaccagctgcagacccccaaccctggtttctgtgccatgttgcgctctgaccgtctctgttgcttctcttctggtgttgcttctcctccctcccattctctctgcaactccctgcgggccgcatcgcttgctttcactgccgtctggctaggactcccttcttccttccttccccgagaaggcctcaatgtggcgaggaagatgctggggccggtagggctgtgagatcttctggggaggctagccgggtggggcgggagcctctcagctgtccagattcagaactggagcccactcctcctccctctcgttgcctcagcctgccctcaccctcaggactaggcagaggtgaggctggctcaccctgaagaggtgggataggaggggactgcacccatactgcttccctaccacaaatcagggctcagggagaggccatgcggccagcccaggtctgcatgctgagccccatcctccacagcttgccgctgacgctctctcctgtcaccccgcccctgctctctccccagatgtgttctgagctggatgccgggttccagaatcgctgcacagttccaacaggacagcgccttcccccatgcgctgggaggggaccctccatttctccccctcacccatgctgagtgtagagccggggcctgggtggcgggtgggggccgggtgggaggtggcagtagtcttagcctgtgcactctcttccttgggtgtttggtgctggctcctggggactacaaatcccagagtgcggtgtgcccggcctcatttctgatagatcccgcttgggggaggtggtgtatggttacggagctgtgcatcttgggacatgtagtagcccaggtcggcttgtcactcgctgtgagatggggagattttgtcttttgatttatccctgtagggctggcagggttgtagatgaagggggaatgatctgagccttggttcccctgacacgtcttgctagccccagggttagagtgggcagggcagagccgcgcagcacctgggagcggtacctttcccttgggcagcctggggtcccaggaacaagccagggcgagtggcatgtctgcctgagcagggtgtggccccagaaagctgaggagtgtgggctggcagagagcttcgagggcaaggccacccgcgggggcgtgtgtgtggtggggcttggcatgtgatggcagctccaggcatgccgctgcttgtatggctttctttggcctctgaccctgctgcccattctttccaacatcacagatgaactgcctctcctcctccctgcctggggagcccagtggccagggaggggagtggtggagccagtcgctgtaacactgagcctcagagacgaaccaaaaccagctgggctgagctcagatccagggggaaatgctggaagtcaataaaactgagttttgagagcttg

SEQ ID NO: 65949 - DNA, 1939 bp, Homo sapiens
tggtacggtccggaagttcgtttggatacggttcccggcggggggcaggggcggggcgccgcaggaggccgggactcctggcggaggagccccaaggaggcccgcctgacgactgaccagttgccatggcatcctactacgagatcctagacgtgccgcgaagtgcgtccgctgatgacatcaagaaggcgtaagtgcctccgtatgcaacagaagacctctcaccctccacccgccaccaccatggggcacttcagagtgacacctgtatcggcgcaaggctctccagtggcacccagacaaaaacccagataataaagagtttgctgagaagaaatttaaggaggtggccgaggcatatgaagtgctgtctgacaagcacaagcgggagatttacgaccgctatggccgggaagggctgacagggacaggaactggcccatctcgggcagaagctggcagtggtgggcctggcttcaccttcaccttccgcagccccgaggaggtcttccgggaattctttgggagtggagacccttttgcagagctctttgatgacctgggccccttctcagagcttcagaaccggggttcccgacactcaggccccttctttaccttctcttcctccttccctgggcactccgatttctcctcctcatctttctccttcagtcctggggctggtgcttttcgctctgtttctacatctaccacctttgtccaaggacgccgcatcaccacacgcagaatcatggagaacgggcaggagcgggtggaagtggaggaggatgggcagctgaagtcagtcacaatcaatggtgtcccagatgacctggcactgggcttggagctgagccgtcgcgagcagcagccgtcagtcacttccaggtctgggggcactcaggtccagcagacccctgcctcatgccccttggacagcgacctctctgaggatgaggacctgcagctggccatggcctacagcctgtcagagatggaggcagctgggaagaaacccgcagatgtgttctgagctggatgccgggttccagaatcgctgcacagttccaacaggacagcgccttcccccatgcgctgggaggggaccctccatttctccccctcacccatgctgagtgtagagccggggcctgggtggcgggtgggggccgggtgggaggtggcagtagtcttagcctgtgcactctcttccttgggtgtttggtgctggctcctggggactacaaatcccagagtgcggtgtgcccggcctcatttctgatagatcccgcttgggggaggtggtgtatggttacggagctgtgcatcttgggacatgtagtagcccaggtcggcttgtcactcgctgtgagatggggagattttgtcttttgatttatccctgtagggctggcagggttgtagatgaagggggaatgatctgagccttggttcccctgacacgtcttgctagccccagggttagagtgggcagggcagagccgcgcagcacctgggagcggtacctttcccttgggcagcctggggtcccaggaacaagccagggcgagtggcatgtctgcctgagcagggtgtggccccagaaagctgaggagtgtgggctggcagagagcttcgagggcaaggccacccgcgggggcgtgtgtgtggtggggcttggcatgtgatggcagctccaggcatgccgctgcttgtatggctttctttggcctctgaccctgctgcccattctttccaacatcacagatgaactgcctctcctcctccctgcctggggagcccagtggccagggaggggagtggtggagccagtcgctgtaacactgagcctcagagacgaaccaaaaccagctgggctgagctcagatccagggggaaatgctggaagtcaataaaactgagttttgagagcttg

SEQ ID NO: 65950 - DNA, 1896 bp, Homo sapiens
ggagccggccttctccccgtctctagtagtttccgcaccgctgacgcatgcctgcgcgcacagctgggccgggcgcgtcctacgcagcagccgcgagccgggctgcgggtgccagacggttcccggcggggggcaggggcggggcgccgcaggaggccgggactcctggcggaggagccccaaggaggcccgcctgacgactgaccagttgccatggcatcctactacgagatcctagacgtgccgcgaagtgcgtccgctgatgacatcaagaaggcgtatcggcgcaaggctctccagtggcacccagacaaaaacccagataataaagagtttgctgagaagaaatttaaggaggtggccgaggcatatgaagtgctgtctgacagaactggcccatctcgggcagaagctggcagtggtgggcctggcttcaccttcaccttccgcagccccgaggaggtcttccgggaattctttgggagtggagacccttttgcagagctctttgatgacctgggccccttctcagagcttcagaaccggggttcccgacactcaggccccttctttaccttctcttcctccttccctgggcactccgatttctcctcctcatctttctccttcagtcctggggctggtgcttttcgctctgtttctacatctaccacctttgtccaaggacgccgcatcaccacacgcagaatcatggagaacgggcaggagcgggtggaagtggaggaggatgggcagctgaagtcagtcacaatcaatggtgtcccagatgacctggcactgggcttggagctgagccgtcgcgagcagcagccgtcagtcacttccaggtctgggggcactcaggtccagcagacccctgcctcatgccccttggacagcgacctctctgaggatgaggacctgcagctggccatggcctacagcctgtcagagatggaggcagctgggaagaaacccgcagatgtgttctgagctggatgccgggttccagaatcgctgcacagttccaacaggacagcgccttcccccatgcgctgggaggggaccctccatttctccccctcacccatgctgagtgtagagccggggcctgggtggcgggtgggggccgggtgggaggtggcagtagtcttagcctgtgcactctcttccttgggtgtttggtgctggctcctggggactacaaatcccagagtgcggtgtgcccggcctcatttctgatagatcccgcttgggggaggtggtgtatggttacggagctgtgcatcttgggacatgtagtagcccaggtcggcttgtcactcgctgtgagatggggagattttgtcttttgatttatccctgtagggctggcagggttgtagatgaagggggaatgatctgagccttggttcccctgacacgtcttgctagccccagggttagagtgggcagggcagagccgcgcagcacctgggagcggtacctttcccttgggcagcctggggtcccaggaacaagccagggcgagtggcatgtctgcctgagcagggtgtggccccagaaagctgaggagtgtgggctggcagagagcttcgagggcaaggccacccgcgggggcgtgtgtgtggtggggcttggcatgtgatggcagctccaggcatgccgctgcttgtatggctttctttggcctctgaccctgctgcccattctttccaacatcacagatgaactgcctctcctcctccctgcctggggagcccagtggccagggaggggagtggtggagccagtcgctgtaacactgagcctcagagacgaaccaaaaccagctgggctgagctcagatccagggggaaatgctggaagtcaataaaactgagttttgagagcttg

SEQ ID NO: 65951 - DNA, 3284 bp, Homo sapiens
ggagccggccttctccccgtctctagtagtttccgcaccgctgacgcatgcctgcgcgcacagctgggccgggcgcgtcctacgcagcagccgcgagccgggctgcgggtgccagacggttcccggcggggggcaggggcggggcgccgcaggaggccgggactcctggcggaggagccccaaggaggcccgcctgacgactgaccagttgccatggcatcctactacgagatcctagacgtgccgcgaagtgcgtccgctgatgacatcaagaaggcgtatcggcgcaaggctctccagtggcacccagacaaaaacccagataataaagagtttgctgagaagaaatttaaggaggtggccgaggcatatgaagtgctgtctgacaagcacaagcgggagatttacgaccgctatggccgggaagggctgacagggacaggaactggcccatctcgggcagaagctggcagtggtgggcctggcttcaccttcaccttccgcagccccgaggaggtcttccgggaattctttgggagtggagacccttttgcagagctctttgatgacctgggccccttctcagagcttcagaaccggggttcccgacactcaggccccttctttaccttctcttcctccttccctgggcactccgatttctcctcctcatctttctccttcagtcctggggctggtgcttttcgctctgtttctacatctaccacctttgtccaaggacgccgcatcaccacacgcaggtgagagctccttctggggccatagaggggtgagaggtctgctggggagctgtgttcaaatagaaagttggctccttgagggcagggcccagtctgcgctctctactgcggtggccagaactgggaccagcgcctgcaggattctgtcactgctcgttgcctgaactgtgctgtctcccacagaatcatggagaacgggcaggagcgggtggaagtggaggaggatgggcagctgaagtcagtcacaatcaatggtgtcccagatgacctggcactgggcttggagctgagccgtcgcgagcagcagccgtcagtcacttccaggtctgggggcactcaggtccagcagacccctgcctcatgccccttggacagcgacctctctgaggatgaggacctgcagctggccatggcctacagcctgtcagagatggaggcagctgggaagaaacccgcaggtgggcgggaggcacagcaccgacggcaggggcggcccaaggcccagcaccaagatccaggcttgggggggacccaggagggtgcgaggggtgaagcaaccaaacgcagtccatccccagaggagaaggcctctcgctgcctcatcctctgaacaccgggcccaacctgatctgatccagatcttgactggggggtctgactcactgtgggaagagaagaggggagtatcctgagttgtaggaactgctttccaactccaagctccctccacaagtttccctcccaggccccccacaccccagtgtggacttgggatttgctgtgctcagcccagggctgataggtccctggtgaagcccagggtggggggtgtcagggcagtggaggggcccgaggagccaggttgcatttattggatggggagctccaaggggcattagtggtttgggctgggccttttgtgccctggtactctgccacctgtgttgctgatggtgtcaaggaaggaggacttggcctagggttgtctgagccggagccggcagctccactggagagcagtgcaggcagagtggagcctcctgctctcctggaccagctgcagacccccaaccctggtttctgtgccatgttgcgctctgaccgtctctgttgcttctcttctggtgttgcttctcctccctcccattctctctgcaactccctgcgggccgcatcgcttgctttcactgccgtctggctaggactcccttcttccttccttccccgagaaggcctcaatgtggcgaggaagatgctggggccggtagggctgtgagatcttctggggaggctagccgggtggggcgggagcctctcagctgtccagattcagaactggagcccactcctcctccctctcgttgcctcagcctgccctcaccctcaggactaggcagaggtgaggctggctcaccctgaagaggtgggataggaccgggggaccccagagggaggcctaggaggggactgcacccatactgcttccctaccacaaatcagggctcagggagaggccatgcggccagcccaggtctgcatgctgagccccatcctccacagcttgccgctgacgctctctcctgtcaccccgcccctgctctctccccagatgtgttctgagctggatgccgggttccagaatcgctgcacagttccaacaggacagcgccttcccccatgcgctgggaggggaccctccatttctccccctcacccatgctgagtgtagagccggggcctgggtggcgggtgggggccgggtgggaggtggcagtagtcttagcctgtgcactctcttccttgggtgtttggtgctggctcctggggactacaaatcccagagtgcggtgtgcccggcctcatttctgatagatcccgcttgggggaggtggtgtatggttacggagctgtgcatcttgggacatgtagtagcccaggtcggcttgtcactcgctgtgagatggggagattttgtcttttgatttatccctgtagggctggcagggttgtagatgaagggggaatgatctgagccttggttcccctgacacgtcttgctagccccagggttagagtgggcagggcagagccgcgcagcacctgggagcggtacctttcccttgggcagcctggggtcccaggaacaagccagggcgagtggcatgtctgcctgagcagggtgtggccccagaaagctgaggagtgtgggctggcagagagcttcgagggcaaggccacccgcgggggcgtgtgtgtggtggggcttggcatgtgatggcagctccaggcatgccgctgcttgtatggctttctttggcctctgaccctgctgcccattctttccaacatcacagatgaactgcctctcctcctccctgcctggggagcccagtggccagggaggggagtggtggagccagtcgctgtaacactgagcctcagagacgaaccaaaaccagctgggctgagctcagatccagggggaaatgctggaagtcaataaaactgagttttgagagcttg

SEQ ID NO: 65952 - DNA, 2453 bp, Homo sapiens
aaggatctcaggtgctcatcccacctggcttacaggactatagcctgggtggacatgaatccacgtcacactgggtgtgcggggctggaggaaacttgtgagggagcttggagttgaaagcagttctacaactcaggatactccctcttctcttccacagtgagtcatgaccccccagtcaatggtgtcccagatgacctggcactgggcttggagctgagccgtcgcgagcagcagccgtcagtcacttccaggtctgggggcactcaggtccagcagacccctgcctcatgccccttggacagcgacctctctgaggatgaggacctgcagctggccatggcctacagcctgtcagagatggaggcagctgggaagaaacccgcaggtgggcgggaggcacagcaccgacggcaggggcggcccaaggcccagcaccaagatccaggcttgggggggacccaggagggtgcgaggggtgaagcaaccaaacgcagtccatccccagaggagaaggcctctcgctgcctcatcctctgaacaccgggcccaacctgatctgatccagatcttgactggggggtctgactcactgtgggaagagaagaggggagtatcctgagttgtaggaactgctttccaactccaagctccctccacaagtttccctcccaggccccccacaccccagtgtggacttgggatttgctgtgctcagcccagggctgataggtccctggtgaagcccagggtggggggtgtcagggcagtggaggggcccgaggagccaggttgcatttattggatggggagctccaaggggcattagtggtttgggctgggccttttgtgccctggtactctgccacctgtgttgctgatggtgtcaaggaaggaggacttggcctagggttgtctgagccggagccggcagctccactggagagcagtgcaggcagagtggagcctcctgctctcctggaccagctgcagacccccaaccctggtttctgtgccatgttgcgctctgaccgtctctgttgcttctcttctggtgttgcttctcctccctcccattctctctgcaactccctgcgggccgcatcgcttgctttcactgccgtctggctaggactcccttcttccttccttccccgagaaggcctcaatgtggcgaggaagatgctggggccggtagggctgtgagatcttctggggaggctagccgggtggggcgggagcctctcagctgtccagattcagaactggagcccactcctcctccctctcgttgcctcagcctgccctcaccctcaggactaggcagaggtgaggctggctcaccctgaagaggtgggataggaccgggggaccccagagggaggcctaggaggggactgcacccatactgcttccctaccacaaatcagggctcagggagaggccatgcggccagcccaggtctgcatgctgagccccatcctccacagcttgccgctgacgctctctcctgtcaccccgcccctgctctctccccagatgtgttctgagctggatgccgggttccagaatcgctgcacagttccaacaggacagcgccttcccccatgcgctgggaggggaccctccatttctccccctcacccatgctgagtgtagagccggggcctgggtggcgggtgggggccgggtgggaggtggcagtagtcttagcctgtgcactctcttccttgggtgtttggtgctggctcctggggactacaaatcccagagtgcggtgtgcccggcctcatttctgatagatcccgcttgggggaggtggtgtatggttacggagctgtgcatcttgggacatgtagtagcccaggtcggcttgtcactcgctgtgagatggggagattttgtcttttgatttatccctgtagggctggcagggttgtagatgaagggggaatgatctgagccttggttcccctgacacgtcttgctagccccagggttagagtgggcagggcagagccgcgcagcacctgggagcggtacctttcccttgggcagcctggggtcccaggaacaagccagggcgagtggcatgtctgcctgagcagggtgtggccccagaaagctgaggagtgtgggctggcagagagcttcgagggcaaggccacccgcgggggcgtgtgtgtggtggggcttggcatgtgatggcagctccaggcatgccgctgcttgtatggctttctttggcctctgaccctgctgcccattctttccaacatcacagatgaactgcctctcctcctccctgcctggggagcccagtggccagggaggggagtggtggagccagtcgctgtaacactgagcctcagagacgaaccaaaaccagctgggctgagctcagatccagggggaaatgctggaagtcaataaaactgagttttgagagcttg

SEQ ID NO: 65953 - DNA, 1463 bp, Homo sapiens
ggagccggccttctccccgtctctagtagtttccgcaccgctgacgcatgcctgcgcgcacagctgggccgggcgcgtcctacgcagcagccgcgagccgggctgcgggtgccagacggttcccggcggggggcaggggcggggcgccgcaggaggccgggactcctggcggaggagccccaaggaggcccgcctgacgactgaccagttgccatggcatcctactacgagatcctagacgtgccgcgaagtgcgtccgctgatgacatcaagaaggcgtatcggcgcaaggctctccagtggcacccagacaaaaacccagataataaagagtttgctgagaagaaatttaaggaggtggccgaggcatatgaagtgctgtctgacaagcacaagcgggagatttacgaccgctatggccgggaagggctgacagggacaggaactggcccatctcgggcagaagctggcagtggtgggcctggcttcaccttcaccttccgcagccccgaggaggtcttccgggaattctttgggagtggagacccttttgcagagctctttgatgacctgggccccttctcagagcttcagaaccggggttcccgacactcaggccccttctttaccttctcttcctccttccctgggcactccgatttctcctcctcatctttctccttcagtcctggggctggtgcttttcgctctgtttctacatctaccacctttgtccaaggacgccgcatcaccacacgcagaatcatggagaacgggcaggagcgggtggaagtggaggaggatgggcagctgaagtcagtcacaatcaatggtgtcccagatgacctggcactgggcttggagctgagccgtcgcgagcagcagccgtcagtcacttccaggtctgggggcactcaggtccagcagacccctgcctcatgccccttggacagcgacctctctgaggatgaggacctgcagctggccatggcctacagcctgtcagagatggaggcagctgggaagaaacccgcagatgtgttctgagctggatgccgggttccagaatcgctgcacagttccaacaggacagcgccttcccccatgcgctgggaggggaccctccatttctccccctcacccatgctgagtgtagagccggggcctgggtggcgggtgggggccgggtgggaggtggcagtagtcttagcctgtgcactctcttccttgggtgtttggtgctggctcctggggactacaaatcccagagtgcggtgtgcccggcctcatttctgatagatcccgcttgggggaggtggtgtatggttacggagctgtgcatcttgggacatgtagtagcccaggtcggcttgtcactcgctgtgagatggggagattttgtcttttgatttatcctggagatgtagggtcttggtgagcagcacaaccaggagggccgacct

SEQ ID NO: 65954 - DNA, 1086 bp, Homo sapiens
  misc_feature (926)..(926): n is a, c, g, or t
aggccagacagcctgtgacagagaaactaggcggtccgctcctgggacgcggtctcgggggcgggttcgcccctgaggcccggtgacccttcgcccgcaaccagggctagcgcttgtgtgcgcccacggaagcacccgagcgaccggagaaagaaaaagtggtcaaggggacctccttccagctctacgcgcctctcattcagagagaatctgttaaatcaaaatatcaagacctactggcagttgaacatcaaggggtgaaactgcttgaaaacagacatcaacagcaaagtacctttaaaccagaagaaattctttacaagactttgggtttcagtgttgcccaagcaactagctcattgatttctgctggaaaaggtgtcttcgttactaaaggattggtaccaaaaggcgcagtcgtatctatgtatcctggtacagtatatcagaagtatgagccgatctttttccagtccattggaaatccgtttatttttagatgcctggatggggtactcattgatgggaatgacaaagggatatcaaaagttgtgtacagatcttgcaatgggagggatcgactcggccctttaaaaatgagtgatagtacatggctaacgtcagaaattcataaccctctggctgtgggacagtatgtcaacaattgttccaatgacagagcagctaatgtctgttatcaggaatttgatgtgcctgcagttttccctatagaactgaagcagtatcttccaaacattgcctacagctatgacaaacaaagcccacttcgatgtgttgttcttgtcgcacttagggacatcaatcaaggagaagagcttttttcaaactactacacaattgtcagctaactctgtgaatcagaaattattaggttttctactcagctattaattctaagtgttttngttaatcacttctctgagttctacctgtaaaacaaatattttgagacttaatgggaactacggaatttcttatgtctagtcgactattatatttatggttccaatttcatgattaaagctactgcctccattacaatttcaaatctggtatgccaattcc

SEQ ID NO: 65955 - DNA, 440 bp, Homo sapiens
gtcgcctgttcttccctgttgcgttcggcactgactggggagcttgtatctgggcaaaaatggaaactttttaaaaagactgcccttaccgcgtgagagtgcgtggctttttctccaccaggggttaattaggtgcttgaacttcctcagaaaagccaagccagggtttattttcatagttcatacaagtacttcacgtggttaaagaagcccatcccggctgtgagaatagcgtgcagtagctcgcgcgttaagaacgggcagaacgccactcaaaagcacgtcgggatggtgggtttcggattggggaccctccgatatgttccagaggaatccaaagacaaagttatctcagatgaagatgtcctaggaacattactgaaagttttccaggctctattcttaaatgatttcaataaacaatcagaaatcttgaaaat

SEQ ID NO: 65956 - DNA, 959 bp, Homo sapiens
  misc_feature (799)..(799): n is a, c, g, or t
gtcgcctgttcttccctgttgcgttcggcactgactggggagcttgtatctgggcaaaaatggaaactttttaaaaagactgcccttaccgcgtgagagtgcgtggctttttctccaccaggggttaattaggtgcttgaacttcctcagaaaagccaagccagggtttattttcatagttcatacaagtacttcacgtggttaaagaagcccatcccggctgtgagaatagcgtgcagtagctcgcgcgttaagaacgggcagaacgccactcaaaagcacgtcgggatggtgggtttcggattggggtacagtatatcagaagtatgagccgatctttttccagtccattggaaatccgtttatttttagatgcctggatggggtactcattgatgggaatgacaaagggatatcaaaagttgtgtacagatcttgcaatgggagggatcgactcggccctttaaaaatgagtgatagtacatggctaacgtcagaaattcataaccctctggctgtgggacagtatgtcaacaattgttccaatgacagagcagctaatgtctgttatcaggaatttgatgtgcctgcagttttccctatagaactgaagcagtatcttccaaacattgcctacagctatgacaaacaaagcccacttcgatgtgttgttcttgtcgcacttagggacatcaatcaaggagaagagcttttttcaaactactacacaattgtcagctaactctgtgaatcagaaattattaggttttctactcagctattaattctaagtgttttngttaatcacttctctgagttctacctgtaaaacaaatattttgagacttaatgggaactacggaatttcttatgtctagtcgactattatatttatggttccaatttcatgattaaagctactgcctccattacaatttcaaatctggtatgccaattcc

SEQ ID NO: 65957 - DNA, 773 bp, Homo sapiens
  misc_feature (613)..(613): n is a, c, g, or t
tggtcacggccccgcggggcagccatgcctggccgtctgctgcggggcctgtggcagcgatggcgccgttacaagtaccgcttcgttccctggatcgcactgaacctaagccacaacccgaggtacagtatatcagaagtatgagccgatctttttccagtccattggaaatccgtttatttttagatgcctggatggggtactcattgatgggaatgacaaagggatatcaaaagttgtgtacagatcttgcaatgggagggatcgactcggccctttaaaaatgagtgatagtacatggctaacgtcagaaattcataaccctctggctgtgggacagtatgtcaacaattgttccaatgacagagcagctaatgtctgttatcaggaatttgatgtgcctgcagttttccctatagaactgaagcagtatcttccaaacattgcctacagctatgacaaacaaagcccacttcgatgtgttgttcttgtcgcacttagggacatcaatcaaggagaagagcttttttcaaactactacacaattgtcagctaactctgtgaatcagaaattattaggttttctactcagctattaattctaagtgttttngttaatcacttctctgagttctacctgtaaaacaaatattttgagacttaatgggaactacggaatttcttatgtctagtcgactattatatttatggttccaatttcatgattaaagctactgcctccattacaatttcaaatctggtatgccaattcc

SEQ ID NO: 65958 - DNA, 1029 bp, Homo sapiens
  misc_feature (869)..(869): n is a, c, g, or t
gtcgcctgttcttccctgttgcgttcggcactgactggggagcttgtatctgggcaaaaatggaaactttttaaaaagactgcccttaccgcgtgagagtgcgtggctttttctccaccaggggttaattaggtgcttgaacttcctcagaaaagccaagccagggtttattttcatagttcatacaagtacttcacgtggttaaagaagcccatcccggctgtgagaatagcgtgcagtagctcgcgcgttaagaacgggcagaacgccactcaaaagcacgtcgggatggtgggtttcggattgggtttccagccctccacacacatgagaataagcttatagttccttaaggccaggaacccagaagttatgcaggtacagtatatcagaagtatgagccgatctttttccagtccattggaaatccgtttatttttagatgcctggatggggtactcattgatgggaatgacaaagggatatcaaaagttgtgtacagatcttgcaatgggagggatcgactcggccctttaaaaatgagtgatagtacatggctaacgtcagaaattcataaccctctggctgtgggacagtatgtcaacaattgttccaatgacagagcagctaatgtctgttatcaggaatttgatgtgcctgcagttttccctatagaactgaagcagtatcttccaaacattgcctacagctatgacaaacaaagcccacttcgatgtgttgttcttgtcgcacttagggacatcaatcaaggagaagagcttttttcaaactactacacaattgtcagctaactctgtgaatcagaaattattaggttttctactcagctattaattctaagtgttttngttaatcacttctctgagttctacctgtaaaacaaatattttgagacttaatgggaactacggaatttcttatgtctagtcgactattatatttatggttccaatttcatgattaaagctactgcctccattacaatttcaaatctggtatgccaattcc

SEQ ID NO: 65959 - DNA, 559 bp, Homo sapiens
tgcaatgggagggatcgactcggccctttaaaaatgagtgatagtacatggctaacgtcagaaattcataaccctctggctgtgggacagtatgtcaacaattgttccaatggtaagaaggcatcatggggctgtgagatgagatatatcaatggctaattctactcctttgtcatatgactgagtgccaagggcagttgagtataacatataataagctagtcaagtccttaagcaactctcacttttgggggatgatattagagagaattaggggaaatcttgatatacattatttagaattgtttaatttactatttttcttctgattttgcagtgaatataggcaattgataactcccctttgatcattattattttagcattttaaaaatagaaattattatgtcagtgcttcaatatagccttatagattaatggctagactagtatctgctttctgttgctaagtttgtgagtccctatctatatcttctttaggagttgactttcccataggtaaaagtttgattgtttgaatacatttaacatgggcttt

SEQ ID NO: 65960 - DNA, 279 bp, Homo sapiens
atgagaagtacagtttataatattctagttaacactataccaaagattttgaatagttcagggaaataatacagtttagaaatttgaggatttttattttctaccactgaaataattaaacatattttaaaatactacagtagagtttattattttatacaaagtgaggcacaacattgttttccaaatgcaaaaaaaaaaaaactgtagtgtggatgttaacaggcattaccatgaaatgtgacattaaaacacaattttcacaaaaacatgtaggtt

SEQ ID NO: 65961 - DNA, 555 bp, Homo sapiens
ttattctacttaggattttcatgtatcttattatatctggtatctgaggcctataattggcttcaaacttgcattgacccactgtcaagccaataaggctttgccctacataacacatttttatgaagggatctgacacatctccatgaacatagtaatgaaggttatgcccataatgatgaggcctgttactctgagatttatgttgcaggcttgtcctgtagtgtactttctgtggtgcacctttcttaccggaactcacaggcaaaaggagacttaataagtgacataaattacataatattttgggtatacttttacattttcattagtacaactcaattcccttgctctctggccctccgacacttttctttattctgtggttttacattcttaagtttgaaattttcactttaggcaaaatgtaaagtttatgcaagaggttttcagaattctagaatttcagaattctgtttttaggtgctttcatttacattgtcccaaatgtaattggctccattaaaattaagtgttctgatggcttctgaaaat

SEQ ID NO: 65962 - DNA, 1414 bp, Homo sapiens
attcagagcaggaggctgccggaggttctaagagaatattgggcaagaagcacatgcagtgaaattaaaagttgaaaaagaccaaaatcagacttcaaatgggggtaaaagacattaaagtaaatatatcagaaaagaaatacagtaaattgggaattaatatttatttataaaaatactaaaatgtgttcacagatctaaaggggcattttgaagtatttttaaaaggggtttggaggtagcatccgaaatcatataaagattggggataaatgttgaatttttgagatatggaatgtctattaagaggtggaataaagattgtatgtgtcatactctttggaggaaagtggtcccccaaaatgacagcaattcctaaggagtttgtgaaggggtacatgttggaatcatatagagtaaatatcataaaaactatccatacattactgttgcattggcaagagcacatcatttagaatatacatccaattattaaatttatttaataggcaagatgttatagagaagacagttctcaagattctttttcagtttccattgactaaatttctaactttagaaagctctgaatgtgacatatttcgccattcttcagcaagagtgatgtcaaacttacatccccactttgcaaaaatatatcacttcaatggaggtggcatataaacctgaatttttattttatggaaggttgctatgtgaatatacagagctgaaggtttaggagggcaactaagggtcttatcgtaccacatctctggcccttattgaatgtttcttttcctaagtccattcctgactccagttttgctgtataatcctgagactcctttacagaatacggggatctaacatgtagagactattcctgtaattggtgtttcttggaggcattgcaaaaccaaatttttctttactttgtagcacttttgactaatgttatctaaggactgtatcaaagaattggtttctattagattttagtttaagaaatcttacaattttgttacagagcaggctatttggaggatgaaactgaaattaatttttcctcataaggcacaagaaatgaaatttgcaatgcactcgtactgtattttcatcttttttctcttgaatttgcatttgtaaactttgattcacatgtagtatttgtcaactctgatttatatgacaaaagatacatattttaaaaatatatattttaaaaaggaaagattttttctttttttagtgatctacaaacctttaaatttagataattttaatttattattttaagatataagtcatattaaaacttaggagctctaaaactttttccaattttcaaggtgattatatcaccatgaaaaaaatttaaaagttaattattacttccatcaaaattatgtca

SEQ ID NO: 65963 - DNA, 441 bp, Homo sapiens
gagttgagtttaccatcccactgagggagaactgggcgctgccattctttgcaattcagatagcagcaattacatatttcctgagaccaaacttacagcctctttctgaaaggctgacacttcttgccattttcatatcaacttttctctttagtctgacatggcaatttaatcaatttatgatgctgatgcaagcattagtgctgttcacactggactccctggacatgctgccagcagtgaaggcgacatggctgtatggaatacagataacaagtttactcctggtctgcattcttcagttttttaattccatgattcttggatcactgcttatcagttttaacctttcagtattcattgcaagaaaacttcagaaaaatctgaaaactggaagcttccttaataggcttgggaaacttttgttacatttatttatgg

SEQ ID NO: 65964 - DNA, 238 bp, Homo sapiens
  misc_feature (22)..(23): n is a, c, g, or t
  misc_feature (25)..(25): n is a, c, g, or t
ccgcctactactactatacggnngngagaagacgacagaagggtcattcggggcgggagaccctgagcctgctgagaaatccttttagcgccagcaagccccacccagggccctgtcctgtgtctgccaccacctttgtctgatacttgtttccagggaagctgggggaactgccacatctgaggaactggaataaagatgagggggcttcgggggcccccagactgtgtgcccaaaa

SEQ ID NO: 65965 - DNA, 794 bp, Homo sapiens
gtggacacacaagagttaactggcgggtgtgacaggcggaccgccctcaggaagtgttactcactggggatgtgcgtgccttgccttgggactggattctcttcctgaagcgaaggagctcccagccatggaaagccctggagagtcaggcgcgggctctcctggagcccccagcccgtccagcttcactactgggcacctggcgagagaaaagccagcccaggacccactgtatgacgtgcccaatgccagcggcgggcaggcaggcgggccgcagcggccggggcgcgttgtgagcctgcgggagcgcctgctgctcacccggcccgtgtggctgcagctgcaagccaacgcagcggccgcactgcacatgctgaggaccgagcccccggggacgttcctcgtgcggaaatctaacacccgccagtgccaggccctgtgcatgcggttgcctgaagccagtggcccctccttcgtctccagccactacatcctggagagccctggcggcgtctccttggagggctcggagctcatgttcccagacctagtccagctcatctgtgcctactgccacacccgggacatccttctcctcccgctgcagctccccagagccatccaccacgcagccactcacaaagagctggaggccatctcccatctgggcattggtaagggcttcctgccacccattgcacagatgaacaagctgaggccgaggggaaggcaaggctcgcagcacaccgcccgaagcccctgccttgccttggttgggaaacttcccctaacca

SEQ ID NO: 65966 - DNA, 2693 bp, Homo sapiens
gtggacacacaagagttaactggcgggtgtgacaggcggaccgccctcaggaagtgttactcactggggatgtgcgtgccttgccttgggactggattctcttcctgaagcgaaggagctcccagccatggaaagccctggagagtcaggcgcgggctctcctggagcccccagcccgtccagcttcactactgggcacctggcgagagaaaagccagcccaggacccactgtatgacgtgcccaatgccagcggcgggcaggcaggcgggccgcagcggccggggcgcgttgtgagcctgcgggagcgcctgctgctcacccggcccgtgtggctgcagctgcaagccaacgcagcggccgcactgcacatgctgaggaccgagcccccggggacgttcctcgtgcggaaatctaacacccgccagtgccaggccctgtgcatgcggttgcctgaagccagtggcccctccttcgtctccagccactacatcctggagagccctggcggcgtctccttggagggctcggagctcatgttcccagacctagtccagctcatctgtgcctactgccacacccgggacatccttctcctcccgctgcagctccccagagccatccaccacgcagccactcacaaagagctggaggccatctcccatctgggcattgagttctggagctcctccctcaacatcaaggctcagcggggcccggctggaggcccagtgttgccccagctgaaggcccggtcccctcaagagctggaccagggcaccggagccgccttgtgcttcttcaaccccctgttcccgggggacctagggcccaccaagcgggagaaattcaagagaagcttcaaagtgcgcgtgtccacagagacctccagccccctgtctccacctgccgtgccacctccccccgtccccgtgctgccaggggcagtccccagccagacagagcggctgcccccttgccagctgctacggagggagagctcagtggggtaccgcgtgccagcaggcagtggccctagccttccgcctatgccctccctccaagaggtggactgcggctcccccagcagctccgaggaggagggggtgccagggtcccgggggagcccagcgacctcaccccacctgggccgccgacgacctctgcttcggtccatgagcgccgccttctgctccctactggcaccggagcggcaggtgggccgggctgcggcagcactgatgcaggaccgacacacagccgcgggccagctggtgcaggacctactgacccaggtgcgggctgggcccgagccccaggagctgcagggcatccgtcaggcgctgagccgggcccgggccatgctgagtgcggagctgggccctgagaagctgctgtcgcctaagaggctggaacatgtcctggagaagtcattgcattgctctgtgctcaagcctctccggcccatcctggcagcccgcctgcggcgccggcttgccgcagacggctccctgggccgcctagctgagggcctccgcctggcccgggcccagggccccggagccttcgggtcccacctgagcctgccctccccagtagagttggagcaagtgcgccagaagctgctgcagctgctccgcacctactcacccagcgcccaggtcaagcggctcctgcaggcctgcaagctgctctacatggccctgaggacccaggaaggggagggcgcgggtgccgacgagttcctgcctctgctgagcctcgtcttggcccactgtgaccttcctgagctgctgctggaggccgagtacatgtcggagctgctggagcccagcctgcttactggagagggtggctactacctgaccagcctctctgccagcctggccctgctgagtggcctgggtcaggcccacaccctcccactgagccccgtgcaggagctacggcgctccctcagcctctgggagcagcgccgcctgcctgccacccactgcttccagcacctcctccgagtagcctatcaggatcccagcagtggctgcacctccaagaccctggccgtgcccccagaggcctcgattgccaccctgaaccagctctgtgccaccaagttccgagtgacccagcccaacacttttggcctcttcctgtacaaggagcagggctaccaccgcctgccccctggggccctggcccacaggctgcccaccactggctacctcgtctaccgccgggcagagtggcctgagacccagggggctgtgacagaggaggagggcagtgggcagtcagaggcaagaagcagaggggaggagcaagggtgccagggagatggggatgctggggtcaaagccagccccagggacattcgggaacagtctgagacaactgctgaagggggccagggtcaagcccaggaaggccctgctcagccaggggaaccagaggcagagggaagccgggcagcagaggagtagcttgaagtggccagaagggtcattcggggcgggagaccctgagcctgctgagaaatccttttagcgccagcaagccccacccagggccctgtcctgtgtctgccaccacctttgtctgatacttgtttccagggaagctgggggaactgccacatctgaggaactggaataaagatgagggggcttcgggggcccccagactgtgtgcccaaaa

SEQ ID NO: 65967 - DNA, 2236 bp, Homo sapiens
gtggacacacaagagttaactggcgggtgtgacaggcggaccgccctcaggaagtgttactcactggggatgtgcgtgccttgccttgggactggattctcttcctgaagcgaaggagctcccagccatggaaagccctggagagtcaggcgcgggctctcctggagcccccagcccgtccagcttcactactgggcacctggcgagagaaaagccagcccaggacccactgtatgacgtgcccaatgccagcggcgggcaggcaggcgggccgcagcggccggggcgcgttgtgagcctgcgggagcgcctgctgctcacccggcccgtgtggctgcagctgcaagccaacgcagcggccgcactgcacatgctgaggaccgagcccccggggacgttcctcgtgcggaaatctaacacccgccagtgccaggccctgtgcatgcggttgcctgaagccagtggcccctccttcgtctccagccactacatcctggagagccctggcggcgtctccttggagggctcggagctcatgttcccagacctagtccagctcatctgtgcctactgccacacccgggacatccttctcctcccgctgcagctccccagagccatccaccacgcagccactcacaaagagctggaggccatctcccatctgggcattgagttctggagctcctccctcaacatcaaggctcagcggggcccggctggaggcccagtgttgccccagctgaaggcccggtcccctcaagagctggaccagggcaccggagccgccttgtgcttcttcaaccccctgttcccgggggacctagggcccaccaagcgggagaaattcaagagaagcttcaaagtgcgcgtgtccacagagacctccagccccctgtctccacctgccgtgccacctccccccgtccccgtgctgccaggggcagtccccagccagacagagcggctgcccccttgccagctgctacggagggagagctcagtggggtaccgcgtgccagcaggcagtggccctagccttccgcctatgccctccctccaagaggtggactgcggctcccccagcagctccgaggaggagggggtgccagggtcccgggggagcccagcgacctcaccccacctgggccgccgacgacctctgcttcggtccatgagcgccgccttctgctccctactggcaccggagcggcaggtgggccgggctgcggcagcactgatgcaggaccgacacacagccgcgggccagctggtgcaggacctactgacccaggtgcgggctgggcccgagccccaggagctgcagggcatccgtcaggcgctgagccgggcccgggccatgctgagtgcggagctgggccctgagaagctgctgtcgcctaagaggctggaacatgtcctggagaagtcattgcattgctctgtgctcaagcctctccggcccatcctggcagcccgcctgcggcgccggcttgccgcagacggctccctgggccgcctagctgagggcctccgcctggcccgggcccagggccccggagccttcgggtcccacctgagcctgccctccccagtagagttggagcaagtgcgccagaagctgctgcagctgctccgcacctactcacccagcgcccaggtcaagcggctcctgcaggcctgcaagctgctctacatggccctgaggacccaggaaggggagggcgcgggtgccgacgagttcctgcctctgctgagcctcgtcttggcccactgtgaccttcctgagctgctgctggaggccgagtacatgtcggagctgctggagcccagcctgcttactggagagggtggctactacctgaccagcctctctgccagcctggccctgctgagtggcctgggtcaggcccacaccctcccactgagccccgtgcaggagctacggcgctccctcagcctctgggagcagcgccgcctgcctgccacccactgcttccaggtaacaggccctccaccgtgtcctcagagccagacgccatccccgcctttcaccttcctgtccttggtgaagagtccagactctgtagacagatcctgggttctaatcctggctctgccactgggttgtggggacttgggcgagttacttaactacttcgtgcctcagttttctcatcagtaaaatggggtaataggacctacctcctggggttgaggtgaagattaaatgagt

SEQ ID NO: 65968 - DNA, 747 bp, Homo sapiens
gttttgtccctctgaacctagttttcttatctataaaatgggaataacaacatgtcatatagtcattgggagggttaaatctgataatccatgcagagtacatacatgggttagttactgtcattattagttattatcattattcatttcactctctgccaaaacctggcacagtcccaaacagctggaagccttttattcctaaagagactcttctgtttctcaccagcacccccttcagcttggtttgattcaataaactctcattgagcttctggtctacgtcaggctctgtgcaggaccttggtgatggggactacaccaccatcgtccccgccctcaaagagctcaaagtctagtgatgagcagaccccctttctcccaaaagtaacagagaggcaaagtgatagggctatgcaacagaaatgtggaagtgcagccacaggcctttaaatgtatgtagtgctgatattctgaataagttatatatgcacacagtacacacttcacagggcacaaaagggtatggaatgaaaaggaattctccctcccaccctgtctctcagctcataaattcctcttcctgggtcaaatacagttgccagtttcttgtgtgtccttctggatatattctctgcctatatattcctttaaaacacacacattgtatagacgttatacacacagttttgtctcttacttttttcacttatagaatatatgttgatgtttttatgtcagtctcta

SEQ ID NO: 65969 - DNA, 1905 bp, Homo sapiens
  misc_feature (181)..(181): n is a, c, g, or t
  misc_feature (184)..(184): n is a, c, g, or t
  misc_feature (665)..(665): n is a, c, g, or t
  misc_feature (1905)..(1905): n is a, c, g, or t
tgaccgagtctcactctgtctcccaagctggagtgcagtggcgcgatctcggctcactgtaacctccgtctcctgggttcaagtgattctcctgtctcgccttcctgagtaactggtactataggtgcatgccagcacacccggctgattttttattttattttattttttattttttttngtngagatgggtttcaccatgttagccagaatggtctcgatctcctgacctcgtgattcacccgcctcggcctcccaaagtcctgggattacaggcgtgagccaccaggcctagcagtggtattataatcttaagataggtgaaaagatactaaagacctttttggagaatgagaataccactgtcaatcaataaatccaactatattaaatagttttgtctagagctataatatagaggatttacgaaaactttgctttgtataacaaaggcagatattttatattctggttctatttttactttttctgatattaacttcagattttttattttggctttttttttgttttgtagagacaaggtctcactgtgtttcccaggctggtctcaaactcctgggctcaagctatcctcctgccttggcctctcaaagtgttgggattacaggcttgagccaccatgcctggtcaacatcaagttntaacatgatgttaattctatgtgttttaggactttgtagaataaggaaagaggcaaatatgggagatttgaagattttcagtgagacaggcaaagtaagttaacaatctgataggaaataatgtgacagaaggagaagttttcattgattagggccaggcactttatttgacttaaaataattagagctcagatagtattaggagtagcaactcaggtaggatattaattgaaggggacagaattgatgtgggtggtgggtagggcaaggacttaaaattgaccaaaaatacgtaacaatacgtatttctggggcctgaaggacaaaccctcactggttgtatttcttggctggcaggcttataacaagaagttttcaagggagactacatgttagttttttattttgcttgaagagagagatcatttccaagttgacttttgtcttctcagtgtaacatttggcacttcttttcctaaaattatcacttgtggctgagatacaagctgttgaattcagactataagctaaattgttggctctcgattattcttgagattgaaaatctttctggcatcaacaatttagatctatcaaaatgtgttaatagcagtaaatcttcaacttagagacttagaatatactgcaatatttcaattctgatgctaaccactcaaaagttagcatagaccccacaagttagaggcacagttcccaaaaagactgccctcacttcagatgcctgttgcaagttggggttgggggtcccaggccatcttcatttctgaccaactggctataaattggagggatcccttaagcctccttcaggctctataattagaacaactcacagaactcaggaaagtactatacatttgacccttgaacaacacgggtttgaactgcacaggtccacttactagtgattttttcccaacaaaaagtaaatcagaaatatagttggctgggtgcagttgctcacgcttgtaatctcagtactttgagaggccgaggaaagaggatcgcttgaggtcaggagtttgaggccagcttgcacaacatagcgagaccctgtcaccaaaaaaaatatttaaaaattagccaggcatggtgatgctttcctgtaatcccagttactgtggaggctgatcacttgagctcaggagtttgaggcttcagtgagctatgatcatgccactgcaacctagcctgaatgacagagcaagaccctgtctcn

SEQ ID NO: 65970 - DNA, 392 bp, Homo sapiens
aacgtggctgacaccaatctggaaggcgtcgactaagcctcaccgtgccttcagaggcttcttcctgcctctttgcatattcagcataacagcttgtcttccgaaaaaggcattaagggctagagatgtcaaatggaagagacttaggatcaagacattttttaatgttaggcagaacacattcattcagactttgctatttgttgtcaatttatagctgatttgaaggttttctatttaacactggttgacagtataattttcccaaagggcaacaaaacatacagatagcaaatttatattccttttctgttaagataatacttaaatttgttaatcaccagtaagatttgatgtttaaagacttccactgcaatatataaatactgaaa

SEQ ID NO: 65971 - DNA, 2226 bp, Homo sapiens
acttcctaaagttttagttctgagcttttattattttgggatattgtcatctttctaataggtagaattttagtgaaagtaatcaggaccttttcaagatagacttctgcataatttcatcctgtggctttggacgtactatccaaagaggctgtacatccagcaagtcactagttagtgaataggaattcttggcgtgtaatgccatttcttgtagctgaaggaagacatgtgataagtgattaacctgttctgtgcttcagttgactcttataaggacagtcattccctttaagcatcttaagacaaaaatatttatctgttgaattggaatttactaacagagggaatttgaattggaatttacttccagctgcactcatgcaagaatttgtgatgtatactaaaaaataaaaaaaggctcattcaggagagccttgtactcagcaagagtggctaacattagagcatacagactatgtgattgtataaggcatggagagttaaacaacctccagtcagctgcctgtttgaataccactgacttgttaagaatgatcttgcttttagattttaccatattcaaacttattaggtgagccttatatagcatatatacctggctgctattgtggggtttgggaacatgaggggtggggtgaactgttgttgttttaggtttcagtcagacagacatccctgtgcctcagttcccagaagcacagcaggcctctaggagcatccgtgggaacggcgcagtcctgacatcaccaactctcctgctcaggctcatcccatatacagaggtcaaagggtggggtttgagatcgggggaaggaatgagaaagtagaagcaatgtcacttcagtgccactgttgactagtctttggtgcttatgtcagtatttgttttatttcctgatttttttaaagttggcaaaactacatatttttatcttgatgaaggcagtgggagggtggaacaaaaacaagccattactgctatttctagttcatttactggagactgtcccttaatagctaatgtagaataaatttgaaacatagacctagatgacaaaaagaatgggaatagaaatgaatctcaggatttgaacaaacagaagacgtttatgctgtgttgatgcccagttctacaactgctattacatttgtcattctgtctccccttttcccctaattcttttatgtatgtatgtatacagtttgaggaaatgtgcatctatggtcagtcctttttaaaagacttaatgaatttattactcttttgcaaaaaatatacccactgcttatatgggcatacaaatgctaccctattttaaatgtaggtggcgtatgtgttcgtgttttaatgtattcagagccattgggcaataagcagtccagaacattgaaaactcaagcaggtaaagcacctaacacccttagtttctagaattactttaaaaaacttttatattgctgcatcttccacagttctttgggtagtctctgaacttaaaatttgtaggagttgtagactacctaaatttttaagttatggtatttgttcataggttgtaggggtaggtaaagaaggaaacagacaagaaaatggcttcttgaggtggcagctgctgagtggctaaatcttaccactttctttctactttttttggaaattttcccagcttagcatgaacatggatcatacagtgtttgattttatgtgattgagatttttgttttttatttttggagggaaggtcttggagaaacattaaaaagttggtgtatgtgcaaaaatacgaaatgttaaacaaaggaattttttcttatttaatctgaatggtaagcaagaactttttctatatacccttctgctgcagcagacaactaaactggtaggtggcagcagaggaaggaattcttcagattgatggctactgacttaaagtctgcataggagaagagatagagcatgacataccaagtgaagcaagggggacaaaaatggaaacaggactaagattcctgcattttgactctaaatggttcttttgaagtaaccagtgatcttttttgcttaccctcatcaacagaatggatgaagatagatttgactgtgtgctttttcaagtggagaatatgaatatacagaacaagaaagcaataactccaacctgtttgattccgtctgttttctaaataaagacactatgcgct

SEQ ID NO: 65972 - DNA, 1931 bp, Homo sapiens
acttcctaaagttttagttctgagcttttattattttgggatattgtcatctttctaataggtagaattttagtgaaagtaatcaggaccttttcaagatagacttctgcataatttcatcctgtggctttggacgtactatccaaagaggctgtacatccagcaagtcactagttagtgaataggaattcttggcgtgtaatgccatttcttgtagctgaaggaagacatgtgataagtgattaacctgttctgtgcttcagttgactcttataaggacagtcattccctttaagcatcttaagacaaaaatatttatctgttgaattggaatttactaacagagggaatttgaattggaatttacttccagctgcactcatgcaagaatttgtgatgtatactaaaaaataaaaaaaggctcattcaggagagccttgtactcagcaagagtggctaacattagagcatacagactatgtgattgtataaggcatggagagttaaacaacctccagtcagctgcctgtttgaataccactgacttgttaagaatgatcttgcttttagattttaccatattcaaacttattaggtgagccttatatagcatatatacctggctgctattgtggggtttgggaacatgaggggtggggtgaactgttgttgttttaggtttcagtcagacagacatccctgtgcctcagttcccagaagcacagcaggcctctaggagcatccgtgggaacggcgcagtcctgacatcaccaactctcctgctcaggctcatcccatatacagaggtcaaagggtggggtttgagatcgggggaaggaatgagaaagtagaagcaatgtcacttcagtgccactgttgactagtctttggtgcttatgtcagtatttgttttatttcctgatttttttaaagttggcaaaactacatatttttatcttgatgaaggcagtgggagggtggaacaaaaacaagccattactgctatttctagttcatttactggagactgtcccttaatagctaatgtagaataaatttgaaacatagacctagatgacaaaaagaatgggaatagaaatgaatctcaggatttgaacaaacagaagacgtttatgctgtgttgatgcccagttctacaactgctattacatttgtcattctgtctccccttttcccctaattcttttatgtatgtatgtatacagtttgaggaaatgtgcatctatggtcagtcctttttaaaagacttaatgaatttattactcttttgcaaaaaatatacccactgcttatatgggcatacaaatgctaccctattttaaatgtaggtggcgtatgtgttcgtgttttaatgtattcagagccattgggcaataagcagtccagaacattgaaaactcaagcagcagacaactaaactggtaggtggcagcagaggaaggaattcttcagattgatggctactgacttaaagtctgcataggagaagagatagagcatgacataccaagtgaagcaagggggacaaaaatggaaacaggactaagattcctgcattttgactctaaatggttcttttgaagtaaccagtgatcttttttgcttaccctcatcaacagaatggatgaagatagatttgactgtgtgctttttcaagtggagaatatgaatatacagaacaagaaagcaataactccaacctgtttgattccgtctgttttctaaataaagacactatgcgctcagacagcaaacagaacacgccacagcagacacacgggcggcgaccaccccgcgccgggaacgccttgttcaggccaccataccctgagcgtaccggcacacagagagggcagggacacaggcacacaagcgcgccctgagaagccgacaccacacacacagaaccc

SEQ ID NO: 65973 - DNA, 1764 bp, Homo sapiens
acttcctaaagttttagttctgagcttttattattttgggatattgtcatctttctaataggtagaattttagtgaaagtaatcaggaccttttcaagatagacttctgcataatttcatcctgtggctttggacgtactatccaaagaggctgtacatccagcaagtcactagttagtgaataggaattcttggcgtgtaatgccatttcttgtagctgaaggaagacatgtgataagtgattaacctgttctgtgcttcagttgactcttataaggacagtcattccctttaagcatcttaagacaaaaatatttatctgttgaattggaatttactaacagagggaatttgaattggaatttacttccagctgcactcatgcaagaatttgtgatgtatactaaaaaataaaaaaaggctcattcaggagagccttgtactcagcaagagtggctaacattagagcatacagactatgtgattgtataaggcatggagagttaaacaacctccagtcagctgcctgtttgaataccactgacttgttaagaatgatcttgcttttagattttaccatattcaaacttattaggtgagccttatatagcatatatacctggctgctattgtggggtttgggaacatgaggggtggggtgaactgttgttgttttaggtttcagtcagacagacatccctgtgcctcagttcccagaagcacagcaggcctctaggagcatccgtgggaacggcgcagtcctgacatcaccaactctcctgctcaggctcatcccatatacagaggtcaaagggtggggtttgagatcgggggaaggaatgagaaagtagaagcaatgtcacttcagtgccactgttgactagtctttggtgcttatgtcagtatttgttttatttcctgatttttttaaagttggcaaaactacatatttttatcttgatgaaggcagtgggagggtggaacaaaaacaagccattactgctatttctagttcatttactggagactgtcccttaatagctaatgtagaataaatttgaaacatagacctagatgacaaaaagaatgggaatagaaatgaatctcaggatttgaacaaacagaagacgtttatgctgtgttgatgcccagttctacaactgctattacatttgtcattctgtctccccttttcccctaattcttttatgtatgtatgtatacagtttgaggaaatgtgcatctatggtcagtcctttttaaaagacttaatgaatttattactcttttgcaaaaaatatacccactgcttatatgggcatacaaatgctaccctattttaaatgtaggtggcgtatgtgttcgtgttttaatgtattcagagccattgggcaataagcagtccagaacattgaaaactcaagcagcagacaactaaactggtaggtggcagcagaggaaggaattcttcagattgatggctactgacttaaagtctgcataggagaagagatagagcatgacataccaagtgaagcaagggggacaaaaatggaaacaggactaagattcctgcattttgactctaaatggttcttttgaagtaaccagtgatcttttttgcttaccctcatcaacagaatggatgaagatagatttgactgtgtgctttttcaagtggagaatatgaatatacagaacaagaaagcaataactccaacctgtttgattccgtctgttttctaaataaagacactatgcgct

SEQ ID NO: 65974 - DNA, 359 bp, Homo sapiens
  misc_feature (201)..(201): n is a, c, g, or t
tcgtgccgaattcggcacgagcggcacgatgcttttttaggcctttttgtgtatatgtacgttgtttgtttttttccttttgtttctagcctgttcagtgtacagtttattcaaggctacatgcttttctttaatgcttctggctatgcattttctctttttacatataggatttgggattgggggtgggttggatgtttnctatttaagcttccttaatattatatattataaaacttatgtgatacaaaatttccattacctatgtaaaagattttgactttctatataaaaagagctgactgacattatctttaagtactttgtactaactttattttacttactgtatcattgat

SEQ ID NO: 65975 - DNA, 271 bp, Homo sapiens
tttttttttttcttcttaaaaaaacaaaacaaagtttcatttaaaatacatttaggcacctttggagcttggattttggaatgtttcagtagtggacagaaatctgctgttggaatcttctagtcttccaggtttaatttgaaatgtttttagttttgttttggatttttgtgtggtattttatttcctttataccaatgccattttgccatgtccccgtacatcgttagaagcttgaattcgagcagtagtagtagtagtaggcggccgc

SEQ ID NO: 65976 - DNA, 6700 bp, Homo sapiens
ggcacgagggggagtgagagtgtgtgggagtggggtgagggagaagctgacgggacgcgaggctgtgagaaactgggcgagtgtgcgaggacgcccggccagcctgcgggagccgcagtcggcggaggagaaaggaggcggctcccggtatcccgaccccctccccctcctctccttcccccacttccagccgcccggcggcccgcgcttcctcgaaggccccagcccggctcagtcggccgagagcgagggaggagccccccgacccaggtgctggagtctgcttgtcagggaggggggcagtctgtgattctgagaacagagccaagaaggggaacagcaaattcagtcacagacaatcctccactcggtcaagagccacttttctcttcctgccttgcccccccgcagggggtaaggaactgagcgtttaatctttagccggttggctaccagctaaaattctacttatcttagtttctagtggatagctttcttattttgcccatgttttcttagaatccctgtttaatatacttttgtcagtagtagtatctaggagtagcagggagagtgacaataaattagccccttcttttttcccttgtcattcaggccccttttcctctccagagggaaattaccagtaaactcttctaaatcttccaccccttctcagtcatactgtgaagaaacacactaaagtggacattatttgaccagtgaacacgaacccagcttcaggcattggtttgttgtggcacatggagaaacatctcttttaaaatatctcccaattacccttttcacaatttgtatccacctaggatttgctgctggggtaagtcactagatttatttctcaaagctcccctctctatgagctgaaagactgaccaaccatgaacactagtaggggatggggaaaggggacagagcagagccagttgttccacactttgggaagcaggagtagcttttatcatcttcctctggggagcaggcatagagacataaactgagtgaaaatgggtggaggaagaacttctatacccacgaacaacatgtgaagagagagaaccaaacataaagtaaggagggtagacgttacatccaagaggaaataatccaggcaaggaagcacaagctgatcaagatgtgtagttctgtggctgccaagttgtggtttttgacagatcgtcgcatcagggaagactatcctcaaaaagagattttacgagcattgaaggccaaatgttgtgaggaggaactggactttagggctgtggtgatggatgaggtggtgctgacaatcgagcaaggaaacctgggtctgcggatcaatggagagctaatcactgcctacccacaagtggtggtagtcagagtaccaaccccttgggtgcaaagtgatagtgacatcactgttttgcgccatctagagaagatgggatgtcggttaatgaaccgacctcaagccatcctgaactgcgttaataagttctggacatttcaagagttggctggccatggtgttcctctgccggatactttctcttatggtggccacgaaaattttgctaaaatgattgatgaggctgaagttctggagttcccaatggtagtaaagaatacgcggggtcacagaggtaaagctgttttcttggctcgagataagcaccatttggctgatctaagccatcttattcgccatgaagcgccatacctgttccagaagtatgttaaagagtctcatggacgggatgtacgtgtcattgtcgtgggaggccgtgtggttggcaccatgttacgttgttcaacagatgggagaatgcaaagcaactgctcattaggtggtgtggggatgatgtgctcattgagtgaacaagggaagcagctagctatccaggtgtctaatatcctggggatggatgtgtgtggcattgacctgctgatgaaagatgacggctccttctgcgtctgtgaggccaatgcaaatgtaggtttcatcgcctttgataaggcttgtaatctagatgtagctggtatcatagcagactatgccgcctcccttctaccctctggccggctcacccggcgtatgtccctgctctccgtggtgtccactgccagtgagactagtgagccggagctgggtcccccagccagcactgctgttgacaacatgagtgcaagttccagctctgttgacagcgaccctgaaagcacggagcgagagctgctcaccaagctcccagggggcctgttcaacatgaaccagctgctagccaatgaaatcaaactactggtggactgactccactggtaattaaccaacaaaacccttgtaaaactttctttcttcttttctatttttaaaaccaacttgcaatgctgttcatggaggatgctcaggaagatgagagaaaattagtaggattagttggagagagtgggagatagatgagacctctgctagtaagatgttactttcatttacaaatcctacaaatagagaggcagaataggtggggtatagaaaaatgtcaggctctcatagttacccttttaaattgctaaaaaatgtgtatgctcataggccatgaggaacaaatactttttttttttcatggtcccttgcttttgtttttgtacaaaaaaaaatggttttgctacaaatatccaagtagcataacttcacattgtgttggaagatttgtcatcagtgaggaaaacatctgcttaaattacaggaatttttgtattatacagctctgaaaattctgccatttccttattaactagcagctttagtttgtagtttatgaaatcttgaggggctcttttactgggatttcttatttttttgttttttcccgcttaatttggtgggaggtcaaattgaatataacccaataaaggcttcttaatgacaaaattggcatgtttgcatgatgaaatggaaatgaacagtattgcaatgtccggtatacaaaataacattaattcaatgtagataaaattacactagtttaaaatatgtgcattcacttgtatttgttagtgttttagtcttttttgaaagatgtgctctgttaatgttgcttttttttttttttttaatacatgctagtctaacatttcctgctctatgcctgcatctttaacaatggccaaagtgaagaaaatgctaccttttttgttaacaagacactgacttgaaacatgtacatttaaagccttttattttttccctttttgttttggtagttgggcatttaaataaggacaaggaaaaatatttttgggggcaaatcaagagcctatgagttctaagtataaagctgaagtgatttcgaatgccagcgttatatatttgcatttttcacattttacgagggagtatatgtgtatgtgtgtgcacgcatgcatgtgtatgtgttttgctttttgtttccatcaactaatcaaaaaggataatttagaaaatggagcatgatgggaaacagagtttttgactttaaaaaacagatgagttgttttcataagtagactccactggggtagaggtattcaccttaaaacatagggtgagtagatgcttttttaggcctttttgtgtatatgtacgttgtttgtttttttccttttgtttctagcctgttcagtgtacagtttattcaaggctacatgcttttctttaatgcttctggctatgcattttctctttttacatataggatttgggattgggggtgggttggatgtttttgtttggggacttatttagtagtattgagtctcttatagccctactcttaagccttcaatactgtccactctttatattcctttacttgcagaatttataaaagcccccaaactgcatataatatgagcctttaaaacatgggtaaaactaatcccattgatgggtttggatggtatgttaagaaatggagatgctgcagagcccaacgtaattttttaaacagcaagttttccatctccctacgaatcctctgaagcttttacccaagccctttcttgcctctccagtgctattttccttcagatggaccttaaacataatttcttggacactactagagagacttcgaggcaataataaaagatcagtattaaccagctataacagaggtttgatcatgcttacttgtacagtttttcccccgttttaaaaaggaatgtaataaaatttgttttttccatagaattaaataatattaaaattgagtgaaaggttgattgttgatgaatagaatagtacctctcatctgtgcagtgtctcatttcacctcagagaaaaggatacataagaggagtttgtaatttatcttaggatattctaattgcatttaaaagaacttatcttgcgcagggtaaatgggggactcacatacatatattaatacctctgactcattaacagaaagaaatacttggtacttctttcgctgaatgaccatactgtggaggatgcatactatttggtatagagaaataaatgaggaagaaagaactgcttaattaaattatcattcatatgttcatatagagaccatctggttgccatgtgtattatgacacatacactttgaatagttacatatcacaagtatgtagttcatgtttgtgttggtggggtaaggcatcaggaaaaatgtagttagtcttttcttaacttataccaaattaaccaactatattataggaaatatgtgaaattagttcattagctttattcactattatgcattcacatgatattaaaacgtacactcacatgttagaatgaaaagagcagtagttatcttagattttaaaaacatggatatcttcttgaattccttcaagattgaggtagagaataagagcaaatcattctggaagtaccttaaggaaacaaacagcagcagatatttaggttaaacttattttcataattgtttaataacttttgtataatcttcattgctattatgagagagaatgtatatatcaaatatgtgtaatgataaaatctgaattgtaaaatttttgtatattgttaaaattgtaattctaaattgtatttcaaaaatgattatttctgatattgtttttatgtcacccatgatgaaaactggactttatatatctaaacatacaagtatgaactattctatttaaaatttttaatagtttttttcttttttggtgcctataattgattggtcatttctgctggcttttctccaatgaacattgaaatcttcctgtatatgttaccaataagaaaactaccctggaacagtagaaaaacccaacaagagacttggcattcatcaagcacattatcagactttgagaacatattgaaggcattgactttgaaaatcatctctttttctcaagaagaaagcaatggagaagcaaatttgtttcattcagtgaatccccagtttggggcttgtggggcttagagacattgtgaaatcaaatcttgtgttatacttttctcctggctcactttttttgagaaggtttatgggctatttggctggtgagacacgatcccctcctaagaaaatgtaggtgctcagacagccttttcaggagccaaaaaaacaaatacaaacaaacaaaaaaatacccagagaaaaaactttccttcttcccccttcctgatgatgagtgagaagtattgagaactttcggggtcagtgcccttctaaactccccttcccccaataatgcagctgtataatgaatggtaaatgcaccggtttggattcaggcacagccccagtctgcctacaggtggcgtatgtgttcgtgttttaatgtattcagagccattgggcaataagcagtccagaacattgaaaactcaagcaggtaaagcacctaacacccttagtttctagaattactttaaaaaacttttatattgctgcatcttccacagttctttgggtagtctctgaacttaaaatttgtaggagttgtagactacctaaatttttaagttatggtatttgttcataggttgtaggggtaggtaaagaaggaaacagacaagaaaatggcttcttgaggtggcagctgctgagtggctaaatcttaccactttctttctactttttttggaaattttcccagcttagcatgaacatggatcatacagtgtttgattttatgtgattgagatttttgttttttatttttggagggaaggtcttggagaaacattaaaaagttggtgtatgtgcaaaaatacgaaatgttaaacaaaggaattttttcttatttaatctgaatggtaagcaagaactttttctatatacccttctgctgcagcagacaactaaactggtaggtggcagcagaggaaggaattcttcagattgatggctactgacttaaagtctgcataggagaagagatagagcatgacataccaagtgaagcaagggggacaaaaatggaaacaggactaagattcctgcattttgactctaaatggttcttttgaagtaaccagtgatcttttttgcttaccctcatcaacagaatggatgaagatagatttgactgtgtgctttttcaagtggagaatatgaatatacagaacaagaaagcaataactccaacctgtttgattccgtctgttttctaaataaagacactatgcgct

SEQ ID NO: 65977 - DNA, 2569 bp, Homo sapiens
ggcacgagggggagtgagagtgtgtgggagtggggtgagggagaagctgacgggacgcgaggctgtgagaaactgggcgagtgtgcgaggacgcccggccagcctgcgggagccgcagtcggcggaggagaaaggaggcggctcccggtatcccgaccccctccccctcctctccttcccccacttccagccgcccggcggcccgcgcttcctcgaaggccccagcccggctcagtcggccgagagcgagggaggagccccccgacccaggtgctggagtctgcttgtcagggaggggggcagtctgtgattctgagaacagagccaagaaggggaacagcaaattcagtcacagacaatcctccactcggtcaagagccacttttctcttcctgccttgcccccccgcagggggtaaggaactgagcgtttaatctttagccggttggctaccagctaaaattctacttatcttagtttctagtggatagctttcttattttgcccatgttttcttagaatccctgtttaatatacttttgtcagtagtagtatctaggagtagcagggagagtgacaataaattagccccttcttttttcccttgtcattcaggccccttttcctctccagagggaaattaccagtaaactcttctaaatcttccaccccttctcagtcatactgtgaagaaacacactaaagtggacattatttgaccagtgaacacgaacccagcttcaggcattggtttgttgtggcacatggagaaacatctcttttaaaatatctcccaattacccttttcacaatttgtatccacctaggatttgctgctggggtaagtcactagatttatttctcaaagctcccctctctatgagctgaaagactgaccaaccatgaacactagtaggggatggggaaaggggacagagcagagccagttgttccacactttgggaagcaggagtagcttttatcatcttcctctggggagcaggcatagagacataaactgagtgaaaatgggtggaggaagaacttctatacccacgaacaacatgtgaagagagagaaccaaacataaagtaaggagggtagacgttacatccaagaggaaataatccaggcaaggaagcacaagctgatcaagatgtgtagttctgtggctgccaagttgtggtttttgacagatcgtcgcatcagggaagactatcctcaaaaagagattttacgagcattgaaggccaaatgttgtgaggaggaactggactttagggctgtggtgatggatgaggtggtgctgacaatcgagcaaggaaacctgggtctgcggatcaatggagagctaatcactgcctacccacaagtggtggtagtcagagtaccaaccccttgggtgcaaagtgatagtgacatcactgttttgcgccatctagagaagatgggatgtcggttaatgaaccgacctcaagccatcctgaactgcgttaataagttctggacatttcaagagttggctggccatggtgttcctctgccggatactttctcttatggtggccacgaaaattttgctaaaatgattgatgaggctgaagttctggagttcccaatggtagtaaagaatacgcggggtcacagaggtaaagctgttttcttggctcgagataagcaccatttggctgatctaagccatcttattcgccatgaagcgccatacctgttccagaagtatgttaaagagtctcatggacgggatgtacgtgtcattgtcgtgggaggccgtgtggttggcaccatgttacgttgttcaacagatgggagaatgcaaagcaactgctcattaggtggtgtggggatgatgtgctcattgagtgaacaagggaagcagctagctatccaggtgtctaatatcctggggatggatgtgtgtggcattgacctgctgatgaaagatgacggctccttctgcgtctgtgaggccaatgcaaatccttttcaggagccaaaaaaacaaatacaaacaaacaaaaaaatacccagagaaaaaactttccttcttcccccttcctgatgatgagtgagaagtattgagaactttcggggtcagtgcccttctaaactccccttcccccaataatgcagctgtataatgaatggtaaatgcaccggtttggattcaggcacagccccagtctgcctacagcagacaactaaactggtaggtggcagcagaggaaggaattcttcagattgatggctactgacttaaagtctgcataggagaagagatagagcatgacataccaagtgaagcaagggggacaaaaatggaaacaggactaagattcctgcattttgactctaaatggttcttttgaagtaaccagtgatcttttttgcttaccctcatcaacagaatggatgaagatagatttgactgtgtgctttttcaagtggagaatatgaatatacagaacaagaaagcaataactccaacctgtttgattccgtctgttttctaaataaagacactatgcgctggaaataaaaaaaaaaaaag

SEQ ID NO: 65978 - DNA, 6258 bp, Homo sapiens
ggcacgagggggagtgagagtgtgtgggagtggggtgagggagaagctgacgggacgcgaggctgtgagaaactgggcgagtgtgcgaggacgcccggccagcctgcgggagccgcagtcggcggaggagaaaggaggcggctcccggtatcccgaccccctccccctcctctccttcccccacttccagccgcccggcggcccgcgcttcctcgaaggccccagcccggctcagtcggccgagagcgagggaggagccccccgacccaggtgctggagtctgcttgtcagggaggggggcagtctgtgattctgagaacagagccaagaaggggaacagcaaattcagtcacagacaatcctccactcggtcaagagccacttttctcttcctgccttgcccccccgcagggggtaaggaactgagcgtttaatctttagccggttggctaccagctaaaattctacttatcttagtttctagtggatagctttcttattttgcccatgttttcttagaatccctgtttaatatacttttgtcagtagtagtatctaggagtagcagggagagtgacaataaattagccccttcttttttcccttgtcattcaggccccttttcctctccagagggaaattaccagtaaactcttctaaatcttccaccccttctcagtcatactgtgaagaaacacactaaagtggacattatttgaccagtgaacacgaacccagcttcaggcattggtttgttgtggcacatggagaaacatctcttttaaaatatctcccaattacccttttcacaatttgtatccacctaggatttgctgctggggtaagtcactagatttatttctcaaagctcccctctctatgagctgaaagactgaccaaccatgaacactagtaggggatggggaaaggggacagagcagagccagttgttccacactttgggaagcaggagtagcttttatcatcttcctctggggagcaggcatagagacataaactgagtgaaaatgggtggaggaagaacttctatacccacgaacaacatgtgaagagagagaaccaaacataaagtaaggagggtagacgttacatccaagaggaaataatccaggcaaggaagcacaagctgatcaagatgtgtagttctgtggctgccaagttgtggtttttgacagatcgtcgcatcagggaagactatcctcaaaaagagattttacgagcattgaaggccaaatgttgtgaggaggaactggactttagggctgtggtgatggatgaggtggtgctgacaatcgagcaaggaaacctgggtctgcggatcaatggagagctaatcactgcctacccacaagtggtggtagtcagagtaccaaccccttgggtgcaaagtgatagtgacatcactgttttgcgccatctagagaagatgggatgtcggttaatgaaccgacctcaagccatcctgaactgcgttaataagttctggacatttcaagagttggctggccatggtgttcctctgccggatactttctcttatggtggccacgaaaattttgctaaaatgattgatgaggctgaagttctggagttcccaatggtagtaaagaatacgcggggtcacagaggtaaagctgttttcttggctcgagataagcaccatttggctgatctaagccatcttattcgccatgaagcgccatacctgttccagaagtatgttaaagagtctcatggacgggatgtacgtgtcattgtcgtgggaggccgtgtggttggcaccatgttacgttgttcaacagatgggagaatgcaaagcaactgctcattaggtggtgtggggatgatgtgctcattgagtgaacaagggaagcagctagctatccaggtgtctaatatcctggggatggatgtgtgtggcattgacctgctgatgaaagatgacggctccttctgcgtctgtgaggccaatgcaaatgtaggtttcatcgcctttgataaggcttgtaatctagatgtagctggtatcatagcagactatgccgcctcccttctaccctctggccggctcacccggcgtatgtccctgctctccgtggtgtccactgccagtgagactagtgagccggagctgggtcccccagccagcactgctgttgacaacatgagtgcaagttccagctctgttgacagcgaccctgaaagcacggagcgagagctgctcaccaagctcccagggggcctgttcaacatgaaccagctgctagccaatgaaatcaaactactggtggactgactccactggtaattaaccaacaaaacccttgtaaaactttctttcttcttttctatttttaaaaccaacttgcaatgctgttcatggaggatgctcaggaagatgagagaaaattagtaggattagttggagagagtgggagatagatgagacctctgctagtaagatgttactttcatttacaaatcctacaaatagagaggcagaataggtggggtatagaaaaatgtcaggctctcatagttacccttttaaattgctaaaaaatgtgtatgctcataggccatgaggaacaaatactttttttttttcatggtcccttgcttttgtttttgtacaaaaaaaaatggttttgctacaaatatccaagtagcataacttcacattgtgttggaagatttgtcatcagtgaggaaaacatctgcttaaattacaggaatttttgtattatacagctctgaaaattctgccatttccttattaactagcagctttagtttgtagtttatgaaatcttgaggggctcttttactgggatttcttatttttttgttttttcccgcttaatttggtgggaggtcaaattgaatataacccaataaaggcttcttaatgacaaaattggcatgtttgcatgatgaaatggaaatgaacagtattgcaatgtccggtatacaaaataacattaattcaatgtagataaaattacactagtttaaaatatgtgcattcacttgtatttgttagtgttttagtcttttttgaaagatgtgctctgttaatgttgcttttttttttttttttaatacatgctagtctaacatttcctgctctatgcctgcatctttaacaatggccaaagtgaagaaaatgctaccttttttgttaacaagacactgacttgaaacatgtacatttaaagccttttattttttccctttttgttttggtagttgggcatttaaataaggacaaggaaaaatatttttgggggcaaatcaagagcctatgagttctaagtataaagctgaagtgatttcgaatgccagcgttatatatttgcatttttcacattttacgagggagtatatgtgtatgtgtgtgcacgcatgcatgtgtatgtgttttgctttttgtttccatcaactaatcaaaaaggataatttagaaaatggagcatgatgggaaacagagtttttgactttaaaaaacagatgagttgttttcataagtagactccactggggtagaggtattcaccttaaaacatagggtgagtagatgcttttttaggcctttttgtgtatatgtacgttgtttgtttttttccttttgtttctagcctgttcagtgtacagtttattcaaggctacatgcttttctttaatgcttctggctatgcattttctctttttacatataggatttgggattgggggtgggttggatgtttttgtttggggacttatttagtagtattgagtctcttatagccctactcttaagccttcaatactgtccactctttatattcctttacttgcagaatttataaaagcccccaaactgcatataatatgagcctttaaaacatgggtaaaactaatcccattgatgggtttggatggtatgttaagaaatggagatgctgcagagcccaacgtaattttttaaacagcaagttttccatctccctacgaatcctctgaagcttttacccaagccctttcttgcctctccagtgctattttccttcagatggaccttaaacataatttcttggacactactagagagacttcgaggcaataataaaagatcagtattaaccagctataacagaggtttgatcatgcttacttgtacagtttttcccccgttttaaaaaggaatgtaataaaatttgttttttccatagaattaaataatattaaaattgagtgaaaggttgattgttgatgaatagaatagtacctctcatctgtgcagtgtctcatttcacctcagagaaaaggatacataagaggagtttgtaatttatcttaggatattctaattgcatttaaaagaacttatcttgcgcagggtaaatgggggactcacatacatatattaatacctctgactcattaacagaaagaaatacttggtacttctttcgctgaatgaccatactgtggaggatgcatactatttggtatagagaaataaatgaggaagaaagaactgcttaattaaattatcattcatatgttcatatagagaccatctggttgccatgtgtattatgacacatacactttgaatagttacatatcacaagtatgtagttcatgtttgtgttggtggggtaaggcatcaggaaaaatgtagttagtcttttcttaacttataccaaattaaccaactatattataggaaatatgtgaaattagttcattagctttattcactattatgcattcacatgatattaaaacgtacactcacatgttagaatgaaaagagcagtagttatcttagattttaaaaacatggatatcttcttgaattccttcaagattgaggtagagaataagagcaaatcattctggaagtaccttaaggaaacaaacagcagcagatatttaggttaaacttattttcataattgtttaataacttttgtataatcttcattgctattatgagagagaatgtatatatcaaatatgtgtaatgataaaatctgaattgtaaaatttttgtatattgttaaaattgtaattctaaattgtatttcaaaaatgattatttctgatattgtttttatgtcacccatgatgaaaactggactttatatatctaaacatacaagtatgaactattctatttaaaatttttaatagtttttttcttttttggtgcctataattgattggtcatttctgctggcttttctccaatgaacattgaaatcttcctgtatatgttaccaataagaaaactaccctggaacagtagaaaaacccaacaagagacttggcattcatcaagcacattatcagactttgagaacatattgaaggcattgactttgaaaatcatctctttttctcaagaagaaagcaatggagaagcaaatttgtttcattcagtgaatccccagtttggggcttgtggggcttagagacattgtgaaatcaaatcttgtgttatacttttctcctggctcactttttttgagaaggtttatgggctatttggctggtgagacacgatcccctcctaagaaaatgtaggtgctcagacagccttttcaggagccaaaaaaacaaatacaaacaaacaaaaaaatacccagagaaaaaactttccttcttcccccttcctgatgatgagtgagaagtattgagaactttcggggtcagtgcccttctaaactccccttcccccaataatgcagctgtataatgaatggtaaatgcaccggtttggattcaggcacagccccagtctgcctacaggtggcgtatgtgttcgtgttttaatgtattcagagccattgggcaataagcagtccagaacattgaaaactcaagcagcagacaactaaactggtaggtggcagcagaggaaggaattcttcagattgatggctactgacttaaagtctgcataggagaagagatagagcatgacataccaagtgaagcaagggggacaaaaatggaaacaggactaagattcctgcattttgactctaaatggttcttttgaagtaaccagtgatcttttttgcttaccctcatcaacagaatggatgaagatagatttgactgtgtgctttttcaagtggagaatatgaatatacagaacaagaaagcaataactccaacctgtttgattccgtctgttttctaaataaagacactatgcgctggaaataaaaaaaaaaaaag

SEQ ID NO: 65979 - DNA, 6238 bp, Homo sapiens
ggcacgagggggagtgagagtgtgtgggagtggggtgagggagaagctgacgggacgcgaggctgtgagaaactgggcgagtgtgcgaggacgcccggccagcctgcgggagccgcagtcggcggaggagaaaggaggcggctcccggtatcccgaccccctccccctcctctccttcccccacttccagccgcccggcggcccgcgcttcctcgaaggccccagcccggctcagtcggccgagagcgagggaggagccccccgacccaggtgctggagtctgcttgtcagggaggggggcagtctgtgattctgagaacagagccaagaaggggaacagcaaattcagtcacagacaatcctccactcggtcaagagccacttttctcttcctgccttgcccccccgcagggggtaaggaactgagcgtttaatctttagccggttggctaccagctaaaattctacttatcttagtttctagtggatagctttcttattttgcccatgttttcttagaatccctgtttaatatacttttgtcagtagtagtatctaggagtagcagggagagtgacaataaattagccccttcttttttcccttgtcattcaggccccttttcctctccagagggaaattaccagtaaactcttctaaatcttccaccccttctcagtcatactgtgaagaaacacactaaagtggacattatttgaccagtgaacacgaacccagcttcaggcattggtttgttgtggcacatggagaaacatctcttttaaaatatctcccaattacccttttcacaatttgtatccacctaggatttgctgctggggtaagtcactagatttatttctcaaagctcccctctctatgagctgaaagactgaccaaccatgaacactagtaggggatggggaaaggggacagagcagagccagttgttccacactttgggaagcaggagtagcttttatcatcttcctctggggagcaggcatagagacataaactgagtgaaaatgggtggaggaagaacttctatacccacgaacaacatgtgaagagagagaaccaaacataaagtaaggagggtagacgttacatccaagaggaaataatccaggcaaggaagcacaagctgatcaagatgtgtagttctgtggctgccaagttgtggtttttgacagatcgtcgcatcagggaagactatcctcaaaaagagattttacgagcattgaaggccaaatgttgtgaggaggaactggactttagggctgtggtgatggatgaggtggtgctgacaatcgagcaaggaaacctgggtctgcggatcaatggagagctaatcactgcctacccacaagtggtggtagtcagagtaccaaccccttgggtgcaaagtgatagtgacatcactgttttgcgccatctagagaagatgggatgtcggttaatgaaccgacctcaagccatcctgaactgcgttaataagttctggacatttcaagagttggctggccatggtgttcctctgccggatactttctcttatggtggccacgaaaattttgctaaaatgattgatgaggctgaagttctggagttcccaatggtagtaaagaatacgcggggtcacagaggtaaagctgttttcttggctcgagataagcaccatttggctgatctaagccatcttattcgccatgaagcgccatacctgttccagaagtatgttaaagagtctcatggacgggatgtacgtgtcattgtcgtgggaggccgtgtggttggcaccatgttacgttgttcaacagatgggagaatgcaaagcaactgctcattaggtggtgtggggatgatgtgctcattgagtgaacaagggaagcagctagctatccaggtgtctaatatcctggggatggatgtgtgtggcattgacctgctgatgaaagatgacggctccttctgcgtctgtgaggccaatgcaaatgtaggtttcatcgcctttgataaggcttgtaatctagatgtagctggtatcatagcagactatgccgcctcccttctaccctctggccggctcacccggcgtatgtccctgctctccgtggtgtccactgccagtgagactagtgagccggagctgggtcccccagccagcactgctgttgacaacatgagtgcaagttccagctctgttgacagcgaccctgaaagcacggagcgagagctgctcaccaagctcccagggggcctgttcaacatgaaccagctgctagccaatgaaatcaaactactggtggactgactccactggtaattaaccaacaaaacccttgtaaaactttctttcttcttttctatttttaaaaccaacttgcaatgctgttcatggaggatgctcaggaagatgagagaaaattagtaggattagttggagagagtgggagatagatgagacctctgctagtaagatgttactttcatttacaaatcctacaaatagagaggcagaataggtggggtatagaaaaatgtcaggctctcatagttacccttttaaattgctaaaaaatgtgtatgctcataggccatgaggaacaaatactttttttttttcatggtcccttgcttttgtttttgtacaaaaaaaaatggttttgctacaaatatccaagtagcataacttcacattgtgttggaagatttgtcatcagtgaggaaaacatctgcttaaattacaggaatttttgtattatacagctctgaaaattctgccatttccttattaactagcagctttagtttgtagtttatgaaatcttgaggggctcttttactgggatttcttatttttttgttttttcccgcttaatttggtgggaggtcaaattgaatataacccaataaaggcttcttaatgacaaaattggcatgtttgcatgatgaaatggaaatgaacagtattgcaatgtccggtatacaaaataacattaattcaatgtagataaaattacactagtttaaaatatgtgcattcacttgtatttgttagtgttttagtcttttttgaaagatgtgctctgttaatgttgcttttttttttttttttaatacatgctagtctaacatttcctgctctatgcctgcatctttaacaatggccaaagtgaagaaaatgctaccttttttgttaacaagacactgacttgaaacatgtacatttaaagccttttattttttccctttttgttttggtagttgggcatttaaataaggacaaggaaaaatatttttgggggcaaatcaagagcctatgagttctaagtataaagctgaagtgatttcgaatgccagcgttatatatttgcatttttcacattttacgagggagtatatgtgtatgtgtgtgcacgcatgcatgtgtatgtgttttgctttttgtttccatcaactaatcaaaaaggataatttagaaaatggagcatgatgggaaacagagtttttgactttaaaaaacagatgagttgttttcataagtagactccactggggtagaggtattcaccttaaaacatagggtgagtagatgcttttttaggcctttttgtgtatatgtacgttgtttgtttttttccttttgtttctagcctgttcagtgtacagtttattcaaggctacatgcttttctttaatgcttctggctatgcattttctctttttacatataggatttgggattgggggtgggttggatgtttttgtttggggacttatttagtagtattgagtctcttatagccctactcttaagccttcaatactgtccactctttatattcctttacttgcagaatttataaaagcccccaaactgcatataatatgagcctttaaaacatgggtaaaactaatcccattgatgggtttggatggtatgttaagaaatggagatgctgcagagcccaacgtaattttttaaacagcaagttttccatctccctacgaatcctctgaagcttttacccaagccctttcttgcctctccagtgctattttccttcagatggaccttaaacataatttcttggacactactagagagacttcgaggcaataataaaagatcagtattaaccagctataacagaggtttgatcatgcttacttgtacagtttttcccccgttttaaaaaggaatgtaataaaatttgttttttccatagaattaaataatattaaaattgagtgaaaggttgattgttgatgaatagaatagtacctctcatctgtgcagtgtctcatttcacctcagagaaaaggatacataagaggagtttgtaatttatcttaggatattctaattgcatttaaaagaacttatcttgcgcagggtaaatgggggactcacatacatatattaatacctctgactcattaacagaaagaaatacttggtacttctttcgctgaatgaccatactgtggaggatgcatactatttggtatagagaaataaatgaggaagaaagaactgcttaattaaattatcattcatatgttcatatagagaccatctggttgccatgtgtattatgacacatacactttgaatagttacatatcacaagtatgtagttcatgtttgtgttggtggggtaaggcatcaggaaaaatgtagttagtcttttcttaacttataccaaattaaccaactatattataggaaatatgtgaaattagttcattagctttattcactattatgcattcacatgatattaaaacgtacactcacatgttagaatgaaaagagcagtagttatcttagattttaaaaacatggatatcttcttgaattccttcaagattgaggtagagaataagagcaaatcattctggaagtaccttaaggaaacaaacagcagcagatatttaggttaaacttattttcataattgtttaataacttttgtataatcttcattgctattatgagagagaatgtatatatcaaatatgtgtaatgataaaatctgaattgtaaaatttttgtatattgttaaaattgtaattctaaattgtatttcaaaaatgattatttctgatattgtttttatgtcacccatgatgaaaactggactttatatatctaaacatacaagtatgaactattctatttaaaatttttaatagtttttttcttttttggtgcctataattgattggtcatttctgctggcttttctccaatgaacattgaaatcttcctgtatatgttaccaataagaaaactaccctggaacagtagaaaaacccaacaagagacttggcattcatcaagcacattatcagactttgagaacatattgaaggcattgactttgaaaatcatctctttttctcaagaagaaagcaatggagaagcaaatttgtttcattcagtgaatccccagtttggggcttgtggggcttagagacattgtgaaatcaaatcttgtgttatacttttctcctggctcactttttttgagaaggtttatgggctatttggctggtgagacacgatcccctcctaagaaaatgtaggtgctcagacagccttttcaggagccaaaaaaacaaatacaaacaaacaaaaaaatacccagagaaaaaactttccttcttcccccttcctgatgatgagtgagaagtattgagaactttcggggtcagtgcccttctaaactccccttcccccaataatgcagctgtataatgaatggtaaatgcaccggtttggattcaggcacagccccagtctgcctacaggtggcgtatgtgttcgtgttttaatgtattcagagccattgggcaataagcagtccagaacattgaaaactcaagcagcagacaactaaactggtaggtggcagcagaggaaggaattcttcagattgatggctactgacttaaagtctgcataggagaagagatagagcatgacataccaagtgaagcaagggggacaaaaatggaaacaggactaagattcctgcattttgactctaaatggttcttttgaagtaaccagtgatcttttttgcttaccctcatcaacagaatggatgaagatagatttgactgtgtgctttttcaagtggagaatatgaatatacagaacaagaaagcaataactccaacctgtttgattccgtctgttttctaaataaagacactatgcgct

SEQ ID NO: 65980 - DNA, 6089 bp, Homo sapiens
ggcacgagggggagtgagagtgtgtgggagtggggtgagggagaagctgacgggacgcgaggctgtgagaaactgggcgagtgtgcgaggacgcccggccagcctgcgggagccgcagtcggcggaggagaaaggaggcggctcccggtatcccgaccccctccccctcctctccttcccccacttccagccgcccggcggcccgcgcttcctcgaaggccccagcccggctcagtcggccgagagcgagggaggagccccccgacccaggtgctggagtctgcttgtcagggaggggggcagtctgtgattctgagaacagagccaagaaggggaacagcaaattcagtcacagacaatcctccactcggtcaagagccacttttctcttcctgccttgcccccccgcagggggtaaggaactgagcgtttaatctttagccggttggctaccagctaaaattctacttatcttagtttctagtggatagctttcttattttgcccatgttttcttagaatccctgtttaatatacttttgtcagtagtagtatctaggagtagcagggagagtgacaataaattagccccttcttttttcccttgtcattcaggccccttttcctctccagagggaaattaccagtaaactcttctaaatcttccaccccttctcagtcatactgtgaagaaacacactaaagtggacattatttgaccagtgaacacgaacccagcttcaggcattggtttgttgtggcacatggagaaacatctcttttaaaatatctcccaattacccttttcacaatttgtatccacctaggatttgctgctggggtaagtcactagatttatttctcaaagctcccctctctatgagctgaaagactgaccaaccatgaacactagtaggggatggggaaaggggacagagcagagccagttgttccacactttgggaagcaggagtagcttttatcatcttcctctggggagcaggcatagagacataaactgagtgaaaatgggtggaggaagaacttctatacccacgaacaacatgtgaagagagagaaccaaacataaagtaaggagggtagacgttacatccaagaggaaataatccaggcaaggaagcacaagctgatcaagatgtgtagttctgtggctgccaagttgtggtttttgacagatcgtcgcatcagggaagactatcctcaaaaagagattttacgagcattgaaggccaaatgttgtgaggaggaactggactttagggctgtggtgatggatgaggtggtgctgacaatcgagcaaggaaacctgggtctgcggatcaatggagagctaatcactgcctacccacaagtggtggtagtcagagtaccaaccccttgggtgcaaagtgatagtgacatcactgttttgcgccatctagagaagatgggatgtcggttaatgaaccgacctcaagccatcctgaactgcgttaataagttctggacatttcaagagttggctggccatggtgttcctctgccggatactttctcttatggtggccacgaaaattttgctaaaatgattgatgaggctgaagttctggagttcccaatggtagtaaagaatacgcggggtcacagaggtaaagctgttttcttggctcgagataagcaccatttggctgatctaagccatcttattcgccatgaagcgccatacctgttccagaagtatgttaaagagtctcatggacgggatgtacgtgtcattgtcgtgggaggccgtgtggttggcaccatgttacgttgttcaacagatgggagaatgcaaagcaactgctcattaggtggtgtggggatgatgtgctcattgagtgaacaagggaagcagctagctatccaggtgtctaatatcctggggatggatgtgtgtggcattgacctgctgatgaaagatgacggctccttctgcgtctgtgaggccaatgcaaatgtaggtttcatcgcctttgataaggcttgtaatctagatgtagctggtatcatagcagactatgccgcctcccttctaccctctggccggctcacccggcgtatgtccctgctctccgtggtgtccactgccagtgagactagtgagccggagctgggtcccccagccagcactgctgttgacaacatgagtgcaagttccagctctgttgacagcgaccctgaaagcacggagcgagagctgctcaccaagctcccagggggcctgttcaacatgaaccagctgctagccaatgaaatcaaactactggtggactgactccactggtaattaaccaacaaaacccttgtaaaactttctttcttcttttctatttttaaaaccaacttgcaatgctgttcatggaggatgctcaggaagatgagagaaaattagtaggattagttggagagagtgggagatagatgagacctctgctagtaagatgttactttcatttacaaatcctacaaatagagaggcagaataggtggggtatagaaaaatgtcaggctctcatagttacccttttaaattgctaaaaaatgtgtatgctcataggccatgaggaacaaatactttttttttttcatggtcccttgcttttgtttttgtacaaaaaaaaatggttttgctacaaatatccaagtagcataacttcacattgtgttggaagatttgtcatcagtgaggaaaacatctgcttaaattacaggaatttttgtattatacagctctgaaaattctgccatttccttattaactagcagctttagtttgtagtttatgaaatcttgaggggctcttttactgggatttcttatttttttgttttttcccgcttaatttggtgggaggtcaaattgaatataacccaataaaggcttcttaatgacaaaattggcatgtttgcatgatgaaatggaaatgaacagtattgcaatgtccggtatacaaaataacattaattcaatgtagataaaattacactagtttaaaatatgtgcattcacttgtatttgttagtgttttagtcttttttgaaagatgtgctctgttaatgttgcttttttttttttttttaatacatgctagtctaacatttcctgctctatgcctgcatctttaacaatggccaaagtgaagaaaatgctaccttttttgttaacaagacactgacttgaaacatgtacatttaaagccttttattttttccctttttgttttggtagttgggcatttaaataaggacaaggaaaaatatttttgggggcaaatcaagagcctatgagttctaagtataaagctgaagtgatttcgaatgccagcgttatatatttgcatttttcacattttacgagggagtatatgtgtatgtgtgtgcacgcatgcatgtgtatgtgttttgctttttgtttccatcaactaatcaaaaaggataatttagaaaatggagcatgatgggaaacagagtttttgactttaaaaaacagatgagttgttttcataagtagactccactggggtagaggtattcaccttaaaacatagggtgagtagatgcttttttaggcctttttgtgtatatgtacgttgtttgtttttttccttttgtttctagcctgttcagtgtacagtttattcaaggctacatgcttttctttaatgcttctggctatgcattttctctttttacatataggatttgggattgggggtgggttggatgtttttgtttggggacttatttagtagtattgagtctcttatagccctactcttaagccttcaatactgtccactctttatattcctttacttgcagaatttataaaagcccccaaactgcatataatatgagcctttaaaacatgggtaaaactaatcccattgatgggtttggatggtatgttaagaaatggagatgctgcagagcccaacgtaattttttaaacagcaagttttccatctccctacgaatcctctgaagcttttacccaagccctttcttgcctctccagtgctattttccttcagatggaccttaaacataatttcttggacactactagagagacttcgaggcaataataaaagatcagtattaaccagctataacagaggtttgatcatgcttacttgtacagtttttcccccgttttaaaaaggaatgtaataaaatttgttttttccatagaattaaataatattaaaattgagtgaaaggttgattgttgatgaatagaatagtacctctcatctgtgcagtgtctcatttcacctcagagaaaaggatacataagaggagtttgtaatttatcttaggatattctaattgcatttaaaagaacttatcttgcgcagggtaaatgggggactcacatacatatattaatacctctgactcattaacagaaagaaatacttggtacttctttcgctgaatgaccatactgtggaggatgcatactatttggtatagagaaataaatgaggaagaaagaactgcttaattaaattatcattcatatgttcatatagagaccatctggttgccatgtgtattatgacacatacactttgaatagttacatatcacaagtatgtagttcatgtttgtgttggtggggtaaggcatcaggaaaaatgtagttagtcttttcttaacttataccaaattaaccaactatattataggaaatatgtgaaattagttcattagctttattcactattatgcattcacatgatattaaaacgtacactcacatgttagaatgaaaagagcagtagttatcttagattttaaaaacatggatatcttcttgaattccttcaagattgaggtagagaataagagcaaatcattctggaagtaccttaaggaaacaaacagcagcagatatttaggttaaacttattttcataattgtttaataacttttgtataatcttcattgctattatgagagagaatgtatatatcaaatatgtgtaatgataaaatctgaattgtaaaatttttgtatattgttaaaattgtaattctaaattgtatttcaaaaatgattatttctgatattgtttttatgtcacccatgatgaaaactggactttatatatctaaacatacaagtatgaactattctatttaaaatttttaatagtttttttcttttttggtgcctataattgattggtcatttctgctggcttttctccaatgaacattgaaatcttcctgtatatgttaccaataagaaaactaccctggaacagtagaaaaacccaacaagagacttggcattcatcaagcacattatcagactttgagaacatattgaaggcattgactttgaaaatcatctctttttctcaagaagaaagcaatggagaagcaaatttgtttcattcagtgaatccccagtttggggcttgtggggcttagagacattgtgaaatcaaatcttgtgttatacttttctcctggctcactttttttgagaaggtttatgggctatttggctggtgagacacgatcccctcctaagaaaatgtaggtgctcagacagccttttcaggagccaaaaaaacaaatacaaacaaacaaaaaaatacccagagaaaaaactttccttcttcccccttcctgatgatgagtgagaagtattgagaactttcggggtcagtgcccttctaaactccccttcccccaataatgcagctgtataatgaatggtaaatgcaccggtttggattcaggcacagccccagtctgcctacaggtaatttaactctttctcctttctttccatcactaggctaactttctttttttaaaacttcctttctttacgtactttaaaaagtaaccatgggtttgtcataattctcacttaaaaataatgcataaatgtatctagcaaataatatgattaaagaagagcttttgggggtaaagtttgacttggttatgatatactcaagacttgggaattttgtttagccatttagatgactccatttcttgcatatatgtctataattaagt

SEQ ID NO: 65981 - DNA, 1450 bp, Homo sapiens
tttttttttttcttcttaaaaaaacaaaacaaagtttcatttaaaatacatttaggcacctttggagcttggattttggaatgtttcagtagtggacagaaatctgctgttggaatcttctagtcttccaggtttaatttgaaatgtttttagttttgttttggatttttgtgtggtattttatttcctttataccaatgccattttgccatgctgttttggggtggctgcctaactctagtgaaaattctttctatattaatgaaagtttggcctttgaagatccttaatgttttgcattttttacattgtttttaaagaaatattctaactgcttgcactgttactgttctttaccagccttttcaggagccaaaaaaacaaatacaaacaaacaaaaaaatacccagagaaaaaactttccttcttcccccttcctgatgatgagtgagaagtattgagaactttcggggtcagtgcccttctaaactccccttcccccaataatgcagctgtataatgaatggtaaatgcaccggtttggattcaggcacagccccagtctgcctacaggtggcgtatgtgttcgtgttttaatgtattcagagccattgggcaataagcagtccagaacattgaaaactcaagcaggtaaagcacctaacacccttagtttctagaattactttaaaaaacttttatattgctgcatcttccacagttctttgggtagtctctgaacttaaaatttgtaggagttgtagactacctaaatttttaagttatggtatttgttcataggttgtaggggtaggtaaagaaggaaacagacaagaaaatggcttcttgaggtggcagctgctgagtggctaaatcttaccactttctttctactttttttggaaattttcccagcttagcatgaacatggatcatacagtgtttgattttatgtgattgagatttttgttttttatttttggagggaaggtcttggagaaacattaaaaagttggtgtatgtgcaaaaatacgaaatgttaaacaaaggaattttttcttatttaatctgaatggtaagcaagaactttttctatatacccttctgctgcagcagacaactaaactggtaggtggcagcagaggaaggaattcttcagattgatggctactgacttaaagtctgcataggagaagagatagagcatgacataccaagtgaagcaagggggacaaaaatggaaacaggactaagattcctgcattttgactctaaatggttcttttgaagtaaccagtgatcttttttgcttaccctcatcaacagaatggatgaagatagatttgactgtgtgctttttcaagtggagaatatgaatatacagaacaagaaagcaataactccaacctgtttgattccgtctgttttctaaataaagacactatgcgct

SEQ ID NO: 65982 - DNA, 930 bp, Homo sapiens
tttttttttttcttcttaaaaaaacaaaacaaagtttcatttaaaatacatttaggcacctttggagcttggattttggaatgtttcagtagtggacagaaatctgctgttggaatcttctagtcttccaggtttaatttgaaatgtttttagttttgttttggatttttgtgtggtattttatttcctttataccaatgccattttgccatgctgttttggggtggctgcctaactctagtgaaaattctttctatattaatgaaagtttggcctttgaagatccttaatgttttgcattttttacattgtttttaaagaaatattctaactgcttgcactgttactgttctttaccagccttttcaggagccaaaaaaacaaatacaaacaaacaaaaaaatacccagagaaaaaactttccttcttcccccttcctgatgatgagtgagaagtattgagaactttcggggtcagtgcccttctaaactccccttcccccaataatgcagctgtataatgaatggtaaatgcaccggtttggattcaggcacagccccagtctgcctacagcagacaactaaactggtaggtggcagcagaggaaggaattcttcagattgatggctactgacttaaagtctgcataggagaagagatagagcatgacataccaagtgaagcaagggggacaaaaatggaaacaggactaagattcctgcattttgactctaaatggttcttttgaagtaaccagtgatcttttttgcttaccctcatcaacagaatggatgaagatagatttgactgtgtgctttttcaagtggagaatatgaatatacagaacaagaaagcaataactccaacctgtttgattccgtctgttttctaaataaagacactatgcgctggaaataaaaaaaaaaaaag

SEQ ID NO: 65983 - DNA, 1044 bp, Homo sapiens
ctcctttcccctccccaccatgggaagaatttagaaccatatatcaaaaacagccacttccgttggcacagaaatagacaaatagagcagtggaacaggctagagaattcagaaataaattgaggtaaagctgttttcttggctcgagataagcaccatttggctgatctaagccatcttattcgccatgaagcgccatacctgttccagaagtatgttaaagagtctcatggacgggatgtacgtgtcattgtcgtgggaggccgtgtggttggcaccatgttacgttgttcaacagatgggagaatgcaaagcaactgctcattaggtggtgtggggatgatgtgctcattgagtgaacaagggaagcagctagctatccaggtgtctaatatcctggggatggatgtgtgtggcattgacctgctgatgaaagatgacggctccttctgcgtctgtgaggccaatgcaaatccttttcaggagccaaaaaaacaaatacaaacaaacaaaaaaatacccagagaaaaaactttccttcttcccccttcctgatgatgagtgagaagtattgagaactttcggggtcagtgcccttctaaactccccttcccccaataatgcagctgtataatgaatggtaaatgcaccggtttggattcaggcacagccccagtctgcctacagcagacaactaaactggtaggtggcagcagaggaaggaattcttcagattgatggctactgacttaaagtctgcataggagaagagatagagcatgacataccaagtgaagcaagggggacaaaaatggaaacaggactaagattcctgcattttgactctaaatggttcttttgaagtaaccagtgatcttttttgcttaccctcatcaacagaatggatgaagatagatttgactgtgtgctttttcaagtggagaatatgaatatacagaacaagaaagcaataactccaacctgtttgattccgtctgttttctaaataaagacactatgcgctggaaataaaaaaaaaaaaag

SEQ ID NO: 65984 - DNA, 1242 bp, Homo sapiens
tgccgggtagttctctccttcctttctctcctgccttcctttctcttgctgtctcgtccttttctttctttctctctttcttttctttctctccttccttctttccttcgctttctttctctctttccttcctttcgctccttttctccttttctttctttctctccttccttccttcctttctctccttctctctctctctctttctttctttccttcttcccccttcctgatgatgagtgagaagtattgagaactttcggggtcagtgcccttctaaactccccttcccccaataatgcagctgtataatgaatggtaaatgcaccggtttggattcaggcacagccccagtctgcctacaggtggcgtatgtgttcgtgttttaatgtattcagagccattgggcaataagcagtccagaacattgaaaactcaagcaggtaaagcacctaacacccttagtttctagaattactttaaaaaacttttatattgctgcatcttccacagttctttgggtagtctctgaacttaaaatttgtaggagttgtagactacctaaatttttaagttatggtatttgttcataggttgtaggggtaggtaaagaaggaaacagacaagaaaatggcttcttgaggtggcagctgctgagtggctaaatcttaccactttctttctactttttttggaaattttcccagcttagcatgaacatggatcatacagtgtttgattttatgtgattgagatttttgttttttatttttggagggaaggtcttggagaaacattaaaaagttggtgtatgtgcaaaaatacgaaatgttaaacaaaggaattttttcttatttaatctgaatggtaagcaagaactttttctatatacccttctgctgcagcagacaactaaactggtaggtggcagcagaggaaggaattcttcagattgatggctactgacttaaagtctgcataggagaagagatagagcatgacataccaagtgaagcaagggggacaaaaatggaaacaggactaagattcctgcattttgactctaaatggttcttttgaagtaaccagtgatcttttttgcttaccctcatcaacagaatggatgaagatagatttgactgtgtgctttttcaagtggagaatatgaatatacagaacaagaaagcaataactccaacctgtttgattccgtctgttttctaaataaagacactatgcgct

SEQ ID NO: 65985 - DNA, 3515 bp, Homo sapiens
ggcacgagggggagtgagagtgtgtgggagtggggtgagggagaagctgacgggacgcgaggctgtgagaaactgggcgagtgtgcgaggacgcccggccagcctgcgggagccgcagtcggcggaggagaaaggaggcggctcccggtatcccgaccccctccccctcctctccttcccccacttccagccgcccggcggcccgcgcttcctcgaaggccccagcccggctcagtcggccgagagcgagggaggagccccccgacccaggtgctggagtctgcttgtcagggaggggggcagtctgtgattctgagaacagagccaagaaggggaacagcaaattcagtcacagacaatcctccactcggtcaagagccacttttctcttcctgccttgcccccccgcagggggtaaggaactgagcgtttaatctttagccggttggctaccagctaaaattctacttatcttagtttctagtggatagctttcttattttgcccatgttttcttagaatccctgtttaatatacttttgtcagtagtagtatctaggagtagcagggagagtgacaataaattagccccttcttttttcccttgtcattcaggccccttttcctctccagagggaaattaccagtaaactcttctaaatcttccaccccttctcagtcatactgtgaagaaacacactaaagtggacattatttgaccagtgaacacgaacccagcttcaggcattggtttgttgtggcacatggagaaacatctcttttaaaatatctcccaattacccttttcacaatttgtatccacctaggatttgctgctggggtaagtcactagatttatttctcaaagctcccctctctatgagctgaaagactgaccaaccatgaacactagtaggggatggggaaaggggacagagcagagccagttgttccacactttgggaagcaggagtagcttttatcatcttcctctggggagcaggcatagagacataaactgagtgaaaatgggtggaggaagaacttctatacccacgaacaacatgtgaagagagagaaccaaacataaagtaaggagggtagacgttacatccaagaggaaataatccaggcaaggaagcacaagctgatcaagatgtgtagttctgtggctgccaagttgtggtttttgacagatcgtcgcatcagggaagactatcctcaaaaagagattttacgagcattgaaggccaaatgttgtgaggaggaactggactttagggctgtggtgatggatgaggtggtgctgacaatcgagcaaggaaacctgggtctgcggatcaatggagagctaatcactgcctacccacaagtggtggtagtcagagtaccaaccccttgggtgcaaagtgatagtgacatcactgttttgcgccatctagagaagatgggatgtcggttaatgaaccgacctcaagccatcctgaactgcgttaataagttctggacatttcaagagttggctggccatggtgttcctctgccggatactttctcttatggtggccacgaaaattttgctaaaatgattgatgaggctgaagttctggagttcccaatggtagtaaagaatacgcggggtcacagaggtaaagctgttttcttggctcgagataagcaccatttggctgatctaagccatcttattcgccatgaagcgccatacctgttccagaagtatgttaaagagtctcatggacgggatgtacgtgtcattgtcgtgggaggccgtgtggttggcaccatgttacgttgttcaacagatgggagaatgcaaagcaactgctcattaggtggtgtggggatgatgtgctcattgagtgaacaagggaagcagctagctatccaggtgtctaatatcctggggatggatgtgtgtggcattgacctgctgatgaaagatgacggctccttctgcgtctgtgaggccaatgcaaatgtaggtttcatcgcctttgataaggcttgtaatctagatgtagctggtatcatagcagactatgccgcctcccttctaccctctggccggctcacccggcgtatgtccctgctctccgtggtgtccactgccagtgagactagtgagccggagctgggtcccccagccagcactgctgttgacaacatgagtgcaagttccagctctgttgacagcgaccctgaaagcacggagcgagagctgctcaccaagctcccagggggcctgttcaacatgaaccagctgctagccaatgaaatcaaactactggtggactgactccactggtaattaaccaacaaaacccttgtaaaactttctttcttcttttctatttttaaaaccaacttgcaatgctgttcatggaggatgctcaggaagatgagagaaaattagtaggattagttggagagagtgggagatagatgagacctctgctagtaagatgttactttcatttacaaatcctacaaatagagaggcagaataggtggggtatagaaaaatgtcaggctctcatagttacccttttaaattgctaaaaaatgtgtatgctcataggccatgaggaacaaatactttttttttttcatggtcccttgcttttgtttttgtacaaaaaaaaatggttttgctacaaatatccaagtagcataacttcacattgtgttggaagatttgtcatcagtgaggaaaacatctgcttaaattacaggaatttttgtattatacagctctgaaaattctgccatttccttattaactagcagctttagtttgtagtttatgaaatcttgaggggctcttttactgggatttcttatttttttgttttttcccgcttaatttggtgggaggtcaaattgaatataacccaataaaggcttcttaatgacaaaattggcatgtttgcatgatgaaatggaaatgaacagtattgcaatgtccggtatacaaaataacattaattcaatgtagataaaattacactagtttaaaatatgtgcattcacttgtatttgttagtgttttagtcttttttgaaagatgtgctctgttaatgttgcttttttttttttttttaatacatgctagtctaacatttcctgctctatgcctgcatctttaacaatggccaaagtgaagaaaatgctaccttttttgttaacaagacactgacttgaaacatgtacatttaaagccttttattttttccctttttgttttggtagttgggcatttaaataaggacaaggaaaaatatttttgggggcaaatcaagagcctatgagttctaagtataaagctgaagtgatttcgaatgccagcgttatatatttgcatttttcacattttacgagggagtatatgtgtatgtgtgtgcacgcatgcatgtgtatgtgttttgctttttgtttccatcaactaatcaaaaaggataacacgttcgcgagggtaccggctcgattcgtatcgg

SEQ ID NO: 65986 - DNA, 440 bp, Homo sapiens
tgctggtgttctagaggatcccagtgtcatgtattcagagccattgggcaataagcagtccagaacattgaaaactcaagcagcagacaactaaactggtaggtggcagcagaggaaggaattcttcagattgatggctactgacttaaagtctgcataggagaagagatagagcatgacataccaagtgaagcaagggggacaaaaatggaaacaggactaagattcctgcattttgactctaaatggttcttttgaagtaaccagtgatcttttttgcttaccctcatcaacagaatggatgaagatagatttgactgtgtgctttttcaagtggagaatatgaatatacagaacaagaaagcaataactccaacctgtttgattccgtctgttttctaaataaagacactatgcgctggaaataaaaaaaaaaaaag

SEQ ID NO: 65987 - DNA, 413 bp, Homo sapiens
ttgcctctaggtggtactccatccaagaactttttctatatacccttctgctgcagcagacaactaaactggtaggtggcagcagaggaaggaattcttcagattgatggctactgacttaaagtctgcataggagaagagatagagcatgacataccaagtgaagcaagggggacaaaaatggaaacaggactaagattcctgcattttgactctaaatggttcttttgaagtaaccagtgatcttttttgcttaccctcatcaacagaatggatgaagatagatttgactgtgtgctttttcaagtggagaatatgaatatacagaacaagaaagcaataactccaacctgtttgattccgtctgttttctaaataaagacactatgcgctggaaataaaaaaaaaaaaag

SEQ ID NO: 65988 - DNA, 442 bp, Homo sapiens
ttgtaaaacagtaatagatttagcttttattttttaatgataagaacattaaatgtcttctaagtcagaatcagagtatatctttgttaactgagctcaccaagacaaagtgataataacacaaaactgtggtttttggtagtctaatcaatttagaatgttttattgtcatgttagttgattttctgtctttatttgtattttttcttatcctggttatagagacttttaaaatctatgatttaaataagttgtgtttttcccccctaggttcttttgaagtaaccagtgatcttttttgcttaccctcatcaacagaatggatgaagatagatttgactgtgtgctttttcaagtggagaatatgaatatacagaacaagaaagcaataactccaacctgtttgattccgtctgttttctaaataaagacactatgcgct

SEQ ID NO: 65989 - DNA, 5728 bp, Homo sapiens
ggcacgagggggagtgagagtgtgtgggagtggggtgagggagaagctgacgggacgcgaggctgtgagaaactgggcgagtgtgcgaggacgcccggccagcctgcgggagccgcagtcggcggaggagaaaggaggcggctcccggtatcccgaccccctccccctcctctccttcccccacttccagccgcccggcggcccgcgcttcctcgaaggccccagcccggctcagtcggccgagagcgagggaggagccccccgacccaggtgctggagtctgcttgtcagggaggggggcagtctgtgattctgagaacagagccaagaaggggaacagcaaattcagtcacagacaatcctccactcggtcaagagccacttttctcttcctgccttgcccccccgcagggggtaaggaactgagcgtttaatctttagccggttggctaccagctaaaattctacttatcttagtttctagtggatagctttcttattttgcccatgttttcttagaatccctgtttaatatacttttgtcagtagtagtatctaggagtagcagggagagtgacaataaattagccccttcttttttcccttgtcattcaggccccttttcctctccagagggaaattaccagtaaactcttctaaatcttccaccccttctcagtcatactgtgaagaaacacactaaagtggacattatttgaccagtgaacacgaacccagcttcaggcattggtttgttgtggcacatggagaaacatctcttttaaaatatctcccaattacccttttcacaatttgtatccacctaggatttgctgctggggtaagtcactagatttatttctcaaagctcccctctctatgagctgaaagactgaccaaccatgaacactagtaggggatggggaaaggggacagagcagagccagttgttccacactttgggaagcaggagtagcttttatcatcttcctctggggagcaggcatagagacataaactgagtgaaaatgggtggaggaagaacttctatacccacgaacaacatgtgaagagagagaaccaaacataaagtaaggagggtagacgttacatccaagaggaaataatccaggcaaggaagcacaagctgatcaagatgtgtagttctgtggctgccaagttgtggtttttgacagatcgtcgcatcagggaagactatcctcaaaaagagattttacgagcattgaaggccaaatgttgtgaggaggaactggactttagggctgtggtgatggatgaggtggtgctgacaatcgagcaaggaaacctgggtctgcggatcaatggagagctaatcactgcctacccacaagtggtggtagtcagagtaccaaccccttgggtgcaaagtgatagtgacatcactgttttgcgccatctagagaagatgggatgtcggttaatgaaccgacctcaagccatcctgaactgcgttaataagttctggacatttcaagagttggctggccatggtgttcctctgccggatactttctcttatggtggccacgaaaattttgctaaaatgattgatgaggctgaagttctggagttcccaatggtagtaaagaatacgcggggtcacagaggtaaagctgttttcttggctcgagataagcaccatttggctgatctaagccatcttattcgccatgaagcgccatacctgttccagaagtatgttaaagagtctcatggacgggatgtacgtgtcattgtcgtgggaggccgtgtggttggcaccatgttacgttgttcaacagatgggagaatgcaaagcaactgctcattaggtggtgtggggatgatgtgctcattgagtgaacaagggaagcagctagctatccaggtgtctaatatcctggggatggatgtgtgtggcattgacctgctgatgaaagatgacggctccttctgcgtctgtgaggccaatgcaaatgtaggtttcatcgcctttgataaggcttgtaatctagatgtagctggtatcatagcagactatgccgcctcccttctaccctctggccggctcacccggcgtatgtccctgctctccgtggtgtccactgccagtgagactagtgagccggagctgggtcccccagccagcactgctgttgacaacatgagtgcaagttccagctctgttgacagcgaccctgaaagcacggagcgagagctgctcaccaagctcccagggggcctgttcaacatgaaccagctgctagccaatgaaatcaaactactggtggactgactccactggtaattaaccaacaaaacccttgtaaaactttctttcttcttttctatttttaaaaccaacttgcaatgctgttcatggaggatgctcaggaagatgagagaaaattagtaggattagttggagagagtgggagatagatgagacctctgctagtaagatgttactttcatttacaaatcctacaaatagagaggcagaataggtggggtatagaaaaatgtcaggctctcatagttacccttttaaattgctaaaaaatgtgtatgctcataggccatgaggaacaaatactttttttttttcatggtcccttgcttttgtttttgtacaaaaaaaaatggttttgctacaaatatccaagtagcataacttcacattgtgttggaagatttgtcatcagtgaggaaaacatctgcttaaattacaggaatttttgtattatacagctctgaaaattctgccatttccttattaactagcagctttagtttgtagtttatgaaatcttgaggggctcttttactgggatttcttatttttttgttttttcccgcttaatttggtgggaggtcaaattgaatataacccaataaaggcttcttaatgacaaaattggcatgtttgcatgatgaaatggaaatgaacagtattgcaatgtccggtatacaaaataacattaattcaatgtagataaaattacactagtttaaaatatgtgcattcacttgtatttgttagtgttttagtcttttttgaaagatgtgctctgttaatgttgcttttttttttttttttaatacatgctagtctaacatttcctgctctatgcctgcatctttaacaatggccaaagtgaagaaaatgctaccttttttgttaacaagacactgacttgaaacatgtacatttaaagccttttattttttccctttttgttttggtagttgggcatttaaataaggacaaggaaaaatatttttgggggcaaatcaagagcctatgagttctaagtataaagctgaagtgatttcgaatgccagcgttatatatttgcatttttcacattttacgagggagtatatgtgtatgtgtgtgcacgcatgcatgtgtatgtgttttgctttttgtttccatcaactaatcaaaaaggataatttagaaaatggagcatgatgggaaacagagtttttgactttaaaaaacagatgagttgttttcataagtagactccactggggtagaggtattcaccttaaaacatagggtgagtagatgcttttttaggcctttttgtgtatatgtacgttgtttgtttttttccttttgtttctagcctgttcagtgtacagtttattcaaggctacatgcttttctttaatgcttctggctatgcattttctctttttacatataggatttgggattgggggtgggttggatgtttttgtttggggacttatttagtagtattgagtctcttatagccctactcttaagccttcaatactgtccactctttatattcctttacttgcagaatttataaaagcccccaaactgcatataatatgagcctttaaaacatgggtaaaactaatcccattgatgggtttggatggtatgttaagaaatggagatgctgcagagcccaacgtaattttttaaacagcaagttttccatctccctacgaatcctctgaagcttttacccaagccctttcttgcctctccagtgctattttccttcagatggaccttaaacataatttcttggacactactagagagacttcgaggcaataataaaagatcagtattaaccagctataacagaggtttgatcatgcttacttgtacagtttttcccccgttttaaaaaggaatgtaataaaatttgttttttccatagaattaaataatattaaaattgagtgaaaggttgattgttgatgaatagaatagtacctctcatctgtgcagtgtctcatttcacctcagagaaaaggatacataagaggagtttgtaatttatcttaggatattctaattgcatttaaaagaacttatcttgcgcagggtaaatgggggactcacatacatatattaatacctctgactcattaacagaaagaaatacttggtacttctttcgctgaatgaccatactgtggaggatgcatactatttggtatagagaaataaatgaggaagaaagaactgcttaattaaattatcattcatatgttcatatagagaccatctggttgccatgtgtattatgacacatacactttgaatagttacatatcacaagtatgtagttcatgtttgtgttggtggggtaaggcatcaggaaaaatgtagttagtcttttcttaacttataccaaattaaccaactatattataggaaatatgtgaaattagttcattagctttattcactattatgcattcacatgatattaaaacgtacactcacatgttagaatgaaaagagcagtagttatcttagattttaaaaacatggatatcttcttgaattccttcaagattgaggtagagaataagagcaaatcattctggaagtaccttaaggaaacaaacagcagcagatatttaggttaaacttattttcataattgtttaataacttttgtataatcttcattgctattatgagagagaatgtatatatcaaatatgtgtaatgataaaatctgaattgtaaaatttttgtatattgttaaaattgtaattctaaattgtatttcaaaaatgattatttctgatattgtttttatgtcacccatgatgaaaactggactttatatatctaaacatacaagtatgaactattctatttaaaatttttaatagtttttttcttttttggtgcctataattgattggtcatttctgctggcttttctccaatgaacattgaaatcttcctgtatatgttaccaataagaaaactaccctggaacagtagaaaaacccaacaagagacttggcattcatcaagcacattatcagactttgagaacatattgaaggcattgactttgaaaatcatctctttttctcaagaagaaagcaatggagaagcaaatttgtttcattcagtgaatccccagtttggggcttgtggggcttagagacattgtgaaatcaaatcttgtgttatacttttctcctggctcactttttttgagaaggtttatgggctatttggctggtgagacacgatcccctcctaagaaaatgtaggtgctcagacaggtaaccactgctgctactgtttttatttgtttgtttgttcaattttatttaagatttgtttttgttgtactaggattttaaaaaatgtaatatattgcaggatttataaccaggatca

SEQ ID NO: 65990 - DNA, 6180 bp, Homo sapiens
ggcacgagggggagtgagagtgtgtgggagtggggtgagggagaagctgacgggacgcgaggctgtgagaaactgggcgagtgtgcgaggacgcccggccagcctgcgggagccgcagtcggcggaggagaaaggaggcggctcccggtatcccgaccccctccccctcctctccttcccccacttccagccgcccggcggcccgcgcttcctcgaaggccccagcccggctcagtcggccgagagcgagggaggagccccccgacccaggtgctggagtctgcttgtcagggaggggggcagtctgtgattctgagaacagagccaagaaggggaacagcaaattcagtcacagacaatcctccactcggtcaagagccacttttctcttcctgccttgcccccccgcagggggtaaggaactgagcgtttaatctttagccggttggctaccagctaaaattctacttatcttagtttctagtggatagctttcttattttgcccatgttttcttagaatccctgtttaatatacttttgtcagtagtagtatctaggagtagcagggagagtgacaataaattagccccttcttttttcccttgtcattcaggccccttttcctctccagagggaaattaccagtaaactcttctaaatcttccaccccttctcagtcatactgtgaagaaacacactaaagtggacattatttgaccagtgaacacgaacccagcttcaggcattggtttgttgtggcacatggagaaacatctcttttaaaatatctcccaattacccttttcacaatttgtatccacctaggatttgctgctggggtaagtcactagatttatttctcaaagctcccctctctatgagctgaaagactgaccaaccatgaacactagtaggggatggggaaaggggacagagcagagccagttgttccacactttgggaagcaggagtagcttttatcatcttcctctggggagcaggcatagagacataaactgagtgaaaatgggtggaggaagaacttctatacccacgaacaacatgtgaagagagagaaccaaacataaagtaaggagggtagacgttacatccaagaggaaataatccaggcaaggaagcacaagctgatcaagatgtgtagttctgtggctgccaagttgtggtttttgacagatcgtcgcatcagggaagactatcctcaaaaagagattttacgagcattgaaggccaaatgttgtgaggaggaactggactttagggctgtggtgatggatgaggtggtgctgacaatcgagcaaggaaacctgggtctgcggatcaatggagagctaatcactgcctacccacaagtggtggtagtcagagtaccaaccccttgggtgcaaagtgatagtgacatcactgttttgcgccatctagagaagatgggatgtcggttaatgaaccgacctcaagccatcctgaactgcgttaataagttctggacatttcaagagttggctggccatggtgttcctctgccggatactttctcttatggtggccacgaaaattttgctaaaatgattgatgaggctgaagttctggagttcccaatggtagtaaagaatacgcggggtcacagaggtaaagctgttttcttggctcgagataagcaccatttggctgatctaagccatcttattcgccatgaagcgccatacctgttccagaagtatgttaaagagtctcatggacgggatgtacgtgtcattgtcgtgggaggccgtgtggttggcaccatgttacgttgttcaacagatgggagaatgcaaagcaactgctcattaggtggtgtggggatgatgtgctcattgagtgaacaagggaagcagctagctatccaggtgtctaatatcctggggatggatgtgtgtggcattgacctgctgatgaaagatgacggctccttctgcgtctgtgaggccaatgcaaatgtaggtttcatcgcctttgataaggcttgtaatctagatgtagctggtatcatagcagactatgccgcctcccttctaccctctggccggctcacccggcgtatgtccctgctctccgtggtgtccactgccagtgagactagtgagccggagctgggtcccccagccagcactgctgttgacaacatgagtgcaagttccagctctgttgacagcgaccctgaaagcacggagcgagagctgctcaccaagctcccagggggcctgttcaacatgaaccagctgctagccaatgaaatcaaactactggtggactgactccactggtaattaaccaacaaaacccttgtaaaactttctttcttcttttctatttttaaaaccaacttgcaatgctgttcatggaggatgctcaggaagatgagagaaaattagtaggattagttggagagagtgggagatagatgagacctctgctagtaagatgttactttcatttacaaatcctacaaatagagaggcagaataggtggggtatagaaaaatgtcaggctctcatagttacccttttaaattgctaaaaaatgtgtatgctcataggccatgaggaacaaatactttttttttttcatggtcccttgcttttgtttttgtacaaaaaaaaatggttttgctacaaatatccaagtagcataacttcacattgtgttggaagatttgtcatcagtgaggaaaacatctgcttaaattacaggaatttttgtattatacagctctgaaaattctgccatttccttattaactagcagctttagtttgtagtttatgaaatcttgaggggctcttttactgggatttcttatttttttgttttttcccgcttaatttggtgggaggtcaaattgaatataacccaataaaggcttcttaatgacaaaattggcatgtttgcatgatgaaatggaaatgaacagtattgcaatgtccggtatacaaaataacattaattcaatgtagataaaattacactagtttaaaatatgtgcattcacttgtatttgttagtgttttagtcttttttgaaagatgtgctctgttaatgttgcttttttttttttttttaatacatgctagtctaacatttcctgctctatgcctgcatctttaacaatggccaaagtgaagaaaatgctaccttttttgttaacaagacactgacttgaaacatgtacatttaaagccttttattttttccctttttgttttggtagttgggcatttaaataaggacaaggaaaaatatttttgggggcaaatcaagagcctatgagttctaagtataaagctgaagtgatttcgaatgccagcgttatatatttgcatttttcacattttacgagggagtatatgtgtatgtgtgtgcacgcatgcatgtgtatgtgttttgctttttgtttccatcaactaatcaaaaaggataatttagaaaatggagcatgatgggaaacagagtttttgactttaaaaaacagatgagttgttttcataagtagactccactggggtagaggtattcaccttaaaacatagggtgagtagatgcttttttaggcctttttgtgtatatgtacgttgtttgtttttttccttttgtttctagcctgttcagtgtacagtttattcaaggctacatgcttttctttaatgcttctggctatgcattttctctttttacatataggatttgggattgggggtgggttggatgtttttgtttggggacttatttagtagtattgagtctcttatagccctactcttaagccttcaatactgtccactctttatattcctttacttgcagaatttataaaagcccccaaactgcatataatatgagcctttaaaacatgggtaaaactaatcccattgatgggtttggatggtatgttaagaaatggagatgctgcagagcccaacgtaattttttaaacagcaagttttccatctccctacgaatcctctgaagcttttacccaagccctttcttgcctctccagtgctattttccttcagatggaccttaaacataatttcttggacactactagagagacttcgaggcaataataaaagatcagtattaaccagctataacagaggtttgatcatgcttacttgtacagtttttcccccgttttaaaaaggaatgtaataaaatttgttttttccatagaattaaataatattaaaattgagtgaaaggttgattgttgatgaatagaatagtacctctcatctgtgcagtgtctcatttcacctcagagaaaaggatacataagaggagtttgtaatttatcttaggatattctaattgcatttaaaagaacttatcttgcgcagggtaaatgggggactcacatacatatattaatacctctgactcattaacagaaagaaatacttggtacttctttcgctgaatgaccatactgtggaggatgcatactatttggtatagagaaataaatgaggaagaaagaactgcttaattaaattatcattcatatgttcatatagagaccatctggttgccatgtgtattatgacacatacactttgaatagttacatatcacaagtatgtagttcatgtttgtgttggtggggtaaggcatcaggaaaaatgtagttagtcttttcttaacttataccaaattaaccaactatattataggaaatatgtgaaattagttcattagctttattcactattatgcattcacatgatattaaaacgtacactcacatgttagaatgaaaagagcagtagttatcttagattttaaaaacatggatatcttcttgaattccttcaagattgaggtagagaataagagcaaatcattctggaagtaccttaaggaaacaaacagcagcagatatttaggttaaacttattttcataattgtttaataacttttgtataatcttcattgctattatgagagagaatgtatatatcaaatatgtgtaatgataaaatctgaattgtaaaatttttgtatattgttaaaattgtaattctaaattgtatttcaaaaatgattatttctgatattgtttttatgtcacccatgatgaaaactggactttatatatctaaacatacaagtatgaactattctatttaaaatttttaatagtttttttcttttttggtgcctataattgattggtcatttctgctggcttttctccaatgaacattgaaatcttcctgtatatgttaccaataagaaaactaccctggaacagtagaaaaacccaacaagagacttggcattcatcaagcacattatcagactttgagaacatattgaaggcattgactttgaaaatcatctctttttctcaagaagaaagcaatggagaagcaaatttgtttcattcagtgaatccccagtttggggcttgtggggcttagagacattgtgaaatcaaatcttgtgttatacttttctcctggctcactttttttgagaaggtttatgggctatttggctggtgagacacgatcccctcctaagaaaatgtaggtgctcagacagccttttcaggagccaaaaaaacaaatacaaacaaacaaaaaaatacccagagaaaaaactttccttcttcccccttcctgatgatgagtgagaagtattgagaactttcggggtcagtgcccttctaaactccccttcccccaataatgcagctgtataatgaatggtaaatgcaccggtttggattcaggcacagccccagtctgcctacagcagacaactaaactggtaggtggcagcagaggaaggaattcttcagattgatggctactgacttaaagtctgcataggagaagagatagagcatgacataccaagtgaagcaagggggacaaaaatggaaacaggactaagattcctgcattttgactctaaatggttcttttgaagtaaccagtgatcttttttgcttaccctcatcaacagaatggatgaagatagatttgactgtgtgctttttcaagtggagaatatgaatatacagaacaagaaagcaataactccaacctgtttgattccgtctgttttctaaataaagacactatgcgctggaaataaaaaaaaaaaaag

SEQ ID NO: 65991 - DNA, 6672 bp, Homo sapiens
ggcacgagggggagtgagagtgtgtgggagtggggtgagggagaagctgacgggacgcgaggctgtgagaaactgggcgagtgtgcgaggacgcccggccagcctgcgggagccgcagtcggcggaggagaaaggaggcggctcccggtatcccgaccccctccccctcctctccttcccccacttccagccgcccggcggcccgcgcttcctcgaaggccccagcccggctcagtcggccgagagcgagggaggagccccccgacccaggtgctggagtctgcttgtcagggaggggggcagtctgtgattctgagaacagagccaagaaggggaacagcaaattcagtcacagacaatcctccactcggtcaagagccacttttctcttcctgccttgcccccccgcagggggtaaggaactgagcgtttaatctttagccggttggctaccagctaaaattctacttatcttagtttctagtggatagctttcttattttgcccatgttttcttagaatccctgtttaatatacttttgtcagtagtagtatctaggagtagcagggagagtgacaataaattagccccttcttttttcccttgtcattcaggccccttttcctctccagagggaaattaccagtaaactcttctaaatcttccaccccttctcagtcatactgtgaagaaacacactaaagtggacattatttgaccagtgaacacgaacccagcttcaggcattggtttgttgtggcacatggagaaacatctcttttaaaatatctcccaattacccttttcacaatttgtatccacctaggatttgctgctggggtaagtcactagatttatttctcaaagctcccctctctatgagctgaaagactgaccaaccatgaacactagtaggggatggggaaaggggacagagcagagccagttgttccacactttgggaagcaggagtagcttttatcatcttcctctggggagcaggcatagagacataaactgagtgaaaatgggtggaggaagaacttctatacccacgaacaacatgtgaagagagagaaccaaacataaagtaaggagggtagacgttacatccaagaggaaataatccaggcaaggaagcacaagctgatcaagatgtgtagttctgtggctgccaagttgtggtttttgacagatcgtcgcatcagggaagactatcctcaaaaagagattttacgagcattgaaggccaaatgttgtgaggaggaactggactttagggctgtggtgatggatgaggtggtgctgacaatcgagcaaggaaacctgggtctgcggatcaatggagagctaatcactgcctacccacaagtggtggtagtcagagtaccaaccccttgggtgcaaagtgatagtgacatcactgttttgcgccatctagagaagatgggatgtcggttaatgaaccgacctcaagccatcctgaactgcgttaataagttctggacatttcaagagttggctggccatggtgttcctctgccggatactttctcttatggtggccacgaaaattttgctaaaatgattgatgaggctgaagttctggagttcccaatggtagtaaagaatacgcggggtcacagaggtaaagctgttttcttggctcgagataagcaccatttggctgatctaagccatcttattcgccatgaagcgccatacctgttccagaagtatgttaaagagtctcatggacgggatgtacgtgtcattgtcgtgggaggccgtgtggttggcaccatgttacgttgttcaacagatgggagaatgcaaagcaactgctcattaggtggtgtggggatgatgtgctcattgagtgaacaagggaagcagctagctatccaggtgtctaatatcctggggatggatgtgtgtggcattgacctgctgatgaaagatgacggctccttctgcgtctgtgaggccaatgcaaatgtaggtttcatcgcctttgataaggcttgtaatctagatgtagctggtatcatagcagactatgccgcctcccttctaccctctggccggctcacccggcgtatgtccctgctctccgtggtgtccactgccagtgagactagtgagccggagctgggtcccccagccagcactgctgttgacaacatgagtgcaagttccagctctgttgacagcgaccctgaaagcacggagcgagagctgctcaccaagctcccagggggcctgttcaacatgaaccagctgctagccaatgaaatcaaactactggtggactgactccactggtaattaaccaacaaaacccttgtaaaactttctttcttcttttctatttttaaaaccaacttgcaatgctgttcatggaggatgctcaggaagatgagagaaaattagtaggattagttggagagagtgggagatagatgagacctctgctagtaagatgttactttcatttacaaatcctacaaatagagaggcagaataggtggggtatagaaaaatgtcaggctctcatagttacccttttaaattgctaaaaaatgtgtatgctcataggccatgaggaacaaatactttttttttttcatggtcccttgcttttgtttttgtacaaaaaaaaatggttttgctacaaatatccaagtagcataacttcacattgtgttggaagatttgtcatcagtgaggaaaacatctgcttaaattacaggaatttttgtattatacagctctgaaaattctgccatttccttattaactagcagctttagtttgtagtttatgaaatcttgaggggctcttttactgggatttcttatttttttgttttttcccgcttaatttggtgggaggtcaaattgaatataacccaataaaggcttcttaatgacaaaattggcatgtttgcatgatgaaatggaaatgaacagtattgcaatgtccggtatacaaaataacattaattcaatgtagataaaattacactagtttaaaatatgtgcattcacttgtatttgttagtgttttagtcttttttgaaagatgtgctctgttaatgttgcttttttttttttttttaatacatgctagtctaacatttcctgctctatgcctgcatctttaacaatggccaaagtgaagaaaatgctaccttttttgttaacaagacactgacttgaaacatgtacatttaaagccttttattttttccctttttgttttggtagttgggcatttaaataaggacaaggaaaaatatttttgggggcaaatcaagagcctatgagttctaagtataaagctgaagtgatttcgaatgccagcgttatatatttgcatttttcacattttacgagggagtatatgtgtatgtgtgtgcacgcatgcatgtgtatgtgttttgctttttgtttccatcaactaatcaaaaaggataatttagaaaatggagcatgatgggaaacagagtttttgactttaaaaaacagatgagttgttttcataagtagactccactggggtagaggtattcaccttaaaacatagggtgagtagatgcttttttaggcctttttgtgtatatgtacgttgtttgtttttttccttttgtttctagcctgttcagtgtacagtttattcaaggctacatgcttttctttaatgcttctggctatgcattttctctttttacatataggatttgggattgggggtgggttggatgtttttgtttggggacttatttagtagtattgagtctcttatagccctactcttaagccttcaatactgtccactctttatattcctttacttgcagaatttataaaagcccccaaactgcatataatatgagcctttaaaacatgggtaaaactaatcccattgatgggtttggatggtatgttaagaaatggagatgctgcagagcccaacgtaattttttaaacagcaagttttccatctccctacgaatcctctgaagcttttacccaagccctttcttgcctctccagtgctattttccttcagatggaccttaaacataatttcttggacactactagagagacttcgaggcaataataaaagatcagtattaaccagctataacagaggtttgatcatgcttacttgtacagtttttcccccgttttaaaaaggaatgtaataaaatttgttttttccatagaattaaataatattaaaattgagtgaaaggttgattgttgatgaatagaatagtacctctcatctgtgcagtgtctcatttcacctcagagaaaaggatacataagaggagtttgtaatttatcttaggatattctaattgcatttaaaagaacttatcttgcgcagggtaaatgggggactcacatacatatattaatacctctgactcattaacagaaagaaatacttggtacttctttcgctgaatgaccatactgtggaggatgcatactatttggtatagagaaataaatgaggaagaaagaactgcttaattaaattatcattcatatgttcatatagagaccatctggttgccatgtgtattatgacacatacactttgaatagttacatatcacaagtatgtagttcatgtttgtgttggtggggtaaggcatcaggaaaaatgtagttagtcttttcttaacttataccaaattaaccaactatattataggaaatatgtgaaattagttcattagctttattcactattatgcattcacatgatattaaaacgtacactcacatgttagaatgaaaagagcagtagttatcttagattttaaaaacatggatatcttcttgaattccttcaagattgaggtagagaataagagcaaatcattctggaagtaccttaaggaaacaaacagcagcagatatttaggttaaacttattttcataattgtttaataacttttgtataatcttcattgctattatgagagagaatgtatatatcaaatatgtgtaatgataaaatctgaattgtaaaatttttgtatattgttaaaattgtaattctaaattgtatttcaaaaatgattatttctgatattgtttttatgtcacccatgatgaaaactggactttatatatctaaacatacaagtatgaactattctatttaaaatttttaatagtttttttcttttttggtgcctataattgattggtcatttctgctggcttttctccaatgaacattgaaatcttcctgtatatgttaccaataagaaaactaccctggaacagtagaaaaacccaacaagagacttggcattcatcaagcacattatcagactttgagaacatattgaaggcattgactttgaaaatcatctctttttctcaagaagaaagcaatggagaagcaaatttgtttcattcagtgaatccccagtttggggcttgtggggcttagagacattgtgaaatcaaatcttgtgttatacttttctcctggctcactttttttgagaaggtttatgggctatttggctggtgagacacgatcccctcctaagaaaatgtaggtgctcagacagccttttcaggagccaaaaaaacaaatacaaacaaacaaaaaaatacccagagaaaaaactttccttcttcccccttcctgatgatgagtgagaagtattgagaactttcggggtcagtgcccttctaaactccccttcccccaataatgcagctgtataatgaatggtaaatgcaccggtttggattcaggcacagccccagtctgcctacaggtggcgtatgtgttcgtgttttaatgtattcagagccattgggcaataagcagtccagaacattgaaaactcaagcaggtaaagcacctaacacccttagtttctagaattactttaaaaaacttttatattgctgcatcttccacagttctttgggtagtctctgaacttaaaatttgtaggagttgtagactacctaaatttttaagttatggtatttgttcataggttgtaggggtaggtaaagaaggaaacagacaagaaaatggcttcttgaggtggcagctgctgagtggctaaatcttaccactttctttctactttttttggaaattttcccagcttagcatgaacatggatcatacagtgtttgattttatgtgattgagatttttgttttttatttttggagggaaggtcttggagaaacattaaaaagttggtgtatgtgcaaaaatacgaaatgttaaacaaaggaattttttcttatttaatctgaatggtaagcaagaactttttctatatacccttctgctgcagcagacaactaaactggtaggtggcagcagaggaaggaattcttcagattgatggctactgacttaaagtctgcataggagaagagatagagcatgacataccaagtgaagcaagggggacaaaaatggaaacaggactaagattcctgcattttgactctaaatgaatggatgaagatagatttgactgtgtgctttttcaagtggagaatatgaatatacagaacaagaaagcaataactccaacctgtttgattccgtctgttttctaaataaagacactatgcgctggaaataaaaaaaaaaaaag

SEQ ID NO: 65992 - DNA, 6156 bp, Homo sapiens
ggcacgagggggagtgagagtgtgtgggagtggggtgagggagaagctgacgggacgcgaggctgtgagaaactgggcgagtgtgcgaggacgcccggccagcctgcgggagccgcagtcggcggaggagaaaggaggcggctcccggtatcccgaccccctccccctcctctccttcccccacttccagccgcccggcggcccgcgcttcctcgaaggccccagcccggctcagtcggccgagagcgagggaggagccccccgacccaggtgctggagtctgcttgtcagggaggggggcagtctgtgattctgagaacagagccaagaaggggaacagcaaattcagtcacagacaatcctccactcggtcaagagccacttttctcttcctgccttgcccccccgcagggggtaaggaactgagcgtttaatctttagccggttggctaccagctaaaattctacttatcttagtttctagtggatagctttcttattttgcccatgttttcttagaatccctgtttaatatacttttgtcagtagtagtatctaggagtagcagggagagtgacaataaattagccccttcttttttcccttgtcattcaggccccttttcctctccagagggaaattaccagtaaactcttctaaatcttccaccccttctcagtcatactgtgaagaaacacactaaagtggacattatttgaccagtgaacacgaacccagcttcaggcattggtttgttgtggcacatggagaaacatctcttttaaaatatctcccaattacccttttcacaatttgtatccacctaggatttgctgctggggtaagtcactagatttatttctcaaagctcccctctctatgagctgaaagactgaccaaccatgaacactagtaggggatggggaaaggggacagagcagagccagttgttccacactttgggaagcaggagtagcttttatcatcttcctctggggagcaggcatagagacataaactgagtgaaaatgggtggaggaagaacttctatacccacgaacaacatgtgaagagagagaaccaaacataaagtaaggagggtagacgttacatccaagaggaaataatccaggcaaggaagcacaagctgatcaagatgtgtagttctgtggctgccaagttgtggtttttgacagatcgtcgcatcagggaagactatcctcaaaaagagattttacgagcattgaaggccaaatgttgtgaggaggaactggactttagggctgtggtgatggatgaggtggtgctgacaatcgagcaaggaaacctgggtctgcggatcaatggagagctaatcactgcctacccacaagtggtggtagtcagagtaccaaccccttgggtgcaaagtgatagtgacatcactgttttgcgccatctagagaagatgggatgtcggttaatgaaccgacctcaagccatcctgaactgcgttaataagttctggacatttcaagagttggctggccatggtgttcctctgccggatactttctcttatggtggccacgaaaattttgctaaaatgattgatgaggctgaagttctggagttcccaatggtagtaaagaatacgcggggtcacagaggtaaagctgttttcttggctcgagataagcaccatttggctgatctaagccatcttattcgccatgaagcgccatacctgttccagaagtatgttaaagagtctcatggacgggatgtacgtgtcattgtcgtgggaggccgtgtggttggcaccatgttacgttgttcaacagatgggagaatgcaaagcaactgctcattaggtggtgtggggatgatgtgctcattgagtgaacaagggaagcagctagctatccaggtgtctaatatcctggggatggatgtgtgtggcattgacctgctgatgaaagatgacggctccttctgcgtctgtgaggccaatgcaaatgtaggtttcatcgcctttgataaggcttgtaatctagatgtagctggtatcatagcagactatgccgcctcccttctaccctctggccggctcacccggcgtatgtccctgctctccgtggtgtccactgccagtgagactagtgagccggagctgggtcccccagccagcactgctgttgacaacatgagtgcaagttccagctctgttgacagcgaccctgaaagcacggagcgagagctgctcaccaagctcccagggggcctgttcaacatgaaccagctgctagccaatgaaatcaaactactggtggactgactccactggtaattaaccaacaaaacccttgtaaaactttctttcttcttttctatttttaaaaccaacttgcaatgctgttcatggaggatgctcaggaagatgagagaaaattagtaggattagttggagagagtgggagatagatgagacctctgctagtaagatgttactttcatttacaaatcctacaaatagagaggcagaataggtggggtatagaaaaatgtcaggctctcatagttacccttttaaattgctaaaaaatgtgtatgctcataggccatgaggaacaaatactttttttttttcatggtcccttgcttttgtttttgtacaaaaaaaaatggttttgctacaaatatccaagtagcataacttcacattgtgttggaagatttgtcatcagtgaggaaaacatctgcttaaattacaggaatttttgtattatacagctctgaaaattctgccatttccttattaactagcagctttagtttgtagtttatgaaatcttgaggggctcttttactgggatttcttatttttttgttttttcccgcttaatttggtgggaggtcaaattgaatataacccaataaaggcttcttaatgacaaaattggcatgtttgcatgatgaaatggaaatgaacagtattgcaatgtccggtatacaaaataacattaattcaatgtagataaaattacactagtttaaaatatgtgcattcacttgtatttgttagtgttttagtcttttttgaaagatgtgctctgttaatgttgcttttttttttttttttaatacatgctagtctaacatttcctgctctatgcctgcatctttaacaatggccaaagtgaagaaaatgctaccttttttgttaacaagacactgacttgaaacatgtacatttaaagccttttattttttccctttttgttttggtagttgggcatttaaataaggacaaggaaaaatatttttgggggcaaatcaagagcctatgagttctaagtataaagctgaagtgatttcgaatgccagcgttatatatttgcatttttcacattttacgagggagtatatgtgtatgtgtgtgcacgcatgcatgtgtatgtgttttgctttttgtttccatcaactaatcaaaaaggataatttagaaaatggagcatgatgggaaacagagtttttgactttaaaaaacagatgagttgttttcataagtagactccactggggtagaggtattcaccttaaaacatagggtgagtagatgcttttttaggcctttttgtgtatatgtacgttgtttgtttttttccttttgtttctagcctgttcagtgtacagtttattcaaggctacatgcttttctttaatgcttctggctatgcattttctctttttacatataggatttgggattgggggtgggttggatgtttttgtttggggacttatttagtagtattgagtctcttatagccctactcttaagccttcaatactgtccactctttatattcctttacttgcagaatttataaaagcccccaaactgcatataatatgagcctttaaaacatgggtaaaactaatcccattgatgggtttggatggtatgttaagaaatggagatgctgcagagcccaacgtaattttttaaacagcaagttttccatctccctacgaatcctctgaagcttttacccaagccctttcttgcctctccagtgctattttccttcagatggaccttaaacataatttcttggacactactagagagacttcgaggcaataataaaagatcagtattaaccagctataacagaggtttgatcatgcttacttgtacagtttttcccccgttttaaaaaggaatgtaataaaatttgttttttccatagaattaaataatattaaaattgagtgaaaggttgattgttgatgaatagaatagtacctctcatctgtgcagtgtctcatttcacctcagagaaaaggatacataagaggagtttgtaatttatcttaggatattctaattgcatttaaaagaacttatcttgcgcagggtaaatgggggactcacatacatatattaatacctctgactcattaacagaaagaaatacttggtacttctttcgctgaatgaccatactgtggaggatgcatactatttggtatagagaaataaatgaggaagaaagaactgcttaattaaattatcattcatatgttcatatagagaccatctggttgccatgtgtattatgacacatacactttgaatagttacatatcacaagtatgtagttcatgtttgtgttggtggggtaaggcatcaggaaaaatgtagttagtcttttcttaacttataccaaattaaccaactatattataggaaatatgtgaaattagttcattagctttattcactattatgcattcacatgatattaaaacgtacactcacatgttagaatgaaaagagcagtagttatcttagattttaaaaacatggatatcttcttgaattccttcaagattgaggtagagaataagagcaaatcattctggaagtaccttaaggaaacaaacagcagcagatatttaggttaaacttattttcataattgtttaataacttttgtataatcttcattgctattatgagagagaatgtatatatcaaatatgtgtaatgataaaatctgaattgtaaaatttttgtatattgttaaaattgtaattctaaattgtatttcaaaaatgattatttctgatattgtttttatgtcacccatgatgaaaactggactttatatatctaaacatacaagtatgaactattctatttaaaatttttaatagtttttttcttttttggtgcctataattgattggtcatttctgctggcttttctccaatgaacattgaaatcttcctgtatatgttaccaataagaaaactaccctggaacagtagaaaaacccaacaagagacttggcattcatcaagcacattatcagactttgagaacatattgaaggcattgactttgaaaatcatctctttttctcaagaagaaagcaatggagaagcaaatttgtttcattcagtgaatccccagtttggggcttgtggggcttagagacattgtgaaatcaaatcttgtgttatacttttctcctggctcactttttttgagaaggtttatgggctatttggctggtgagacacgatcccctcctaagaaaatgtaggtgctcagacagccttttcaggagccaaaaaaacaaatacaaacaaacaaaaaaatacccagagaaaaaactttccttcttcccccttcctgatgatgagtgagaagtattgagaactttcggggtcagtgcccttctaaactccccttcccccaataatgcagctgtataatgaatggtaaatgcaccggtttggattcaggcacagccccagtctgcctacagcagacaactaaactggtaggtggcagcagaggaaggaattcttcagattgatggctactgacttaaagtctgcataggagaagagatagagcatgacataccaagtgaagcaagggggacaaaaatggaaacaggactaagattcctgcattttgactctaaatgtcttttgaagtaaccagtgatctttttttgtcacctcgatcatgaataaatactctgtgatttggggttagtatagttttggttgttttcccttctcctgagatttcagaaataaaagattcctattccgtgatttttttgtcacctcgggatcctctggaacgatca

SEQ ID NO: 65993 - DNA, 5574 bp, Homo sapiens
ggcacgagggggagtgagagtgtgtgggagtggggtgagggagaagctgacgggacgcgaggctgtgagaaactgggcgagtgtgcgaggacgcccggccagcctgcgggagccgcagtcggcggaggagaaaggaggcggctcccggtatcccgaccccctccccctcctctccttcccccacttccagccgcccggcggcccgcgcttcctcgaaggccccagcccggctcagtcggccgagagcgagggaggagccccccgacccaggtgctggagtctgcttgtcagggaggggggcagtctgtgattctgagaacagagccaagaaggggaacagcaaattcagtcacagacaatcctccactcggtcaagagccacttttctcttcctgccttgcccccccgcagggggtaaggaactgagcgtttaatctttagccggttggctaccagctaaaattctacttatcttagtttctagtggatagctttcttattttgcccatgttttcttagaatccctgtttaatatacttttgtcagtagtagtatctaggagtagcagggagagtgacaataaattagccccttcttttttcccttgtcattcaggccccttttcctctccagagggaaattaccagtaaactcttctaaatcttccaccccttctcagtcatactgtgaagaaacacactaaagtggacattatttgaccagtgaacacgaacccagcttcaggcattggtttgttgtggcacatggagaaacatctcttttaaaatatctcccaattacccttttcacaatttgtatccacctaggatttgctgctggggtaagtcactagatttatttctcaaagctcccctctctatgagctgaaagactgaccaaccatgaacactagtaggggatggggaaaggggacagagcagagccagttgttccacactttgggaagcaggagtagcttttatcatcttcctctggggagcaggcatagagacataaactgagtgaaaatgggtggaggaagaacttctatacccacgaacaacatgtgaagagagagaaccaaacataaagtaaggagggtagacgttacatccaagaggaaataatccaggcaaggaagcacaagctgatcaagatgtgtagttctgtggctgccaagttgtggtttttgacagatcgtcgcatcagggaagactatcctcaaaaagagattttacgagcattgaaggccaaatgttgtgaggaggaactggactttagggctgtggtgatggatgaggtggtgctgacaatcgagcaaggaaacctgggtctgcggatcaatggagagctaatcactgcctacccacaagtggtggtagtcagagtaccaaccccttgggtgcaaagtgatagtgacatcactgttttgcgccatctagagaagatgggatgtcggttaatgaaccgacctcaagccatcctgaactgcgttaataagttctggacatttcaagagttggctggccatggtgttcctctgccggatactttctcttatggtggccacgaaaattttgctaaaatgattgatgaggctgaagttctggagttcccaatggtagtaaagaatacgcggggtcacagaggtaaagctgttttcttggctcgagataagcaccatttggctgatctaagccatcttattcgccatgaagcgccatacctgttccagaagtatgttaaagagtctcatggacgggatgtacgtgtcattgtcgtgggaggccgtgtggttggcaccatgttacgttgttcaacagatgggagaatgcaaagcaactgctcattaggtggtgtggggatgatgtgctcattgagtgaacaagggaagcagctagctatccaggtgtctaatatcctggggatggatgtgtgtggcattgacctgctgatgaaagatgacggctccttctgcgtctgtgaggccaatgcaaatgtaggtttcatcgcctttgataaggcttgtaatctagatgtagctggtatcatagcagactatgccgcctcccttctaccctctggccggctcacccggcgtatgtccctgctctccgtggtgtccactgccagtgagactagtgagccggagctgggtcccccagccagcactgctgttgacaacatgagtgcaagttccagctctgttgacagcgaccctgaaagcacggagcgagagctgctcaccaagctcccagggggcctgttcaacatgaaccagctgctagccaatgaaatcaaactactggtggactgactccactggtaattaaccaacaaaacccttgtaaaactttctttcttcttttctatttttaaaaccaacttgcaatgctgttcatggaggatgctcaggaagatgagagaaaattagtaggattagttggagagagtgggagatagatgagacctctgctagtaagatgttactttcatttacaaatcctacaaatagagaggcagaataggtggggtatagaaaaatgtcaggctctcatagttacccttttaaattgctaaaaaatgtgtatgctcataggccatgaggaacaaatactttttttttttcatggtcccttgcttttgtttttgtacaaaaaaaaatggttttgctacaaatatccaagtagcataacttcacattgtgttggaagatttgtcatcagtgaggaaaacatctgcttaaattacaggaatttttgtattatacagctctgaaaattctgccatttccttattaactagcagctttagtttgtagtttatgaaatcttgaggggctcttttactgggatttcttatttttttgttttttcccgcttaatttggtgggaggtcaaattgaatataacccaataaaggcttcttaatgacaaaattggcatgtttgcatgatgaaatggaaatgaacagtattgcaatgtccggtatacaaaataacattaattcaatgtagataaaattacactagtttaaaatatgtgcattcacttgtatttgttagtgttttagtcttttttgaaagatgtgctctgttaatgttgcttttttttttttttttaatacatgctagtctaacatttcctgctctatgcctgcatctttaacaatggccaaagtgaagaaaatgctaccttttttgttaacaagacactgacttgaaacatgtacatttaaagccttttattttttccctttttgttttggtagttgggcatttaaataaggacaaggaaaaatatttttgggggcaaatcaagagcctatgagttctaagtataaagctgaagtgatttcgaatgccagcgttatatatttgcatttttcacattttacgagggagtatatgtgtatgtgtgtgcacgcatgcatgtgtatgtgttttgctttttgtttccatcaactaatcaaaaaggataatttagaaaatggagcatgatgggaaacagagtttttgactttaaaaaacagatgagttgttttcataagtagactccactggggtagaggtattcaccttaaaacatagggtgagtagatgcttttttaggcctttttgtgtatatgtacgttgtttgtttttttccttttgtttctagcctgttcagtgtacagtttattcaaggctacatgcttttctttaatgcttctggctatgcattttctctttttacatataggatttgggattgggggtgggttggatgtttttgtttggggacttatttagtagtattgagtctcttatagccctactcttaagccttcaatactgtccactctttatattcctttacttgcagaatttataaaagcccccaaactgcatataatatgagcctttaaaacatgggtaaaactaatcccattgatgggtttggatggtatgttaagaaatggagatgctgcagagcccaacgtaattttttaaacagcaagttttccatctccctacgaatcctctgaagcttttacccaagccctttcttgcctctccagtgctattttccttcagatggaccttaaacataatttcttggacactactagagagacttcgaggcaataataaaagatcagtattaaccagctataacagaggtttgatcatgcttacttgtacagtttttcccccgttttaaaaaggaatgtaataaaatttgttttttccatagaattaaataatattaaaattgagtgaaaggttgattgttgatgaatagaatagtacctctcatctgtgcagtgtctcatttcacctcagagaaaaggatacataagaggagtttgtaatttatcttaggatattctaattgcatttaaaagaacttatcttgcgcagggtaaatgggggactcacatacatatattaatacctctgactcattaacagaaagaaatacttggtacttctttcgctgaatgaccatactgtggaggatgcatactatttggtatagagaaataaatgaggaagaaagaactgcttaattaaattatcattcatatgttcatatagagaccatctggttgccatgtgtattatgacacatacactttgaatagttacatatcacaagtatgtagttcatgtttgtgttggtggggtaaggcatcaggaaaaatgtagttagtcttttcttaacttataccaaattaaccaactatattataggaaatatgtgaaattagttcattagctttattcactattatgcattcacatgatattaaaacgtacactcacatgttagaatgaaaagagcagtagttatcttagattttaaaaacatggatatcttcttgaattccttcaagattgaggtagagaataagagcaaatcattctggaagtaccttaaggaaacaaacagcagcagatatttagaaaactaccctggaacagtagaaaaacccaacaagagacttggcattcatcaagcacattatcagactttgagaacatattgaaggcattgactttgaaaatcatctctttttctcaagaagaaagcaatggagaagcaaatttgtttcattcagtgaatccccagtttggggcttgtggggcttagagacattgtgaaatcaaatcttgtgttatacttttctcctggctcactttttttgagaaggtttatgggctatttggctggtgagacacgatcccctcctaagaaaatgtaggtgctcagacagccttttcaggagccaaaaaaacaaatacaaacaaacaaaaaaatacccagagaaaaaactttccttcttcccccttcctgatgatgagtgagaagtattgagaactttcggggtcagtgcccttctaaactccccttccccaaaaggaggcggtatgaaggtgatggccggcgggtttagagaggccctctggctcgaaccaacggggggggggcggaagagaccccaagaggcgcgcactgggtggaaaagaaacgatcccccccgggagcggaagcaaaccatcgcagggagcaagtccccacgagaaggtag

SEQ ID NO: 65994 - DNA, 2135 bp, Homo sapiens
ttcccacaaaagctaggctggttctgattcttaacctgctccagcagtgacacactcagtcccacagggagtggacgacccccaggaagaagatgatgttttggaggaaactccccaaagccctcttcattgggctgactctggccattgctgtcaatctccttctggtattttctagcaaggggactttacaaaacctgtttacgggtggtctccacagggagcttcctttacatctgaataaacgctacggggcagtgataaagagactctcccacttggaggtggaattgcaggatctgaaagaaagtatgaaattagctctgaggcaacaagaaaatgtgaacagcacactgaagagggcgaaagatgaagtacgccctcttctaaaggcaatggaaaccaaggtgaatgagacaaagaagcacaaaacccaaatgaaactcttcccacactcacagcttttcaggcaatggggcgaggatctttctgaggcccagcagaaggcggcccaggacctcttccggaagtttggttacaacgcgtacctcagcaaccagctgcctctcaatcgcaccatccccgacacgcgagactacagatgtcttcggaagacatatccttcccaactcccatccctcagtgtcattctcatattcgtgaatgaagctctgtccattatacaacgggccatcaccagtatcatcaaccggacgccctctcgattgttgaaggaaatcatcttggtggatgatttcagctcaaatggagaactaaaggtacacttggatgagaagattaagctttacaaccagaagtatccaggactactgaaaataatacggcatcctgaaaggaaaggtcttgctcaagcccgcaacactggctgggaagctgccacagcagacgtggtcgccatcttggatgctcacattgaagtcaatgttgggtgggcagagccaatcttggctcggattcaggaggaccgcactgtgattgtgtctcctgtgtttgacaacattcgttttgacaccttcaaactggataagtatgaactggcagttgatgggtttaactgggaactctggtgccgctacgatgcactgccacaagcctggattgatctgcatgatgtcactgccccagtgaagagtccttcaatcatgggcatcctggctgctaacaggcacttcctgggagagatcgggtctctggatggtggaatgctcatctatggaggagagaacgtggagcttagcctgagggtgtggcagtgtggagggaaggtcgagattttgccctgttcccggattgcccacctagagagacaccacaagccctacgccttggatctcaccgctgccttgaagcgcaatgctctgcgagtggccgaaatctggatggatgagcacaaacacatggtctacttggcctggaacatacctctccagaactctggaatagattttggagacgtttcttccagaatggcactccgggaaaaactgaaatgtaaaacttttgactggtacctgaaaaatgtttatccactcttgaagccactccacaccatcgtgggctatggaagaatgaaaaacctattggatgaaaatgtctgcttggatcagggacccgttccaggcaacacccccatcatgtattactgccatgaattcagctcacagaatgtctactatcacctaactggggagctctatgtgggacaactgattgcagaggccagtgctagtgatcgctgcctgacagaccctggcaaggcggagaagcccaccttagaaccatgctccaaggcagctaagaatagactgcatatatattgggattttaaaccgggaggagctgtcataaacagagataccaagcggtgtctggagatgaagaaggatcttttgggtagccacgtgcttgtgctccagacctgtagcacgcaagtgtgggaaatccagcacactgtcagagactggggtcagaccaacagccagtgatcctcagatggtgctggatctgggtcatcaattcttgcaagtggaatggcttctactcctaacactcccagcttctttctcaatgagaaagaaagcatgtgtatgtctgtttatggcgacttcaggtgg

SEQ ID NO: 65995 - DNA, 520 bp, Homo sapiens
gggactcggtaggagctcactaggcaaatgccagcggggtgaggaaggacactggtgtgtccaggtttctcagttccatccctcatgcgacacaacctcatatcactaactacacgtccttttgttctggttcctccctggcaggaaaaaatgctggcaggtggtgcaagcaaggacatctatgcatagaattctgacagcagctggaccctcaacttcttcagaagatgagaaacctgcctggcaccgctggcaggcatctggactgacaccgctctggaggcctcccacaagcagcaaccaagccagaaaaagttgagaccagacccgctgtccctaaagatggggcccagaatgtcggggtgaagctgtaggaacagggtgaaagctggtggtgtgagcaaagagaccagctatggggtggtcaggggattccgggaggtgcatgggtatgttgcagacccccccaggacaagggtggctgtggaagaatggcaaataaacacaaggcaaagtctca

SEQ ID NO: 65996 - DNA, 263 bp, Homo sapiens
gaagaatcaggagtaagatgaggcagcttcaatgactgggtggggaaactaggaagaaaagtccagacaggaagctttgaggccctgcttcctccacattgtcctgagtgctggggcttcatgacgttgctgcagaagtctggacagcagggaccgtagccttcgccatgtgtctagcagagcacctgatacagaattgtcactcatacaatgtgtggtgaatgaatgagtgaggaaataaatgaaggaagtgctggaactgg

SEQ ID NO: 65997 - DNA, 2055 bp, Homo sapiens
tatgctttcagactctttgatgataattttttttttaaaaattattctctcgaagagcaacttacgagaggacagccttatgagggtttgcttgagaggcagtgtggcttctgtgactgccagctctaaatctcgatcttgccataactttacagggtaacttgggtccacagtcactctttgtgcctcagtttacccacccattaaatgggaacattactgtcttcccctccctacctcatggggaatgtctgggaagctggggacattgctatgcaaatgtgtgaatcttagtcatggatttgatttttagttatccccatacccccataggcaaggccttcccccagagttcctgctttggatccaaagcctgagaataggccattatggaccattggctccctaaatccctccttggcctcttggactgagcccctcagcctttcttcttacccttcagaaaggagagttctctttagatatgttcagggggatccttccatggctggaggtcaccttgactgggggcttggcttctccaaacctgaaacacagtagaagatagagatgtttatgatgcaaaaacctgctctgaggtcagaaagtgctagttttccaaatctctcccattgctgctggctatctggggaaagaagagaaaagcccattccagaggcagaagggaagctcccagccgagggtaaaagttgagacctgtatgcatgtatctctgtatatgtgtatgtaatcaccctcatcaccatccctgagaaaacattttcttttcaagtcagagcacgcctgaaagggtttgtggagagcccagctcaccagggactctggttgccgtagcaaccttccagactgttctctctatcttctgctttgggcatcaagggagaccaggggactacatcttcccagcttctcaaatgggagcacctcccacatcgtggcttaggggctgggagtgccagggcacggatgtgggacttttggaaaatgtggaggaagcagggcctcaaagcttcctgtctggacttttcttcctagtttccccacccagtcattgaagctgcctcatcttactcctgattcttcagaaatttgaatgttaagcaaccagttaaaccaacgtcagtattaattttttcaagctgtcgaggggagcccttagaggggacaacttcttggagtggcggccaagctgggccttaccaggtgtgatcatagtcttaggtatcatggagttcccatctccgcagaggcaggctcttcccagctccacgagaggcggagaattgcaacttcttcctctctgggaacggcctatctagctcctgggaggaatctcaaagatctttcttcttaagacatcgaagaaaaactgagaggctgtagctcgacctagtttctgtgaagaattttgtcaagtgatccctctcggaccctgagcctctttatttggattttgtgccttgagcaccaagagaatatgcactctgggttgcctggacagctggggtggtgattcacaggaagggtccaagccatcactacacctgactcaagccggaaagagctcccagaggacttcctggagctgccagcctcagcctgagatgcgggatattcgtccccaaggagcgaggagggacagctcgccttctttgcaggaaaaaatgctggcaggtggtgcaagcaaggacatctatgcatagaattctgacagcagctggaccctcaacttcttcagaagatgagaaacctgcctggcaccgctggcaggcatctggactgacaccgctctggaggcctcccacaagcagcaaccaagccagaaaaagttgagaccagacccgctgtccctaaagatggggcccagaatgtcggggtgaagctgtaggaacagggtgaaagctggtggtgtgagcaaagagaccagctatggggtggtcaggggattccgggaggtgcatgggtatgttgcagacccccccaggacaagggtggctgtggaagaatggcaaataaacacaaggcaaagtctca

SEQ ID NO: 65998 - DNA, 1940 bp, Homo sapiens
tatgctttcagactctttgatgataattttttttttaaaaattattctctcgaagagcaacttacgagaggacagccttatgagggtttgcttgagaggcagtgtggcttctgtgactgccagctctaaatctcgatcttgccataactttacagggtaacttgggtccacagtcactctttgtgcctcagtttacccacccattaaatgggaacattactgtcttcccctccctacctcatggggaatgtctgggaagctggggacattgctatgcaaatgtgtgaatcttagtcatggatttgatttttagttatccccatacccccataggcaaggccttcccccagagttcctgctttggatccaaagcctgagaataggccattatggaccattggctccctaaatccctccttggcttctccaaacctgaaacacagtagaagatagagatgtttatgatgcaaaaacctgctctgaggtcagaaagtgctagttttccaaatctctcccattgctgctggctatctggggaaagaagagaaaagcccattccagaggcagaagggaagctcccagccgagggtaaaagttgagacctgtatgcatgtatctctgtatatgtgtatgtaatcaccctcatcaccatccctgagaaaacattttcttttcaagtcagagcacgcctgaaagggtttgtggagagcccagctcaccagggactctggttgccgtagcaaccttccagactgttctctctatcttctgctttgggcatcaagggagaccaggggactacatcttcccagcttctcaaatgggagcacctcccacatcgtggcttaggggctgggagtgccagggcacggatgtgggacttttggaaaatgtggaggaagcagggcctcaaagcttcctgtctggacttttcttcctagtttccccacccagtcattgaagctgcctcatcttactcctgattcttcagaaatttgaatgttaagcaaccagttaaaccaacgtcagtattaattttttcaagctgtcgaggggagcccttagaggggacaacttcttggagtggcggccaagctgggccttaccaggtgtgatcatagtcttaggtatcatggagttcccatctccgcagaggcaggctcttcccagctccacgagaggcggagaattgcaacttcttcctctctgggaacggcctatctagctcctgggaggaatctcaaagatctttcttcttaagacatcgaagaaaaactgagaggctgtagctcgacctagtttctgtgaagaattttgtcaagtgatccctctcggaccctgagcctctttatttggattttgtgccttgagcaccaagagaatatgcactctgggttgcctggacagctggggtggtgattcacaggaagggtccaagccatcactacacctgactcaagccggaaagagctcccagaggacttcctggagctgccagcctcagcctgagatgcgggatattcgtccccaaggagcgaggagggacagctcgccttctttgcaggaaaaaatgctggcaggtggtgcaagcaaggacatctatgcatagaattctgacagcagctggaccctcaacttcttcagaagatgagaaacctgcctggcaccgctggcaggcatctggactgacaccgctctggaggcctcccacaagcagcaaccaagccagaaaaagttgagaccagacccgctgtccctaaagatggggcccagaatgtcggggtgaagctgtaggaacagggtgaaagctggtggtgtgagcaaagagaccagctatggggtggtcaggggattccgggaggtgcatgggtatgttgcagacccccccaggacaagggtggctgtggaagaatggcaaataaacacaaggcaaagtctca

SEQ ID NO: 65999 - DNA, 2875 bp, Homo sapiens
tatgctttcagactctttgatgataattttttttttaaaaattattctctcgaagagcaacttacgagaggacagccttatgagggtttgcttgagaggcagtgtggcttctgtgactgccagctctaaatctcgatcttgccataactttacagggtaacttgggtccacagtcactctttgtgcctcagtttacccacccattaaatgggaacattactgtcttcccctccctacctcatggggaatgtctgggaagctggggacattgctatgcaaatgtgtgaatcttagtcatggatttgatttttagttatccccatacccccataggcaaggccttcccccagagttcctgctttggatccaaagcctgagaataggccattatggaccattggctccctaaatccctccttggcctcttggactgagcccctcagcctttcttcttacccttcagaaaggagagttctctttagatatgttcagggggatccttccatggctggaggtcaccttgactgggggcttggcttctccaaacctgaaacacagtagaagatagagatgtttatgatgcaaaaacctgctctgaggtcagaaagtgctagttttccaaatctctcccattgctgctggctatctggggaaagaagagaaaagcccattccagaggcagaagggaagctcccagccgagggtaaaagttgagacctgtatgcatgtatctctgtatatgtgtatgtaatcaccctcatcaccatccctgagaaaacattttcttttcaagtcagagcacgcctgaaagggtttgtggagagcccagctcaccagggactctggttgccgtagcaaccttccagactgttctctctatcttctgctttgggcatcaagggagaccaggggactacatcttcccagcttctcaaatgggagcacctcccacatcgtggcttaggggctgggagtgccagggcacggatgtgggacttttggaaaatgtggaggaagcagggcctcaaagcttcctgtctggacttttcttcctagtttccccacccagtcattgaagctgcctcatcttactcctgattcttcagaaatttgaatgttaagcaaccagttaaaccaacgtcagtattaattttttcaagctgtcgaggggagcccttagaggggacaacttcttggagtggcggccaagctgggccttaccaggtgtgatcatagtcttaggtatcatggagttcccatctccgcagaggcaggctcttcccagctccacgagaggcggagaattgcaacttcttcctctctgggaacggcctatctagctcctgggaggaatctcaaagatctttcttcttaagacatcgaagaaaaactgagaggctgtagctcgacctagtttctgtgaagaattttgtcaagtgatccctctcggaccctgagcctctttatttggattttgtgccttgagcaccaagagaatatgcactctgggttgcctggacagctggggtggtgattcacaggaagggtccaagccatcactacacctgactcaagccggaaagagctcccagaggacttcctggagctgccagcctcagcctgagatgcgggatattcgtccccaaggagcgaggagggacagctcgccttctttgcaggaaaaaatgctggcaggtggtgcaagcaaggacatctatgcatagaattctgacagcagctggaccctcaacttcttcagaagatgagaaacctgcctggcaccgctggcaggcatctggactgacaccgctctggaggcctcccacaagcagcaaccaagccagaaaaagttgagaccagacccgctgtccctaaagatggggcccagaatgtcggggtgaagctgtaggaacagggtgaaagctggtggtgtgagcaaagagaccagctatggggtggtcaggggattccgggaggtgcatgggtatgttgcagacccccccaggacaagggtggctgtggaagaatggcaaataaacacaaggcaaagtctcagaggctgtgcattatgccatgagaaaacgtcgacggccaagttaggcagacaagccaagcggtctccacaagagtaggcagggatccaaaattcagagcacctgcagcttgctgggcatcctcactacacaggaggatgtgatggccacacatagatcaccaggaagaggacttgatcaccctctgccatgagccggcccacagataggggacattctgcaagaaagtaagatgcgtaacccatgatctaagagttatctgcctctgatagacacacgagtgggcaaatatcaagggcagagttatttttttgcatggacttcccagaggccagatgatgctgtgtgcggggtctcccaggtaacagtaaggatgttctttctagtcacccgcattgttcttgcaactgacagctgttctctcttggcctgtcctcagtggaagggggtaatgctacttcttaacaatcaaacaagcccttgcactcttctaggatctctggtgggggacattcccactgctagtcactcattcacgtatcttttccacttcctgacaaaatgaaggactaggatgattttcttgtgtggaattttgtttcctaatgaggtgttgctgaggctccaggttgctttaatgcccacaccctcccagattgtcctgagtgctggggcttcatgacgttgctgcagaagtctggacagcagggaccgtagccttcgccatgtgtctagcagagcacctgatacagaattgtcactcatacaatgtgtggtgaatgaatgagtgaggaaataaatgaaggaagtgctggaactgg

SEQ ID NO: 66000 - DNA, 1340 bp, Homo sapiens
gggactcggtaggagctcactaggcaaatgccagcggggtgaggaaggacactggtgtgtccaggtttctcagttccatccctcatgcgacacaacctcatatcactaactacacgtccttttgttctggttcctccctggcaggaaaaaatgctggcaggtggtgcaagcaaggacatctatgcatagaattctgacagcagctggaccctcaacttcttcagaagatgagaaacctgcctggcaccgctggcaggcatctggactgacaccgctctggaggcctcccacaagcagcaaccaagccagaaaaagttgagaccagacccgctgtccctaaagatggggcccagaatgtcggggtgaagctgtaggaacagggtgaaagctggtggtgtgagcaaagagaccagctatggggtggtcaggggattccgggaggtgcatgggtatgttgcagacccccccaggacaagggtggctgtggaagaatggcaaataaacacaaggcaaagtctcagaggctgtgcattatgccatgagaaaacgtcgacggccaagttaggcagacaagccaagcggtctccacaagagtaggcagggatccaaaattcagagcacctgcagcttgctgggcatcctcactacacaggaggatgtgatggccacacatagatcaccaggaagaggacttgatcaccctctgccatgagccggcccacagataggggacattctgcaagaaagtaagatgcgtaacccatgatctaagagttatctgcctctgatagacacacgagtgggcaaatatcaagggcagagttatttttttgcatggacttcccagaggccagatgatgctgtgtgcggggtctcccaggtaacagtaaggatgttctttctagtcacccgcattgttcttgcaactgacagctgttctctcttggcctgtcctcagtggaagggggtaatgctacttcttaacaatcaaacaagcccttgcactcttctaggatctctggtgggggacattcccactgctagtcactcattcacgtatcttttccacttcctgacaaaatgaaggactaggatgattttcttgtgtggaattttgtttcctaatgaggtgttgctgaggctccaggttgctttaatgcccacaccctcccagattgtcctgagtgctggggcttcatgacgttgctgcagaagtctggacagcagggaccgtagccttcgccatgtgtctagcagagcacctgatacagaattgtcactcatacaatgtgtggtgaatgaatgagtgaggaaataaatgaaggaagtgctggaactgg

SEQ ID NO: 66001 - DNA, 1890 bp, Homo sapiens
ttcccacaaaagctaggctggttctgattcttaacctgctccagcagtgacacactcagtcccacagggagtggacgacccccaggaagaagatgatgttttggaggaaactccccaaagccctcttcattgggctgactctggccattgctgtcaatctccttctggtattttctagcaaggggactttacaaaacctgtttacgggtggtctccacagggagcttcctttacatctgaataaacgctacggggcagtgataaagagactctcccacttggaggtggaattgcaggatctgaaagaaagtatgaaattagctctgaggcaacaagaaaatgtgaacagcacactgaagagggcgaaagatgaagtacgccctcttctaaaggcaatggaaaccaaggtgaatgagacaaagaagcacaaaacccaaatgaaactcttcccacactcacagcttttcaggcaatggggcgaggatctttctgaggcccagcagaaggcggcccaggacctcttccggaagtttggttacaacgcgtacctcagcaaccagctgcctctcaatcgcaccatccccgacacgcgagactacagatgtcttcggaagacatatccttcccaactcccatccctcagtgtcattctcatattcgtgaatgaagctctgtccattatacaacgggccatcaccagtatcatcaaccggacgccctctcgattgttgaaggaaatcatcttggtggatgatttcagctcaaatggagaactaaaggtacacttggatgagaagattaagctttacaaccagaagtatccaggactactgaaaataatacggcatcctgaaaggaaaggtcttgctcaagcccgcaacactggctgggaagctgccacagcagacgtggtcgccatcttggatgctcacattgaagtcaatgttgggtgggcagagccaatcttggctcggattcaggaggaccgcactgtgattgtgtctcctgtgtttgacaacattcgttttgacaccttcaaactggataagtatgaactggcagttgatgggtttaactgggaactctggtgccgctacgatgcactgccacaagcctggattgatctgcatgatgtcactgccccagtgaagagtccttcaatcatgggcatcctggctgctaacaggcacttcctgggagagatcgggtctctggatggtggaatgctcatctatggaggagagaacgtggagcttagcctgagggtgtggcagtgtggagggaaggtcgagattttgccctgttcccggattgcccacctagagagacaccacaagccctacgccttggatctcaccgctgccttgaagcgcaatgctctgcgagtggccgaaatctggatggatgagcacaaacacatggtctacttggcctggaacatacctctccagaactctggaatagattttggagacgtttcttccagaatggcactccgggaaaaactgaaatgtaaaacttttgactggtacctgaaaaatgtttatccactcttgaagccactccacaccatcgtgggctatggaagaatgaaaaacctattggatgaaaatgtctgcttggatcagggacccgttccaggcaacacccccatcatgtattactgccatgaattcagctcacagaatgtctactatcacctaactggggagctctatgtgggacaactgattgcagaggccagtgctagtgatcgctgcctgacagaccctggcaaggcggagaagcccaccttagaaccatgctccaaggcagctaagaatagactgcatatatattgggattttaaaccgcctaccattactaaataaataattatgcattccaaaa

SEQ ID NO: 66002 - DNA, 2229 bp, Homo sapiens
ttcccacaaaagctaggctggttctgattcttaacctgctccagcagtgacacactcagtcccacagggagtggacgacccccaggaagaagatgatgttttggaggaaactccccaaagccctcttcattgggctgactctggccattgctgtcaatctccttctggtattttctagcaaggggactttacaaaacctgtttacgggtggtctccacagggagcttcctttacatctgaataaacgctacggggcagtgataaagagactctcccacttggaggtggaattgcaggatctgaaagaaagtatgaaattagctctgaggcaacaagaaaatgtgaacagcacactgaagagggcgaaagatgaagtacgccctcttctaaaggcaatggaaaccaaggtgaatgagacaaagaagcacaaaacccaaatgaaactcttcccacactcacagcttttcaggcaatggggcgaggatctttctgaggcccagcagaaggcggcccaggacctcttccggaagtttggttacaacgcgtacctcagcaaccagctgcctctcaatcgcaccatccccgacacgcgagactacagatgtcttcggaagacatatccttcccaactcccatccctcagtgtcattctcatattcgtgaatgaagctctgtccattatacaacgggccatcaccagtatcatcaaccggacgccctctcgattgttgaaggaaatcatcttggtggatgatttcagctcaaatggagaactaaaggtacacttggatgagaagattaagctttacaaccagaagtatccaggactactgaaaataatacggcatcctgaaaggaaaggtcttgctcaagcccgcaacactggctgggaagctgccacagcagacgtggtcgccatcttggatgctcacattgaagtcaatgttgggtgggcagagccaatcttggctcggattcaggaggaccgcactgtgattgtgtctcctgtgtttgacaacattcgttttgacaccttcaaactggataagtatgaactggcagttgatgggtttaactgggaactctggtgccgctacgatgcactgccacaagcctggattgatctgcatgatgtcactgccccagtgaagagtccttcaatcatgggcatcctggctgctaacaggcacttcctgggagagatcgggtctctggatggtggaatgctcatctatggaggagagaacgtggagcttagcctgagggtgtggcagtgtggagggaaggtcgagattttgccctgttcccggattgcccacctagagagacaccacaagccctacgccttggatctcaccgctgccttgaagcgcaatgctctgcgagtggccgaaatctggatggatgagcacaaacacatggtctacttggcctggaacatacctctccagaactctggaatagattttggagacgtttcttccagaatggcactccgggaaaaactgaaatgtaaaacttttgactggtacctgaaaaatgtttatccactcttgaagccactccacaccatcgtgggctatggaagaatgaaaaacctattggatgaaaatgtctgcttggatcagggacccgttccaggcaacacccccatcatgtattactgccatgaattcagctcacagaatgtctactatcacctaactggggagctctatgtgggacaactgattgcagaggccagtgctagtgatcgctgcctgacagaccctggcaaggcggagaagcccaccttagaaccatgctccaaggcagctaagaatagactgcatatatattgggattttaaaccggaaaaaatgctggcaggtggtgcaagcaaggacatctatgcatagaattctgacagcagctggaccctcaacttcttcagaagatgagaaacctgcctggcaccgctggcaggcatctggactgacaccgctctggaggcctcccacaagcagcaaccaagccagaaaaagttgagaccagacccgctgtccctaaagatggggcccagaatgtcggggtgaagctgtaggaacagggtgaaagctggtggtgtgagcaaagagaccagctatggggtggtcaggggattccgggaggtgcatgggtatgttgcagacccccccaggacaagggtggctgtggaagaatggcaaataaacacaaggcaaagtctca

SEQ ID NO: 66003 - DNA, 1430 bp, Homo sapiens
gaaggactggggaagactggatgagaagggtagaagagggtgggtgtgggatggggaggggagagtggaaaggccctgggcagaccctggcagaaggggcacggggcagggtgtgagttccccactagcagggccaggtgagctatggtgctgcacctactgctcttcttgctgctgaccccacagggtgggcacagctgccaggggctggagctggcccgggaacttgttctggccaaggtgagggccctgttcttggatgccttggggccccccgcggtgaccagggaaggtggggaccctggagtcaggcggctgccccgaagacatgccctggggggcttcacacacaggggctctgagcccgaggaagaggaggatgtctcccaagccatccttttcccagccacagatgccagctgtgaggacaagtcagctgccagagggctggcccaggaggctgaggagggcctcttcagatacatgttccggccatcccagcatacacgcagccgccaggtgacttcagcccagctgtggttccacaccgggctggacaggcagggcacagcagcctccaatagctctgagcccctgctaggcctgctggcactgtcaccgggaggacccgtggctgtgcccatgtctttgggccatgctccccctcactgggccgtgctgcacctggccacctctgctctctctctgctgacccaccccgtcctggtgctgctgctgcgctgtcccctctgtacctgctcagcccggcctgaggccacgcccttcctggtggcccacactcggaccagaccacccagtggaggggagagagcccgacgctcaactcccctgatgtcctggccttggtctccctctgctctgcgcctgctgcagaggcctccggaggaaccggctgcccatgccaactgccacagagtagcactgaacatctccttccaggagctgggctgggaacggtggatcgtgtaccctcccagtttcatcttccactactgtcatggtggttgtgggctgcacatcccaccaaacctgtcccttccagtccctggggctccccctaccccagcccagccctactccttgctgccaggggcccagccctgctgtgctgctctcccagggaccatgaggcccctacatgtccgcaccacctcggatggaggttactctttcaagtatgagacagtgcccaaccttctcacgcagcactgtgcttgtatctaagggtggggggtcttccttcttaatcccatggctggtggccacgcccccaccatcatcagctgggaggaaaggcagagttgggaaatagatggctcccactcctccctcctttcacttctctgcctatgggctaccctccccaccccacttctatctcaataaagaacacagtgcatatgacttga

SEQ ID NO: 66004 - DNA, 2081 bp, Homo sapiens
gaaggactggggaagactggatgagaagggtagaagagggtgggtgtgggatggggaggggagagtggaaaggccctgggcagaccctggcagaaggggcacggggcagggtgtgagttccccactagcagggccaggtgagctatggtgctgcacctactgctcttcttgctgctgaccccacagggtgggcacagctgccaggggctggagctggcccgggaacttgttctggccaaggtgagggccctgttcttggatgccttggggccccccgcggtgaccagggaaggtggggaccctggagtcaggcggctgccccgaagacatgccctggggggcttcacacacaggggctctgagcccgaggaagaggaggatgtctcccaagccatccttttcccagccacagatgccagctgtgaggacaagtcagctgccagagggctggcccaggaggctgaggagggcctcttcagatacatgttccggccatcccagcatacacgcagccgccaggtgacttcagcccagctgtggttccacaccgggctggacaggcagggcacagcagcctccaatagctctgagcccctgctaggcctgctggcactgtcaccgggaggacccgtggctgtgcccatgtctttgggccatgctccccctcactgggccgtgctgcacctggccacctctgctctctctctgctgacccaccccgtcctggtgctgctgctgcgctgtcccctctgtacctgctcagcccggcctgaggccacgcccttcctggtggcccacactcggaccagaccacccagtggaggggagagagcccgacgctcaactcccctgatgtcctggccttggtctccctctgctctgcgcctgctgcagaggcctccggaggaaccggctgcccatgccaactgccacagagtagcactgaacatctccttccaggagctgggctgggaacggtggatcgtgtaccctcccagtttcatcttccactactgtcatggtggttgtgggctgcacatcccaccaaacctgtcccttccagtccctggggctccccctaccccagcccagccctactccttgctgccaggggcccagccctgctgtgctgctctcccagggaccatgaggcccctacatgtccgcaccacctcggatggaggttactctttcaagtatgagacagtgcccaaccttctcacgcagcactgtgcttgtatctaagggtggggggtcttccttcttaatcccatggctggtggccacgcccccaccatcatcagctgggaggaaaggcagagttgggaaatagatggctcccactcctccctcctttcacttctctgcctatgggctaccctccccaccccacttctatctcaataaagaacacagtgcatatgacttgaaaaaaaaaaaaaaaaaaaaaaaaaacaaaaaagacaagacaacagacgaaaacaagagagggaggcggcgcgcgctcacgaagagaatattctctccgacgagggggaccccaagcgatcagcgagcacgcaccacccgaagcataatggaggatacacagagggtggccccaccatataggggaggagccagagaatataacagagagggaagccacgagcgagcgcggtaggatacgaacgacagacaacgcgccgccacgagacgccgggcggacgacacaccacgcgagcagaaacgcacgggggcgcacacctcagctgggagaggagagggcagccccacacaacccatcgcacaggcagggaggggaacgacacaccccgctggcggcaacgaccacctccacacaaacgagagcgattatacagacggccccggatggggggggaatacatccatgcaaacccctctgtcgacacggcgtgtctatacaaagcgggtgtagtaaccacccccaccgccagtacctacgacactccggcagagtctatatgagcaaggttttgcgcccgtccaagctgcaaccagtcaactagcccacaggaaatactatttttaccaccacggggggccatctaccaaacaaa

SEQ ID NO: 66005 - DNA, 1334 bp, Homo sapiens
gaaggactggggaagactggatgagaagggtagaagagggtgggtgtgggatggggaggggagagtggaaaggccctgggcagaccctggcagaaggggcacggggcagggtgtgagttccccactagcagggccaggtgagctatggtgctgcacctactgctcttcttgctgctgaccccacagggtgggcacagctgccaggggctggagctggcccgggaacttgttctggccaaggtgagggccctgttcttggatgccttggggccccccgcggtgaccagggaaggtggggaccctggagtcaggcggctgccccgaagacatgccctggggggcttcacacacaggggctctgagcccgaggaagaggaggatgtctcccaagccatccttttcccagccacagatgccagctgtgaggacaagtcagctgccagagggctggcccaggaggctgaggagggcctcttcagatacatgttccggccatcccagcatacacgcagccgccaggtgacttcagcccagctgtggttccacaccgggctggacaggcagggcacagcagcctccaatagctctgagcccctgctaggcctgctggcactgtcaccgggaggacccgtggctgtgcccatgtctttgggccatgctccccctcactgggccgtgctgcacctggccacctctgctctctctctgctgacccaccccgtcctggtgctgctgctgcgctgtcccctctgtacctgctcagcccggcctgaggccacgcccttcctggtggcccacactcggaccagaccacccagtggaggggagagagcccgacgctcaactcccctgatgtcctggccttggtctccctctgctctgcgcctgctgcagaggcctccggaggaaccggctgcccatgccaactgccacagagtagcactgaacatctccttccaggagctgggctgggaacggtggatcgtgtaccctcccagtttcatcttccactactgtcatggtggttgtgggctgcacatcccaccaaacctgtcccttccagtccctggggctccccctaccccagcccagccctactccttgctgccaggggcccagccctgctgtgctgctctcccagggaccatgaggcccctacatgtccgcaccacctcggatggaggttactctttcaagtatgagacagtgcccaaccttctcacgcagcactgtgcttgtatctaagggtggggggtcttccttcttaatcccatggctggtggcctccccaccccacttctatctcaataaagaacacagtgcatatgacttga

SEQ ID NO: 66006 - DNA, 530 bp, Homo sapiens
tctataatagtgatttcagttctgtagagaaacaaatattatctttcatagtgtttaagccttgatagcatctgtccctcttgctgcacaggagatgtgaattatgttgtctatgcactgatgaattaaaattgcctcaggcattgtcaactgtgatgacatttgatacggtttggatctgtgtccccacccaaatttcatgtggaattgtaatccccaatgttggagatgggggtctggcgggagctgactagctcatgagggtggatccttcatgaatggtttagcaccatccccttggtggtgttcttgtgatagagttctcatgcgatctggttgtttaagtgtgtagcactgcaccgccctctttcttgcttccactccagccacgtgatgcacctactcccccttccgccatgattataagtttcctgagacctcctctgaagtggaacagatgtcagcatgatgcttcctgtacaccctgtggaataatgagccaattaaatctcttttctttataaattacc

SEQ ID NO: 66007 - DNA, 2874 bp, Homo sapiens
  misc_feature (1)..(1): n is a, c, g, or t
  misc_feature (4)..(4): n is a, c, g, or t
  misc_feature (2868)..(2868): n is a, c, g, or t
  misc_feature (2871)..(2871): n is a, c, g, or t
  misc_feature (2874)..(2874): n is a, c, g, or t
naantccggagctgaaaaaggatcctgactgaaagctagaggcattgaggagcctgaagattctcaggttttaaagacgctagagtgccaaagaagactttgaagtgtgaaaacatttcctgtaattgaaaccaaaatgtcatttatagatccttaccagcacattatagtggagcaccagtattcccacaagtttacggtagtggtgttacgtgccaccaaagtgacaaagggggcctttggtgacatgcttgatactccagatccctatgtggaactttttatctctacaacccctgacagcaggaagagaacaagacatttcaataatgacataaaccctgtgtggaatgagacctttgaatttattttggatcctaatcaggaaaatgttttggagattacgttaatggatgccaattatgtcatggatgaaactctagggacagcaacatttactgtatcttctatgaaggtgggagaaaagaaagaagttccttttattttcaaccaagtcactgaaatggttctagaaatgtctcttgaagtttgctcatgcccagacctacgatttagtatggctctgtgtgatcaggagaagactttcagacaacagagaaaagaacacataagggagagcatgaagaaactcttgggtccaaagaatagtgaaggattgcattctgcacgtgatgtgcctgtggtagccatattgggttcaggtgggggtttccgagccatggtgggattctctggtgtgatgaaggcattatacgaatcaggaattctggattgtgctacctacgttgctggtctttctggctccacctggtatatgtcaaccttgtattctcaccctgattttccagagaaagggccagaggagattaatgaagaactaatgaaaaatgttagccacaatccccttttacttctcacaccacagaaagttaaaagatatgttgagtctttatggaagaagaaaagctctggacaacctgtcacctttactgatatctttgggatgttaataggagaaacactaattcataatagaatgaatactactctgagcagtttgaaggaaaaagttaatactgcacaatgccctttacctcttttcacctgtcttcatgtcaaacctgacgtttcagagctgatgtttgcagattgggttgaatttagtccatacgaaattggcatggctaaatatggtacttttatggctcccgacttatttggaagcaaattttttatgggaacagtcgttaagaagtatgaagaaaaccccttgcatttcttaatgggtgtctggggcagtgccttttccatattgttcaacagagttttgggcgtttctggttcacaaagcagaggctccacaatggaggaagaattagaaaatattaccacaaagcatattgtgagtaatgatagctcggacagtgatgatgaatcacacgaacccaaaggcactgaaaatgaagatgctggaagtgactatcaaagtgataatcaagcaagttggattcatcgtatgataatggccttggtgagtgattcagctttattcaataccagagaaggacgtgctgggaaggtacacaacttcatgctgggcttgaatctcaatacatcttatccactgtctcctttgagtgactttgccacacaggactcctttgatgatgatgaactggatgcagctgtagcagatcctgatgaatttgagcgaatatatgagcctctggatgtcaaaagtaaaaagattcatgtagtggacagtgggctcacatttaacctgccgtatcccttgatactgagacctcagagaggggttgatctcataatctcctttgacttttctgcaaggccaagtgactctagtcctccgttcaaggaacttctacttgcagaaaagtgggctaaaatgaacaagctcccctttccaaagattgatccttatgtgtttgatcgggaagggctgaaggagtgctatgtctttaaacccaagaatcctgatatggagaaagattgcccaaccatcatccactttgttctggccaacatcaacttcagaaagtacaaggctccaggtgttccaagggaaactgaggaagagaaagaaatcgctgactttgatatttttgatgacccagaatcaccattttcaaccttcaattttcaatatccaaatcaagcattcaaaagactacatgatcttatgcacttcaatactctgaacaacattgatgtgataaaagaagccatggttgaaagcattgaatatagaagacagaatccatctcgttgctctgtttcccttagtaatgttgaggcaagaagatttttcaacaaggagtttctaagtaaacccaaagcatagttcatgtactggaaatggcagcagtttctgatgctgaggcagtttgcaatcccatgacaactggatttaaaagtacagtacagatagtcgtactgatcatgagagactggctgatactcaaagttgcagttacttagctgcatgagaataatactattataagttaggttgacaaatgatgttgattatgtaaggatatacttagctacattttcagtcagtatgaacttcctgatacaaatgtagggatatatactgtatttttaaacatttctcaccaactttcttatgtgtgttctttttaaaaattttttttcttttaaaatatttaacagttcaatctcaataagacctcgcattatgtatgaatgttattcactgactagatttattcataccatgagacaacactatttttatttatatatgcatatatatacatacatgaaataaatacatcaatataaaaataaaaaaaaacnganttn

SEQ ID NO: 66008 - DNA, 302 bp, Homo sapiens
gtatttttagtagagatggtgtttcaccttgttggccaggatggtctcaatctcttgacctcatgatccgcccgccttggcctcccaaagtgctaggattacaggcgtgagccaccgtgcccagcccaaagatccctttttaaacatgtattttggagtctgtatggtgaccttttatttttccctaggcactgaaaatgaagatgctggaagtgactatcaaagtgataatcaagcaagttggattcatcgtatgataatggccttggtgagtgattcagctttattcaataccagagaag

SEQ ID NO: 66009 - DNA, 2868 bp, Homo sapiens
  misc_feature (8)..(8): n is a, c, g, or t
  misc_feature (17)..(17): n is a, c, g, or t
  misc_feature (22)..(22): n is a, c, g, or t
  misc_feature (2862)..(2862): n is a, c, g, or t
  misc_feature (2865)..(2865): n is a, c, g, or t
  misc_feature (2868)..(2868): n is a, c, g, or t
aaagaagnaaaataaantaaanaaattaattttatattaaaaaaaaaaaaaaaaaaacttagttttaaagacgctagagtgccaaagaagactttgaagtgtgaaaacatttcctgtaattgaaaccaaaatgtcatttatagatccttaccagcacattatagtggagcaccagtattcccacaagtttacggtagtggtgttacgtgccaccaaagtgacaaagggggcctttggtgacatgcttgatactccagatccctatgtggaactttttatctctacaacccctgacagcaggaagagaacaagacatttcaataatgacataaaccctgtgtggaatgagacctttgaatttattttggatcctaatcaggaaaatgttttggagattacgttaatggatgccaattatgtcatggatgaaactctagggacagcaacatttactgtatcttctatgaaggtgggagaaaagaaagaagttccttttattttcaaccaagtcactgaaatggttctagaaatgtctcttgaagtttgctcatgcccagacctacgatttagtatggctctgtgtgatcaggagaagactttcagacaacagagaaaagaacacataagggagagcatgaagaaactcttgggtccaaagaatagtgaaggattgcattctgcacgtgatgtgcctgtggtagccatattgggttcaggtgggggtttccgagccatggtgggattctctggtgtgatgaaggcattatacgaatcaggaattctggattgtgctacctacgttgctggtctttctggctccacctggtatatgtcaaccttgtattctcaccctgattttccagagaaagggccagaggagattaatgaagaactaatgaaaaatgttagccacaatccccttttacttctcacaccacagaaagttaaaagatatgttgagtctttatggaagaagaaaagctctggacaacctgtcacctttactgatatctttgggatgttaataggagaaacactaattcataatagaatgaatactactctgagcagtttgaaggaaaaagttaatactgcacaatgccctttacctcttttcacctgtcttcatgtcaaacctgacgtttcagagctgatgtttgcagattgggttgaatttagtccatacgaaattggcatggctaaatatggtacttttatggctcccgacttatttggaagcaaattttttatgggaacagtcgttaagaagtatgaagaaaaccccttgcatttcttaatgggtgtctggggcagtgccttttccatattgttcaacagagttttgggcgtttctggttcacaaagcagaggctccacaatggaggaagaattagaaaatattaccacaaagcatattgtgagtaatgatagctcggacagtgatgatgaatcacacgaacccaaaggcactgaaaatgaagatgctggaagtgactatcaaagtgataatcaagcaagttggattcatcgtatgataatggccttggtgagtgattcagctttattcaataccagagaaggacgtgctgggaaggtacacaacttcatgctgggcttgaatctcaatacatcttatccactgtctcctttgagtgactttgccacacaggactcctttgatgatgatgaactggatgcagctgtagcagatcctgatgaatttgagcgaatatatgagcctctggatgtcaaaagtaaaaagattcatgtagtggacagtgggctcacatttaacctgccgtatcccttgatactgagacctcagagaggggttgatctcataatctcctttgacttttctgcaaggccaagtgactctagtcctccgttcaaggaacttctacttgcagaaaagtgggctaaaatgaacaagctcccctttccaaagattgatccttatgtgtttgatcgggaagggctgaaggagtgctatgtctttaaacccaagaatcctgatatggagaaagattgcccaaccatcatccactttgttctggccaacatcaacttcagaaagtacaaggctccaggtgttccaagggaaactgaggaagagaaagaaatcgctgactttgatatttttgatgacccagaatcaccattttcaaccttcaattttcaatatccaaatcaagcattcaaaagactacatgatcttatgcacttcaatactctgaacaacattgatgtgataaaagaagccatggttgaaagcattgaatatagaagacagaatccatctcgttgctctgtttcccttagtaatgttgaggcaagaagatttttcaacaaggagtttctaagtaaacccaaagcatagttcatgtactggaaatggcagcagtttctgatgctgaggcagtttgcaatcccatgacaactggatttaaaagtacagtacagatagtcgtactgatcatgagagactggctgatactcaaagttgcagttacttagctgcatgagaataatactattataagttaggttgacaaatgatgttgattatgtaaggatatacttagctacattttcagtcagtatgaacttcctgatacaaatgtagggatatatactgtatttttaaacatttctcaccaactttcttatgtgtgttctttttaaaaattttttttcttttaaaatatttaacagttcaatctcaataagacctcgcattatgtatgaatgttattcactgactagatttattcataccatgagacaacactatttttatttatatatgcatatatatacatacatgaaataaatacatcaatataaaaataaaaaaaaacnganttn

SEQ ID NO: 66010 - DNA, 823 bp, Homo sapiens
  misc_feature (1)..(2): n is a, c, g, or t
  misc_feature (651)..(651): n is a, c, g, or t
  misc_feature (700)..(700): n is a, c, g, or t
nntggtttaagtttcttaacaatttttatgtttttttttcataccaaatcatttctatgccatgccagccaaaggctcattttttctcctttttttttttcatcctaactacagttttcccttctcatttttcttcccttcccttccctgtctcctattcctgcgattctgtcttgatgatgtctaggtgatagagggaaaaaagggaggagagtttaaaatcttttaaagtagatattctgtttttggaatctcccacgtgatttgggtaaagtggaggagtctttgggggcaagtcagctatcttgcatatgtatcttcctcattcggaatgcgtgttagataagtgcaggataatctggaggcaaataccaggcttcagaagcatccttctcttttctttcttttcccttgagacagagtctcactctgttgcccaggctgaagtgcagtggtgtgatcttggctcactgcaacctccacctcccaggttcaagtgattctcgtgcctcagcctcccaagtagctgggactacaggcgcgtaccaccacaccgggctaattttttgtgtttttagtagagatggggtttcaccaagttggccaggctggtctcgaactcctgacctcaggtgatccgcctgcctcggncacccaaagtgctgggattacagacgtgagccaccgtgcacggcctctnttcttttttatcaaatgctgaaatctgaatgcccagggagattggtggcccttgccaggaagtgtcttaacactttgtggatactgctgcctgttgtctttaaaagctgggactcatcaaatt

SEQ ID NO: 66011 - DNA, 525 bp, Homo sapiens
tacgataatcatgtatcacttcaaaaacaaagtatttttagaaaagaacgaatactactgaagttggtattgtgactttatattcttatattatctgttggtccacactgaatcctttctgccacttgcaggccatttactcagcctcagggtgtttttctggaggttgtctcactgattggacctacctagctctttagttagcattagctgaagtcactggtgttgtcctttgaggtgctttgtggagaaaaagcgttgtatggtcaataggttagagaactgtgaatgtgatacctcactttaagagatcaccaatcacacttgcacattcaagtatctgtgaaggtgctcctgaaaatgaacttgtcaacatttaatctaatacttctccaaattctttgagcatggagggagctattttcttgttttatcaactgctaacataccatggaactagtatctgcaaagcagattatgagagacatgagcttaaatggtgatctagtgctttgttatggattt

SEQ ID NO: 66012 - DNA, 1479 bp, Homo sapiens
  misc_feature (12)..(12): n is a, c, g, or t
gaaacagcccgnccggcaccaccatgctcgccctggaggctgcacagctcgacgggccacacttcagctgtctgtacccagatggcgtcttctatgacctggacagctgcaagcattccagctaccctgattcagagggggctcctgactccctgtgggactggactgtggccccacctgtcccagccaccccctatgaagccttcgacccggcagcagccgcttttagccacccccaggctgcccagctctgctacgaaccccccacctacagccctgcagggaacctcgaactggcccccagcctggaggccccggggcctggcctccccgcataccccacggagaacttcgctagccagaccctggttcccccggcatatgccccgtaccccagccctgtgctatcagaggaggaagacttaccgttggacagccctgccctggaggtctcggacagcgagtcggatgaggccctcgtggctggccccgaggggaagggatccgaggcagggactcgcaagaagctgcgcctgtaccagttcctgctggggctactgacgcgcggggacatgcgtgagtgcgtgtggtgggtggagccaggcgccggcgtcttccagttctcctccaagcacaaggaactcctggcgcgccgctggggccagcagaaggggaaccgcaagcgcatgacctaccagaagctggcgcgcgccctccgaaactacgccaagaccggcgagatccgcaaggtcaagcgcaagctcacctaccagttcgacagcgcgctgctgcctgcagtccgccgggcctgagcacacccgaggctcccacctgcggagccgctgggggacctcacgtcccagccaggatccccctggaagaaaaagggcgtccccacactctaggtgataggacttacgcatccccaccttttggggtaaggggagtgctgccctgccataatccccaagcccagcccgggcctgtctgggattccccacttgtgcctggggtccctctgggatttctttgtcatgtacagactccctgggatcctcatgttttgggtgacaggacctatggaccactatactcggggaggcagggtagcagttcttccagaatcccaagagcttctctgggattttcttgtgatatctgattccccagtgaggcctgggacgtttttaagatcgctgtgtgtctgtaaaccctgaatctcatctggggtgggggccctgctggcaaccctgagccctgtccaaggttccctcttgtcagatctgagatttcctagttatgtctggggccctctgggagctgttatcatctcagatctcttcgcccatctatggctgtgttgtcacatctgtcccctcatttttgagatcccccaattctctggaactattctgctgcccctttttatgtgtctggagttccccaatcacatctagggctcctccaagatccttttgt

SEQ ID NO: 66013 - DNA, 1264 bp, Homo sapiens
  misc_feature (12)..(12): n is a, c, g, or t
gaaacagcccgnccggcaccaccatgctcgccctggaggctgcacagctcgacgggccacacttcagctgtctgtacccagatggcgtcttctatgacctggacagctgcaagcattccagctaccctgattcagagggggctcctgaccctggttcccccggcatatgccccgtaccccagccctgtgctatcagaggaggaagacttaccgttggacagccctgccctggaggtctcggacagcgagtcggatgaggccctcgtggctggccccgaggggaagggatccgaggcagggactcgcaagaagctgcgcctgtaccagttcctgctggggctactgacgcgcggggacatgcgtgagtgcgtgtggtgggtggagccaggcgccggcgtcttccagttctcctccaagcacaaggaactcctggcgcgccgctggggccagcagaaggggaaccgcaagcgcatgacctaccagaagctggcgcgcgccctccgaaactacgccaagaccggcgagatccgcaaggtcaagcgcaagctcacctaccagttcgacagcgcgctgctgcctgcagtccgccgggcctgagcacacccgaggctcccacctgcggagccgctgggggacctcacgtcccagccaggatccccctggaagaaaaagggcgtccccacactctaggtgataggacttacgcatccccaccttttggggtaaggggagtgctgccctgccataatccccaagcccagcccgggcctgtctgggattccccacttgtgcctggggtccctctgggatttctttgtcatgtacagactccctgggatcctcatgttttgggtgacaggacctatggaccactatactcggggaggcagggtagcagttcttccagaatcccaagagcttctctgggattttcttgtgatatctgattccccagtgaggcctgggacgtttttaagatcgctgtgtgtctgtaaaccctgaatctcatctggggtgggggccctgctggcaaccctgagccctgtccaaggttccctcttgtcagatctgagatttcctagttatgtctggggccctctgggagctgttatcatctcagatctcttcgcccatctatggctgtgttgtcacatctgtcccctcatttttgagatcccccaattctctggaactattctgctgcccctttttatgtgtctggagttccccaatcacatctagggctcctccaagatccttttgt

SEQ ID NO: 66014 - DNA, 1532 bp, Homo sapiens
  misc_feature (12)..(12): n is a, c, g, or t
gaaacagcccgnccggcaccaccatgctcgccctggaggctgcacaattcaggtggctggaggcagcctcagcatgcccctgtgtctctccccctccaggctcgacgggccacacttcagctgtctgtacccagatggcgtcttctatgacctggacagctgcaagcattccagctaccctgattcagagggggctcctgactccctgtgggactggactgtggccccacctgtcccagccaccccctatgaagccttcgacccggcagcagccgcttttagccacccccaggctgcccagctctgctacgaaccccccacctacagccctgcagggaacctcgaactggcccccagcctggaggccccggggcctggcctccccgcataccccacggagaacttcgctagccagaccctggttcccccggcatatgccccgtaccccagccctgtgctatcagaggaggaagacttaccgttggacagccctgccctggaggtctcggacagcgagtcggatgaggccctcgtggctggccccgaggggaagggatccgaggcagggactcgcaagaagctgcgcctgtaccagttcctgctggggctactgacgcgcggggacatgcgtgagtgcgtgtggtgggtggagccaggcgccggcgtcttccagttctcctccaagcacaaggaactcctggcgcgccgctggggccagcagaaggggaaccgcaagcgcatgacctaccagaagctggcgcgcgccctccgaaactacgccaagaccggcgagatccgcaaggtcaagcgcaagctcacctaccagttcgacagcgcgctgctgcctgcagtccgccgggcctgagcacacccgaggctcccacctgcggagccgctgggggacctcacgtcccagccaggatccccctggaagaaaaagggcgtccccacactctaggtgataggacttacgcatccccaccttttggggtaaggggagtgctgccctgccataatccccaagcccagcccgggcctgtctgggattccccacttgtgcctggggtccctctgggatttctttgtcatgtacagactccctgggatcctcatgttttgggtgacaggacctatggaccactatactcggggaggcagggtagcagttcttccagaatcccaagagcttctctgggattttcttgtgatatctgattccccagtgaggcctgggacgtttttaagatcgctgtgtgtctgtaaaccctgaatctcatctggggtgggggccctgctggcaaccctgagccctgtccaaggttccctcttgtcagatctgagatttcctagttatgtctggggccctctgggagctgttatcatctcagatctcttcgcccatctatggctgtgttgtcacatctgtcccctcatttttgagatcccccaattctctggaactattctgctgcccctttttatgtgtctggagttccccaatcacatctagggctcctccaagatccttttgt

SEQ ID NO: 66015 - DNA, 512 bp, Homo sapiens
cacttggatggcctgggggcagggttgctcttctgggggagggtcattcattcagttggcttttggctttcctttctccgggctgggcctggttctcttttgaacacttgtcgtgctgcagcaagagcatctttggatttggggctgtggagctgtggttcacccgcgggagtcacagccgcggcctggacctttccacctcgcaccctcgctcaccctccttcatgatgcctggaggatgcctgagacaattgccttgaagatgaggaaagtgtttcactgtttattttctccatgggatgtagcaggcaagcatgcttaggacagaaaaccactgagtttactcaggtaaatgcgggcctaatacaagagtattgggttccaatgttggttaaccaatgcagttaatacgcaatgcttctattttttttctttttgtaatcttatttagaagtttcaaacaaaaagacatagtctgctgatcaataaacatggagctgccctctcccact

SEQ ID NO: 66016 - DNA, 349 bp, Homo sapiens
aaactagctctcacatgcattgtagcctgcattccattcatccgagtaacccagaaaaatctcataccctgaaattaaattcagttgatttcagatagctagtagccccagacacctgaggataaaagtacaagtattctttggaggaatacaacaatatcctgggcttcaaactatttatttaaaataaaatctaatgtctacgtcatgcaatgcatgtttgtgcaaaacctggcgctaaagcatttgtagatgacctgcttctgtgtgagggtttcatccacagcggggcagttctctcactgtgatctatggagagtcagcctttgacacaagggtttgtaagaaa

SEQ ID NO: 66017 - DNA, 596 bp, Homo sapiens
ggtataatgaggcatgtctgacccctgcccccttcccatcatgacctgaactagtttttcaggttagctttggaatgcccttgctgagaggaggggtcccttcagatgatcaggggatttagaattttatttttggttaacagagtacattttctagccatttcctgaaaccattctcagcttctacccagggtgtatcagtcaggactcatttgtttgcaagaaacataacacaaactggctccaacaaaaaagggaaggaattgcctcaaatcagaaaagtccaagtggtaactataggcatgtctggacccagtaattctaaaagtattgtcagatacttcttcccaccaccttcccccttcacacccctgcttcccatttctgtggtaggctacacactcagtaggcctcatctacgtggcagaacttggaaatgccaggcaaacactacagttgaataattctagtagaaagagaatgcttcttccctaattggtttcagcagaagtctggcttagggtcatatcagctgactcccagtttgtaacccactttacattagctttcagagttcaattatacttcagatacag

SEQ ID NO: 66018 - DNA, 525 bp, Homo sapiens
tttaaaaaagagagacatttaatagtgtttttccaagtttttgtctgcggactgttttatctgtcttactgtttcccttggtcatccattcatccaaccatttatttgtctgtctactttcaactattagataatacatgtatgtggcacaaaacacaaaagatactgaaaaatacataaatgaaaagtcttcctcctatcttatccctggccactcagtttattttcccaaagacaagcactaatacccagtgcataatttcagagatactcgatcaatagacaaacatatatacacatgtttacggtctaattttattttaacacaacagaagtatgctttatactcgtctgcacctagtttttttaacttctattaatgcccatattgggctgtctcattctttcagatggatatagagattccactgcatgaatgtaactttatttaagcagactccttacgaatgctcatttaaaatgctacaatgctgcaatgagtatacttatctatatatcattctg

SEQ ID NO: 66019 - DNA, 2041 bp, Homo sapiens
cctttgtcattctagctgcctgctgcctccgcagcgtccccccagctctccctgtgctaactgcctgcaccttggacagagcgggtgcgcaaatcagaaggattagttgggacctgccttggcgaccccatggcatcccccagaaccgtaactattgtggccctctcagtggccctgggactcttctttgttttcatggggactatcaagctgacccccaggctcagcaaggatgcctacagtgagatgaaacgtgcttacaagagctatgttcgagccctccctctgctgaagaaaatggggatcaattccattctcctccgaaaaagcattggtgcccttgaagtggcctgtggcatcgtcatgacccttgtgcctgggcgtcccaaagatgtggccaacttcttcctactgttgctggtgttggctgtgctcttcttccaccagctggtcggtgatcctctcaaacgctacgcccatgctctggtgtttggaatcctgctcacttgccgcctgctgattgctcgcaagcccgaagaccggtcttctgagaagaagcctttgccagggaatgctgaggagcaaccctccttatatgagaaggcccctcagggcaaagtgaaggtgtcatagaaaagtggaagtgcaaagagtggaccttccaggcagttgcgtccatgacaccaggaagatgtcagtgtgtgtttttcatttgatttatttatcttggggaaagtgaaaaatgtaatctgcaagttaatgaccctattggcttgtgtacatctatatgctaaaatgacttccccacattgacatttgtgcgccacctttaatcactctggggcaactctcacatcttgctgcatgtacatgtatacggctactattgaagtgtaattgtgagatggactccaacaagcatgtgactgtgagattgtgtgtgggaaaatgtatttaactactctgtgtgtgtgtgtgtgtgtgtgtgcgcacgcgcgcacgcgcacacactcacgcacacacaagcagagaaggcgctgatcttgaactaatcctgcacaggcatccttccctttatagattgattccagcaaaggcggaataaaacaaatttcctatgaagagaatcctgatatgaaacaagtcatgtagtctcatggccgggaatctctccacagatactaacaacttaaacttactactttaggagaaaaaaaaaaacattcaatttcggacactgagttatatatgaaattaattaggctctagtccaacagttgtttacattttaaatagtccatattgaatttaattaaaacaagggatgcatgcagtcaaattgatagtttaattcttcaagtgataatataggaagtttcaccttgcctttgtccaagccccacctattaaaaccctttactcacagtttgaaactgaagcagtaaacttgtttccagacatctttttcagattgtcttaagcccaaagttgcctcacttccactattctcagcagccaaccaggatttggcagctgctccactgttacggttgagggaacagggatcagtcctgttagaagtctgtgagcctcaaactctacctgttctctgcaatcatccaaaatttgaaaaagaagctatatccagtgtttcactgccaaacagattcactactcttactgattcttcactgagctttgctagtataagcagagttccaagtctcccctagggttgtctctacatttctttatcattccagtgggtagggtttagctgggggaaggacatttcataagggttagttggactgagcagtatggacatttgcttttttcattacgtactgttgtttttccttgttaggtgtgctttggtggttttaatattattgtgccagggatggggaaatggggggggttgtgtgggaagagtacttattattgtgttttcttcagtgtaattgttcttggtaattgatacctctctgttttatttctctcattctttcaaaataaaactttttgaaatttggaggaa

SEQ ID NO: 66020 - DNA, 2171 bp, Homo sapiens
ttcagatttctctgtttggctcttgattatgcagttcaggagccatttcttgcctcttagagggactctctaagaagcccctgtctctcagaggcagagtctctcagaaccccaaccctagatcagctgggatgattatctgggattttttgttttccattaaggagtggattcctctgcatcgaggaggttagtcatgtattgactgcagtggcatttcttataagatctcaaagcgttgttgctgctgttgttgttttaagattatttgttctttagaacatgtctgtgaggtagatttagtgtattcgttatttttattttactgatggataaactaaagcagaacaagtttaatgacatatccaaggccagaaagaaacgtgcttacaagagctatgttcgagccctccctctgctgaagaaaatggggatcaattccattctcctccgaaaaagcattggtgcccttgaagtggcctgtggcatcgtcatgacccttgtgcctgggcgtcccaaagatgtggccaacttcttcctactgttgctggtgttggctgtgctcttcttccaccagctggtcggtgatcctctcaaacgctacgcccatgctctggtgtttggaatcctgctcacttgccgcctgctgattgctcgcaagcccgaagaccggtcttctgagaagaagcctttgccagggaatgctgaggagcaaccctccttatatgagaaggcccctcagggcaaagtgaaggtgtcatagaaaagtggaagtgcaaagagtggaccttccaggcagttgcgtccatgacaccaggaagatgtcagtgtgtgtttttcatttgatttatttatcttggggaaagtgaaaaatgtaatctgcaagttaatgaccctattggcttgtgtacatctatatgctaaaatgacttccccacattgacatttgtgcgccacctttaatcactctggggcaactctcacatcttgctgcatgtacatgtatacggctactattgaagtgtaattgtgagatggactccaacaagcatgtgactgtgagattgtgtgtgggaaaatgtatttaactactctgtgtgtgtgtgtgtgtgtgtgtgcgcacgcgcgcacgcgcacacactcacgcacacacaagcagagaaggcgctgatcttgaactaatcctgcacaggcatccttccctttatagattgattccagcaaaggcggaataaaacaaatttcctatgaagagaatcctgatatgaaacaagtcatgtagtctcatggccgggaatctctccacagatactaacaacttaaacttactactttaggagaaaaaaaaaaacattcaatttcggacactgagttatatatgaaattaattaggctctagtccaacagttgtttacattttaaatagtccatattgaatttaattaaaacaagggatgcatgcagtcaaattgatagtttaattcttcaagtgataatataggaagtttcaccttgcctttgtccaagccccacctattaaaaccctttactcacagtttgaaactgaagcagtaaacttgtttccagacatctttttcagattgtcttaagcccaaagttgcctcacttccactattctcagcagccaaccaggatttggcagctgctccactgttacggttgagggaacagggatcagtcctgttagaagtctgtgagcctcaaactctacctgttctctgcaatcatccaaaatttgaaaaagaagctatatccagtgtttcactgccaaacagattcactactcttactgattcttcactgagctttgctagtataagcagagttccaagtctcccctagggttgtctctacatttctttatcattccagtgggtagggtttagctgggggaaggacatttcataagggttagttggactgagcagtatggacatttgcttttttcattacgtactgttgtttttccttgttaggtgtgctttggtggttttaatattattgtgccagggatggggaaatggggggggttgtgtgggaagagtacttattattgtgttttcttcagtgtaattgttcttggtaattgatacctctctgttttatttctctcattctttcaaaataaaactttttgaaatttggaggaa

SEQ ID NO: 66021 - DNA, 2577 bp, Homo sapiens
gttccattgacactggttgctacagaattaactttactcggagatccgaggagccatcggcagttcccaggagtaagaacctgagagcgtgtgagaatttgagagggaagatctgatctcctagaattagagttggtacagaaaccatttcagctccaaaaatgttggaggaagatatggaagtcgccataaagatggtggttgtagggaatggagcagttggaaaatcaagtatgattcagcgatattgcaaaggcatttttacaaaagactacaagaaaaccattggagttgattttttggagcgacaaattcaagttaatgatgaagatgtcagactaatgttatgggacactgcaggtcaggaggaatttgatgcaattacaaaggcctactatcgaggagcccaggcttgtgtgctcgtgttctctaccacagatagggaatcttttgaagcagtttccagttggagagagaaagtagtagccgaagtgggagatataccaactgtacttgtgcaaaacaagattgatcttctggatgattcttgtataaagaatgaggaagctgaggcactggcaaaaaggttaaagttaagattctacagaacatcagtgaaagaagatctaaatgtgaatgaagtttttaagtatttggctgaaaaataccttcagaaactcaaacaacaaatagctgaggatccagaactaacgcattcaagtagtaacaagattggtgtctttaatacatctggtggaagtcactccggtcagaattcaggtaccctcaatggtggagatgtcatcaatcttagacccaacaaacaaaggaccaagaaaaacagaaatccttttagcagctgtagcataccctaagatgttttgggaggaaaacaattgaattacattgtgcaatgcattaagaaacccatccagctgtcatggtatgttacaaggttttcagcagactttgctcctaatggctctctgaaagtgacagacttaaatattgctctgcagtgcttttcagaatgtagagtgagacctctggtggaaaaattattgccctgtggactcctttaattttttttacattagacgaagcttctcctgtttgtaaaggaatgctataagaaatttcaaacacaggttttgcggaattttaaatgctggaaaacataaatgaaatgcctaaatatattgttacagattttaatactgtggatcaaggaaagatagcaagcattcttttcctgaaattggtcatgtagcttttctgcgaaatagtattgaatctgaatactttcacaaaataatactgaaaggtaaaccctaaatcttgccagactgcattagtattttggcattgaaacttgtgcaatatctgtgtaatgtagaatgtggggtgtgcatgcagatgtctggtactggagtaagctgaaggtatgtgcagtatttaagaaaatgtacattctaattaattcacttataaaaccatttacatattgtgtatatgtttttattttcaaatgataaactctagacatatattttgcaaaatgagcttgggtttaaaaagtgctttgtgccaaaaatatcatacctaatttttatagtgctttactatcagaatttatattgtttattatatcttttaaaagcagtaagcagttttcatctgacagcgtagataaaagaggagtataggaatttgaatgctagagcatctcccaggtgagccttattgcagatctttttgatatagtcacccataagcatggtgagctcctgctctcataaggtcagccaaagccccttaagaaggtacacagcacatctgcagtcattcaggaggtcctgtgaagtgtggtgatgcatctaacaccttttgctgctcactgagaacccagctttgaacttacaagattacactaaccatttttaaagtgcacaaaaatattattattagtcttaactaaaattacatattttataatgccctgcaactctaaaccatccttttgtttacacatttttgtatggtattttaagattatcaatcacttcaacatttctataaccttgtttgtatagcactttctcaagagctgtcagtcccacatacagaatcatttcttttacaaaatgatttaatatgtaatcatgtgtcaggacataaattttgtcacttgggacagtagctttccagctaagataattgcgtgaactctgttaaaactgattatcactcatcaatggctttatttttaacctataaataacccctttcaatatacctggtttttacagcattgcaaaatctgtaaaaataacttttattggaaaatgtcatgaagtcatttttcattatttgtactaaacaatgttttatgtactccttttgtgttttatcttttgtttttccatctgtactcccctcatcctcctaatgttgagaaaatcaaatttcctgggtgtgtccttgttaagtgatcaaaagtaaatgttctctttgccattttagatggaaaaataaaaaaaattaaaaagtaaatttttgcttttcattatattgaaa

SEQ ID NO: 66022 - DNA, 3047 bp, Homo sapiens
cgggtccacagatgaggggagtcgagactcccgcgccccaccacccccggcggagctgctgctgagccactcaatctgagccctggctactaataaagttcgtttaaaaatcataatcattcttaagagagcgaaagagggtgcgaactagccgctcggccccgcagggagagctggcgcgtcgggaggagacagcggcggcagcggttgcgccgcgaccaggaggagccggtggcgccgggcggcgggtccgcggccggtgggggacggtgagtagcggctcgcgctgcggtgcagcggcgctgcactcactcgccctctccaggggctgggggttcgtccggctccactggggaagactcagcttctccccggggtcccgggttgtgccttactctccggagtgggcaggggtatcgagggcaggggcctcccggcccggctcccccatcccccggttcggaccgccgagcgccggctctcccctccctgagcaccgatcccaagttccagctagagaaggtgggcggcagcgccagcccggcgccccctcccagctcccagcgatttgagagggaagatctgatctcctagaattagagttggtacagaaaccatttcagctccaaaaatgttggaggaagatatggaagtcgccataaagatggtggttgtagggaatggagcagttggaaaatcaagtatgattcagcgatattgcaaaggcatttttacaaaagactacaagaaaaccattggagttgattttttggagcgacaaattcaagttaatgatgaagatgtcagactaatgttatgggacactgcaggtcaggaggaatttgatgcaattacaaaggcctactatcgaggagcccaggcttgtgtgctcgtgttctctaccacagatagggaatcttttgaagcagtttccagttggagagagaaagtagtagccgaagtgggagatataccaactgtacttgtgcaaaacaagattgatcttctggatgattcttgtataaagaatgaggaagctgaggcactggcaaaaaggttaaagttaagattctacagaacatcagtgaaagaagatctaaatgtgaatgaagtttttaagtatttggctgaaaaataccttcagaaactcaaacaacaaatagctgaggatccagaactaacgcattcaagtagtaacaagattggtgtctttaatacatctggtggaagtcactccggtcagaattcaggtaccctcaatggtggagatgtcatcaatcttagacccaacaaacaaaggaccaagaaaaacagaaatccttttagcagctgtagcataccctaagatgttttgggaggaaaacaattgaattacattgtgcaatgcattaagaaacccatccagctgtcatggtatgttacaaggttttcagcagactttgctcctaatggctctctgaaagtgacagacttaaatattgctctgcagtgcttttcagaatgtagagtgagacctctggtggaaaaattattgccctgtggactcctttaattttttttacattagacgaagcttctcctgtttgtaaaggaatgctataagaaatttcaaacacaggttttgcggaattttaaatgctggaaaacataaatgaaatgcctaaatatattgttacagattttaatactgtggatcaaggaaagatagcaagcattcttttcctgaaattggtcatgtagcttttctgcgaaatagtattgaatctgaatactttcacaaaataatactgaaaggtaaaccctaaatcttgccagactgcattagtattttggcattgaaacttgtgcaatatctgtgtaatgtagaatgtggggtgtgcatgcagatgtctggtactggagtaagctgaaggtatgtgcagtatttaagaaaatgtacattctaattaattcacttataaaaccatttacatattgtgtatatgtttttattttcaaatgataaactctagacatatattttgcaaaatgagcttgggtttaaaaagtgctttgtgccaaaaatatcatacctaatttttatagtgctttactatcagaatttatattgtttattatatcttttaaaagcagtaagcagttttcatctgacagcgtagataaaagaggagtataggaatttgaatgctagagcatctcccaggtgagccttattgcagatctttttgatatagtcacccataagcatggtgagctcctgctctcataaggtcagccaaagccccttaagaaggtacacagcacatctgcagtcattcaggaggtcctgtgaagtgtggtgatgcatctaacaccttttgctgctcactgagaacccagctttgaacttacaagattacactaaccatttttaaagtgcacaaaaatattattattagtcttaactaaaattacatattttataatgccctgcaactctaaaccatccttttgtttacacatttttgtatggtattttaagattatcaatcacttcaacatttctataaccttgtttgtatagcactttctcaagagctgtcagtcccacatacagaatcatttcttttacaaaatgatttaatatgtaatcatgtgtcaggacataaattttgtcacttgggacagtagctttccagctaagataattgcgtgaactctgttaaaactgattatcactcatcaatggctttatttttaacctataaataacccctttcaatatacctggtttttacagcattgcaaaatctgtaaaaataacttttattggaaaatgtcatgaagtcatttttcattatttgtactaaacaatgttttatgtactccttttgtgttttatcttttgtttttccatctgtactcccctcatcctcctaatgttgagaaaatcaaatttcctgggtgtgtccttgttaagtgatcaaaagtaaatgttctctttgccattttagatggaaaaataaaaaaaattaaaaagtaaatttttgcttttcattatattgaaa

SEQ ID NO: 66023 - DNA, 1311 bp, Homo sapiens
cgggtccacagatgaggggagtcgagactcccgcgccccaccacccccggcggagctgctgctgagccactcaatctgagccctggctactaataaagttcgtttaaaaatcataatcattcttaagagagcgaaagagggtgcgaactagccgctcggccccgcagggagagctggcgcgtcgggaggagacagcggcggcagcggttgcgccgcgaccaggaggagccggtggcgccgggcggcgggtccgcggccggtgggggacggtgagtagcggctcgcgctgcggtgcagcggcgctgcactcactcgccctctccaggggctgggggttcgtccggctccactggggaagactcagcttctccccggggtcccgggttgtgccttactctccggagtgggcaggggtatcgagggcaggggcctcccggcccggctcccccatcccccggttcggaccgccgagcgccggctctcccctccctgagcaccgatcccaagttccagctagagaaggtgggcggcagcgccagcccggcgccccctcccagctcccagcgatttgagagggaagatctgatctcctagaattagagttggtacagaaaccatttcagctccaaaaatgttggaggaagatatggaagtcgccataaagatggtggttgtagggaatggagcagttggaaaatcaagtatgattcagcgatattgcaaaggcatttttacaaaagactacaagaaaaccattggagttgattttttggagcgacaaattcaagttaatgatgaagatgtcagactaatgttatgggacactgcaggtcaggaggaatttgatgcaattacaaaggcctactatcgaggagcccaggcttgtgtgctcgtgttctctaccacagatagggaatcttttgaagcagtttccagttggagagagaaagtagtagccgaagtgggagatataccaactgtacttgtgcaaaacaagattgatcttctggatgattcttgtataaagaatgaggaagctgaggcactggcaaaaaggttaaagttaagattctacagaacatcagtgaaagaagatctaaatgtgaatgaagtttttaagtatttggctgaaaaataccttcagaaactcaaacaacaaatagctgaggatccagaactaacgcattcaagtagtaacaagattgatttgagagggaagatctgatctcctagaattagagttggtacagaaaccatttcagctccaaaaatgttggaggaagatatggaagtcgccataaagatggtatc

SEQ ID NO: 66024 - DNA, 494 bp, Homo sapiens
gaattcaacataaatagagtttatatgttgaaaagtaaagaagagtagtacaaagatgagttcaacatttatttacataaaagttgttttgaatggataaaagttgcccccattcttcatgagattgttttcttaatgtaaatgtaatatgttaatgtaaataccttgattgattgattgattgattgtgaacttacaggagcccaggcttgtgtgctcgtgttctctaccacagatagggaatcttttgaagcagtttccagttggagagagaaagtagtagccgaagtgggagatataccaactgtacttgtgcaaaacaagattgatcttctggatgattcttgtataaagaagtaagatggctacttttggggaaggagggacagtaattctataaagttaagacatcttaatttttgcatagttttacaggttctaggaaaaattctatactttcattttgaaggctttaatgacttaaatattttaat

SEQ ID NO: 66025 - DNA, 2529 bp, Homo sapiens
cgggtccacagatgaggggagtcgagactcccgcgccccaccacccccggcggagctgctgctgagccactcaatctgagccctggctactaataaaatttgagagggaagatctgatctcctagaattagagttggtacagaaaccatttcagctccaaaaatgttggaggaagatatggaagtcgccataaagatggtggttgtagggaatggagcagttggaaaatcaagtatgattcagcgatattgcaaaggcatttttacaaaagactacaagaaaaccattggagttgattttttggagcgacaaattcaagttaatgatgaagatgtcagactaatgttatgggacactgcaggtcaggaggaatttgatgcaattacaaaggcctactatcgaggagcccaggcttgtgtgctcgtgttctctaccacagatagggaatcttttgaagcagtttccagttggagagagaaagtagtagccgaagtgggagatataccaactgtacttgtgcaaaacaagattgatcttctggatgattcttgtataaagaatgaggaagctgaggcactggcaaaaaggttaaagttaagattctacagaacatcagtgaaagaagatctaaatgtgaatgaagtttttaagtatttggctgaaaaataccttcagaaactcaaacaacaaatagctgaggatccagaactaacgcattcaagtagtaacaagattggtgtctttaatacatctggtggaagtcactccggtcagaattcaggtaccctcaatggtggagatgtcatcaatcttagacccaacaaacaaaggaccaagaaaaacagaaatccttttagcagctgtagcataccctaagatgttttgggaggaaaacaattgaattacattgtgcaatgcattaagaaacccatccagctgtcatggtatgttacaaggttttcagcagactttgctcctaatggctctctgaaagtgacagacttaaatattgctctgcagtgcttttcagaatgtagagtgagacctctggtggaaaaattattgccctgtggactcctttaattttttttacattagacgaagcttctcctgtttgtaaaggaatgctataagaaatttcaaacacaggttttgcggaattttaaatgctggaaaacataaatgaaatgcctaaatatattgttacagattttaatactgtggatcaaggaaagatagcaagcattcttttcctgaaattggtcatgtagcttttctgcgaaatagtattgaatctgaatactttcacaaaataatactgaaaggtaaaccctaaatcttgccagactgcattagtattttggcattgaaacttgtgcaatatctgtgtaatgtagaatgtggggtgtgcatgcagatgtctggtactggagtaagctgaaggtatgtgcagtatttaagaaaatgtacattctaattaattcacttataaaaccatttacatattgtgtatatgtttttattttcaaatgataaactctagacatatattttgcaaaatgagcttgggtttaaaaagtgctttgtgccaaaaatatcatacctaatttttatagtgctttactatcagaatttatattgtttattatatcttttaaaagcagtaagcagttttcatctgacagcgtagataaaagaggagtataggaatttgaatgctagagcatctcccaggtgagccttattgcagatctttttgatatagtcacccataagcatggtgagctcctgctctcataaggtcagccaaagccccttaagaaggtacacagcacatctgcagtcattcaggaggtcctgtgaagtgtggtgatgcatctaacaccttttgctgctcactgagaacccagctttgaacttacaagattacactaaccatttttaaagtgcacaaaaatattattattagtcttaactaaaattacatattttataatgccctgcaactctaaaccatccttttgtttacacatttttgtatggtattttaagattatcaatcacttcaacatttctataaccttgtttgtatagcactttctcaagagctgtcagtcccacatacagaatcatttcttttacaaaatgatttaatatgtaatcatgtgtcaggacataaattttgtcacttgggacagtagctttccagctaagataattgcgtgaactctgttaaaactgattatcactcatcaatggctttatttttaacctataaataacccctttcaatatacctggtttttacagcattgcaaaatctgtaaaaataacttttattggaaaatgtcatgaagtcatttttcattatttgtactaaacaatgttttatgtactccttttgtgttttatcttttgtttttccatctgtactcccctcatcctcctaatgttgagaaaatcaaatttcctgggtgtgtccttgttaagtgatcaaaagtaaatgttctctttgccattttagatgga

SEQ ID NO: 66026 - DNA, 2528 bp, Homo sapiens
gttccattgacactggttgctacagaattaactttactcggagatccgaggagccatcggcagttcccaggagtaagaacctgagagcgtgtgagaatttgagagggaagatctgatctcctagaattagagttggtacagaaaccatttcagctccaaaaatgttggaggaagatatggaagtcgccataaagatggtggttgtagggaatggagcagttggaaaatcaagtatgattcagcgatattgcaaaggcatttttacaaaagactacaagaaaaccattggagttgattttttggagcgacaaattcaagttaatgatgaagatgtcagactaatgttatgggacactgcaggtcaggaggaatttgatgcaattacaaaggcctactatcgaggagcccaggcttgtgtgctcgtgttctctaccacagatagggaatcttttgaagcagtttccagttggagagagaaagtagtagccgaagtgggagatataccaactgtacttgtgcaaaacaagattgatcttctggatgattcttgtataaagaatgaggaagctgaggcactggcaaaaaggttaaagttaagattctacagaacatcagtgaaagaagatctaaatgtgaatgaagtttttaagtatttggctgaaaaataccttcagaaactcaaacaacaaatagctgaggatccagaactaacgcattcaagtagtaacaagattggtgtctttaatacatctggtggaagtcactccggtcagaattcaggtaccctcaatggtggagatgtcatcaatcttagacccaacaaacaaaggaccaagaaaaacagaaatccttttagcagctgtagcataccctaagatgttttgggaggaaaacaattgaattacattgtgcaatgcattaagaaacccatccagctgtcatggtatgttacaaggttttcagcagactttgctcctaatggctctctgaaagtgacagacttaaatattgctctgcagtgcttttcagaatgtagagtgagacctctggtggaaaaattattgccctgtggactcctttaattttttttacattagacgaagcttctcctgtttgtaaaggaatgctataagaaatttcaaacacaggttttgcggaattttaaatgctggaaaacataaatgaaatgcctaaatatattgttacagattttaatactgtggatcaaggaaagatagcaagcattcttttcctgaaattggtcatgtagcttttctgcgaaatagtattgaatctgaatactttcacaaaataatactgaaaggtaaaccctaaatcttgccagactgcattagtattttggcattgaaacttgtgcaatatctgtgtaatgtagaatgtggggtgtgcatgcagatgtctggtactggagtaagctgaaggtatgtgcagtatttaagaaaatgtacattctaattaattcacttataaaaccatttacatattgtgtatatgtttttattttcaaatgataaactctagacatatattttgcaaaatgagcttgggtttaaaaagtgctttgtgccaaaaatatcatacctaatttttatagtgctttactatcagaatttatattgtttattatatcttttaaaagcagtaagcagttttcatctgacagcgtagataaaagaggagtataggaatttgaatgctagagcatctcccaggtgagccttattgcagatctttttgatatagtcacccataagcatggtgagctcctgctctcataaggtcagccaaagccccttaagaaggtacacagcacatctgcagtcattcaggaggtcctgtgaagtgtggtgatgcatctaacaccttttgctgctcactgagaacccagctttgaacttacaagattacactaaccatttttaaagtgcacaaaaatattattattagtcttaactaaaattacatattttataatgccctgcaactctaaaccatccttttgtttacacatttttgtatggtattttaagattatcaatcacttcaacatttctataaccttgtttgtatagcactttctcaagagctgtcagtcccacatacagaatcatttcttttacaaaatgatttaatatgtaatcatgtgtcaggacataaattttgtcacttgggacagtagctttccagctaagataattgcgtgaactctgttaaaactgattatcactcatcaatggctttatttttaacctataaataacccctttcaatatacctggtttttacagcattgcaaaatctgtaaaaataacttttattggaaaatgtcatgaagtcatttttcattatttgtactaaacaatgttttatgtactccttttgtgttttatcttttgtttttccatctgtactcccctcatcctcctaatgttgagaaaatcaaatttcctgggtgtgtccttgttaagtgatcaaaagtaaatgttctctttgccattttagatgga

SEQ ID NO: 66027 - DNA, 821 bp, Homo sapiens
ggggaacagtagtgtctggagggaagggggaagaatcttcatccactccattgtctgaattgttcacccggtaacttttgccatgacaattttacaaattaaggttttcttttaaaattgaggaataattgacatttcatcaagggcacagatcttcagcatggagcgtagacccaagggaccaccacaaagctcaagatgtaggacatctccatcaattcaggaggctccctccgggttacccccactccagagggtctcattttgttgctgaggctggagtgcggtggcacaaacgtggctcactgcaggcttgacgttctgggctcaagtgatcctcccatcttggcctcccgagtagctgggaccacaggccatgatactgctggtggtgcagaacggagtttagacaaggaggtgcacggccgagagcaatctggaaacgatcagagaggccagttgcgtaatgatggagaagccgctgttttgcagccacgaaaatcatgcctggagagagaatgttccgggatgtgaaattattcacaatctattgttcaaagaagacagttgattatgggacggaagagctccaggagaagagagctaagccagcccttgggatgactacaagaggaccggaggagacagggaaacacaaggggagtagaaggcttcagtagaagatttcagtagaggctgaaatctactgatatgtacacctccaaggacacatgtgtcacatcagaatagttgctgaatcccactgggcctctatttcctcatgtgtaaaatgggaataataaagctcctacttcacaggg

SEQ ID NO: 66028 - DNA, 537 bp, Homo sapiens
tctgctgacaacagcccacaaccatctagaaaacatgatttctacaaagtcttgatcctggaatggagcacacagccccttctccccaggccatgatactgctggtggtgcagaacggagtttagacaaggaggtgcacggccgagagcaatctggaaacgatcagagaggccagttgcgtaatgatggagaagccgctgttttgcagccacgaaaatcatgcctggagagagaatgttccgggatgtgaaattattcacaatctattgttcaaagaagacagttgattatgggacggaagagctccaggagaagagagctaagccagcccttgggatgactacaagaggaccggaggagacagggaaacacaaggggagtagaaggcttcagtagaagatttcagtagaggctgaaatctactgatatgtacacctccaaggacacatgtgtcacatcagaatagttgctgaatcccactgggcctctatttcctcatgtgtaaaatgggaataataaagctcctacttcacaggg

SEQ ID NO: 66029 - DNA, 840 bp, Homo sapiens
ggggaacagtagtgtctggagggaagggggaagaatcttcatccactccattgtctgaattgttcacccggtaacttttgccatgacaattttacaaattaaggttttcttttaaaattgaggaataattgacatttcatcaagggcacagatcttcagcatggagcgtagacccaagggaccaccacaaagctcaagatgtaggacatctccatcaattcaggaggctccctccgggttacccccactccagagggtctcattttgttgctgaggctggagtgcggtggcacaaacgtggctcactgcaggcttgacgttctgggctcaagtgatcctcccatcttggcctcccgagtagctgggaccacaggccatgatactgctggtggtgcagaacggagtttagacaaggaggtgcacggccgagagcaatctggaaacgatcagagaggccagttgcgtaatgatggagaagccgctgttttgcagccacgaaaatcatgcctggagagagaatgttccgggatgtgaaattattcacaatctattgttcaaagaagacagttgattatgggacggaagggatgctatggccttccagagctccaggagaagagagctaagccagcccttgggatgactacaagaggaccggaggagacagggaaacacaaggggagtagaaggcttcagtagaagatttcagtagaggctgaaatctactgatatgtacacctccaaggacacatgtgtcacatcagaatagttgctgaatcccactgggcctctatttcctcatgtgtaaaatgggaataataaagctcctacttcacaggg

SEQ ID NO: 66030 - DNA, 758 bp, Homo sapiens
ggggaacagtagtgtctggagggaagggggaagaatcttcatccactccattgtctgaattgttcacccggtaacttttgccatgacaattttacaaattaaggttttcttttaaaattgaggaataattgacatttcatcaagggcacagatcttcagcatggagcgtagacccaagggaccaccacaaagctcaagatgtaggacatctccatcaattcaggaggctccctccgggttacccccactccagagggtctcattttgttgctgaggctggagtgcggtggcacaaacgtggctcactgcaggcttgacgttctgggctcaagtgatcctcccatcttggcctcccgagtagctgggaccacaggtacgtgccaccacactcagctaatttttcttttccttttttttttttttgtagagacaggatcttgccgtgttgtccaggctggacttgaattcctgagctcaagcaatcctcctgccttggcctcccaaagtgctgggattacaggcatgagccactgctcctggcttgtttcaaaattaaaaagaaaaacttacatgcagtaaaattaagttttcccttttttattatatgtgctgccaaagttagtgctaaaatttccccttttgagtgtacagttctgtgagtttggggaaatatatacagttgtgtaacccccaccacagttgtgatatagaacataatcatcctatcctcgatggattatttgggcctgttacaaact

SEQ ID NO: 66031 - DNA, 546 bp, Homo sapiens
  misc_feature (543)..(543): n is a, c, g, or t
attggtcacccagggtctggccctgtgctagcacccaactgtgaacaagacccagaatccacctgtgaggagggagtccaactctctacagtgtagcctgcctctgctttttagaccttatcgaaaggacatcaaggagcttttggaggacttaaacagggatcagattgtccctttagttgtggtgtggagaagtgatcagaggagtgaggcaggctgtcaggcggccctgctggcctcggtgatacaggtgtcaggcagtggcggccttcgccggagtggtggtcatggagatggattctccagctgttcaggcagtggaattagcagtacctggcagctggctgaggaatttggcaacgccctgtccacacacttttgcttctaggacttctgtatgtctgttacacccactatactgcaaactcctcaagaatgccttgcaagcagagctgtctaattcatctgtgcatcgccagagcccagcaccgtgctgagcacatagtaggagctcaataaatgttagttgcatacgtgaaaaanaaa

SEQ ID NO: 66032 - DNA, 506 bp, Homo sapiens
tgttttcatctactgacttctatatacattctacaatatagttttattctttgtgtagatctactttccatctggtatcttttactatcatttgaagaatttcctttatttctgatagcaaaggtctgctggcaacaaattttgttgatctgaaaaattttaattttgctttatttattcttatttttgtagagatggggtttccctatgttgcctaggctggtctcaaactgctggcctcaagccatcctcctgccctgacctcccaaagttgctttcttttttgaaagccatattttctagataaagaattacaggttgacagttattttcccccaaccttttaatgaagtcattcaattgtcttttggcttgcattgttctagcctagaaacctgtgaattctttgttctttcacctgcattgtatcttcatttttctccttatcactggatttcaggaacttgactatgttatgtcttggtatgaattcttttgtgtttatc

SEQ ID NO: 66033 - DNA, 399 bp, Homo sapiens
cctcgaggagcccagctcagtgtgggcagaaaaggactcccaggatgctaggatgctgcacccattaacttgtcatttacattaggtatatctcctaatgctatgattccactttttatccctactcctacattgttggttttgccaaggatgttcttagaagactccaaccctcttttatgtggggaggaggtgctaaagccccctagtgagttggtattgttttttttctcttttgatttggggggttttcatctttcatggagtggactggccttggagacttcgcctgttgaaaggagaacttaaaagactggagtgcataaggagcttggcaatggaccgccaagacattcatggttgtgcactcttgcctcagtacccataaatctaatgatt

SEQ ID NO: 66034 - DNA, 423 bp, Homo sapiens
ctctccatgatccagaacattcacaggtgtttcagagaccctcaccatctccccaaggagaaagctcttctcttgcctggaaattcacagaagaagagaaaaaggcagcctctcagagctgatttcttgaagactgaactcttctgggcatggtgcactcctcctgggtgggtgacacgccacagtctaggacaagcagggcctagtggaacgacagtgtcgtggcctcctaacttgtgtgctctcaggcaaattactgagccctgtctgcaagatgctaataactctgaagatctatattcctagtcctttacaaaattttattataaattgacaatttatatttgtgtttatttacaagggtacaaagtgatatattttatgaatacaatgtataataattaaacccagctaattaacata

SEQ ID NO: 66035 - DNA, 2423 bp, Homo sapiens
  misc_feature (306)..(306): n is a, c, g, or t
  misc_feature (866)..(866): n is a, c, g, or t
  misc_feature (1517)..(1517): n is a, c, g, or t
  misc_feature (1563)..(1563): n is a, c, g, or t
  misc_feature (1661)..(1661): n is a, c, g, or t
aaaaaattaaggctgatagaggtaaagcaactttcccaagatcaagtaatagagctggatttcaacctacacatcccctctctagagcccatgattagaatcactgtgttgcaggtctgtgtctacaatggtaacgttgtgacataaccgagcagtatcagtggtgtcctccctggaaaggcctggccatcccagtgatacgtttctgagttagaaggcatcttggacactccacaggttcttaacctgcctgcacattggaattacctggaaaactggaaaataaacttatacctgaatcccacnctcagaattttggatttgactgatctgggtggagtattgttggtgggaaaggcaggtatttaaaagttccctagttggttccaatatgattcaaagttgagaaccactgaccagccctctggactggcaacacttacgtccctaactgtcagcatcagcatcatctggaaatttgtcagaaatgcagactgccaggcttcacctcaggtgatttgtatgcacactacagtttgagagaatggcaggcagtgctcagctaacccctaagggattaggaggacttagggaaagtgggaagggaagaacagagggaattctgatgttttctcatgattaacagggcttatgggttttggggaggaaaatagtgctgttctacccatatcgtatcaagagtacatactatcaatgtgacttataactattgatgttaaccttgatcacctggctgagatagtgtgtgtcagatttctccactgtagcaaattacttttgtccctacccccttccgtactttggaaggaattcactatgcacattcctcacttaaggaatggggngacatgctccgacttcatggggtcaggggtactatcaatttaatttatttggaattcttctgtacaggagattcatttcttctccctcatttatttacttagtcatttatgtcagtatggactcgtagatgtttattatatactttgggttataatccaatactactatattttgctcaaattgttccagccttggccattgggaactctttcagttggatcctgggctcctttgacatattcctatcatagggaatatgagaataacatcgcaaaaaaaccagaaaaggaagaatggcacataaaggaactcgaagcaggtcttggtggctgaagcagagattaccaagagattattagatcaaccttttcatacagacgagaaatgcttctttctaggactaaggactgagcactggctacttcctctgtctgcctggttcatatcttccacccgaagtgataccttctcaataacggcctaccctggtttcctcgtttaaatcatgatctttcctctaaacttgcactctcagacttcaatatttgctccattttttcccctcaacatttgtaaccttctaatatgctaaatagtgtatttattttgtctttctttactgcacatccccaccctagaatgtaaattcnacgagcgcacagattttgtttttgttctgcattgtatcctccagcnctaacaacagtatctgacacttcaaagaggtgcttcacatttatttgctgagttaaaatgaattaatcaatttacaaaaatttgggttagtttatgcntactttatctagagtgggattgtgaaatatcagtcaaaagccttttcaggagtttaaatgagtgaagaacaagatcaggtttgattttagaaagaccatctggctgtgtgtatctagtggacccaggaatggggaggccgagggctgcactaaacgcagggtaaggccagtttggtgacaatgtcagcctgccctaagagagcagtggctgaagaagatagcatgcatttgaggtcttcttaggaagtagcatcagcaggggacagctcagggagtaaggaagagaggagtcattctaggtttctgttttaggcaaccagaaggatggaaagccatctgtaggcagtgctgaggtagaacagatatttggagggaaaaagttaagctgttttgaagtattaaaaattgcagactgatgtaacctggtggaaatgtagatttcacattcattaaacaatgacctattacccttctggcactatagtaagccccaacgagtaagtggtagtcattcaatgaagtacccactatgtgccagacatagtgtcagctccagtggggaatgagacaggtgtgtggattcatcctccttgcacttgcagaacttggagaaacagaaaaaatcatgtgagagcaatgggagtgagaaggagagagagagagagagagagagagacagacagagatagtacaagattactttcagctagggattcaggggaatgcagctttctggtaatgatagcatttacagtggagctt

SEQ ID NO: 66036 - DNA, 427 bp, Homo sapiens
cagggctccaagcaaaatcaccttgcctcctaatagaatgtcaaaaggataaacattaattggggaaaaaaaaagttttcaccccaaagcctttcaaaaacagactcaaagagaaggaagttggtccctagccactgtgttcagcacagacccacgctgggcttagtattagcaaaaccggccaccaaaatcttcagtctgtggttccctgcacctgcagctctgagccctctgcctgtcctcccctccccctcccacccaccttagccaaattctcaggttcctggggggtggggaggaggtgggtattgactccaaatcctactggggagaatatcctaatttaaagcatctctttttccctttttaattttatttttctttttctgtcttcaaccttaacacatgaatgatcttaaagttttga

SEQ ID NO: 66037 - DNA, 456 bp, Homo sapiens
attttacattcccaccagcagtatatgagcgtttcattttctctaaatcctcaccaacacttaatattattgttttgattatagctgtcctagtggatgtgaagtggtatcttattgtggttttgatttgcatttccctgatgactaatgatgttcgtcatctttttatgtgtttactggccatttgataatcttctttggaaaaacaccttttcagattctttacccatttgtgtgtctttggagtaatattcacatcttttgcctatttttacttgggttatttatcattttattattaagttgtaagtgttcttaatatattctagatacaagtcacttattgtatgtatgatttgcaaatattttcctttttcttgggttgtcttttcactttcttgatggtgtccttggaaatacaagttttaaattttgataaagtccagtttatttttt

SEQ ID NO: 66038 - DNA, 672 bp, Homo sapiens
ctcttaatccatctcctattgccccgtcctctgcaatctgggccaaggagtacagcacagcagtagcgatgccatgtgccttccaagacgatgtcataaaagactgtattatagttctccacctggttctcctggaacaatcactcttataacccagctaccatggtatgacaaggtccaggcagcccatggcgtgttctacatgaagagggccatttggagaggaaccaggaccccggccctggaccccaactgagctctggtcaacagccttttgagcagccatcttgaaagaggattctccagccccctgaacggtcccagctgacactgcatggaacccaaaccttccatgcctagccatgcccaagttgcctatttccgaactcaataactgttgttttgagccactgttttgaagaggtttgctacacagcaataaataactgatacacacgactataaaagattctggcttctgcttaaaaattctatgagaaagatgctgagaattttctatgtattaaactattaagatttataggaggccattgatttagactgagctcctgctctaggcttcaacagatccaaccaaaatagagtcactcatgctaaagttccacatcaccaaaccaaaactaagctatttatctgacctgagaaatcaag

SEQ ID NO: 66039 - DNA, 469 bp, Homo sapiens
gcaaggagtggcctgggtgcatgtgcccagcgcctctgtgtggggtcttctccttctaccatctcaggacccctgggtctctgcagacctgctttccacccaaggggaagagaaaagggctgagcagaggtgaaggaggtaactgaaatgcattttcaacaactatttatgtttctcaaggtgaatgagaaatcccctgtgggaggctgaaaaaatgccttccaaaggtatccattctctaatccccagaacctgtaactatgttaccttatatggcaaaagggcctttggatacatgactaaggaatgcagacagcctgtagatagaaagggaagaaaatggattctcctctagaacctccagaaggaatgagccctgctggcaccttgactttagcccactgaaatttatttcgaacttccagcctccaaaattctaaaagaataaatctgtgttttttaaagccac

SEQ ID NO: 66040 - DNA, 605 bp, Homo sapiens
gtctttgcccattgaagaaagtttttgtaaattttcagataacattgtatgcttttgttgtgtacaacatgatgtgaagtatatatactttgttgagtggttaacatgtacgtattatatatgtacatattctgtatacgtattttaaatattaaccccttgcagatatgtgtttttcaaatactgtctaccattcagtctgcttccttttcattctgttcatgtctttttttttttttttttgcacaggagttttcaaatttcaatggagtccaatatatgttatgtttgtttcctatgcttttggtattatacccaagaaattattgctaaatccagtgtcatgaaccttttttcatgttattttctaggagttttatagttttaagttgtacttttatgtctgatttatttcagtttgttttagtaaatggaggaaggtaagagttcaacttcattcttttgcatatagatatccagctttttgaaagtcatttgttgaaaagactccttaataagtttttgcgctcttgtcaaaaatctgagcataagtatgaggacttccgtctggcctctttattccactatatgtatgcatttgtgct

SEQ ID NO: 66041 - DNA, 375 bp, Homo sapiens
gtctttgcccattgaagaaagtttttgtaaattttcagataacattgtatgcttttgttgtgtacaacatgatgtgaagtatatatactttgttgagtggttaacatgtacgtattatatatgtacatattctgtatacgtattttaaatattaaccccttgcagatatgtgtttttcaaatactgtctaccattcagtctgcttccttttcattctgttcatgtctttttttttttttttttgcacaggagttttcaaatttcaatggagtccaatatatgttatgtttgtttcctatgcttttggtattatacccaagaaattattgctaaaaaaaaaaagtcgacgcggccgcgaatttagtagtagtagta

SEQ ID NO: 66042 - DNA, 2444 bp, Homo sapiens
  misc_feature (933)..(933): n is a, c, g, or t
  misc_feature (935)..(935): n is a, c, g, or t
  misc_feature (948)..(948): n is a, c, g, or t
  misc_feature (1305)..(1305): n is a, c, g, or t
  misc_feature (1307)..(1307): n is a, c, g, or t
  misc_feature (1356)..(1356): n is a, c, g, or t
  misc_feature (1361)..(1361): n is a, c, g, or t
  misc_feature (1386)..(1386): n is a, c, g, or t
  misc_feature (1422)..(1422): n is a, c, g, or t
  misc_feature (1438)..(1438): n is a, c, g, or t
  misc_feature (1463)..(1463): n is a, c, g, or t
  misc_feature (1492)..(1492): n is a, c, g, or t
  misc_feature (1519)..(1519): n is a, c, g, or t
  misc_feature (2270)..(2270): n is a, c, g, or t
agttaaagcagcgttcagagggaaatgtttagctgtaagcatctacctttaaaaataagaaagccagcagtggtggctcatgccaacatcccagtattttgggaggctgaagcgggaggatcccctgaggtcaggagttcaagaccagtctaaccaacatggcaaaagcccatcgctactaaaaatacaaaaattagccaggcatggtgatgcaggcctgtaatcccagctacttgggaggctggggcaggagaatcgcttgaacctgggagagggaggttgcagtgagccgagatagcaccactgcattccagcctgggtgacagagtgagactctatctcaaaaaaaatcaataaaaataaaaaataaaagtaagaaagatctcaaattagtcacctcactataccctctaaaggatctagaaaaagaagagctaaccccaacctagcagaataccagaaacaaagattagagtggaaataaataaaggaaattaagagaatagataaaattaaaagttttttttacagttcagcaaaattgacaaatttttagctagattgactaagaaacacaagaagactcaaatatccaaaatcagaaatgaaaatgaggccattactgtgactttacaacaattaaggttatcgtaagagaatactataaacatatgtacaccagcaaattgaataaccaaatgaaatggcaaatctctagaaacacaaacctaccaagactgaatcacaaagaaataaaaaatatgggtaaaccaaccaggtgcagtggctcgtgcctgtaatcccagcactttgggaggccaaggtaggcggatcacctgagatcaggagttcaagaccagcctggccaacatggtgaaaccccttctctactaaaaatacaaaaatgagctgggtgtggtggcaggcgcctgnantcacagcaactcnggaggctgaggcaggagaatcacttgaactgggaggcggaagttgcagtgagctgagatcgcaccattgtgctccagcctgggggacaagagtgagacttcgtctccaaaaaaaaaaaaaaaaagaaaaagaaaatatgggtaaacgtataactagtaagaagattaaattaccaataaaatcttcccaacacagaaatacccttgactggatggctccaccagtgaattctaccagacatttaaaggaaaaattagtgccaatcctttgcaaactctttcaaaaacttgaagaggaggaaatactttcttttttttgtttgttttgagacagagtctcgctctgtcgcccacgctngngtgcagtggcgcgatcttggctcactgcaagctctggctcccgggttcncgccnttctcctgcctcagcctcccgagtngctgggactacaggcgcccaccacaacgcccggctnattttttgtatttttngcggagacggggtttcactgtgttngccaggatgatctctatctcctgacctcntgatccgcctgccttggccttccaaantgctgggattacaggcatgagccacccggtgcccggccgagaaggaaacactaactcattctatgaggacagcattgccttgttactagggccagacaaagacagtacaagaaaacaactgaccaatattgcttatgaacattgattaaaaaattctcaagaagacactgcctgctgggtgtggtggctcacgcctgtaatcccagcactttgggaggccaaggtgggtggatcacgaggtcaggagtttgagaccagcctggtcaagatggtgaaactctgtctctactaaaaataaagaaaattagctaggcatggtggtgggtgcctgtaaccccagctgcttgggaggctgtggcaggggaatcgcttgaacacgggaggcggaggtggctgtgagccgacattgcgccactgcgctccagcctgggcaacagagtgagactccatctcaaaaaaaaaaaaagaaaaaagaaaaaaaagaaaacactgcccaactggctggccgcagtggctcaggcgggtaatcccagcactttgggaggccaaggcaggtggatcacttgagttcaggagttcaagaccagcctggggaacgtagtgaggccccacctctacctagaatacaaaaatcagctggttgtggtgttaccctcctgtggttccagctgcttgggaggctgaggtgggaggatcactggaaccaggaagttgaggctgcagtgagccgagattgcaccactgcataccngcctgcacgacagagtgagactccatctcaaaaaaaaataaataaataaaaataaaaaataaaagaaagatctcaaatcagtcacctaactatacactttaaaggacctacaaaaagaagaactaaacccaagctagcagaataggggaaacaaagattagagtggaaataaat

SEQ ID NO: 66043 - DNA, 323 bp, Homo sapiens
attttaaataaccattagcctctgagtgtagagtttagattgactaacacctgagagctaaactgtaaagagcaacttaagacacagcaaggctcaggccggcccacttctcctcatacagctccataggaggcacccatatcccttcttggtcattccacccaacttaggggattctggaacttccatactacctgattcaagataaaagcaaaggaagtaatagattgtaaggagagtataagaaactgaatttggaaaagtagcacctgagacctttactatgaggtgggcaagcagctttctttatatctttaaaacta

SEQ ID NO: 66044 - DNA, 322 bp, Homo sapiens
cagggttctttgttacagcagttgtcctacccttatacaacatagcacctatcccactctgcactgcaatgcatttgtaggtctctgtctcactggactgtgggctccttgggggaaggagttgtgtcttgttagtctcatctccagctcctaacacagtgcagttaaacaggaggaacacattaaataaatatcgatggaaggagggtcatgggaaggaacaaattcatggatagaaaatgtagcacagcaaaaactatgccctggaaacacaattagcctttgctctgaatcagctgagactctggatgagtcagttttg

SEQ ID NO: 66045 - DNA, 1277 bp, Homo sapiens
tgagaaaatttatgaatttgtgttgggccgcattcaaaactgtcctgggccacgagttggacaagcgtggtttagctattctaaagctatcccagtgccctcagctgaattctaggactagcaggagaattagctgtactggagccaagttttcattggtgaagaccaacaaatcagcagccagttcattggcataattatttctcttgagttgctgccacccccacctctgttccccagggctgaaccgttagggctcttctctgccaccgccttccagagccccaggctccagcgcattaaagtccaaccatttgcttctcctcaccctgccagctgcaaaggtcgcatcagcttagggagaaaatagcccctggagggggcctttatagtgcatactctgggtgtgcctgtgactggactcttgcctcactctcactgtgcctcattcttcatcctgtctaatgaagagatctccagctcacagtcttcatggattgtggtaaggatgaaatgagaagagtgatttaagaactgccaagtggccaggatacctgtagggtggcccagtctcaggctttgtcactcttgtcctgtgtggtatcatcagaaacctgaaaaaagctaacattaacaatggttccttaagattctttggccaggcacagtggcttatgcctataatcccaacactttgagaggctgaggcaggtggatcatttgaggtcaagagctcgagatcagcctggccaaatggtgaaaccccttctctactaaaatacaaaaaatttgctgggcatggtagcacacacctgtaatcccagttactcaggaggctgaggcatgagaatcatttgaacctgggaggcagaggttgcagtgagctgagattgtgccattgcactctagcctgggtgacagaacaagactgtgtctcttagaaaaaaaaaaaaaattctttgaccttttacatatttaaaaaacacattataggaccaggcatggtggctcacgcctgtaatcccagcactttgggaggccgaggagggcagatcacgaggtcaagagatcgagaccattctggctaacatggtgaaaccccatctctactaaaaatacaaaaaattagttgggcatggtggcgggtgcctgtagtcccagctactcaggaagctgaggcaggagaatggcgtgaacccaggaggcagagcttgcagtgagccgagatggtgccactgcactccagcctgggcgacagagtgagactctgtctcaaa

SEQ ID NO: 66046 - DNA, 1275 bp, Homo sapiens
ggaggaaatctacaagcaccaggaagtcaagatgcaagcaccagccttcagggacaagaaacagggggtctcagccaagaatcaaggtgcccatgacccagactatgagaatatcaccttggccttcaaaaatcaggaccatgcaaagggtggtcattcacgacccacgagccaagtcccagcccagtgcaggccgccctcagactccacccaggtcccctgctggttgtacagagccatcctgagcctgtacatcctcctggccctggcctttgtcctctgcatcatcctgtcagccttcatcatggtgaagaatgctgagatgtccaaggagctgctgggctttaaaagggagctttggaatgtctcaaactccgtacaagcatgcgaagagagacagaagagaggctgggattccgttcagcagagcatcaccatggtcaggagcaagattgatagattagagacgacattagcaggcataaaaaacattgacacaaaggtacagaaaatcttggaggtgctgcagaaaatgccacagtcctcacctcaataaatgagaggacattgtggcagccaaagccacaacttggaagatggggctgcacctgccaacgaagacgggaaatgacccccccccccagcctagtgtgaacctgcccctcgtcccacgtatagaaaaacctcgagtcatggtgaatgagtgtctcggagttgctcgtgtgtgtgtacacctgcgtgcgtgtgtgtgcgtgtgtgcgcgtgtgttcgtgtatgtgcgtgtgtgcgtgcgcgtgtgtgtgcattttgcaaagggtggacatttcagtgtatctcccagaaaggtgatgaatgaataggactgagagtcacagtgaatgtggcatgcatgcctgtgtcatgtgacatatgtgagtctcggcatgtcacggtgggtgggctgtgtctgagcacctccagcagatgtcactctgagtgtgggtgttggtgacatgcattgcacgggcctgtctccctgtttgtgtaaacatactagagtatactgcggcgtgttttctgtctacccatgtcatggtgggggagatttatctccgtacatgtgggtgtcgccatgtgtgccctgtcactatctgtggctgggtgaacggctgtgtcattatgagtgtgccgagttatgccaccctgtgtgctcagggcacatgcacacagacatttatctctgcactcacattttgtgacttatgaagataaataaagtcaagggaaaacagcgtc

SEQ ID NO: 66047 - DNA, 1201 bp, Homo sapiens
ggaggaaatctacaagcaccaggaagtcaagatgcaagcaccagccttcagggacaagaaacagggggtctcagccaagaatcaaggtgcccatgacccagactatgagaatatcaccttggccttcaaaaatcaggaccatgcaaagggtggtcattcacgacccacgagccaagtcccagcccagtgcaggccgccctcagactccacccaggtcccctgctggttgtacagagccatcctgagcctgtacatcctcctggccctggcctttgtcctctgcatcatcctgtcagccttcatcatggtgaagaatgctgagatgtccaaggagctgctgggctttaaaagggagctttggaatgtctcaaactccgtacaagcatgcgaagagagacagaagagaggctgggattccgttcagcagagcatcaccatggtcaggagcaagattgatagattagagacgacattagcaggcataaaaaacattgacacaaaggtacagaaaatcttggaggtgctgcagaaaatgccacagtcctcacctcaataaatgagaggacattgtggcagccaaagccacaacttggaagatggggctgcacctgccaacgaagacgggaaatgacccccccccccagcctagtgtgaacctgcccctcgtcccacgtatagaaaaacctcgagtcatggtgaatgagtgtctcggagttgctcgtgtgtgtgcattttgcaaagggtggacatttcagtgtatctcccagaaaggtgatgaatgaataggactgagagtcacagtgaatgtggcatgcatgcctgtgtcatgtgacatatgtgagtctcggcatgtcacggtgggtgggctgtgtctgagcacctccagcagatgtcactctgagtgtgggtgttggtgacatgcattgcacgggcctgtctccctgtttgtgtaaacatactagagtatactgcggcgtgttttctgtctacccatgtcatggtgggggagatttatctccgtacatgtgggtgtcgccatgtgtgccctgtcactatctgtggctgggtgaacggctgtgtcattatgagtgtgccgagttatgccaccctgtgtgctcagggcacatgcacacagacatttatctctgcactcacattttgtgacttatgaagataaataaagtcaagggaaaacagcgtc

SEQ ID NO: 66048 - DNA, 427 bp, Homo sapiens
ctcatgtctgtaatcctagcactttgggaggctgaggcgggaggattgcgtgagccctggaggtggagactggcctgggcaacatagggagactctgtctgtaaaaaataaaaataaaaaaagaaggagagttcagatgggagaggtaaggggtcaaaggtgggggccgggggctccttcccctccaagatgtgtggatgtgtgtgtggatgtgtgtgtggtgtgatcactcaaactctcacacacccgctccacttaaccaaaaagcagattttagcttctcactccttatctttcaccccctacaatttattgagtgcaaagggttgggtaaaacaagatcccggatccactctccacaccacagagctctgagcagatctccaacccctcccaggtgcccatgacccagactatgagaatatca

SEQ ID NO: 66049 - DNA, 1157 bp, Homo sapiens
ggaggaaatctacaagcaccaggaagtcaagatgcaagcaccagccttcagggacaagaaacagggggtctcagccaagaatcaaggtgcccatgacccagactatgagaatatcaccttggccttcaaaaatcaggaccatgcaaagggtggtcattcacgacccacgagccaagtcccagcccagtgcaggccgccctcagactccacccaggtcccctgctggttgtacagagccatcctgagcctgtacatcctcctggccctggcctttgtcctctgcatcatcctgtcagccttcatcatggtgaagaatgctgagatgtccaaggagctgctgggctttaaaagggagctttggaatgtctcaaactccgtacaagcatgcgaagagagacagaagagaggctgggattccgttcagcagagcatcaccatggtcaggagcaagattgatagattagagacgacattagcaggcataaaaaacattgacacaaaggtacagaaaatcttggaggtgctgcagaaaatgccaccacaacttggaagatggggctgcacctgccaacgaagacgggaaatgacccccccccccagcctagtgtgaacctgcccctcgtcccacgtatagaaaaacctcgagtcatggtgaatgagtgtctcggagttgctcgtgtgtgtgcattttgcaaagggtggacatttcagtgtatctcccagaaaggtgatgaatgaataggactgagagtcacagtgaatgtggcatgcatgcctgtgtcatgtgacatatgtgagtctcggcatgtcacggtgggtgggctgtgtctgagcacctccagcagatgtcactctgagtgtgggtgttggtgacatgcattgcacgggcctgtctccctgtttgtgtaaacatactagagtatactgcggcgtgttttctgtctacccatgtcatggtgggggagatttatctccgtacatgtgggtgtcgccatgtgtgccctgtcactatctgtggctgggtgaacggctgtgtcattatgagtgtgccgagttatgccaccctgtgtgctcagggcacatgcacacagacatttatctctgcactcacattttgtgacttatgaagataaataaagtcaagggaaaacagcgtc

SEQ ID NO: 66050 - DNA, 1233 bp, Homo sapiens
tgatgacaagctgcatgaccacagctgctgatggttttgagaggagcgaggtgtccatggtgttagagacagtgaggatggtttgagtggtggtgctggcccctcaaggtcactttgctgcctctttgctccagtcccagcccagtgcaggccgccctcagactccacccaggtcccctgctggttgtacagagccatcctgagcctgtacatcctcctggccctggcctttgtcctctgcatcatcctgtcagccttcatcatggtgaagaatgctgagatgtccaaggagctgctgggctttaaaagggagctttggaatgtctcaaactccgtacaagcatgcgaagagagacagaagagaggctgggattccgttcagcagagcatcaccatggtcaggagcaagattgatagattagagacgacattagcaggcataaaaaacattgacacaaaggtacagaaaatcttggaggtgctgcagaaaatgccacagtcctcacctcaataaatgagaggacattgtggcagccaaagccacaacttggaagatggggctgcacctgccaacgaagacgggaaatgacccccccccccagcctagtgtgaacctgcccctcgtcccacgtatagaaaaacctcgagtcatggtgaatgagtgtctcggagttgctcgtgtgtgtgtacacctgcgtgcgtgtgtgtgcgtgtgtgcgcgtgtgttcgtgtatgtgcgtgtgtgcgtgcgcgtgtgtgtgcattttgcaaagggtggacatttcagtgtatctcccagaaaggtgatgaatgaataggactgagagtcacagtgaatgtggcatgcatgcctgtgtcatgtgacatatgtgagtctcggcatgtcacggtgggtgggctgtgtctgagcacctccagcagatgtcactctgagtgtgggtgttggtgacatgcattgcacgggcctgtctccctgtttgtgtaaacatactagagtatactgcggcgtgttttctgtctacccatgtcatggtgggggagatttatctccgtacatgtgggtgtcgccatgtgtgccctgtcactatctgtggctgggtgaacggctgtgtcattatgagtgtgccgagttatgccaccctgtgtgctcagggcacatgcacacagacatttatctctgcactcacattttgtgacttatgaagataaataaagtcaagggaaaacagcgtc

SEQ ID NO: 66051 - DNA, 724 bp, Homo sapiens
acccacgcgtcgcggacgcgtgggtcgacccacgcgtcggcgcccgcccggagccagcggttctccaagcacccagcatcctgctagacgcgccgcgcaccgacggaggggacatgggcagagcaatggtggccaggctcgggctggggctgctgctgctggcactgctcctacccacgcagatttattccagtgaaacaacaactggaacttcaagtaactcctcccagagtacttccaactctgggttggccccaaatccaactaatgccaccaccaaggcggctggtggtgccctgcagtcaacagccagtctcttcgtggtctcactctctcttctgcatctctactcttaagagactcaggccaagaaacgtcttctaaatttccccatcttctaaacccaatccaaatggcgtctggaagtccaatgtggcaaggaaaaacaggtcttcatcgaatctactaattccacaccttttattgacacagaaaatgttgagaatcccaaatttgattgatttgaagaacatgtgagaggtttgactagatgatggatgccaatattaaatctgctggagtttcatgtacaagatgaaggagaggcaacatccaaaatagttaagacatgatttccttgaatgtggcttgagaaatatggacacttaatactaccttgaaaataagaatagaaataaaggatgggattgtggaatggagattc

SEQ ID NO: 66052 - DNA, 683 bp, Homo sapiens
  misc_feature (128)..(128): n is a, c, g, or t
  misc_feature (130)..(130): n is a, c, g, or t
aggagtcttgctctgtctcccaggttggagtgcagtggcccggtctggggtcattgcaacctccgccttctcggttcaagcgattctcttgcccaagcctcccgagaagctgggactacaggcgtgtncncccatgcccagatttattccagtgaaacaacaactggaacttcaagtaactcctcccagagtacttccaactctgggttggccccaaatccaactaatgccaccaccaaggcggctggtggtgccctgcagtcaacagccagtctcttcgtggtctcactctctcttctgcatctctactcttaagagactcaggccaagaaacgtcttctaaatttccccatcttctaaacccaatccaaatggcgtctggaagtccaatgtggcaaggaaaaacaggtcttcatcgaatctactaattccacaccttttattgacacagaaaatgttgagaatcccaaatttgattgatttgaagaacatgtgagaggtttgactagatgatggatgccaatattaaatctgctggagtttcatgtacaagatgaaggagaggcaacatccaaaatagttaagacatgatttccttgaatgtggcttgagaaatatggacacttaatactaccttgaaaataagaatagaaataaaggatgggattgtggaatggagattc

SEQ ID NO: 66053 - DNA, 831 bp, Homo sapiens
tccttttttcctttgcaaagaaataaaaacaggagttatagttattgaataacttttttgttcttgttgccacttggcatttttgaggcatctctaggtagtttgttttgaaactaaagagaatgaccttggtgggttgagcaagaattcagaagttaatgatgttgggtaagagaacaatggtaagagagcaatctaagaatatatcacctactttaattttatatgagagtacatggaggtagctgtgatgtggaaatgtatccatgtaactttttatgtattttagatttattccagtgaaacaacaactggaacttcaagtaactcctcccagagtacttccaactctgggttggccccaaatccaactaatgccaccaccaaggcggctggtggtgccctgcagtcaacagccagtctcttcgtggtctcactctctcttctgcatctctactcttaagagactcaggccaagaaacgtcttctaaatttccccatcttctaaacccaatccaaatggcgtctggaagtccaatgtggcaaggaaaaacaggtcttcatcgaatctactaattccacaccttttattgacacagaaaatgttgagaatcccaaatttgattgatttgaagaacatgtgagaggtttgactagatgatggatgccaatattaaatctgctggagtttcatgtacaagatgaaggagaggcaacatccaaaatagttaagacatgatttccttgaatgtggcttgagaaatatggacacttaatactaccttgaaaataagaatagaaataaaggatgggattgtggaatggagattc

SEQ ID NO: 66054 - DNA, 954 bp, Homo sapiens
  misc_feature (13)..(13): n is a, c, g, or t
  misc_feature (73)..(73): n is a, c, g, or t
cccccgcactccnccgcctatacgctgtcgcgccatctgcggcaccatctgtcccactcccaccccgcacacncatcaggccggctcgtcaacccgtgtccatctcggagggtctggcctgaccgcgcctcggaccacatgccactcatatgctcgcaaaacgccttctcctaatgacgctccgcatatcctcctccgcttgtctttccacgctatctcttgggcacaaacggccattgcgccttctcctccttctcccacccaacgcgtcctaccgtcttcgctcctgtcgcctagggttgcaatccataccccctgcatccgcggaactcttaaaccgccccagctctacagttctggagggtggtctcctggcctcggccgtccgaagcagctgggggatttatggatttattttcagtgtgaccaccatcgtgccccttcaagtaactcctcccagagtacttccaactctgggttggccccaaatccaactaatgccaccaccaaggcggctggtggtgccctgcagtcaacagccagtctcttcgtggtctcactctctcttctgcatctctactcttaagagactcaggccaagaaacgtcttctaaatttccccatcttctaaacccaatccaaatggcgtctggaagtccaatgtggcaaggaaaaacaggtcttcatcgaatctactaattccacaccttttattgacacagaaaatgttgagaatcccaaatttgattgatttgaagaacatgtgagaggtttgactagatgatggatgccaatattaaatctgctggagtttcatgtacaagatgaaggagaggcaacatccaaaatagttaagacatgatttccttgaatgtggcttgagaaatatggacacttaatactaccttgaaaataagaatagaaataaaggatgggattgtggaatggagattc

SEQ ID NO: 66055 - DNA, 698 bp, Homo sapiens
gtttttgatagtatttatgtctgctgcggggatcaacgagaataatagtttctatatttattccagtgaaacaacaactggaacttcaagtaactcctcccagagtacttccaactctgggttggccccaaatccaactaatgccaccaccaaggcggctggtggtgccctgcagtcaacagccagtctcttcgtggtctcactctctcttctgcatctctactcttaagagactcaggccaagaaacgtcttctaaatttccccatcttctaaacccaatccaaatggcgtctggaagtccaatgtggcaaggaaaaacaggtcttcatcgaatctactaattccacaccttttattgacacagaaaatgttgagaatcccaaatttgattgatttgaagaacatgtgagaggtttgactagatgatggatgccaatattaaatctgctggagtttcatgtacaagatgaaggagaggcaacatccaaaatagttaagacatgatttccttgaatgtggcttgagaaatatggacacttaatactaccttgaaaataagaatagaaataaaggatgggattgtggaatggagattccaaaatacacaaacttcatcatcactcacaacactagcaaatgactaaatgaaagggccccttcggccccacgcggggagctttgcggccgttttccttta

SEQ ID NO: 66056 - DNA, 388 bp, Homo sapiens
agggctgtagcaagctatccggttcaatacactgctgttggcacacataaacctttttaaaaatagacactccccgaagtcttttgttcgcatggtcacacactgatgcttagatgttccagtaatctaatatggccacagtagtcttgatgaccaaagtcctttttttccatctttagaaaactacatgggaacaaacagatcgaacagttttgaagctactgtgtgtgtgaatgaacactcttgctttattccagaatgctgtacatctattttggattgtatattgtgtttgtgtatttacgctttgattcatagtaacttcttatggaattgatttgcattgaacacaaaccggatagcttgccgggacctctagatcacctca

SEQ ID NO: 66057 - DNA, 894 bp, Homo sapiens
agtgggcgcgtgcatgttagcttttaccttatcaccccatctcgttccactctgtatcgtgcgatactaacacgttacggtttgtttcactcctcatctacccgctctatctgtcccaccgccccatgtagtcgatagagccaccctcgtctgtcgttcactcaagcgtccgccgcgctgggtgatgcacctggcgggcaggtcatccgcttacagctttgtcggggatcagacgaggcgagcagggccccagttgagttgctagtgcggtgtgctcgctactgacgaaagcggtacatagcgttcactcttgacctatcagcaatctaaggaagcgtccttgatttattcttgtgaaagccaaggggcggccatagatagccaccctgggacttcacgttacgcgtggccccgaatcgcgcttaatgccaccaccaaggcggctggtggtgccctgcagtcaacagccagtctcttcgtggtctcactctctcttctgcatctctactcttaagagactcaggccaagaaacgtcttctaaatttccccatcttctaaacccaatccaaatggcgtctggaagtccaatgtggcaaggaaaaacaggtcttcatcgaatctactaattccacaccttttattgacacagaaaatgttgagaatcccaaatttgattgatttgaagaacatgtgagaggtttgactagatgatggatgccaatattaaatctgctggagtttcatgtacaagatgaaggagaggcaacatccaaaatagttaagacatgatttccttgaatgtggcttgagaaatatggacacttaatactaccttgaaaggtgtacccgcgcaggctccttccctcgtctccaagctcttccgcttggtctct

SEQ ID NO: 66058 - DNA, 236 bp, Homo sapiens
ggatttgctggtgcagtacaactaggcttaaaactacatgggaacaaacagatcgaacagttttgaagctactgtgtgtgtgaatgaacactcttgctttattccagaatgctgtacatctattttggattgtatattgtgtttgtgtatttacgctttgattcatagtaacttcttatggaattgatttgcattgaacacaaactgtaaataaaaagaaatggctgaaagagcaa

SEQ ID NO: 66059 - DNA, 259 bp, Homo sapiens
cgtcgaccacacagtagcttcaaaactgttcgatctgtttgttcccatgtagttttctaaagatggaaaaaaaggactttggtcatcaagactactgtgtgtgtgaatgaacactcttgctttattccagaatgctgtacatctattttggattgtatattgtgtttgtgtatttacgctttgattcatagtaacttcttatggaattgatttgcattgaacacaaactgtaaataaaaagaaatggctgaaagagcaa

SEQ ID NO: 66060 - DNA, 2673 bp, Homo sapiens
agtttgcagcgtcaggcagcgggtctgcgcccagcgagcggctccccagctcctgggaagatgcggacccgggacgcccccgtgagctcactgcgcctggctgacacgaggcgctcacagaacaaagcaagggctgggggatggcgcggccgcggggccggcgcgcagatcgctccggacccggacaccgcctgcgaggagcgccgaccagccgggaagggttcgcgctaggcggcgcccgggtcccgtcggccagggtgagcgtccggcccgcgtccgcgccacgcccgccgcgttcccctttcctctgcggcgggccgagagataaccctgcccgaggggtcccggcgcccgccccccacgcggtcgcactggaattcgcagcccctctcgggtccccggggcgcattttgcagtctgagtggcaatgcacttgctccaggacaggcggctaccccgccgcagcggaggcgcggacttttcttttggggggtctcgccggctcgccgcgctccccaccttgcctgcgcccgcccggagccagcggttctccaagcacccagcatcctgctagacgcgccgcgcaccgacggaggggacatgggcagagcaatggtggccaggctcgggctggggctgctgctgctggcactgctcctacccacgcagatttattccagtgaaacaacaactggaacttcaagtaactcctcccagagtacttccaactctgggttggccccaaatccaactaatgccaccaccaaggcggctggtggtgccctgcagtcaacagccagtctcttcgtggtctcactctctcttctgcatctctactcttaagagactcaggccaagaaacgtcttctaaatttccccatcttctaaacccaatccaaatggcgtctggaagtccaatgtggcaaggaaaaacaggtcttcatcgaatctactaattccacaccttttattgacacagaaaatgttgagaatcccaaatttgattgatttgaagaacatgtgagaggtttgactagatgatggatgccaatattaaatctgctggagtttcatgtacaagatgaaggagaggcaacatccaaaatagttaagacatgatttccttgaatgtggcttgagaaatatggacacttaatactaccttgaaaataagaatagaaataaaggatgggattgtggaatggagattcagttttcatttggttcattaattctataaggccataaaacaggtaatataaaaagcttccatgattctatttatatgtacatgagaaggaacttccaggtgttactgtaattcctcaacgtattgtttcgacagcactaatttaatgccgatatactctagatgaagttttacattgttgagctattgctgttctcttgggaactgaactcactttcctcctgaggctttggatttgacattgcatttgaccttttatgtagtaattgacatgtgccagggcaatgatgaatgagaatctacccccagatccaagcatcctgagcaactcttgattatccatattgagtcaaatggtaggcatttcctatcacctgtttccattcaacaagagcactacattcatttagctaaacggattccaaagagtagaattgcattgaccacgactaatttcaaaatgctttttattattattattttttagacagtctcactttgtcgcccaggccggagtgcagtggtgcgatctcagatcagtgtaccatttgcctcccgggctcaagcgattctcctgcctcagcctcccaagtagctgggattacaggcacctgccaccatgcccggctaatttttgtaattttagtagagacagggtttcaccatgttgcccaggctggtttcgaactcctgacctcaggtgatccacccgcctcggcctcccaaagtgctgggattacaggcttgagcccccgcgcccagccatcaaaatgctttttatttctgcatatgttgaatactttttacaatttaaaaaaatgatctgttttgaaggcaaaattgcaaatcttgaaattaagaaggcaaaaatgtaaaggagtcaaaactataaatcaagtatttgggaagtgaagactggaagctaatttgcattaaattcacaaacttttatactctttctgtatatacattttttttctttaaaaaacaactatggatcagaatagccacatttagaacactttttgttatcagtcaatatttttagatagttagaacctggtcctaagcctaaaagtgggcttgattctgcagtaaatcttttacaactgcctcgacacacataaacctttttaaaaatagacactccccgaagtcttttgttcgcatggtcacacactgatgcttagatgttccagtaatctaatatggccacagtagtcttgatgaccaaagtcctttttttccatctttagaaaactacatgggaacaaacagatcgaacagttttgaagctactgtgtgtgtgaatgaacactcttgctttattccagaatgctgtacatctattttggattgtatattgtgtttgtgtatttacgctttgattcatagtaacttcttatggaattgatttgcattgaacacaaactgtaaataaaaagaaatggctgaaagagcaa

SEQ ID NO: 66061 - DNA, 2398 bp, Homo sapiens
attagatagcttggaacgagctcagccatctggtttgcattagggcaggttggagatggtgcaagaccattgctatgtgatttttgccagaaactgaaagtgcattttgtttacagtttagaagacaaatcgtctttcattcacctgtacagttgtaagtagaggacacaggcccactaatctcagaagcttggttgagaaataatttatttggatcattatttgctcttttaaaatacatgaccttgcctgcgcccgcccggagccagcggttctccaagcacccagcatcctgctagacgcgccgcgcaccgacggaggggacatgggcagagcaatggtggccaggctcgggctggggctgctgctgctggcactgctcctacccacgcagatttattccagtgaaacaacaactggaacttcaagtaactcctcccagagtacttccaactctgggttggccccaaatccaactaatgccaccaccaaggcggctggtggtgccctgcagtcaacagccagtctcttcgtggtctcactctctcttctgcatctctactcttaagagactcaggccaagaaacgtcttctaaatttccccatcttctaaacccaatccaaatggcgtctggaagtccaatgtggcaaggaaaaacaggtcttcatcgaatctactaattccacaccttttattgacacagaaaatgttgagaatcccaaatttgattgatttgaagaacatgtgagaggtttgactagatgatggatgccaatattaaatctgctggagtttcatgtacaagatgaaggagaggcaacatccaaaatagttaagacatgatttccttgaatgtggcttgagaaatatggacacttaatactaccttgaaaataagaatagaaataaaggatgggattgtggaatggagattcagttttcatttggttcattaattctataaggccataaaacaggtaatataaaaagcttccatgattctatttatatgtacatgagaaggaacttccaggtgttactgtaattcctcaacgtattgtttcgacagcactaatttaatgccgatatactctagatgaagttttacattgttgagctattgctgttctcttgggaactgaactcactttcctcctgaggctttggatttgacattgcatttgaccttttatgtagtaattgacatgtgccagggcaatgatgaatgagaatctacccccagatccaagcatcctgagcaactcttgattatccatattgagtcaaatggtaggcatttcctatcacctgtttccattcaacaagagcactacattcatttagctaaacggattccaaagagtagaattgcattgaccacgactaatttcaaaatgctttttattattattattttttagacagtctcactttgtcgcccaggccggagtgcagtggtgcgatctcagatcagtgtaccatttgcctcccgggctcaagcgattctcctgcctcagcctcccaagtagctgggattacaggcacctgccaccatgcccggctaatttttgtaattttagtagagacagggtttcaccatgttgcccaggctggtttcgaactcctgacctcaggtgatccacccgcctcggcctcccaaagtgctgggattacaggcttgagcccccgcgcccagccatcaaaatgctttttatttctgcatatgttgaatactttttacaatttaaaaaaatgatctgttttgaaggcaaaattgcaaatcttgaaattaagaaggcaaaaatgtaaaggagtcaaaactataaatcaagtatttgggaagtgaagactggaagctaatttgcattaaattcacaaacttttatactctttctgtatatacattttttttctttaaaaaacaactatggatcagaatagccacatttagaacactttttgttatcagtcaatatttttagatagttagaacctggtcctaagcctaaaagtgggcttgattctgcagtaaatcttttacaactgcctcgacacacataaacctttttaaaaatagacactccccgaagtcttttgttcgcatggtcacacactgatgcttagatgttccagtaatctaatatggccacagtagtcttgatgaccaaagtcctttttttccatctttagaaaactacatgggaacaaacagatcgaacagttttgaagctactgtgtgtgtgaatgaacactcttgctttattccagaatgctgtacatctattttggattgtatattgtgtttgtgtatttacgctttgattcatagtaacttcttatggaattgatttgcattgaacacaaactgtaaataaaaagaaatggctgaaagagcaa

SEQ ID NO: 66062 - DNA, 2186 bp, Homo sapiens
acccacgcgtcgcggacgcgtgggtcgacccacgcgtcggcgcccgcccggagccagcggttctccaagcacccagcatcctgctagacgcgccgcgcaccgacggaggggacatgggcagagcaatggtggccaggctcgggctggggctgctgctgctggcactgctcctacccacgcagatttattccagtgaaacaacaactggaacttcaagtaactcctcccagagtacttccaactctgggttggccccaaatccaactaatgccaccaccaaggcggctggtggtgccctgcagtcaacagccagtctcttcgtggtctcactctctcttctgcatctctactcttaagagactcaggccaagaaacgtcttctaaatttccccatcttctaaacccaatccaaatggcgtctggaagtccaatgtggcaaggaaaaacaggtcttcatcgaatctactaattccacaccttttattgacacagaaaatgttgagaatcccaaatttgattgatttgaagaacatgtgagaggtttgactagatgatggatgccaatattaaatctgctggagtttcatgtacaagatgaaggagaggcaacatccaaaatagttaagacatgatttccttgaatgtggcttgagaaatatggacacttaatactaccttgaaaataagaatagaaataaaggatgggattgtggaatggagattcagttttcatttggttcattaattctataaggccataaaacaggtaatataaaaagcttccatgattctatttatatgtacatgagaaggaacttccaggtgttactgtaattcctcaacgtattgtttcgacagcactaatttaatgccgatatactctagatgaagttttacattgttgagctattgctgttctcttgggaactgaactcactttcctcctgaggctttggatttgacattgcatttgaccttttatgtagtaattgacatgtgccagggcaatgatgaatgagaatctacccccagatccaagcatcctgagcaactcttgattatccatattgagtcaaatggtaggcatttcctatcacctgtttccattcaacaagagcactacattcatttagctaaacggattccaaagagtagaattgcattgaccacgactaatttcaaaatgctttttattattattattttttagacagtctcactttgtcgcccaggccggagtgcagtggtgcgatctcagatcagtgtaccatttgcctcccgggctcaagcgattctcctgcctcagcctcccaagtagctgggattacaggcacctgccaccatgcccggctaatttttgtaattttagtagagacagggtttcaccatgttgcccaggctggtttcgaactcctgacctcaggtgatccacccgcctcggcctcccaaagtgctgggattacaggcttgagcccccgcgcccagccatcaaaatgctttttatttctgcatatgttgaatactttttacaatttaaaaaaatgatctgttttgaaggcaaaattgcaaatcttgaaattaagaaggcaaaaatgtaaaggagtcaaaactataaatcaagtatttgggaagtgaagactggaagctaatttgcattaaattcacaaacttttatactctttctgtatatacattttttttctttaaaaaacaactatggatcagaatagccacatttagaacactttttgttatcagtcaatatttttagatagttagaacctggtcctaagcctaaaagtgggcttgattctgcagtaaatcttttacaactgcctcgacacacataaacctttttaaaaatagacactccccgaagtcttttgttcgcatggtcacacactgatgcttagatgttccagtaatctaatatggccacagtagtcttgatgaccaaagtcctttttttccatctttagaaaactacatgggaacaaacagatcgaacagttttgaagctactgtgtgtgtgaatgaacactcttgctttattccagaatgctgtacatctattttggattgtatattgtgtttgtgtatttacgctttgattcatagtaacttcttatggaattgatttgcattgaacacaaactgtaaataaaaagaaatggctgaaagagcaa

SEQ ID NO: 66063 - DNA, 3116 bp, Homo sapiens
agtttgcagcgtcaggcagcgggtctgcgcccagcgagcggctccccagctcctgggaagatgcggacccgggacgcccccgtgagctcactgcgcctggctgacacgaggcgctcacagaacaaagcaagggctgggggatggcgcggccgcggggccggcgcgcagatcgctccggacccggacaccgcctgcgaggagcgccgaccagccgggaagggttcgcgctaggcggcgcccgggtcccgtcggccagggtgagcgtccggcccgcgtccgcgccacgcccgccgcgttcccctttcctctgcggcgggccgagagataaccctgcccgaggggtcccggcgcccgccccccacgcggtcgcactggaattcgcagcccctctcgggtccccggggcgcattttgcagtctgagtggcaatgcacttgctccaggacaggcggctaccccgccgcagcggaggcgcggacttttcttttggggggtctcgccggctcgccgcgctccccaccttgcctgcgcccgcccggagccagcggttctccaagcacccagcatcctgctagacgcgccgcgcaccgacggaggggacatgggcagagcaatggtggccaggctcgggctggggctgctgctgctggcactgctcctacccacgcagatttattccagtgaaacaacaactggaacttcaagtaactcctcccagagtacttccaactctgggttggccccaaatccaactaatgccaccaccaaggcggctggtggtgccctgcagtcaacagccagtctcttcgtggtctcactctctcttctgcatctctactcttaagagactcaggccaagaaacgtcttctaaatttccccatcttctaaacccaatccaaatggcgtctggaagtccaatgtggcaaggaaaaacaggtcttcatcgaatctactaattccacaccttttattgacacagaaaatgttgagaatcccaaatttgattgatttgaagaacatgtgagaggtttgactagatgatggatgccaatattaaatctgctggagtttcatgtacaagatgaaggagaggcaacatccaaaatagttaagacatgatttccttgaatgtggcttgagaaatatggacacttaatactaccttgaaaataagaatagaaataaaggatgggattgtggaatggagattcagttttcatttggttcattaattctataaggccataaaacaggtaatataaaaagcttccatgattctatttatatgtacatgagaaggaacttccaggtgttactgtaattcctcaacgtattgtttcgacagcactaatttaatgccgatatactctagatgaagttttacattgttgagctattgctgttctcttgggaactgaactcactttcctcctgaggctttggatttgacattgcatttgaccttttatgtagtaattgacatgtgccagggcaatgatgaatgagaatctacccccagatccaagcatcctgagcaactcttgattatccatattgagtcaaatggtaggcatttcctatcacctgtttccattcaacaagagcactacattcatttagctaaacggattccaaagagtagaattgcattgaccacgactaatttcaaaatgctttttattattattattttttagacagtctcactttgtcgcccaggccggagtgcagtggtgcgatctcagatcagtgtaccatttgcctcccgggctcaagcgattctcctgcctcagcctcccaagtagctgggattacaggcacctgccaccatgcccggctaatttttgtaattttagtagagacagggtttcaccatgttgcccaggctggtttcgaactcctgacctcaggtgatccacccgcctcggcctcccaaagtgctgggattacaggcttgagcccccgcgcccagccatcaaaatgctttttatttctgcatatgttgaatactttttacaatttaaaaaaatgatctgttttgaaggcaaaattgcaaatcttgaaattaagaaggcaaaaatgtaaaggagtcaaaactataaatcaagtatttgggaagtgaagactggaagctaatttgcattaaattcacaaacttttatactctttctgtatatacattttttttctttaaaaaacaactatggatcagaatagccacatttagaacactttttgttatcagtcaatatttttagatagttagaacctggtcctaagcctaaaagtgggcttgattctgcagtaaatcttttacaactgcctcgacacacataaacctttttaaaaatagacactccccgaagtcttttgttcgcatggtcacacactgatgcttagatgttccagtaatctaatatggccacagtagtcttgatgaccaaagtcctttttttccatctttagaaaactacatgggaacaaacagatcgaacagttttgaagctactgtgtgtgtgaatgaacactcttgctttattccagaatgctgtacatctattttggattgtatattgtgtttgtgtatttacgctttgattcatagtaacttcttatggaattgatttgcattgaacacaaactgtaaataaaaagaaatggctgaaagagcaaaaaaaaaaaaaaaaaaaaaaaaaaaaaaaaaaaaaaaaaaaaaaaaaaaaaaaaaaaaaaaaaaaaaaaaaaaaggggggggggggacaaaaaaaccgggggggaaaaccttttttacaaagagggcgaccaccaagagagggggtataaaaacgcaggaggggagggagaaaaacaccggggggaggagaaaaacgcagcagtcgtgcctctggggagaggccccatgcgtgcgggacaagggcgacccccccaaccaatgtaggggccggaaaaaaaatgggtgatgggggaaccccgctatctcgcgccaattgtttcgtcttttaattactcactctccatagttaacaacacgaggagaaagaccaacagcaccagccgtaacataagacgaacgacttcaaaacacgcaaataagagcaacagcgacgagcacagca

SEQ ID NO: 66064 - DNA, 3045 bp, Homo sapiens
agtttgcagcgtcaggcagcgggtctgcgcccagcgagcggctccccagctcctgggaagatgcggacccgggacgcccccgtgagctcactgcgcctggctgacacgaggcgctcacagaacaaagcaagggctgggggatggcgcggccgcggggccggcgcgcagatcgctccggacccggacaccgcctgcgaggagcgccgaccagccgggaagggttcgcgctaggcggcgcccgggtcccgtcggccagggtgagcgtccggcccgcgtccgcgccacgcccgccgcgttcccctttcctctgcggcgggccgagagataaccctgcccgaggggtcccggcgcccgccccccacgcggtcgcactggaattcgcagcccctctcgggtccccggggcgcattttgcagtctgagtggcaatgcacttgctccaggacaggcggctaccccgccgcagcggaggcgcggacttttcttttggggggtctcgccggctcgccgcgctccccaccttgcctgcgcccgcccggagccagcggttctccaagcacccagcatcctgctagacgcgccgcgcaccgacggaggggacatgggcagagcaatggtggccaggctcgggctggggctgctgctgctggcactgctcctacccacgcagatttattccagtgaaacaacaactggaacttcaagtaactcctcccagagtacttccaactctgggttggccccaaatccaactaatgccaccaccaaggcggctggtggtgccctgcagtcaacagccagtctcttcgtggtctcactctctcttctgcatctctactcttaagagactcaggccaagaaacgtcttctaaatttccccatcttctaaacccaatccaaatggcgtctggaagtccaatgtggcaaggaaaaacaggtcttcatcgaatctactaattccacaccttttattgacacagaaaatgttgagaatcccaaatttgattgatttgaagaacatgtgagaggtttgactagatgatggatgccaatattaaatctgctggagtttcatgtacaagatgaaggagaggcaacatccaaaatagttaagacatgatttccttgaatgtggcttgagaaatatggacacttaatactaccttgaaaataagaatagaaataaaggatgggattgtggaatggagattcagttttcatttggttcattaattctataaggccataaaacaggtaatataaaaagcttccatgattctatttatatgtacatgagaaggaacttccaggtgttactgtaattcctcaacgtattgtttcgacagcactaatttaatgccgatatactctagatgaagttttacattgttgagctattgctgttctcttgggaactgaactcactttcctcctgaggctttggatttgacattgcatttgaccttttatgtagtaattgacatgtgccagggcaatgatgaatgagaatctacccccagatccaagcatcctgagcaactcttgattatccatattgagtcaaatggtaggcatttcctatcacctgtttccattcaacaagagcactacattcatttagctaaacggattccaaagagtagaattgcattgaccacgactaatttcaaaatgctttttattattattattttttagacagtctcactttgtcgcccaggccggagtgcagtggtgcgatctcagatcagtgtaccatttgcctcccgggctcaagcgattctcctgcctcagcctcccaagtagctgggattacaggcacctgccaccatgcccggctaatttttgtaattttagtagagacagggtttcaccatgttgcccaggctggtttcgaactcctgacctcaggtgatccacccgcctcggcctcccaaagtgctgggattacaggcttgagcccccgcgcccagccatcaaaatgctttttatttctgcatatgttgaatactttttacaatttaaaaaaatgatctgttttgaaggcaaaattgcaaatcttgaaattaagaaggcaaaaatgtaaaggagtcaaaactataaatcaagtatttgggaagtgaagactggaagctaatttgcattaaattcacaaacttttatactctttctgtatatacattttttttctttaaaaaacaactatggatcagaatagccacatttagaacactttttgttatcagtcaatatttttagatagttagaacctggtcctaagcctaaaagtgggcttgattctgcagtaaatcttttacaactgcctcgacacacataaacctttttaaaaatagacactccccgaagtcttttgttcgcatggtcacacactgatgcttagatgttccagtaatctaatatggccacagtagtcttgatgaccaaagtcctttttttccatctttagaaaactacatgggaacaaacagatcgaacagttttgaagctactgtgtgtgtgaatgaacactcttgctttattccagaatgctgtacatctattttggattgtatattgtgtttgtgtatttacgctttgattcatagtaacttcttatggaattgatttgcattgaacacaaactgtaaataaaaagaaatggctgaaagagcaaaaaaaattcggcacgaggaaagtggctcatgccaaagaagaaaaccttagtatgcatcagatgctggatcagactttactggagttaaacaacatgtgaaaacctccttagctgcgaccacattctttcattttgttttgttttgttttgtttttaaacacctgcttaccccttaaatgcaatttatttacttttaccactgtcacagaaacatccacaagattccagctaggtcagggggggggggaaaacacatacaaaaaagggaagcccatggtcagggggattctgggttaaaatgtgccattttcccgggttgatggtgccacaactttgtagagagttttacaaaaacattgtgcttagtccgcg

SEQ ID NO: 66065 - DNA, 2110 bp, Homo sapiens
  misc_feature (37)..(38): n is a, c, g, or t
ccaatgcacaggatctgctagagcgcggcacgagagnnatggcagagcaatggtggccaggctcgggctggggctgctgctgctggcactgctcctacccacgcagatttattccagtgaaacaacaactggaacttcaagtaactcctcccagagtacttccaactctgggttggccccaaatccaactaatgccaccaccaaggcggctggtggtgccctgcagtcaacagccagtctcttcgtggtctcactctctcttctgcatctctactcttaagagactcaggccaagaaacgtcttctaaatttccccatcttctaaacccaatccaaatggcgtctggaagtccaatgtggcaaggaaaaacaggtcttcatcgaatctactaattccacaccttttattgacacagaaaatgttgagaatcccaaatttgattgatttgaagaacatgtgagaggtttgactagatgatggatgccaatattaaatctgctggagtttcatgtacaagatgaaggagaggcaacatccaaaatagttaagacatgatttccttgaatgtggcttgagaaatatggacacttaatactaccttgaaaataagaatagaaataaaggatgggattgtggaatggagattcagttttcatttggttcattaattctataaggccataaaacaggtaatataaaaagcttccatgattctatttatatgtacatgagaaggaacttccaggtgttactgtaattcctcaacgtattgtttcgacagcactaatttaatgccgatatactctagatgaagttttacattgttgagctattgctgttctcttgggaactgaactcactttcctcctgaggctttggatttgacattgcatttgaccttttatgtagtaattgacatgtgccagggcaatgatgaatgagaatctacccccagatccaagcatcctgagcaactcttgattatccatattgagtcaaatggtaggcatttcctatcacctgtttccattcaacaagagcactacattcatttagctaaacggattccaaagagtagaattgcattgaccacgactaatttcaaaatgctttttattattattattttttagacagtctcactttgtcgcccaggccggagtgcagtggtgcgatctcagatcagtgtaccatttgcctcccgggctcaagcgattctcctgcctcagcctcccaagtagctgggattacaggcacctgccaccatgcccggctaatttttgtaattttagtagagacagggtttcaccatgttgcccaggctggtttcgaactcctgacctcaggtgatccacccgcctcggcctcccaaagtgctgggattacaggcttgagcccccgcgcccagccatcaaaatgctttttatttctgcatatgttgaatactttttacaatttaaaaaaatgatctgttttgaaggcaaaattgcaaatcttgaaattaagaaggcaaaaatgtaaaggagtcaaaactataaatcaagtatttgggaagtgaagactggaagctaatttgcattaaattcacaaacttttatactctttctgtatatacattttttttctttaaaaaacaactatggatcagaatagccacatttagaacactttttgttatcagtcaatatttttagatagttagaacctggtcctaagcctaaaagtgggcttgattctgcagtaaatcttttacaactgcctcgacacacataaacctttttaaaaatagacactccccgaagtcttttgttcgcatggtcacacactgatgcttagatgttccagtaatctaatatggccacagtagtcttgatgaccaaagtcctttttttccatctttagaaaactacatgggaacaaacagatcgaacagttttgaagctactgtgtgtgtgaatgaacactcttgctttattccagaatgctgtacatctattttggattgtatattgtgtttgtgtatttacgctttgattcatagtaacttcttatggaattgatttgcattgaacacaaactgtaaataaaaagaaatggctgaaagagcaa

SEQ ID NO: 66066 - DNA, 2112 bp, Homo sapiens
atcccccggaggcgttgaatggccaccgacggaggggacatgggcagagcaatggtggccaggctcgggctggggctgctgctgctggcactgctcctacccacgcagatttattccagtgaaacaacaactggaacttcaagtaactcctcccagagtacttccaactctgggttggccccaaatccaactaatgccaccaccaaggcggctggtggtgccctgcagtcaacagccagtctcttcgtggtctcactctctcttctgcatctctactcttaagagactcaggccaagaaacgtcttctaaatttccccatcttctaaacccaatccaaatggcgtctggaagtccaatgtggcaaggaaaaacaggtcttcatcgaatctactaattccacaccttttattgacacagaaaatgttgagaatcccaaatttgattgatttgaagaacatgtgagaggtttgactagatgatggatgccaatattaaatctgctggagtttcatgtacaagatgaaggagaggcaacatccaaaatagttaagacatgatttccttgaatgtggcttgagaaatatggacacttaatactaccttgaaaataagaatagaaataaaggatgggattgtggaatggagattcagttttcatttggttcattaattctataaggccataaaacaggtaatataaaaagcttccatgattctatttatatgtacatgagaaggaacttccaggtgttactgtaattcctcaacgtattgtttcgacagcactaatttaatgccgatatactctagatgaagttttacattgttgagctattgctgttctcttgggaactgaactcactttcctcctgaggctttggatttgacattgcatttgaccttttatgtagtaattgacatgtgccagggcaatgatgaatgagaatctacccccagatccaagcatcctgagcaactcttgattatccatattgagtcaaatggtaggcatttcctatcacctgtttccattcaacaagagcactacattcatttagctaaacggattccaaagagtagaattgcattgaccacgactaatttcaaaatgctttttattattattattttttagacagtctcactttgtcgcccaggccggagtgcagtggtgcgatctcagatcagtgtaccatttgcctcccgggctcaagcgattctcctgcctcagcctcccaagtagctgggattacaggcacctgccaccatgcccggctaatttttgtaattttagtagagacagggtttcaccatgttgcccaggctggtttcgaactcctgacctcaggtgatccacccgcctcggcctcccaaagtgctgggattacaggcttgagcccccgcgcccagccatcaaaatgctttttatttctgcatatgttgaatactttttacaatttaaaaaaatgatctgttttgaaggcaaaattgcaaatcttgaaattaagaaggcaaaaatgtaaaggagtcaaaactataaatcaagtatttgggaagtgaagactggaagctaatttgcattaaattcacaaacttttatactctttctgtatatacattttttttctttaaaaaacaactatggatcagaatagccacatttagaacactttttgttatcagtcaatatttttagatagttagaacctggtcctaagcctaaaagtgggcttgattctgcagtaaatcttttacaactgcctcgacacacataaacctttttaaaaatagacactccccgaagtcttttgttcgcatggtcacacactgatgcttagatgttccagtaatctaatatggccacagtagtcttgatgaccaaagtcctttttttccatctttagaaaactacatgggaacaaacagatcgaacagttttgaagctactgtgtgtgtgaatgaacactcttgctttattccagaatgctgtacatctattttggattgtatattgtgtttgtgtatttacgctttgattcatagtaacttcttatggaattgatttgcattgaacacaaactgtaaataaaaagaaatggctgaaagagcaa

SEQ ID NO: 66067 - DNA, 2085 bp, Homo sapiens
  misc_feature (14)..(14): n is a, c, g, or t
  misc_feature (20)..(20): n is a, c, g, or t
tgtcactgtccaanaaaggnatccagagttttgctcttgttgcccaggctgctgctgctggcactgctcctacccacgcagatttattccagtgaaacaacaactggaacttcaagtaactcctcccagagtacttccaactctgggttggccccaaatccaactaatgccaccaccaaggcggctggtggtgccctgcagtcaacagccagtctcttcgtggtctcactctctcttctgcatctctactcttaagagactcaggccaagaaacgtcttctaaatttccccatcttctaaacccaatccaaatggcgtctggaagtccaatgtggcaaggaaaaacaggtcttcatcgaatctactaattccacaccttttattgacacagaaaatgttgagaatcccaaatttgattgatttgaagaacatgtgagaggtttgactagatgatggatgccaatattaaatctgctggagtttcatgtacaagatgaaggagaggcaacatccaaaatagttaagacatgatttccttgaatgtggcttgagaaatatggacacttaatactaccttgaaaataagaatagaaataaaggatgggattgtggaatggagattcagttttcatttggttcattaattctataaggccataaaacaggtaatataaaaagcttccatgattctatttatatgtacatgagaaggaacttccaggtgttactgtaattcctcaacgtattgtttcgacagcactaatttaatgccgatatactctagatgaagttttacattgttgagctattgctgttctcttgggaactgaactcactttcctcctgaggctttggatttgacattgcatttgaccttttatgtagtaattgacatgtgccagggcaatgatgaatgagaatctacccccagatccaagcatcctgagcaactcttgattatccatattgagtcaaatggtaggcatttcctatcacctgtttccattcaacaagagcactacattcatttagctaaacggattccaaagagtagaattgcattgaccacgactaatttcaaaatgctttttattattattattttttagacagtctcactttgtcgcccaggccggagtgcagtggtgcgatctcagatcagtgtaccatttgcctcccgggctcaagcgattctcctgcctcagcctcccaagtagctgggattacaggcacctgccaccatgcccggctaatttttgtaattttagtagagacagggtttcaccatgttgcccaggctggtttcgaactcctgacctcaggtgatccacccgcctcggcctcccaaagtgctgggattacaggcttgagcccccgcgcccagccatcaaaatgctttttatttctgcatatgttgaatactttttacaatttaaaaaaatgatctgttttgaaggcaaaattgcaaatcttgaaattaagaaggcaaaaatgtaaaggagtcaaaactataaatcaagtatttgggaagtgaagactggaagctaatttgcattaaattcacaaacttttatactctttctgtatatacattttttttctttaaaaaacaactatggatcagaatagccacatttagaacactttttgttatcagtcaatatttttagatagttagaacctggtcctaagcctaaaagtgggcttgattctgcagtaaatcttttacaactgcctcgacacacataaacctttttaaaaatagacactccccgaagtcttttgttcgcatggtcacacactgatgcttagatgttccagtaatctaatatggccacagtagtcttgatgaccaaagtcctttttttccatctttagaaaactacatgggaacaaacagatcgaacagttttgaagctactgtgtgtgtgaatgaacactcttgctttattccagaatgctgtacatctattttggattgtatattgtgtttgtgtatttacgctttgattcatagtaacttcttatggaattgatttgcattgaacacaaactgtaaataaaaagaaatggctgaaagagcaa

SEQ ID NO: 66068 - DNA, 2533 bp, Homo sapiens
agtttgcagcgtcaggcagcgggtctgcgcccagcgagcggctccccagctcctgggaagatgcggacccgggacgcccccgtgagctcactgcgcctggctgacacgaggcgctcacagaacaaagcaagggctgggggatggcgcggccgcggggccggcgcgcagatcgctccggacccggacaccgcctgcgaggagcgccgaccagccgggaagggttcgcgctaggcggcgcccgggtcccgtcggccagggtgagcgtccggcccgcgtccgcgccacgcccgccgcgttcccctttcctctgcggcgggccgagagataaccctgcccgaggggtcccggcgcccgccccccacgcggtcgcactggaattcgcagcccctctcgggtccccggggcgcattttgcagtctgagtggcaatgcacttgctccaggacaggcggctaccccgccgcagcggaggcgcggacttttcttttggggggtctcgccggctcgccgcgctccccaccttgcctgcgcccgcccggagccagcggttctccaagcacccagcatcctgctagacgcgccgcgcaccgacggaggggacatgggcagagcaatggtggccaggctcgggctggggctgctgctgctggcactgctcctacccacgcagatttattccagtgaaacaacaactggaacttcaagtaactcctcccagagtacttccaactctgggttggccccaaatccaactaatgccaccaccaaggcggctggtggtgccctgcagtcaacagccagtctcttcgtggtctcactctctcttctgcatctctactcttaagagactcaggccaagaaacgtcttctaaatttccccatcttctaaacccaatccaaatggcgtctggaagtccaatgtggcaaggaaaaacaggtcttcatcgaatctactaattccacaccttttattgacacagaaaatgttgagaatcccaaatttgattgatttgaagaacatgtgagaggtttgactagatgatggatgccaatattaaatctgctggagtttcatgtacaagatgaaggagaggcaacatccaaaatagttaagacatgatttccttgaatgtggcttgagaaatatggacacttaatactaccttgaaaataagaatagaaataaaggatgggattgtggaatggagattcagttttcatttggttcattaattctataaggccataaaacaggtaatataaaaagcttccatgattctatttatatgtacatgagaaggaacttccaggtgttactgtaattcctcaacgtattgtttcgacagcactaatttaatgccgatatactctagatgaagttttacattgttgagctattgctgttctcttgggaactgaactcactttcctcctgaggctttggatttgacattgcatttgaccttttatgtagtaattgacatgtgccagggcaatgatgaatgagaatctacccccagatccaagcatcctgagcaactcttgattatccatattgagtcaaatggtaggcatttcctatcacctgtttccattcaacaagagcactacattcatttagctaaacggattccaaagagtagaattgcattgaccacgactaatttcaaaatgctttttattattattattttttagacagtctcactttgtcgcccaggccggagtgcagtggtgcgatctcagatcagtgtaccatttgcctcccgggctcaagcgattctcctgcctcaccaaagtgctgggattacaggcttgagcccccgcgcccagccatcaaaatgctttttatttctgcatatgttgaatactttttacaatttaaaaaaatgatctgttttgaaggcaaaattgcaaatcttgaaattaagaaggcaaaaatgtaaaggagtcaaaactataaatcaagtatttgggaagtgaagactggaagctaatttgcattaaattcacaaacttttatactctttctgtatatacattttttttctttaaaaaacaactatggatcagaatagccacatttagaacactttttgttatcagtcaatatttttagatagttagaacctggtcctaagcctaaaagtgggcttgattctgcagtaaatcttttacaactgcctcgacacacataaacctttttaaaaatagacactccccgaagtcttttgttcgcatggtcacacactgatgcttagatgttccagtaatctaatatggccacagtagtcttgatgaccaaagtcctttttttccatctttagaaaactacatgggaacaaacagatcgaacagttttgaagctactgtgtgtgtgaatgaacactcttgctttattccagaatgctgtacatctattttggattgtatattgtgtttgtgtatttacgctttgattcatagtaacttcttatggaattgatttgcattgaacacaaactgtaaataaaaagaaatggctgaaagagcaa

SEQ ID NO: 66069 - DNA, 2494 bp, Homo sapiens
agtttgcagcgtcaggcagcgggtctgcgcccagcgagcggctccccagctcctgggaagatgcggacccgggacgcccccgtgagctcactgcgcctggctgacacgaggcgctcacagaacaaagcaagggctgggggatggcgcggccgcggggccggcgcgcagatcgctccggacccggacaccgcctgcgaggagcgccgaccagccgggaagggttcgcgctaggcggcgcccgggtcccgtcggccagggtgagcgtccggcccgcgtccgcgccacgcccgccgcgttcccctttcctctgcggcgggccgagagataaccctgcccgaggggtcccggcgcccgccccccacgcggtcgcactggaattcgcagcccctctcgggtccccggggcgcattttgcagtctgagtggcaatgcacttgctccaggacaggcggctaccccgccgcagcggaggcgcggacttttcttttgggatttattccagtgaaacaacaactggaacttcaagtaactcctcccagagtacttccaactctgggttggccccaaatccaactaatgccaccaccaaggcggctggtggtgccctgcagtcaacagccagtctcttcgtggtctcactctctcttctgcatctctactcttaagagactcaggccaagaaacgtcttctaaatttccccatcttctaaacccaatccaaatggcgtctggaagtccaatgtggcaaggaaaaacaggtcttcatcgaatctactaattccacaccttttattgacacagaaaatgttgagaatcccaaatttgattgatttgaagaacatgtgagaggtttgactagatgatggatgccaatattaaatctgctggagtttcatgtacaagatgaaggagaggcaacatccaaaatagttaagacatgatttccttgaatgtggcttgagaaatatggacacttaatactaccttgaaaataagaatagaaataaaggatgggattgtggaatggagattcagttttcatttggttcattaattctataaggccataaaacaggtaatataaaaagcttccatgattctatttatatgtacatgagaaggaacttccaggtgttactgtaattcctcaacgtattgtttcgacagcactaatttaatgccgatatactctagatgaagttttacattgttgagctattgctgttctcttgggaactgaactcactttcctcctgaggctttggatttgacattgcatttgaccttttatgtagtaattgacatgtgccagggcaatgatgaatgagaatctacccccagatccaagcatcctgagcaactcttgattatccatattgagtcaaatggtaggcatttcctatcacctgtttccattcaacaagagcactacattcatttagctaaacggattccaaagagtagaattgcattgaccacgactaatttcaaaatgctttttattattattattttttagacagtctcactttgtcgcccaggccggagtgcagtggtgcgatctcagatcagtgtaccatttgcctcccgggctcaagcgattctcctgcctcagcctcccaagtagctgggattacaggcacctgccaccatgcccggctaatttttgtaattttagtagagacagggtttcaccatgttgcccaggctggtttcgaactcctgacctcaggtgatccacccgcctcggcctcccaaagtgctgggattacaggcttgagcccccgcgcccagccatcaaaatgctttttatttctgcatatgttgaatactttttacaatttaaaaaaatgatctgttttgaaggcaaaattgcaaatcttgaaattaagaaggcaaaaatgtaaaggagtcaaaactataaatcaagtatttgggaagtgaagactggaagctaatttgcattaaattcacaaacttttatactctttctgtatatacattttttttctttaaaaaacaactatggatcagaatagccacatttagaacactttttgttatcagtcaatatttttagatagttagaacctggtcctaagcctaaaagtgggcttgattctgcagtaaatcttttacaactgcctcgacacacataaacctttttaaaaatagacactccccgaagtcttttgttcgcatggtcacacactgatgcttagatgttccagtaatctaatatggccacagtagtcttgatgaccaaagtcctttttttccatctttagaaaactacatgggaacaaacagatcgaacagttttgaagctactgtgtgtgtgaatgaacactcttgctttattccagaatgctgtacatctattttggattgtatattgtgtttgtgtatttacgctttgattcatagtaacttcttatggaattgatttgcattgaacacaaactgtaaataaaaagaaatggctgaaagagcaa

SEQ ID NO: 66070 - DNA, 2067 bp, Homo sapiens
ccgatgaagtataggtgcgaggccgggtttatatcagcgacgaggtgcgcctacccacgctagatttattccagtgaaacaacaactggaacttcaagtaactcctcccagagtacttccaactctgggttggccccaaatccaactaatgccaccaccaaggcggctggtggtgccctgcagtcaacagccagtctcttcgtggtctcactctctcttctgcatctctactcttaagagactcaggccaagaaacgtcttctaaatttccccatcttctaaacccaatccaaatggcgtctggaagtccaatgtggcaaggaaaaacaggtcttcatcgaatctactaattccacaccttttattgacacagaaaatgttgagaatcccaaatttgattgatttgaagaacatgtgagaggtttgactagatgatggatgccaatattaaatctgctggagtttcatgtacaagatgaaggagaggcaacatccaaaatagttaagacatgatttccttgaatgtggcttgagaaatatggacacttaatactaccttgaaaataagaatagaaataaaggatgggattgtggaatggagattcagttttcatttggttcattaattctataaggccataaaacaggtaatataaaaagcttccatgattctatttatatgtacatgagaaggaacttccaggtgttactgtaattcctcaacgtattgtttcgacagcactaatttaatgccgatatactctagatgaagttttacattgttgagctattgctgttctcttgggaactgaactcactttcctcctgaggctttggatttgacattgcatttgaccttttatgtagtaattgacatgtgccagggcaatgatgaatgagaatctacccccagatccaagcatcctgagcaactcttgattatccatattgagtcaaatggtaggcatttcctatcacctgtttccattcaacaagagcactacattcatttagctaaacggattccaaagagtagaattgcattgaccacgactaatttcaaaatgctttttattattattattttttagacagtctcactttgtcgcccaggccggagtgcagtggtgcgatctcagatcagtgtaccatttgcctcccgggctcaagcgattctcctgcctcagcctcccaagtagctgggattacaggcacctgccaccatgcccggctaatttttgtaattttagtagagacagggtttcaccatgttgcccaggctggtttcgaactcctgacctcaggtgatccacccgcctcggcctcccaaagtgctgggattacaggcttgagcccccgcgcccagccatcaaaatgctttttatttctgcatatgttgaatactttttacaatttaaaaaaatgatctgttttgaaggcaaaattgcaaatcttgaaattaagaaggcaaaaatgtaaaggagtcaaaactataaatcaagtatttgggaagtgaagactggaagctaatttgcattaaattcacaaacttttatactctttctgtatatacattttttttctttaaaaaacaactatggatcagaatagccacatttagaacactttttgttatcagtcaatatttttagatagttagaacctggtcctaagcctaaaagtgggcttgattctgcagtaaatcttttacaactgcctcgacacacataaacctttttaaaaatagacactccccgaagtcttttgttcgcatggtcacacactgatgcttagatgttccagtaatctaatatggccacagtagtcttgatgaccaaagtcctttttttccatctttagaaaactacatgggaacaaacagatcgaacagttttgaagctactgtgtgtgtgaatgaacactcttgctttattccagaatgctgtacatctattttggattgtatattgtgtttgtgtatttacgctttgattcatagtaacttcttatggaattgatttgcattgaacacaaactgtaaataaaaagaaatggctgaaagagcaa

SEQ ID NO: 66071 - DNA, 2145 bp, Homo sapiens
  misc_feature (128)..(128): n is a, c, g, or t
  misc_feature (130)..(130): n is a, c, g, or t
aggagtcttgctctgtctcccaggttggagtgcagtggcccggtctggggtcattgcaacctccgccttctcggttcaagcgattctcttgcccaagcctcccgagaagctgggactacaggcgtgtncncccatgcccagatttattccagtgaaacaacaactggaacttcaagtaactcctcccagagtacttccaactctgggttggccccaaatccaactaatgccaccaccaaggcggctggtggtgccctgcagtcaacagccagtctcttcgtggtctcactctctcttctgcatctctactcttaagagactcaggccaagaaacgtcttctaaatttccccatcttctaaacccaatccaaatggcgtctggaagtccaatgtggcaaggaaaaacaggtcttcatcgaatctactaattccacaccttttattgacacagaaaatgttgagaatcccaaatttgattgatttgaagaacatgtgagaggtttgactagatgatggatgccaatattaaatctgctggagtttcatgtacaagatgaaggagaggcaacatccaaaatagttaagacatgatttccttgaatgtggcttgagaaatatggacacttaatactaccttgaaaataagaatagaaataaaggatgggattgtggaatggagattcagttttcatttggttcattaattctataaggccataaaacaggtaatataaaaagcttccatgattctatttatatgtacatgagaaggaacttccaggtgttactgtaattcctcaacgtattgtttcgacagcactaatttaatgccgatatactctagatgaagttttacattgttgagctattgctgttctcttgggaactgaactcactttcctcctgaggctttggatttgacattgcatttgaccttttatgtagtaattgacatgtgccagggcaatgatgaatgagaatctacccccagatccaagcatcctgagcaactcttgattatccatattgagtcaaatggtaggcatttcctatcacctgtttccattcaacaagagcactacattcatttagctaaacggattccaaagagtagaattgcattgaccacgactaatttcaaaatgctttttattattattattttttagacagtctcactttgtcgcccaggccggagtgcagtggtgcgatctcagatcagtgtaccatttgcctcccgggctcaagcgattctcctgcctcagcctcccaagtagctgggattacaggcacctgccaccatgcccggctaatttttgtaattttagtagagacagggtttcaccatgttgcccaggctggtttcgaactcctgacctcaggtgatccacccgcctcggcctcccaaagtgctgggattacaggcttgagcccccgcgcccagccatcaaaatgctttttatttctgcatatgttgaatactttttacaatttaaaaaaatgatctgttttgaaggcaaaattgcaaatcttgaaattaagaaggcaaaaatgtaaaggagtcaaaactataaatcaagtatttgggaagtgaagactggaagctaatttgcattaaattcacaaacttttatactctttctgtatatacattttttttctttaaaaaacaactatggatcagaatagccacatttagaacactttttgttatcagtcaatatttttagatagttagaacctggtcctaagcctaaaagtgggcttgattctgcagtaaatcttttacaactgcctcgacacacataaacctttttaaaaatagacactccccgaagtcttttgttcgcatggtcacacactgatgcttagatgttccagtaatctaatatggccacagtagtcttgatgaccaaagtcctttttttccatctttagaaaactacatgggaacaaacagatcgaacagttttgaagctactgtgtgtgtgaatgaacactcttgctttattccagaatgctgtacatctattttggattgtatattgtgtttgtgtatttacgctttgattcatagtaacttcttatggaattgatttgcattgaacacaaactgtaaataaaaagaaatggctgaaagagcaa

SEQ ID NO: 66072 - DNA, 2293 bp, Homo sapiens
tccttttttcctttgcaaagaaataaaaacaggagttatagttattgaataacttttttgttcttgttgccacttggcatttttgaggcatctctaggtagtttgttttgaaactaaagagaatgaccttggtgggttgagcaagaattcagaagttaatgatgttgggtaagagaacaatggtaagagagcaatctaagaatatatcacctactttaattttatatgagagtacatggaggtagctgtgatgtggaaatgtatccatgtaactttttatgtattttagatttattccagtgaaacaacaactggaacttcaagtaactcctcccagagtacttccaactctgggttggccccaaatccaactaatgccaccaccaaggcggctggtggtgccctgcagtcaacagccagtctcttcgtggtctcactctctcttctgcatctctactcttaagagactcaggccaagaaacgtcttctaaatttccccatcttctaaacccaatccaaatggcgtctggaagtccaatgtggcaaggaaaaacaggtcttcatcgaatctactaattccacaccttttattgacacagaaaatgttgagaatcccaaatttgattgatttgaagaacatgtgagaggtttgactagatgatggatgccaatattaaatctgctggagtttcatgtacaagatgaaggagaggcaacatccaaaatagttaagacatgatttccttgaatgtggcttgagaaatatggacacttaatactaccttgaaaataagaatagaaataaaggatgggattgtggaatggagattcagttttcatttggttcattaattctataaggccataaaacaggtaatataaaaagcttccatgattctatttatatgtacatgagaaggaacttccaggtgttactgtaattcctcaacgtattgtttcgacagcactaatttaatgccgatatactctagatgaagttttacattgttgagctattgctgttctcttgggaactgaactcactttcctcctgaggctttggatttgacattgcatttgaccttttatgtagtaattgacatgtgccagggcaatgatgaatgagaatctacccccagatccaagcatcctgagcaactcttgattatccatattgagtcaaatggtaggcatttcctatcacctgtttccattcaacaagagcactacattcatttagctaaacggattccaaagagtagaattgcattgaccacgactaatttcaaaatgctttttattattattattttttagacagtctcactttgtcgcccaggccggagtgcagtggtgcgatctcagatcagtgtaccatttgcctcccgggctcaagcgattctcctgcctcagcctcccaagtagctgggattacaggcacctgccaccatgcccggctaatttttgtaattttagtagagacagggtttcaccatgttgcccaggctggtttcgaactcctgacctcaggtgatccacccgcctcggcctcccaaagtgctgggattacaggcttgagcccccgcgcccagccatcaaaatgctttttatttctgcatatgttgaatactttttacaatttaaaaaaatgatctgttttgaaggcaaaattgcaaatcttgaaattaagaaggcaaaaatgtaaaggagtcaaaactataaatcaagtatttgggaagtgaagactggaagctaatttgcattaaattcacaaacttttatactctttctgtatatacattttttttctttaaaaaacaactatggatcagaatagccacatttagaacactttttgttatcagtcaatatttttagatagttagaacctggtcctaagcctaaaagtgggcttgattctgcagtaaatcttttacaactgcctcgacacacataaacctttttaaaaatagacactccccgaagtcttttgttcgcatggtcacacactgatgcttagatgttccagtaatctaatatggccacagtagtcttgatgaccaaagtcctttttttccatctttagaaaactacatgggaacaaacagatcgaacagttttgaagctactgtgtgtgtgaatgaacactcttgctttattccagaatgctgtacatctattttggattgtatattgtgtttgtgtatttacgctttgattcatagtaacttcttatggaattgatttgcattgaacacaaactgtaaataaaaagaaatggctgaaagagcaa

SEQ ID NO: 66073 - DNA, 1934 bp, Homo sapiens
gtaccatccttcctctctcacgacgtgcactatgacccagctccctgcagtcaacagccagtctcttcgtggtctcactctctcttctgcatctctactcttaagagactcaggccaagaaacgtcttctaaatttccccatcttctaaacccaatccaaatggcgtctggaagtccaatgtggcaaggaaaaacaggtcttcatcgaatctactaattccacaccttttattgacacagaaaatgttgagaatcccaaatttgattgatttgaagaacatgtgagaggtttgactagatgatggatgccaatattaaatctgctggagtttcatgtacaagatgaaggagaggcaacatccaaaatagttaagacatgatttccttgaatgtggcttgagaaatatggacacttaatactaccttgaaaataagaatagaaataaaggatgggattgtggaatggagattcagttttcatttggttcattaattctataaggccataaaacaggtaatataaaaagcttccatgattctatttatatgtacatgagaaggaacttccaggtgttactgtaattcctcaacgtattgtttcgacagcactaatttaatgccgatatactctagatgaagttttacattgttgagctattgctgttctcttgggaactgaactcactttcctcctgaggctttggatttgacattgcatttgaccttttatgtagtaattgacatgtgccagggcaatgatgaatgagaatctacccccagatccaagcatcctgagcaactcttgattatccatattgagtcaaatggtaggcatttcctatcacctgtttccattcaacaagagcactacattcatttagctaaacggattccaaagagtagaattgcattgaccacgactaatttcaaaatgctttttattattattattttttagacagtctcactttgtcgcccaggccggagtgcagtggtgcgatctcagatcagtgtaccatttgcctcccgggctcaagcgattctcctgcctcagcctcccaagtagctgggattacaggcacctgccaccatgcccggctaatttttgtaattttagtagagacagggtttcaccatgttgcccaggctggtttcgaactcctgacctcaggtgatccacccgcctcggcctcccaaagtgctgggattacaggcttgagcccccgcgcccagccatcaaaatgctttttatttctgcatatgttgaatactttttacaatttaaaaaaatgatctgttttgaaggcaaaattgcaaatcttgaaattaagaaggcaaaaatgtaaaggagtcaaaactataaatcaagtatttgggaagtgaagactggaagctaatttgcattaaattcacaaacttttatactctttctgtatatacattttttttctttaaaaaacaactatggatcagaatagccacatttagaacactttttgttatcagtcaatatttttagatagttagaacctggtcctaagcctaaaagtgggcttgattctgcagtaaatcttttacaactgcctcgacacacataaacctttttaaaaatagacactccccgaagtcttttgttcgcatggtcacacactgatgcttagatgttccagtaatctaatatggccacagtagtcttgatgaccaaagtcctttttttccatctttagaaaactacatgggaacaaacagatcgaacagttttgaagctactgtgtgtgtgaatgaacactcttgctttattccagaatgctgtacatctattttggattgtatattgtgtttgtgtatttacgctttgattcatagtaacttcttatggaattgatttgcattgaacacaaactgtaaataaaaagaaatggctgaaagagcaa

SEQ ID NO: 66074 - DNA, 2073 bp, Homo sapiens
  misc_feature (2)..(2): n is a, c, g, or t
  misc_feature (12)..(12): n is a, c, g, or t
  misc_feature (37)..(37): n is a, c, g, or t
  misc_feature (48)..(48): n is a, c, g, or t
ancctataaaanaagtttcccatggtaagctatggcngttctcttggnaacttgaactcactttcctcctgaggctttgatttgacattgcatttgcccttttatgtagtaattgacatgtgccagggcaatgatgaatgagaatctacccccagatccaagcatcctgagcaactcttgattatccatattgagtcaaatggtaggcatttcctatcacctgtttccattcaacaagagcactacattcatttagctaaacgtcttctaaatttccccatcttctaaacccaatccaaatggcgtctggaagtccaatgtggcaaggaaaaacaggtcttcatcgaatctactaattccacaccttttattgacacagaaaatgttgagaatcccaaatttgattgatttgaagaacatgtgagaggtttgactagatgatggatgccaatattaaatctgctggagtttcatgtacaagatgaaggagaggcaacatccaaaatagttaagacatgatttccttgaatgtggcttgagaaatatggacacttaatactaccttgaaaataagaatagaaataaaggatgggattgtggaatggagattcagttttcatttggttcattaattctataaggccataaaacaggtaatataaaaagcttccatgattctatttatatgtacatgagaaggaacttccaggtgttactgtaattcctcaacgtattgtttcgacagcactaatttaatgccgatatactctagatgaagttttacattgttgagctattgctgttctcttgggaactgaactcactttcctcctgaggctttggatttgacattgcatttgaccttttatgtagtaattgacatgtgccagggcaatgatgaatgagaatctacccccagatccaagcatcctgagcaactcttgattatccatattgagtcaaatggtaggcatttcctatcacctgtttccattcaacaagagcactacattcatttagctaaacggattccaaagagtagaattgcattgaccacgactaatttcaaaatgctttttattattattattttttagacagtctcactttgtcgcccaggccggagtgcagtggtgcgatctcagatcagtgtaccatttgcctcccgggctcaagcgattctcctgcctcagcctcccaagtagctgggattacaggcacctgccaccatgcccggctaatttttgtaattttagtagagacagggtttcaccatgttgcccaggctggtttcgaactcctgacctcaggtgatccacccgcctcggcctcccaaagtgctgggattacaggcttgagcccccgcgcccagccatcaaaatgctttttatttctgcatatgttgaatactttttacaatttaaaaaaatgatctgttttgaaggcaaaattgcaaatcttgaaattaagaaggcaaaaatgtaaaggagtcaaaactataaatcaagtatttgggaagtgaagactggaagctaatttgcattaaattcacaaacttttatactctttctgtatatacattttttttctttaaaaaacaactatggatcagaatagccacatttagaacactttttgttatcagtcaatatttttagatagttagaacctggtcctaagcctaaaagtgggcttgattctgcagtaaatcttttacaactgcctcgacacacataaacctttttaaaaatagacactccccgaagtcttttgttcgcatggtcacacactgatgcttagatgttccagtaatctaatatggccacagtagtcttgatgaccaaagtcctttttttccatctttagaaaactacatgggaacaaacagatcgaacagttttgaagctactgtgtgtgtgaatgaacactcttgctttattccagaatgctgtacatctattttggattgtatattgtgtttgtgtatttacgctttgattcatagtaacttcttatggaattgatttgcattgaacacaaactgtaaataaaaagaaatggctgaaagagcaa

SEQ ID NO: 66075 - DNA, 1786 bp, Homo sapiens
cgacattgagagtggctgacgaaagagaaagagaactcagaagggagaataagatagagagaaaatgaggctagaaaaacatgcaggagctagaaaggtaaaggaacccctgaccccttgaccttccttccctctaccctcatggtcctcttactgtccttgactttcttctctgctttaacattccattctatatgtcaactgcataacacagggtacaatttctacatgatttccttgaatgtggcttgagaaatatggacacttaatactaccttgaaaataagaatagaaataaaggatgggattgtggaatggagattcagttttcatttggttcattaattctataaggccataaaacaggtaatataaaaagcttccatgattctatttatatgtacatgagaaggaacttccaggtgttactgtaattcctcaacgtattgtttcgacagcactaatttaatgccgatatactctagatgaagttttacattgttgagctattgctgttctcttgggaactgaactcactttcctcctgaggctttggatttgacattgcatttgaccttttatgtagtaattgacatgtgccagggcaatgatgaatgagaatctacccccagatccaagcatcctgagcaactcttgattatccatattgagtcaaatggtaggcatttcctatcacctgtttccattcaacaagagcactacattcatttagctaaacggattccaaagagtagaattgcattgaccacgactaatttcaaaatgctttttattattattattttttagacagtctcactttgtcgcccaggccggagtgcagtggtgcgatctcagatcagtgtaccatttgcctcccgggctcaagcgattctcctgcctcagcctcccaagtagctgggattacaggcacctgccaccatgcccggctaatttttgtaattttagtagagacagggtttcaccatgttgcccaggctggtttcgaactcctgacctcaggtgatccacccgcctcggcctcccaaagtgctgggattacaggcttgagcccccgcgcccagccatcaaaatgctttttatttctgcatatgttgaatactttttacaatttaaaaaaatgatctgttttgaaggcaaaattgcaaatcttgaaattaagaaggcaaaaatgtaaaggagtcaaaactataaatcaagtatttgggaagtgaagactggaagctaatttgcattaaattcacaaacttttatactctttctgtatatacattttttttctttaaaaaacaactatggatcagaatagccacatttagaacactttttgttatcagtcaatatttttagatagttagaacctggtcctaagcctaaaagtgggcttgattctgcagtaaatcttttacaactgcctcgacacacataaacctttttaaaaatagacactccccgaagtcttttgttcgcatggtcacacactgatgcttagatgttccagtaatctaatatggccacagtagtcttgatgaccaaagtcctttttttccatctttagaaaactacatgggaacaaacagatcgaacagttttgaagctactgtgtgtgtgaatgaacactcttgctttattccagaatgctgtacatctattttggattgtatattgtgtttgtgtatttacgctttgattcatagtaacttcttatggaattgatttgcattgaacacaaactgtaaataaaaagaaatggctgaaagagcaa

SEQ ID NO: 66076 - DNA, 1545 bp, Homo sapiens
  misc_feature (25)..(25): n is a, c, g, or t
  misc_feature (40)..(40): n is a, c, g, or t
aagcagtggtatcaacgcagagtgncattacggccggganaataagaatagaaataaaggatgggattgtggaatggagattcagttttcatttggttcattaattctataaggccataaaacaggtaatataaaaagcttccatgattctatttatatgtacatgagaaggaacttccaggtgttactgtaattcctcaacgtattgtttcgacagcactaatttaatgccgatatactctagatgaagttttacattgttgagctattgctgttctcttgggaactgaactcactttcctcctgaggctttggatttgacattgcatttgaccttttatgtagtaattgacatgtgccagggcaatgatgaatgagaatctacccccagatccaagcatcctgagcaactcttgattatccatattgagtcaaatggtaggcatttcctatcacctgtttccattcaacaagagcactacattcatttagctaaacggattccaaagagtagaattgcattgaccacgactaatttcaaaatgctttttattattattattttttagacagtctcactttgtcgcccaggccggagtgcagtggtgcgatctcagatcagtgtaccatttgcctcccgggctcaagcgattctcctgcctcagcctcccaagtagctgggattacaggcacctgccaccatgcccggctaatttttgtaattttagtagagacagggtttcaccatgttgcccaggctggtttcgaactcctgacctcaggtgatccacccgcctcggcctcccaaagtgctgggattacaggcttgagcccccgcgcccagccatcaaaatgctttttatttctgcatatgttgaatactttttacaatttaaaaaaatgatctgttttgaaggcaaaattgcaaatcttgaaattaagaaggcaaaaatgtaaaggagtcaaaactataaatcaagtatttgggaagtgaagactggaagctaatttgcattaaattcacaaacttttatactctttctgtatatacattttttttctttaaaaaacaactatggatcagaatagccacatttagaacactttttgttatcagtcaatatttttagatagttagaacctggtcctaagcctaaaagtgggcttgattctgcagtaaatcttttacaactgcctcgacacacataaacctttttaaaaatagacactccccgaagtcttttgttcgcatggtcacacactgatgcttagatgttccagtaatctaatatggccacagtagtcttgatgaccaaagtcctttttttccatctttagaaaactacatgggaacaaacagatcgaacagttttgaagctactgtgtgtgtgaatgaacactcttgctttattccagaatgctgtacatctattttggattgtatattgtgtttgtgtatttacgctttgattcatagtaacttcttatggaattgatttgcattgaacacaaactgtaaataaaaagaaatggctgaaagagcaa

SEQ ID NO: 66077 - DNA, 1539 bp, Homo sapiens
tgaccctagcaggatccttactaatggctgtaagaataagaatagaaataaaggatgggattgtggaatggagattcagttttcatttggttcattaattctataaggccataaaacaggtaatataaaaagcttccatgattctatttatatgtacatgagaaggaacttccaggtgttactgtaattcctcaacgtattgtttcgacagcactaatttaatgccgatatactctagatgaagttttacattgttgagctattgctgttctcttgggaactgaactcactttcctcctgaggctttggatttgacattgcatttgaccttttatgtagtaattgacatgtgccagggcaatgatgaatgagaatctacccccagatccaagcatcctgagcaactcttgattatccatattgagtcaaatggtaggcatttcctatcacctgtttccattcaacaagagcactacattcatttagctaaacggattccaaagagtagaattgcattgaccacgactaatttcaaaatgctttttattattattattttttagacagtctcactttgtcgcccaggccggagtgcagtggtgcgatctcagatcagtgtaccatttgcctcccgggctcaagcgattctcctgcctcagcctcccaagtagctgggattacaggcacctgccaccatgcccggctaatttttgtaattttagtagagacagggtttcaccatgttgcccaggctggtttcgaactcctgacctcaggtgatccacccgcctcggcctcccaaagtgctgggattacaggcttgagcccccgcgcccagccatcaaaatgctttttatttctgcatatgttgaatactttttacaatttaaaaaaatgatctgttttgaaggcaaaattgcaaatcttgaaattaagaaggcaaaaatgtaaaggagtcaaaactataaatcaagtatttgggaagtgaagactggaagctaatttgcattaaattcacaaacttttatactctttctgtatatacattttttttctttaaaaaacaactatggatcagaatagccacatttagaacactttttgttatcagtcaatatttttagatagttagaacctggtcctaagcctaaaagtgggcttgattctgcagtaaatcttttacaactgcctcgacacacataaacctttttaaaaatagacactccccgaagtcttttgttcgcatggtcacacactgatgcttagatgttccagtaatctaatatggccacagtagtcttgatgaccaaagtcctttttttccatctttagaaaactacatgggaacaaacagatcgaacagttttgaagctactgtgtgtgtgaatgaacactcttgctttattccagaatgctgtacatctattttggattgtatattgtgtttgtgtatttacgctttgattcatagtaacttcttatggaattgatttgcattgaacacaaactgtaaataaaaagaaatggctgaaagagcaa

SEQ ID NO: 66078 - DNA, 1532 bp, Homo sapiens
cctagaggacccgctgatccgcttaagaataagaatagaaataaaggatgggattgtggaatggagattcagttttcatttggttcattaattctataaggccataaaacaggtaatataaaaagcttccatgattctatttatatgtacatgagaaggaacttccaggtgttactgtaattcctcaacgtattgtttcgacagcactaatttaatgccgatatactctagatgaagttttacattgttgagctattgctgttctcttgggaactgaactcactttcctcctgaggctttggatttgacattgcatttgaccttttatgtagtaattgacatgtgccagggcaatgatgaatgagaatctacccccagatccaagcatcctgagcaactcttgattatccatattgagtcaaatggtaggcatttcctatcacctgtttccattcaacaagagcactacattcatttagctaaacggattccaaagagtagaattgcattgaccacgactaatttcaaaatgctttttattattattattttttagacagtctcactttgtcgcccaggccggagtgcagtggtgcgatctcagatcagtgtaccatttgcctcccgggctcaagcgattctcctgcctcagcctcccaagtagctgggattacaggcacctgccaccatgcccggctaatttttgtaattttagtagagacagggtttcaccatgttgcccaggctggtttcgaactcctgacctcaggtgatccacccgcctcggcctcccaaagtgctgggattacaggcttgagcccccgcgcccagccatcaaaatgctttttatttctgcatatgttgaatactttttacaatttaaaaaaatgatctgttttgaaggcaaaattgcaaatcttgaaattaagaaggcaaaaatgtaaaggagtcaaaactataaatcaagtatttgggaagtgaagactggaagctaatttgcattaaattcacaaacttttatactctttctgtatatacattttttttctttaaaaaacaactatggatcagaatagccacatttagaacactttttgttatcagtcaatatttttagatagttagaacctggtcctaagcctaaaagtgggcttgattctgcagtaaatcttttacaactgcctcgacacacataaacctttttaaaaatagacactccccgaagtcttttgttcgcatggtcacacactgatgcttagatgttccagtaatctaatatggccacagtagtcttgatgaccaaagtcctttttttccatctttagaaaactacatgggaacaaacagatcgaacagttttgaagctactgtgtgtgtgaatgaacactcttgctttattccagaatgctgtacatctattttggattgtatattgtgtttgtgtatttacgctttgattcatagtaacttcttatggaattgatttgcattgaacacaaactgtaaataaaaagaaatggctgaaagagcaa

SEQ ID NO: 66079 - DNA, 1357 bp, Homo sapiens
atcgtttggaccagccaactaattaactgcctatactatctctactatgtacacttctataaatcagttgaggcataaatatgatgttctcttgggaactgaactcactttcctcctgaggctttggatttgacattgcatttgaccttttatgtagtaattgacatgtgccagggcaatgatgaatgagaatctacccccagatccaagcatcctgagcaactcttgattatccatattgagtcaaatggtaggcatttcctatcacctgtttccattcaacaagagcactacattcatttagctaaacggattccaaagagtagaattgcattgaccacgactaatttcaaaatgctttttattattattattttttagacagtctcactttgtcgcccaggccggagtgcagtggtgcgatctcagatcagtgtaccatttgcctcccgggctcaagcgattctcctgcctcagcctcccaagtagctgggattacaggcacctgccaccatgcccggctaatttttgtaattttagtagagacagggtttcaccatgttgcccaggctggtttcgaactcctgacctcaggtgatccacccgcctcggcctcccaaagtgctgggattacaggcttgagcccccgcgcccagccatcaaaatgctttttatttctgcatatgttgaatactttttacaatttaaaaaaatgatctgttttgaaggcaaaattgcaaatcttgaaattaagaaggcaaaaatgtaaaggagtcaaaactataaatcaagtatttgggaagtgaagactggaagctaatttgcattaaattcacaaacttttatactctttctgtatatacattttttttctttaaaaaacaactatggatcagaatagccacatttagaacactttttgttatcagtcaatatttttagatagttagaacctggtcctaagcctaaaagtgggcttgattctgcagtaaatcttttacaactgcctcgacacacataaacctttttaaaaatagacactccccgaagtcttttgttcgcatggtcacacactgatgcttagatgttccagtaatctaatatggccacagtagtcttgatgaccaaagtcctttttttccatctttagaaaactacatgggaacaaacagatcgaacagttttgaagctactgtgtgtgtgaatgaacactcttgctttattccagaatgctgtacatctattttggattgtatattgtgtttgtgtatttacgctttgattcatagtaacttcttatggaattgatttgcattgaacacaaactgtaaataaaaagaaatggctgaaagagcaa

SEQ ID NO: 66080 - DNA, 1263 bp, Homo sapiens
  misc_feature (25)..(25): n is a, c, g, or t
  misc_feature (40)..(40): n is a, c, g, or t
aagcagtggtatcaacgcagagtgncattacggccggganattgcatttgaccttttatgtagtaattgacatgtgccagggcaatgatgaatgagaatctacccccagatccaagcatcctgagcaactcttgattatccatattgagtcaaatggtaggcatttcctatcacctgtttccattcaacaagagcactacattcatttagctaaacggattccaaagagtagaattgcattgaccacgactaatttcaaaatgctttttattattattattttttagacagtctcactttgtcgcccaggccggagtgcagtggtgcgatctcagatcagtgtaccatttgcctcccgggctcaagcgattctcctgcctcagcctcccaagtagctgggattacaggcacctgccaccatgcccggctaatttttgtaattttagtagagacagggtttcaccatgttgcccaggctggtttcgaactcctgacctcaggtgatccacccgcctcggcctcccaaagtgctgggattacaggcttgagcccccgcgcccagccatcaaaatgctttttatttctgcatatgttgaatactttttacaatttaaaaaaatgatctgttttgaaggcaaaattgcaaatcttgaaattaagaaggcaaaaatgtaaaggagtcaaaactataaatcaagtatttgggaagtgaagactggaagctaatttgcattaaattcacaaacttttatactctttctgtatatacattttttttctttaaaaaacaactatggatcagaatagccacatttagaacactttttgttatcagtcaatatttttagatagttagaacctggtcctaagcctaaaagtgggcttgattctgcagtaaatcttttacaactgcctcgacacacataaacctttttaaaaatagacactccccgaagtcttttgttcgcatggtcacacactgatgcttagatgttccagtaatctaatatggccacagtagtcttgatgaccaaagtcctttttttccatctttagaaaactacatgggaacaaacagatcgaacagttttgaagctactgtgtgtgtgaatgaacactcttgctttattccagaatgctgtacatctattttggattgtatattgtgtttgtgtatttacgctttgattcatagtaacttcttatggaattgatttgcattgaacacaaactgtaaataaaaagaaatggctgaaagagcaa

SEQ ID NO: 66081 - DNA, 1920 bp, Homo sapiens
agtttgcagcgtcaggcagcgggtctgcgcccagcgagcggctccccagctcctgggaagatgcggacccgggacgcccccgtgagctcactgcgcctggctgacacgaggcgctcacagaacaaagcaagggctgggggatggcgcggccgcggggccggcgcgcagatcgctccggacccggacaccgcctgcgaggagcgccgaccagccgggaagggttcgcgctaggcggcgcccgggtcccgtcggccagggtgagcgtccggcccgcgtccgcgccacgcccgccgcgttcccctttcctctgcggcgggccgagagataaccctgcccgaggggtcccggcgcccgccccccacgcggtcgcactggaattcgcagcccctctcgggtccccggggcgcattttgcagtctgagtggcaatgcacttgctccaggacaggcggctaccccgccgcagcggaggcgcggacttttcttttggggggtctcgccggctcgccgcgctccccaccttgcctgcgcccgcccggagccagcggttctccaagcacccagcatcctgctagacgcgccgcgcaccgacggaggggacatgggcagagcaatggtggccaggctcgggctggggctgctgctgctggcactgctcctacccacgcagatttattccagtgaaacaacaactggaacttcaagtaactcctcccagagtacttccaactctgggttggccccaaatccaactaatgccaccaccaaggcggctggtggtgccctgcagtcaacagccagtctcttcgtggtctcactctctcttctgcatctctactcttaagagactcaggccaagaaacgtcttctaaatttccccatcttctaaacccaatccaaatggcgtctggaagtccaatgtggcaaggaaaaacaggtcttcatcgaatctactaattccacaccttttattgacacagaaaatgttgagaatcccaaatttgattgatttgaagaacatgtgagaggtttgactagatgatggatgccaatattaaatctgctggagtttcatgtacaagatgaaggagaggcaacatccaaaatagttaagacatgatttccttgaatgtggcttgagaaatatggacacttaatactaccttgaaaataagaatagaaataaaggatgggattgtggaatggagattcagttttcatttggttcattaattctataaggccataaaacaggtaatataaaaagcttccatgattctatttatatgtacatgagaaggaacttccaggtgttactgtaattcctcaacgtattgtttcgacagcactaatttaatgccgatatactctagatgaagttttacattgttgagctattgctgttctcttgggaactgaactcactttcctcctgaggctttggatttgacattgcatttgaccttttatgtagtaattgacatgtgccagggcaatgatgaatgagaatctacccccagatccaagcatcctgagcaactcttgattatccatattgagtcaaatggtaggcatttcctatcacctgtttccattcaacaagagcactacattcatttagctaaacggattccaaagagtagaattgcattgaccacgactaatttcaaaatgctttttattattattattttttagacagtctcactttgtcgcccaggccggagtgcagtggtgcgatctcagatcagtgtaccatttgcctcccgggctcaagcgattctcctgcctcatactaggcaggctgaggcaggagaatggtgtgaacccgggaggcagaggttgcagtgaaccgagatcacgccactgcactctagcctgggcaacagagcaagactctgcctcacagaaaaaaaaaaaa

SEQ ID NO: 66082 - DNA, 1730 bp, Homo sapiens
  misc_feature (1708)..(1709): n is a, c, g, or t
  misc_feature (1716)..(1716): n is a, c, g, or t
  misc_feature (1720)..(1720): n is a, c, g, or t
agtttgcagcgtcaggcagcgggtctgcgcccagcgagcggctccccagctcctgggaagatgcggacccgggacgcccccgtgagctcactgcgcctggctgacacgaggcgctcacagaacaaagcaagggctgggggatggcgcggccgcggggccggcgcgcagatcgctccggacccggacaccgcctgcgaggagcgccgaccagccgggaagggttcgcgctaggcggcgcccgggtcccgtcggccagggtgagcgtccggcccgcgtccgcgccacgcccgccgcgttcccctttcctctgcggcgggccgagagataaccctgcccgaggggtcccggcgcccgccccccacgcggtcgcactggaattcgcagcccctctcgggtccccggggcgcattttgcagtctgagtggcaatgcacttgctccaggacaggcggctaccccgccgcagcggaggcgcggacttttcttttggggggtctcgccggctcgccgcgctccccaccttgcctgcgcccgcccggagccagcggttctccaagcacccagcatcctgctagacgcgccgcgcaccgacggaggggacatgggcagagcaatggtggccaggctcgggctggggctgctgctgctggcactgctcctacccacgcagatttattccagtgaaacaacaactggaacttcaagtaactcctcccagagtacttccaactctgggttggccccaaatccaactaatgccaccaccaaggcggctggtggtgccctgcagtcaacagccagtctcttcgtggtctcactctctcttctgcatctctactcttaagagactcaggccaagaaacgtcttctaaatttccccatcttctaaacccaatccaaatggcgtctggaagtccaatgtggcaaggaaaaacaggtcttcatcgaatctactaattccacaccttttattgacacagaaaatgttgagaatcccaaatttgattgatttgaagaacatgtgagaggtttgactagatgatggatgccaatattaaatctgctggagtttcatgtacaagatgaaggagaggcaacatccaaaatagttaagacatgatttccttgaatgtggcttgagaaatatggacacttaatactaccttgaaaataagaatagaaataaaggatgggattgtggaatggagattcagttttcatttggttcattaattctataaggccataaaacaggtaatataaaaagcttccatgattctatttatatgtacatgagaaggaacttccaggtgttactgtaattcctcaacgtattgtttcgacagcactaatttaatgccgatatactctagatgaagttttacattgttgagctattgctgttctcttgggaactgaactcactttcctcctgaggctttggatttgacattgcatttgaccttttatgtagtaattgacatgtgccagggcaatgatgaatgagaatctacccccagatccaagcatcctgagcaactcttgattatccatattgagtcaaatggtaggcatttcctatcacctgtttccattcaacaagagcactacattcatttagctaaacggattccaaagagtagaattgcattgaccacgactaatttcaaaatgctttttattattattattttttagacagcctgggnnacagagngagnctccgtctca

SEQ ID NO: 66083 - DNA, 1680 bp, Homo sapiens
agtttgcagcgtcaggcagcgggtctgcgcccagcgagcggctccccagctcctgggaagatgcggacccgggacgcccccgtgagctcactgcgcctggctgacacgaggcgctcacagaacaaagcaagggctgggggatggcgcggccgcggggccggcgcgcagatcgctccggacccggacaccgcctgcgaggagcgccgaccagccgggaagggttcgcgctaggcggcgcccgggtcccgtcggccagggtgagcgtccggcccgcgtccgcgccacgcccgccgcgttcccctttcctctgcggcgggccgagagataaccctgcccgaggggtcccggcgcccgccccccacgcggtcgcactggaattcgcagcccctctcgggtccccggggcgcattttgcagtctgagtggcaatgcacttgctccaggacaggcggctaccccgccgcagcggaggcgcggacttttcttttggggggtctcgccggctcgccgcgctccccaccttgcctgcgcccgcccggagccagcggttctccaagcacccagcatcctgctagacgcgccgcgcaccgacggaggggacatgggcagagcaatggtggccaggctcgggctggggctgctgctgctggcactgctcctacccacgcagatttattccagtgaaacaacaactggaacttcaagtaactcctcccagagtacttccaactctgggttggccccaaatccaactaatgccaccaccaaggcggctggtggtgccctgcagtcaacagccagtctcttcgtggtctcactctctcttctgcatctctactcttaagagactcaggccaagaaacgtcttctaaatttccccatcttctaaacccaatccaaatggcgtctggaagtccaatgtggcaaggaaaaacaggtcttcatcgaatctactaattccacaccttttattgacacagaaaatgttgagaatcccaaatttgattgatttgaagaacatgtgagaggtttgactagatgatggatgccaatattaaatctgctggagtttcatgtacaagatgaaggagaggcaacatccaaaatagttaagacatgatttccttgaatgtggcttgagaaatatggacacttaatactaccttgaaaataagaatagaaataaaggatgggattgtggaatggagattcagttttcatttggttcattaattctataaggccataaaacaggtaatataaaaagcttccatgattctatttatatgtacatgagaaggaacttccaggtgttactgtaattcctcaacgtattgtttcgacagcactaatttaatgccgatatactctagatgaagttttacattgttgagctattgctgttctcttgggaactgaactcactttcctcctgaggctttggatttgacattgcatttgaccttttatgtagtaattgacatgtgccagggcaatgatgaatgagaatctacccccagatccaagcatcctgagcaactcttgattatccatattgagtcaaatggtaggcatttcctatcacctgtttccattcaacaagagcactacattcatttagctaaacggattccaaagagtagaattgcattgacacccacggggtaccggctcgattcta

SEQ ID NO: 66084 - DNA, 979 bp, Homo sapiens
ttttttttttgagacagagtttcgctcttgttgcccaggctggagtaatagctcactgcaccgtccacctcccgggctcaagcgattctcctgcctcagcctcccaagtagctgggattacaggcacctgccaccatgcccggctaatttttgtaattttagtagagacagggtttcaccatgttgcccaggctggtttcgaactcctgacctcaggtgatccacccgcctcggcctcccaaagtgctgggattacaggcttgagcccccgcgcccagccatcaaaatgctttttatttctgcatatgttgaatactttttacaatttaaaaaaatgatctgttttgaaggcaaaattgcaaatcttgaaattaagaaggcaaaaatgtaaaggagtcaaaactataaatcaagtatttgggaagtgaagactggaagctaatttgcattaaattcacaaacttttatactctttctgtatatacattttttttctttaaaaaacaactatggatcagaatagccacatttagaacactttttgttatcagtcaatatttttagatagttagaacctggtcctaagcctaaaagtgggcttgattctgcagtaaatcttttacaactgcctcgacacacataaacctttttaaaaatagacactccccgaagtcttttgttcgcatggtcacacactgatgcttagatgttccagtaatctaatatggccacagtagtcttgatgaccaaagtcctttttttccatctttagaaaactacatgggaacaaacagatcgaacagttttgaagctactgtgtgtgtgaatgaacactcttgctttattccagaatgctgtacatctattttggattgtatattgtgtttgtgtatttacgctttgattcatagtaacttcttatggaattgatttgcattgaacacaaactgtaaataaaaagaaatggctgaaagagcaa

SEQ ID NO: 66085 - DNA, 976 bp, Homo sapiens
caggagatcgagagcatcctggctaacacagtgaaaccctgtcctctagtaaaaatacaaaaaattagccaggcgtggcagcatgcgtctgtagtgcctcccaagtagctgggattacaggcacctgccaccatgcccggctaatttttgtaattttagtagagacagggtttcaccatgttgcccaggctggtttcgaactcctgacctcaggtgatccacccgcctcggcctcccaaagtgctgggattacaggcttgagcccccgcgcccagccatcaaaatgctttttatttctgcatatgttgaatactttttacaatttaaaaaaatgatctgttttgaaggcaaaattgcaaatcttgaaattaagaaggcaaaaatgtaaaggagtcaaaactataaatcaagtatttgggaagtgaagactggaagctaatttgcattaaattcacaaacttttatactctttctgtatatacattttttttctttaaaaaacaactatggatcagaatagccacatttagaacactttttgttatcagtcaatatttttagatagttagaacctggtcctaagcctaaaagtgggcttgattctgcagtaaatcttttacaactgcctcgacacacataaacctttttaaaaatagacactccccgaagtcttttgttcgcatggtcacacactgatgcttagatgttccagtaatctaatatggccacagtagtcttgatgaccaaagtcctttttttccatctttagaaaactacatgggaacaaacagatcgaacagttttgaagctactgtgtgtgtgaatgaacactcttgctttattccagaatgctgtacatctattttggattgtatattgtgtttgtgtatttacgctttgattcatagtaacttcttatggaattgatttgcattgaacacaaactgtaaataaaaagaaatggctgaaagagcaa

SEQ ID NO: 66086 - DNA, 908 bp, Homo sapiens
gagagagagagagagagagagagagagagagagagagagagagagagagagagagagagagagagagagagggtaatttttgtaattttagtagagacagggtttcaccatgttgcccaggctggtttcgaactcctgacctcaggtgatccacccgcctcggcctcccaaagtgctgggattacaggcttgagcccccgcgcccagccatcaaaatgctttttatttctgcatatgttgaatactttttacaatttaaaaaaatgatctgttttgaaggcaaaattgcaaatcttgaaattaagaaggcaaaaatgtaaaggagtcaaaactataaatcaagtatttgggaagtgaagactggaagctaatttgcattaaattcacaaacttttatactctttctgtatatacattttttttctttaaaaaacaactatggatcagaatagccacatttagaacactttttgttatcagtcaatatttttagatagttagaacctggtcctaagcctaaaagtgggcttgattctgcagtaaatcttttacaactgcctcgacacacataaacctttttaaaaatagacactccccgaagtcttttgttcgcatggtcacacactgatgcttagatgttccagtaatctaatatggccacagtagtcttgatgaccaaagtcctttttttccatctttagaaaactacatgggaacaaacagatcgaacagttttgaagctactgtgtgtgtgaatgaacactcttgctttattccagaatgctgtacatctattttggattgtatattgtgtttgtgtatttacgctttgattcatagtaacttcttatggaattgatttgcattgaacacaaactgtaaataaaaagaaatggctgaaagagcaa

SEQ ID NO: 66087 - DNA, 866 bp, Homo sapiens
gccaggctgatctagagatatccctttatcagacaagggtagcactctctctctcaggctgcagtgcaagtggtgcgatcttgaccctgcaacctctgcctcttgggctcaagccatcctctgacccaaagtgctgggattacaggcttgagcccccgcgcccagccatcaaaatgctttttatttctgcatatgttgaatactttttacaatttaaaaaaatgatctgttttgaaggcaaaattgcaaatcttgaaattaagaaggcaaaaatgtaaaggagtcaaaactataaatcaagtatttgggaagtgaagactggaagctaatttgcattaaattcacaaacttttatactctttctgtatatacattttttttctttaaaaaacaactatggatcagaatagccacatttagaacactttttgttatcagtcaatatttttagatagttagaacctggtcctaagcctaaaagtgggcttgattctgcagtaaatcttttacaactgcctcgacacacataaacctttttaaaaatagacactccccgaagtcttttgttcgcatggtcacacactgatgcttagatgttccagtaatctaatatggccacagtagtcttgatgaccaaagtcctttttttccatctttagaaaactacatgggaacaaacagatcgaacagttttgaagctactgtgtgtgtgaatgaacactcttgctttattccagaatgctgtacatctattttggattgtatattgtgtttgtgtatttacgctttgattcatagtaacttcttatggaattgatttgcattgaacacaaactgtaaataaaaagaaatggctgaaagagcaa

SEQ ID NO: 66088 - DNA, 1211 bp, Homo sapiens
agtttgcagcgtcaggcagcgggtctgcgcccagcgagcggctccccagctcctgggaagatgcggacccgggacgcccccgtgagctcactgcgcctggctgacacgaggcgctcacagaacaaagcaagggctgggggatggcgcggccgcggggccggcgcgcagatcgctccggacccggacaccgcctgcgaggagcgccgaccagccgggaagggttcgcgctaggcggcgcccgggtcccgtcggccagggtgagcgtccggcccgcgtccgcgccacgcccgccgcgttcccctttcctctgcggcgggccgagagataaccctgcccgaggggtcccggcgcccgccccccacgcggtcgcactggaattcgcagcccctctcgggtccccggggcgcattttgcagtctgagtggcaatgcacttgctccaggacaggcggctaccccgccgcagcggaggcgcggacttttcttttggggggtctcgccggctcgccgcgctccccaccttgcctgcgcccgcccggagccagcggttctccaagcacccagcatcctgctagacgcgccgcgcaccgacggaggggacatgggcagagcaatggtggccaggctcgggctggggctgctgctgctggcactgctcctacccacgcagatttattccagtgaaacaacaactggaacttcaagtaactcctcccagagtacttccaactctgggttggccccaaatccaactaatgccaccaccaaggcggctggtggtgccctgcagtcaacagccagtctcttcgtggtctcactctctcttctgcatctctactcttaagagactcaggccaagaaacgtcttctaaatttccccatcttctaaacccaatccaaatggcgtctggaagtccaatgtggcaaggaaaaacaggtcttcatcgaatctactaattccacaccttttattgacacagaaaatgttgagaatcccaaatttgattgatttgaagaacatgtgagaggtttgactagatgatggatgccaatattaaatctgctggagtttcatgtacaagatgaaggagaggcaacatccaaaatagttaagacatgatttccttgaatgtggcttgagaaatatggacacttaatactaccttgaaaataagaatagaaataaaggatgggattgtggaatggagattc

SEQ ID NO: 66089 - DNA, 1282 bp, Homo sapiens
agtttgcagcgtcaggcagcgggtctgcgcccagcgagcggctccccagctcctgggaagatgcggacccgggacgcccccgtgagctcactgcgcctggctgacacgaggcgctcacagaacaaagcaagggctgggggatggcgcggccgcggggccggcgcgcagatcgctccggacccggacaccgcctgcgaggagcgccgaccagccgggaagggttcgcgctaggcggcgcccgggtcccgtcggccagggtgagcgtccggcccgcgtccgcgccacgcccgccgcgttcccctttcctctgcggcgggccgagagataaccctgcccgaggggtcccggcgcccgccccccacgcggtcgcactggaattcgcagcccctctcgggtccccggggcgcattttgcagtctgagtggcaatgcacttgctccaggacaggcggctaccccgccgcagcggaggcgcggacttttcttttggggggtctcgccggctcgccgcgctccccaccttgcctgcgcccgcccggagccagcggttctccaagcacccagcatcctgctagacgcgccgcgcaccgacggaggggacatgggcagagcaatggtggccaggctcgggctggggctgctgctgctggcactgctcctacccacgcagatttattccagtgaaacaacaactggaacttcaagtaactcctcccagagtacttccaactctgggttggccccaaatccaactaatgccaccaccaaggcggctggtggtgccctgcagtcaacagccagtctcttcgtggtctcactctctcttctgcatctctactcttaagagactcaggccaagaaacgtcttctaaatttccccatcttctaaacccaatccaaatggcgtctggaagtccaatgtggcaaggaaaaacaggtcttcatcgaatctactaattccacaccttttattgacacagaaaatgttgagaatcccaaatttgattgatttgaagaacatgtgagaggtttgactagatgatggatgccaatattaaatctgctggagtttcatgtacaagatgaaggagaggcaacatccaaaatagttaagacatgatttccttgaatgtggcttgagaaatatggacacttaatactaccttgaaaataagaatagaaataaaggatgggattgtggaatggagattctgtatagctgaaggattgtaaatacaccaatcagtgctctgtgtctagctaaaggttttgtaaatgcacca

SEQ ID NO: 66090 - DNA, 370 bp, Homo sapiens
ggctatccggttcacagaggtatggcacacataaacctttttaaaaatagacactccccgaagtcttttgttcgcatggtcacacactgatgcttagatgttccagtaatctaatatggccacagtagtcttgatgaccaaagtcctttttttccatctttagaaaactacatgggaacaaacagatcgaacagttttgaagctactgtgtgtgtgaatgaacactcttgctttattccagaatgctgtacatctattttggattgtatattgtgtttgtgtatttacgctttgattcatagtaacttcttatggaattgatttgcattgaacacaaactgtaaataaaaagaaatggctgaaagagcaa

SEQ ID NO: 66091 - DNA, 619 bp, Homo sapiens
  misc_feature (23)..(23): n is a, c, g, or t
  misc_feature (39)..(39): n is a, c, g, or t
  misc_feature (79)..(79): n is a, c, g, or t
  misc_feature (103)..(103): n is a, c, g, or t
  misc_feature (149)..(149): n is a, c, g, or t
  misc_feature (204)..(204): n is a, c, g, or t
  misc_feature (259)..(259): n is a, c, g, or t
cctccaagttcaagtcccttttntgggccaattattgantgccaccagtaaactccttcctccctgaaaaaaggaaatncagagattaagagcatatagcccnccctagtgaagaaaaatggagtaaggagattaagttaagtgccccntgtccaagcgatgggatgaaagaagcttgtctcagagatcccagatcatggtccntataatggatattattcagaccttagtacagcaagacactctggccaccataaanaacgcagaaaagaaaaaaaggttaagcattgaaacaaaagacgatcgccgaagtcttttgttcgcatggtcacacactgatgcttagatgttccagtaatctaatatggccacagtagtcttgatgaccaaagtcctttttttccatctttagaaaactacatgggaacaaacagatcgaacagttttgaagctactgtgtgtgtgaatgaacactcttgctttattccagaatgctgtacatctattttggattgtatattgtgtttgtgtatttacgctttgattcatagtaacttcttatggaattgatttgcattgaacacaaactgtaaataaaaagaaatggctgaaagagcaa

SEQ ID NO: 66092 - DNA, 341 bp, Homo sapiens
ctttctacgacattctacactcaattctccgaagtcttttgttcgcatggtcacacactgatgcttagatgttccagtaatctaatatggccacagtagtcttgatgaccaaagtcctttttttccatctttagaaaactacatgggaacaaacagatcgaacagttttgaagctactgtgtgtgtgaatgaacactcttgctttattccagaatgctgtacatctattttggattgtatattgtgtttgtgtatttacgctttgattcatagtaacttcttatggaattgatttgcattgaacacaaactgtaaataaaaagaaatggctgaaagagcaa

SEQ ID NO: 66093 - DNA, 1965 bp, Homo sapiens
gttttctcatttgcaaccacccatgctggcatgaaagaaagtgaagctgctgggttgaactccatcttctgggggacatttgcagcctgcaggggcctggcaatcttttttgctacctgtttacagcctggaaccatgattgtgttgagcaacattggcagcctgacttcatctttatttctggtgctttttgacaagaacccaatttgtctctggatagcaacttcagtgtatggggcttcaatggcaaccacatttccgagtggtgtttcttggattgagcagtacacgaccatccatgggaaatctgcagcattttttgtaattggtgcttccctgggagaaatggctattcctgcagtcattggaattcttcaaggaaaataccctgatttgcctgtagttctgtatacctctttgggagcatcaatagctactggtattttatttcctgtgctatataaattagccacttcacctcttgatcgccagcgaaaagaagacagaaagagtgaggaccagaaagctctgctctctagctccgggctaaatgaatatgaggaagagaatgaagaggaggatgcagaaaaatggaatgaaatggattttgaaatgattgaaacgaatgatacaatgaggcattctataatagagacatctagaagtagtctgacggagcccacagctgaagtctataatcaatacccatcaaatgcactggtgtttgagtcttctccttttaatactggcagtgcccatgtgaagcacttgccagaaaccaggacaaaagggactaacgtttagagaagatggattactcactgacatctttgaataactgccacttctaaggacgccattcagagcagagcattagcagaatttcaccatgctttggggattaaaatttttaggtccatattatagcaaatgctaaaaatttttgaaatgttctgtaattcccagagtcttccataaataaccaaatggtctcatacacgtacaataggatcttgttataacgctatcatttgacatgtgactgattaggaaatattttatggtctccacccctcagagcacccaaagaaggcattgtttttgagaaggggggtattctcagaatgagaccatgtaggagttgaattgattggttgaacaaattatcaggtatcaatatttttccaggaaagttgaggagaatagtttcataaaagagaaatgccaaagtgctgggattacaggcttgagcccccgcgcccagccatcaaaatgctttttatttctgcatatgttgaatactttttacaatttaaaaaaatgatctgttttgaaggcaaaattgcaaatcttgaaattaagaaggcaaaaatgtaaaggagtcaaaactataaatcaagtatttgggaagtgaagactggaagctaatttgcattaaattcacaaacttttatactctttctgtatatacattttttttctttaaaaaacaactatggatcagaatagccacatttagaacactttttgttatcagtcaatatttttagatagttagaacctggtcctaagcctaaaagtgggcttgattctgcagtaaatcttttacaactgcctcgacacacataaacctttttaaaaatagacactccccgaagtcttttgttcgcatggtcacacactgatgcttagatgttccagtaatctaatatggccacagtagtcttgatgaccaaagtcctttttttccatctttagaaaactacatgggaacaaacagatcgaacagttttgaagctactgtgtgtgtgaatgaacactcttgctttattccagaatgctgtacatctattttggattgtatattgtgtttgtgtatttacgctttgattcatagtaacttcttatggaattgatttgcattgaacacaaactgtaaataaaaagaaatggctgaaagagcaa

SEQ ID NO: 66094 - DNA, 936 bp, Homo sapiens
  misc_feature (158)..(158): n is a, c, g, or t
  misc_feature (384)..(384): n is a, c, g, or t
  misc_feature (392)..(393): n is a, c, g, or t
ctttaccccacgcttcagctccatgtgtgtactcggctcgcccccggccgtccccgctggggttacagtgccccaaggccaaacagcggtctgcacagccatcgcctccagctcagacagcgcggtccgacaccgcgacatctcgtcccccgggggtnaacccacccctctcctttgtccagttcaccaagcgacactccctcccgtattcactcctggtttcaagcagggctcgacatcctacactcttctcaagagggtctctccaccaccaaggggcccgctcagcctcaagggtaaaaattcaaggtgccacgcagggccacaaaggtcacgcaaggcaaccccagtgtcagagccttttcaagctgtccacgaacaaangggatccnngatttattccagtgaaacaacaactggaacttcaagtaactcctcccagagtacttccaactctgggttggccccaaatccaactaatgccaccaccaaggcggctggtggtgccctgcagtcaacagccagtctcttcgtggtctcactctctcttctgcatctctactcttaagagactcaggccaagaaacgtcttctaaatttccccatcttctaaacccaatccaaatggcgtctggaagtccaatgtggcaaggaaaaacaggtcttcatcgaatctactaattccacaccttttattgacacagaaaatgttgagaatcccaaatttgattgatttgaagaacatgtgagaggtttgactagatgatggatgccaatattaaatctgctggagtttcatgtacaagatgaaggagaggcaacatccaaaatagttaagacatgatttccttgaatgtggcttgagaaatatggacacttaatactaccttgaaaataagaatagaaataaaggatgggattgtggaatggagattc

SEQ ID NO: 66095 - DNA, 598 bp, Homo sapiens
aaggctcaggtacggaggccggggttgaatcggcagaggtgtcctacccacggcagatttattccagtgaaacaacaactggaacttcaagtaactcctcccagagtacttccaactctgggttggccccaaatccaactaatgccaccaccaaggcggctggtggtgccctgcagtcaacagccagtctcttcgtggtctcactctctcttctgcatctctactcttaagagactcaggccaagaaacgtcttctaaatttccccatcttctaaacccaatccaaatggcgtctggaagtccaatgtggcaaggaaaaacaggtcttcatcgaatctactaattccacaccttttattgacacagaaaatgttgagaatcccaaatttgattgatttgaagaacatgtgagaggtttgactagatgatggatgccaatattaaatctgctggagtttcatgtacaagatgaaggagaggcaacatccaaaatagttaagacatgatttccttgaatgtggcttgagaaatatggacacttaatactaccttgaaaataagaatagaaataaaggatgggattgtggaatggagattc

SEQ ID NO: 66096 - DNA, 962 bp, Homo sapiens
  misc_feature (85)..(85): n is a, c, g, or t
gttagactgctagaataaatgacgtgccgcgctgagagttttatcgatacataccggaacaggagaaacctgtaccaggtaacancttcgaacgaggacaatgcttactatacataagcgcgaggaggctgtcttgcactcatcgcgtattctgagagactcgctgcggcggcctcgcgggaccgtgttaagtatgatatattgcggtaaggcccagcgatttaatacaatgtacataagagggatacgtacaagactaagtttttccacaagaggtcagttccgtcacaagtgggcttcacaagcgcagatgtcaaacatcactaggtgcacagcaaggcacaaaagtcgagctagagttccaggtgtcgggcatttcaattgtcctcgagaaagggaatctagattaattcaaggcatcacacgactggcgctttcaagtaactcctcccagagtacttccaactctgggttggccccaaatccaactaatgccaccaccaaggcggctggtggtgccctgcagtcaacagccagtctcttcgtggtctcactctctcttctgcatctctactcttaagagactcaggccaagaaacgtcttctaaatttccccatcttctaaacccaatccaaatggcgtctggaagtccaatgtggcaaggaaaaacaggtcttcatcgaatctactaattccacaccttttattgacacagaaaatgttgagaatcccaaatttgattgatttgaagaacatgtgagaggtttgactagatgatggatgccaatattaaatctgctggagtttcatgtacaagatgaaggagaggcaacatccaaaatagttaagacatgatttccttgaatgtggcttgagaaatatggacacttaatactaccttgaaaaacaggatgcggccagattttgtgcttcttctttcactactacactctcgcacctt

SEQ ID NO: 66097 - DNA, 2438 bp, Homo sapiens
agtttgcagcgtcaggcagcgggtctgcgcccagcgagcggctccccagctcctgggaagatgcggacccgggacgcccccgtgagctcactgcgcctggctgacacgaggcgctcacagaacaaagcaagggctgggggatggcgcggccgcggggccggcgcgcagatcgctccggacccggacaccgcctgcgaggagcgccgaccagccgggaagggttcgcgctaggcggcgcccgggtcccgtcggccagggtctcgccggctcgccgcgctccccaccttgcctgcgcccgcccggagccagcggttctccaagcacccagcatcctgctagacgcgccgcgcaccgacggaggggacatgggcagagcaatggtggccaggctcgggctggggctgctgctgctggcactgctcctacccacgcagatttattccagtgaaacaacaactggaacttcaagtaactcctcccagagtacttccaactctgggttggccccaaatccaactaatgccaccaccaaggcggctggtggtgccctgcagtcaacagccagtctcttcgtggtctcactctctcttctgcatctctactcttaagagactcaggccaagaaacgtcttctaaatttccccatcttctaaacccaatccaaatggcgtctggaagtccaatgtggcaaggaaaaacaggtcttcatcgaatctactaattccacaccttttattgacacagaaaatgttgagaatcccaaatttgattgatttgaagaacatgtgagaggtttgactagatgatggatgccaatattaaatctgctggagtttcatgtacaagatgaaggagaggcaacatccaaaatagttaagacatgatttccttgaatgtggcttgagaaatatggacacttaatactaccttgaaaataagaatagaaataaaggatgggattgtggaatggagattcagttttcatttggttcattaattctataaggccataaaacaggtaatataaaaagcttccatgattctatttatatgtacatgagaaggaacttccaggtgttactgtaattcctcaacgtattgtttcgacagcactaatttaatgccgatatactctagatgaagttttacattgttgagctattgctgttctcttgggaactgaactcactttcctcctgaggctttggatttgacattgcatttgaccttttatgtagtaattgacatgtgccagggcaatgatgaatgagaatctacccccagatccaagcatcctgagcaactcttgattatccatattgagtcaaatggtaggcatttcctatcacctgtttccattcaacaagagcactacattcatttagctaaacggattccaaagagtagaattgcattgaccacgactaatttcaaaatgctttttattattattattttttagacagtctcactttgtcgcccaggccggagtgcagtggtgcgatctcagatcagtgtaccatttgcctcccgggctcaagcgattctcctgcctcagcctcccaagtagctgggattacaggcacctgccaccatgcccggctaatttttgtaattttagtagagacagggtttcaccatgttgcccaggctggtttcgaactcctgacctcaggtgatccacccgcctcggcctcccaaagtgctgggattacaggcttgagcccccgcgcccagccatcaaaatgctttttatttctgcatatgttgaatactttttacaatttaaaaaaatgatctgttttgaaggcaaaattgcaaatcttgaaattaagaaggcaaaaatgtaaaggagtcaaaactataaatcaagtatttgggaagtgaagactggaagctaatttgcattaaattcacaaacttttatactctttctgtatatacattttttttctttaaaaaacaactatggatcagaatagccacatttagaacactttttgttatcagtcaatatttttagatagttagaacctggtcctaagcctaaaagtgggcttgattctgcagtaaatcttttacaactgcctcgacacacataaacctttttaaaaatagacactccccgaagtcttttgttcgcatggtcacacactgatgcttagatgttccagtaatctaatatggccacagtagtcttgatgaccaaagtcctttttttccatctttagaaaactacatgggaacaaacagatcgaacagttttgaagctactgtgtgtgtgaatgaacactcttgctttattccagaatgctgtacatctattttggattgtatattgtgtttgtgtatttacgctttgattcatagtaacttcttatggaattgatttgcattgaacacaaactgtaaataaaaagaaatggctgaaagagcaa

SEQ ID NO: 66098 - DNA, 2168 bp, Homo sapiens
tccgcccacgcgtccgcttacgcgcccgcccggagccagcggttctccaagcacccagcatcctgctagacgcgccgcgcaccgacggaggggacatgggcagagcaatggtggccaggctcgggctggggctgctgctgctggcactgctcctacccacgcagatttattccagtgaaacaacaactggaacttcaagtaactcctcccagagtacttccaactctgggttggccccaaatccaactaatgccaccaccaaggcggctggtggtgccctgcagtcaacagccagtctcttcgtggtctcactctctcttctgcatctctactcttaagagactcaggccaagaaacgtcttctaaatttccccatcttctaaacccaatccaaatggcgtctggaagtccaatgtggcaaggaaaaacaggtcttcatcgaatctactaattccacaccttttattgacacagaaaatgttgagaatcccaaatttgattgatttgaagaacatgtgagaggtttgactagatgatggatgccaatattaaatctgctggagtttcatgtacaagatgaaggagaggcaacatccaaaatagttaagacatgatttccttgaatgtggcttgagaaatatggacacttaatactaccttgaaaataagaatagaaataaaggatgggattgtggaatggagattcagttttcatttggttcattaattctataaggccataaaacaggtaatataaaaagcttccatgattctatttatatgtacatgagaaggaacttccaggtgttactgtaattcctcaacgtattgtttcgacagcactaatttaatgccgatatactctagatgaagttttacattgttgagctattgctgttctcttgggaactgaactcactttcctcctgaggctttggatttgacattgcatttgaccttttatgtagtaattgacatgtgccagggcaatgatgaatgagaatctacccccagatccaagcatcctgagcaactcttgattatccatattgagtcaaatggtaggcatttcctatcacctgtttccattcaacaagagcactacattcatttagctaaacggattccaaagagtagaattgcattgaccacgactaatttcaaaatgctttttattattattattttttagacagtctcactttgtcgcccaggccggagtgcagtggtgcgatctcagatcagtgtaccatttgcctcccgggctcaagcgattctcctgcctcagcctcccaagtagctgggattacaggcacctgccaccatgcccggctaatttttgtaattttagtagagacagggtttcaccatgttgcccaggctggtttcgaactcctgacctcaggtgatccacccgcctcggcctcccaaagtgctgggattacaggcttgagcccccgcgcccagccatcaaaatgctttttatttctgcatatgttgaatactttttacaatttaaaaaaatgatctgttttgaaggcaaaattgcaaatcttgaaattaagaaggcaaaaatgtaaaggagtcaaaactataaatcaagtatttgggaagtgaagactggaagctaatttgcattaaattcacaaacttttatactctttctgtatatacattttttttctttaaaaaacaactatggatcagaatagccacatttagaacactttttgttatcagtcaatatttttagatagttagaacctggtcctaagcctaaaagtgggcttgattctgcagtaaatcttttacaactgcctcgacacacataaacctttttaaaaatagacactccccgaagtcttttgttcgcatggtcacacactgatgcttagatgttccagtaatctaatatggccacagtagtcttgatgaccaaagtcctttttttccatctttagaaaactacatgggaacaaacagatcgaacagttttgaagctactgtgtgtgtgaatgaacactcttgctttattccagaatgctgtacatctattttggattgtatattgtgtttgtgtatttacgctttgattcatagtaacttcttatggaattgatttgcattgaacacaaactgtaaataaaaagaaatggctgaaagagcaa

SEQ ID NO: 66099 - DNA, 3063 bp, Homo sapiens
agtttgcagcgtcaggcagcgggtctgcgcccagcgagcggctccccagctcctgggaagatgcggacccgggacgcccccgtgagctcactgcgcctggctgacacgaggcgctcacagaacaaagcaagggctgggggatggcgcggccgcggggccggcgcgcagatcgctccggacccggacaccgcctgcgaggagcgccgaccagccgggaagggttcgcgctaggcggcgcccgggtcccgtcggccagggtgagcgtccggcccgcgtccgcgccacgcccgccgcgttcccctttcctctgcggcgggccgagagataaccctgcccgaggggtcccggcgcccgccccccacgcggtcgcactggaattcgcagcccctctcgggtccccggggcgcattttgcagtctgagtggcaatgcacttgctccaggacaggcggctaccccgccgcagcggaggcgcggacttttcttttggggggtctcgccggctcgccgcgctccccaccttgcctgcgcccgcccggagccagcggttctccaagcacccagcatcctgctagacgcgccgcgcaccgacggaggggacatgggcagagcaatggtggccaggctcgggctggggctgctgctgctggcactgctcctacccacgcagatttattccagtgaaacaacaactggaacttcaagtaactcctcccagagtacttccaactctgggttggccccaaatccaactaatgccaccaccaaggcggctggtggtgccctgcagtcaacagccagtctcttcgtggtctcactctctcttctgcatctctactcttaagagactcaggccaagaaacgtcttctaaatttccccatcttctaaacccaatccaaatggcgtctggaagtccaatgtggcaaggaaaaacaggtcttcatcgaatctactaattccacaccttttattgacacagaaaatgttgagaatcccaaatttgattgatttgaagaacatgtgagaggtttgactagatgatggatgccaatattaaatctgctggagtttcatgtacaagatgaaggagaggcaacatccaaaatagttaagacatgatttccttgaatgtggcttgagaaatatggacacttaatactaccttgaaaataagaatagaaataaaggatgggattgtggaatggagattcagttttcatttggttcattaattctataaggccataaaacaggtaatataaaaagcttccatgattctatttatatgtacatgagaaggaacttccaggtgttactgtaattcctcaacgtattgtttcgacagcactaatttaatgccgatatactctagatgaagttttacattgttgagctattgctgttctcttgggaactgaactcactttcctcctgaggctttggatttgacattgcatttgaccttttatgtagtaattgacatgtgccagggcaatgatgaatgagaatctacccccagatccaagcatcctgagcaactcttgattatccatattgagtcaaatggtaggcatttcctatcacctgtttccattcaacaagagcactacattcatttagctaaacggattccaaagagtagaattgcattgaccacgactaatttcaaaatgctttttattattattattttttagacagtctcactttgtcgcccaggccggagtgcagtggtgcgatctcagatcagtgtaccatttgcctcccgggctcaagcgattctcctgcctcagcctcccaagtagctgggattacaggcacctgccaccatgcccggctaatttttgtaattttagtagagacagggtttcaccatgttgcccaggctggtttcgaactcctgacctcaggtgatccacccgcctcggcctcccaaagtgctgggattacaggcttgagcccccgcgcccagccatcaaaatgctttttatttctgcatatgttgaatactttttacaatttaaaaaaatgatctgttttgaaggcaaaattgcaaatcttgaaattaagaaggcaaaaatgtaaaggagtcaaaactataaatcaagtatttgggaagtgaagactggaagctaatttgcattaaattcacaaacttttatactctttctgtatatacattttttttctttaaaaaacaactatggatcagaatagccacatttagaacactttttgttatcagtcaatatttttagatagttagaacctggtcctaagcctaaaagtgggcttgattctgcagtaaatcttttacaactgcctcgacacacataaacctttttaaaaatagacactccccgaagtcttttgttcgcatggtcacacactgatgcttagatgttccagtaatctaatatggccacagtagtcttgatgaccaaagtcctttttttccatctttagaaaactacatgggaacaaacagatcgaacagttttgaagctactgtgtgtgtgaatgaacactcttgctttattccagaatgctgtacatctattttggattgtatattgtgtttgtgtatttacgctttgattcatagtaacttcttatggaattgatttgcattgaacacaaactgtaaataaaaagaaatggctgaaagagcaaaaacatataaacaataaaacaaaacagaacaacaaacaacagggggcgccaaaacagaaaacccacaggggacaaaaacacacgaaccaacaatactaaaaacaggaaggtcaaagaggcgcacttagaaaacacaacacataccgaggacacaaaccgacggcacagggaaaacgcagaacagggaccaacaaaagagcacaacaacagaggcgagaccacggggaacacccaaaaagcaaaaccacggggaaacacaaagccccgcgaaaagggcaaccccccaatgagccggcacaccgccaaggacatagaaaacggcgagacaaaacagcagacaacatgacacgacagcaaagccagagacaagacccagccacaccacacccg

SEQ ID NO: 66100 - DNA, 3076 bp, Homo sapiens
agtttgcagcgtcaggcagcgggtctgcgcccagcgagcggctccccagctcctgggaagatgcggacccgggacgcccccgtgagctcactgcgcctggctgacacgaggcgctcacagaacaaagcaagggctgggggatggcgcggccgcggggccggcgcgcagatcgctccggacccggacaccgcctgcgaggagcgccgaccagccgggaagggttcgcgctaggcggcgcccgggtcccgtcggccagggtgagcgtccggcccgcgtccgcgccacgcccgccgcgttcccctttcctctgcggcgggccgagagataaccctgcccgaggggtcccggcgcccgccccccacgcggtcgcactggaattcgcagcccctctcgggtccccggggcgcattttgcagtctgagtggcaatgcacttgctccaggacaggcggctaccccgccgcagcggaggcgcggacttttcttttggggggtctcgccggctcgccgcgctccccaccttgcctgcgcccgcccggagccagcggttctccaagcacccagcatcctgctagacgcgccgcgcaccgacggaggggacatgggcagagcaatggtggccaggctcgggctggggctgctgctgctggcactgctcctacccacgcagatttattccagtgaaacaacaactggaacttcaagtaactcctcccagagtacttccaactctgggttggccccaaatccaactaatgccaccaccaaggcggctggtggtgccctgcagtcaacagccagtctcttcgtggtctcactctctcttctgcatctctactcttaagagactcaggccaagaaacgtcttctaaatttccccatcttctaaacccaatccaaatggcgtctggaagtccaatgtggcaaggaaaaacaggtcttcatcgaatctactaattccacaccttttattgacacagaaaatgttgagaatcccaaatttgattgatttgaagaacatgtgagaggtttgactagatgatggatgccaatattaaatctgctggagtttcatgtacaagatgaaggagaggcaacatccaaaatagttaagacatgatttccttgaatgtggcttgagaaatatggacacttaatactaccttgaaaataagaatagaaataaaggatgggattgtggaatggagattcagttttcatttggttcattaattctataaggccataaaacaggtaatataaaaagcttccatgattctatttatatgtacatgagaaggaacttccaggtgttactgtaattcctcaacgtattgtttcgacagcactaatttaatgccgatatactctagatgaagttttacattgttgagctattgctgttctcttgggaactgaactcactttcctcctgaggctttggatttgacattgcatttgaccttttatgtagtaattgacatgtgccagggcaatgatgaatgagaatctacccccagatccaagcatcctgagcaactcttgattatccatattgagtcaaatggtaggcatttcctatcacctgtttccattcaacaagagcactacattcatttagctaaacggattccaaagagtagaattgcattgaccacgactaatttcaaaatgctttttattattattattttttagacagtctcactttgtcgcccaggccggagtgcagtggtgcgatctcagatcagtgtaccatttgcctcccgggctcaagcgattctcctgcctcagcctcccaagtagctgggattacaggcacctgccaccatgcccggctaatttttgtaattttagtagagacagggtttcaccatgttgcccaggctggtttcgaactcctgacctcaggtgatccacccgcctcggcctcccaaagtgctgggattacaggcttgagcccccgcgcccagccatcaaaatgctttttatttctgcatatgttgaatactttttacaatttaaaaaaatgatctgttttgaaggcaaaattgcaaatcttgaaattaagaaggcaaaaatgtaaaggagtcaaaactataaatcaagtatttgggaagtgaagactggaagctaatttgcattaaattcacaaacttttatactctttctgtatatacattttttttctttaaaaaacaactatggatcagaatagccacatttagaacactttttgttatcagtcaatatttttagatagttagaacctggtcctaagcctaaaagtgggcttgattctgcagtaaatcttttacaactgcctcgacacacataaacctttttaaaaatagacactccccgaagtcttttgttcgcatggtcacacactgatgcttagatgttccagtaatctaatatggccacagtagtcttgatgaccaaagtcctttttttccatctttagaaaactacatgggaacaaacagatcgaacagttttgaagctactgtgtgtgtgaatgaacactcttgctttattccagaatgctgtacatctattttggattgtatattgtgtttgtgtatttacgctttgattcatagtaacttcttatggaattgatttgcattgaacacaaactgtaaataaaaagaaatggctgaaagagcaaaaaaaaaaaaaaaaaaaaaaaaaaaaaaaaaaaaggggggggggggacaaaaaaaccgggggggaaaaccttttttacaaagagggcgaccaccaagagagggggtataaaaacgcaggaggggagggagaaaaacaccggggggaggagaaaaacgcagcagtcgtgcctctggggagaggccccatgcgtgcgggacaagggcgacccccccaaccaatgtaggggccggaaaaaaaatgggtgatgggggaaccccgctatctcgcgccaattgtttcgtcttttaattactcactctccatagttaacaacacgaggagaaagaccaacagcaccagccgtaacataagacgaacgacttcaaaacacgcaaataagagcaacagcgacgagcacagca

SEQ ID NO: 66101 - DNA, 2673 bp, Homo sapiens
agtttgcagcgtcaggcagcgggtctgcgcccagcgagcggctccccagctcctgggaagatgcggacccgggacgcccccgtgagctcactgcgcctggctgacacgaggcgctcacagaacaaagcaagggctgggggatggcgcggccgcggggccggcgcgcagatcgctccggacccggacaccgcctgcgaggagcgccgaccagccgggaagggttcgcgctaggcggcgcccgggtcccgtcggccagggtgagcgtccggcccgcgtccgcgccacgcccgccgcgttcccctttcctctgcggcgggccgagagataaccctgcccgaggggtcccggcgcccgccccccacgcggtcgcactggaattcgcagcccctctcgggtccccggggcgcattttgcagtctgagtggcaatgcacttgctccaggacaggcggctaccccgccgcagcggaggcgcggacttttcttttggggggtctcgccggctcgccgcgctccccaccttgcctgcgcccgcccggagccagcggttctccaagcacccagcatcctgctagacgcgccgcgcaccgacggaggggacatgggcagagcaatggtggccaggctcgggctggggctgctgctgctggcactgctcctacccacgcagatttattccagtgaaacaacaactggaacttcaagtaactcctcccagagtacttccaactctgggttggccccaaatccaactaatgccaccaccaaggcggctggtggtgccctgcagtcaacagccagtctcttcgtggtctcactctctcttctgcatctctactcttaagagactcaggccaagaaacgtcttctaaatttccccatcttctaaacccaatccaaatggcgtctggaagtccaatgtggcaaggaaaaacaggtcttcatcgaatctactaattccacaccttttattgacacagaaaatgttgagaatcccaaatttgattgatttgaagaacatgtgagaggtttgactagatgatggatgccaatattaaatctgctggagtttcatgtacaagatgaaggagaggcaacatccaaaatagttaagacatgatttccttgaatgtggcttgagaaatatggacacttaatactaccttgaaaataagaatagaaataaaggatgggattgtggaatggagattcagttttcatttggttcattaattctataaggccataaaacaggtaatataaaaagcttccatgattctatttatatgtacatgagaaggaacttccaggtgttactgtaattcctcaacgtattgtttcgacagcactaatttaatgccgatatactctagatgaagttttacattgttgagctattgctgttctcttgggaactgaactcactttcctcctgaggctttggatttgacattgcatttgaccttttatgtagtaattgacatgtgccagggcaatgatgaatgagaatctacccccagatccaagcatcctgagcaactcttgattatccatattgagtcaaatggtaggcatttcctatcacctgtttccattcaacaagagcactacattcatttagctaaacggattccaaagagtagaattgcattgaccacgactaatttcaaaatgctttttattattattattttttagacagtctcactttgtcgcccaggccggagtgcagtggtgcgatctcagatcagtgtaccatttgcctcccgggctcaagcgattctcctgcctcagcctcccaagtagctgggattacaggcacctgccaccatgcccggctaatttttgtaattttagtagagacagggtttcaccatgttgcccaggctggtttcgaactcctgacctcaggtgatccacccgcctcggcctcccaaagtgctgggattacaggcttgagcccccgcgcccagccatcaaaatgctttttatttctgcatatgttgaatactttttacaatttaaaaaaatgatctgttttgaaggcaaaattgcaaatcttgaaattaagaaggcaaaaatgtaaaggagtcaaaactataaatcaagtatttgggaagtgaagactggaagctaatttgcattaaattcacaaacttttatactctttctgtatatacattttttttctttaaaaaacaactatggatcagaatagccacatttagaacactttttgttatcagtcaatatttttagatagttagaacctggtcctaagcctaaaagtgggcttgattctgcagtaaatcttttacaactgcctcgacacacataaacctttttaaaaatagacactccccgaagtcttttgttcgcatggtcacacactgatgcttagatgttccagtaatctaatatggccacagtagtcttgatgaccaaagtcctttttttccatctttagaaaactacatgggaacaaacagatcgaacagttttgaagctactgtgtgtgtgaatgaacactcttgctttattccagaatgctgtacatctattttggattgtatattgtgtttgtgtatttacgctttgattcatagtaacttcttatggaattgatttgcattgaacacaaacgtatagatgggtgctggggggtgtgggcgtg

SEQ ID NO: 66102 - DNA, 2634 bp, Homo sapiens
agtttgcagcgtcaggcagcgggtctgcgcccagcgagcggctccccagctcctgggaagatgcggacccgggacgcccccgtgagctcactgcgcctggctgacacgaggcgctcacagaacaaagcaagggctgggggatggcgcggccgcggggccggcgcgcagatcgctccggacccggacaccgcctgcgaggagcgccgaccagccgggaagggttcgcgctaggcggcgcccgggtcccgtcggccagggtgagcgtccggcccgcgtccgcgccacgcccgccgcgttcccctttcctctgcggcgggccgagagataaccctgcccgaggggtcccggcgcccgccccccacgcggtcgcactggaattcgcagcccctctcgggtccccggggcgcattttgcagtctgagtggcaatgcacttgctccaggacaggcggctaccccgccgcagcggaggcgcggacttttcttttggggggtctcgccggctcgccgcgctccccaccttgcctgcgcccgcccggagccagcggttctccaagcacccagcatcctgctagacgcgccgcgcaccgacggaggggacatgggcagagcaatggtggccaggctcgggctggggctgctgctgctggcactgctcctacccacgcagatttattccagtgaaacaacaactggaacttcaagtaactcctcccagagtacttccaactctgggttggccccaaatccaactaatgccaccaccaaggcggctggtggtgccctgcagtcaacagccagtctcttcgtggtctcactctctcttctgcatctctactcttaagagactcaggccaagaaacgtcttctaaatttccccatcttctaaacccaatccaaatggcgtctggaagtccaatgtggcaaggaaaaacaggtcttcatcgaatctactaattccacaccttttattgacacagaaaatgttgagaatcccaaatttgattgatttgaagaacatgtgagaggtttgactagatgatggatgccaatattaaatctgctggagtttcatgtacaagatgaaggagaggcaacatccaaaatagttaagacatgatttccttgaatgtggcttgagaaatatggacacttaatactaccttgaaaataagaatagaaataaaggatgggattgtggaatggagattcagttttcatttggttcattaattctataaggccataaaacaggtaatataaaaagcttccatgattctatttatatgtacatgagaaggaacttccaggtgttactgtaattcctcaacgtattgtttcgacagcactaatttaatgccgatatactctagatgaagttttacattgttgagctattgctgttctcttgggaactgaactcactttcctcctgaggctttggatttgacattgcatttgaccttttatgtagtaattgacatgtgccagggcaatgatgaatgagaatctacccccagatccaagcatcctgagcaactcttgattatccatattgagtcaaatggtaggcatttcctatcacctgtttccattcaacaagagcactacattcatttagctaaacggattccaaagagtagaattgcattgaccacgactaatttcaaaatgctttttattattattattttttagacagtctcactttgtcgcccaggccggagtgcagtggtgcgatctcagatcagtgtaccatttgcctcccgggctcaagcgattctcctgcctcagcctcccaagtagctgggattacaggcacctgccaccatgcccggcttgcccaggctggtttcgaactcctgacctcaggtgatccacccgcctcggcctcccaaagtgctgggattacaggcttgagcccccgcgcccagccatcaaaatgctttttatttctgcatatgttgaatactttttacaatttaaaaaaatgatctgttttgaaggcaaaattgcaaatcttgaaattaagaaggcaaaaatgtaaaggagtcaaaactataaatcaagtatttgggaagtgaagactggaagctaatttgcattaaattcacaaacttttatactctttctgtatatacattttttttctttaaaaaacaactatggatcagaatagccacatttagaacactttttgttatcagtcaatatttttagatagttagaacctggtcctaagcctaaaagtgggcttgattctgcagtaaatcttttacaactgcctcgacacacataaacctttttaaaaatagacactccccgaagtcttttgttcgcatggtcacacactgatgcttagatgttccagtaatctaatatggccacagtagtcttgatgaccaaagtcctttttttccatctttagaaaactacatgggaacaaacagatcgaacagttttgaagctactgtgtgtgtgaatgaacactcttgctttattccagaatgctgtacatctattttggattgtatattgtgtttgtgtatttacgctttgattcatagtaacttcttatggaattgatttgcattgaacacaaactgtaaataaaaagaaatggctgaaagagcaa

SEQ ID NO: 66103 - DNA, 2603 bp, Homo sapiens
agtttgcagcgtcaggcagcgggtctgcgcccagcgagcggctccccagctcctgggaagatgcggacccgggacgcccccgtgagctcactgcgcctggctgacacgaggcgctcacagaacaaagcaagggctgggggatggcgcggccgcggggccggcgcgcagatcgctccggacccggacaccgcctgcgaggagcgccgaccagccgggaagggttcgcgctaggcggcgcccgggtcccgtcggccagggtgagcgtccggcccgcgtccgcgccacgcccgccgcgttcccctttcctctgcggcgggccgagagataaccctgcccgaggggtcccggcgcccgccccccacgcggtcgcactggaattcgcagcccctctcgggtccccggggcgcattttgcagtctgagtggcaatgcacttgctccaggacaggcggctaccccgccgcagcggaggcgcggacttttcttttggggggtctcgccggctcgccgcgctccccaccttgcctgcgcccgcccggagccagcggttctccaagcacccagcatcctgctagacgcgccgcgcaccgacggaggggacatgggcagagcaatggtggccaggctcgggctggggctgctgctgctggcactgctcctacccacgcagatttattccagtgaaacaacaactggaacttcaagtaactcctcccagagtacttccaactctgggttggccccaaatccaactaatgccaccaccaaggcggctggtggtgccctgcagtcaacagccagtctcttcgtggtctcactctctcttctgcatctctactcttaagagactcaggccaagaaacgtcttctaaatttccccatcttctaaacccaatccaaatggcgtctggaagtccaatgtggcaaggaaaaacaggtcttcatcgaatctactaattccacaccttttattgacacagaaaatgttgagaatcccaaatttgattgatttgaagaacatgtgagaggtttgactagatgatggatgccaatattaaatctgctggagtttcatgtacaagatgaaggagaggcaacatccaaaatagttaagacatgatttccttgaatgtggcttgagaaatatggacacttaatactaccttgaaaataagaatagaaataaaggatgggattgtggaatggagattcagttttcatttggttcattaattctataaggccataaaacaggtaatataaaaagcttccatgattctatttatatgtacatgagaaggaacttccaggtgttactgtaattcctcaacgtattgtttcgacagcactaatttaatgccgatatactctagatgaagttttacattgttgagctattgctgttctcttgggaactgaactcactttcctcctgaggctttggatttgacattgcatttgaccttttatgtagtaattgacatgtgccagggcaatgatgaatgagaatctacccccagatccaagcatcctgagcaactcttgattatccatattgagtcaaatggtaggcatttcctatcacctgtttccattcaacaagagcactacattcatttagctaaacggattccaaagagtagaattgcattcggagtgcagtggtgcgatctcagatcagtgtaccatttgcctcccgggctcaagcgattctcctgcctcagcctcccaagtagctgggattacaggcacctgccaccatgcccggctaatttttgtaattttagtagagacagggtttcaccatgttgcccaggctggtttcgaactcctgacctcaggtgatccacccgcctcggcctcccaaagtgctgggattacaggcttgagcccccgcgcccagccatcaaaatgctttttatttctgcatatgttgaatactttttacaatttaaaaaaatgatctgttttgaaggcaaaattgcaaatcttgaaattaagaaggcaaaaatgtaaaggagtcaaaactataaatcaagtatttgggaagtgaagactggaagctaatttgcattaaattcacaaacttttatactctttctgtatatacattttttttctttaaaaaacaactatggatcagaatagccacatttagaacactttttgttatcagtcaatatttttagatagttagaacctggtcctaagcctaaaagtgggcttgattctgcagtaaatcttttacaactgcctcgacacacataaacctttttaaaaatagacactccccgaagtcttttgttcgcatggtcacacactgatgcttagatgttccagtaatctaatatggccacagtagtcttgatgaccaaagtcctttttttccatctttagaaaactacatgggaacaaacagatcgaacagttttgaagctactgtgtgtgtgaatgaacactcttgctttattccagaatgctgtacatctattttggattgtatattgtgtttgtgtatttacgctttgattcatagtaacttcttatggaattgatttgcattgaacacaaactgtaaataaaaagaaatggctgaaagagcaa

SEQ ID NO: 66104 - DNA, 2080 bp, Homo sapiens
cgatcatacgtgtgaacgattatcgtgacgatatcggtcagggctgctgctgctggcactgctcctacccacgcagatttattccagtgaaacaacaactggaacttcaagtaactcctcccagagtacttccaactctgggttggccccaaatccaactaatgccaccaccaaggcggctggtggtgccctgcagtcaacagccagtctcttcgtggtctcactctctcttctgcatctctactcttaagagactcaggccaagaaacgtcttctaaatttccccatcttctaaacccaatccaaatggcgtctggaagtccaatgtggcaaggaaaaacaggtcttcatcgaatctactaattccacaccttttattgacacagaaaatgttgagaatcccaaatttgattgatttgaagaacatgtgagaggtttgactagatgatggatgccaatattaaatctgctggagtttcatgtacaagatgaaggagaggcaacatccaaaatagttaagacatgatttccttgaatgtggcttgagaaatatggacacttaatactaccttgaaaataagaatagaaataaaggatgggattgtggaatggagattcagttttcatttggttcattaattctataaggccataaaacaggtaatataaaaagcttccatgattctatttatatgtacatgagaaggaacttccaggtgttactgtaattcctcaacgtattgtttcgacagcactaatttaatgccgatatactctagatgaagttttacattgttgagctattgctgttctcttgggaactgaactcactttcctcctgaggctttggatttgacattgcatttgaccttttatgtagtaattgacatgtgccagggcaatgatgaatgagaatctacccccagatccaagcatcctgagcaactcttgattatccatattgagtcaaatggtaggcatttcctatcacctgtttccattcaacaagagcactacattcatttagctaaacggattccaaagagtagaattgcattgaccacgactaatttcaaaatgctttttattattattattttttagacagtctcactttgtcgcccaggccggagtgcagtggtgcgatctcagatcagtgtaccatttgcctcccgggctcaagcgattctcctgcctcagcctcccaagtagctgggattacaggcacctgccaccatgcccggctaatttttgtaattttagtagagacagggtttcaccatgttgcccaggctggtttcgaactcctgacctcaggtgatccacccgcctcggcctcccaaagtgctgggattacaggcttgagcccccgcgcccagccatcaaaatgctttttatttctgcatatgttgaatactttttacaatttaaaaaaatgatctgttttgaaggcaaaattgcaaatcttgaaattaagaaggcaaaaatgtaaaggagtcaaaactataaatcaagtatttgggaagtgaagactggaagctaatttgcattaaattcacaaacttttatactctttctgtatatacattttttttctttaaaaaacaactatggatcagaatagccacatttagaacactttttgttatcagtcaatatttttagatagttagaacctggtcctaagcctaaaagtgggcttgattctgcagtaaatcttttacaactgcctcgacacacataaacctttttaaaaatagacactccccgaagtcttttgttcgcatggtcacacactgatgcttagatgttccagtaatctaatatggccacagtagtcttgatgaccaaagtcctttttttccatctttagaaaactacatgggaacaaacagatcgaacagttttgaagctactgtgtgtgtgaatgaacactcttgctttattccagaatgctgtacatctattttggattgtatattgtgtttgtgtatttacgctttgattcatagtaacttcttatggaattgatttgcattgaacacaaactgtaaataaaaagaaatggctgaaagagcaa

SEQ ID NO: 66105 - DNA, 2060 bp, Homo sapiens
aaggctcaggtacggaggccggggttgaatcggcagaggtgtcctacccacggcagatttattccagtgaaacaacaactggaacttcaagtaactcctcccagagtacttccaactctgggttggccccaaatccaactaatgccaccaccaaggcggctggtggtgccctgcagtcaacagccagtctcttcgtggtctcactctctcttctgcatctctactcttaagagactcaggccaagaaacgtcttctaaatttccccatcttctaaacccaatccaaatggcgtctggaagtccaatgtggcaaggaaaaacaggtcttcatcgaatctactaattccacaccttttattgacacagaaaatgttgagaatcccaaatttgattgatttgaagaacatgtgagaggtttgactagatgatggatgccaatattaaatctgctggagtttcatgtacaagatgaaggagaggcaacatccaaaatagttaagacatgatttccttgaatgtggcttgagaaatatggacacttaatactaccttgaaaataagaatagaaataaaggatgggattgtggaatggagattcagttttcatttggttcattaattctataaggccataaaacaggtaatataaaaagcttccatgattctatttatatgtacatgagaaggaacttccaggtgttactgtaattcctcaacgtattgtttcgacagcactaatttaatgccgatatactctagatgaagttttacattgttgagctattgctgttctcttgggaactgaactcactttcctcctgaggctttggatttgacattgcatttgaccttttatgtagtaattgacatgtgccagggcaatgatgaatgagaatctacccccagatccaagcatcctgagcaactcttgattatccatattgagtcaaatggtaggcatttcctatcacctgtttccattcaacaagagcactacattcatttagctaaacggattccaaagagtagaattgcattgaccacgactaatttcaaaatgctttttattattattattttttagacagtctcactttgtcgcccaggccggagtgcagtggtgcgatctcagatcagtgtaccatttgcctcccgggctcaagcgattctcctgcctcagcctcccaagtagctgggattacaggcacctgccaccatgcccggctaatttttgtaattttagtagagacagggtttcaccatgttgcccaggctggtttcgaactcctgacctcaggtgatccacccgcctcggcctcccaaagtgctgggattacaggcttgagcccccgcgcccagccatcaaaatgctttttatttctgcatatgttgaatactttttacaatttaaaaaaatgatctgttttgaaggcaaaattgcaaatcttgaaattaagaaggcaaaaatgtaaaggagtcaaaactataaatcaagtatttgggaagtgaagactggaagctaatttgcattaaattcacaaacttttatactctttctgtatatacattttttttctttaaaaaacaactatggatcagaatagccacatttagaacactttttgttatcagtcaatatttttagatagttagaacctggtcctaagcctaaaagtgggcttgattctgcagtaaatcttttacaactgcctcgacacacataaacctttttaaaaatagacactccccgaagtcttttgttcgcatggtcacacactgatgcttagatgttccagtaatctaatatggccacagtagtcttgatgaccaaagtcctttttttccatctttagaaaactacatgggaacaaacagatcgaacagttttgaagctactgtgtgtgtgaatgaacactcttgctttattccagaatgctgtacatctattttggattgtatattgtgtttgtgtatttacgctttgattcatagtaacttcttatggaattgatttgcattgaacacaaactgtaaataaaaagaaatggctgaaagagcaa

SEQ ID NO: 66106 - DNA, 2344 bp, Homo sapiens
agccgaggcggggaccctctcctgacgctgcgctctctgcgaggcaacctttcacgtccatcgcttgtcatcttaggatccccatgttattttagcccagattggctagttctggggaggcagcatggtgggacgattctgtcccgagtccccgccaggctttgttcgggtcgccgctaccagcgcggtctccctagatcctccatccggggaacctcgccccgggtgcgggtacccggggccgcgcagcgctgcctcgagggtgtatggatgcaccgcgccggcgagagagaccgggggctgggcctgggagaccctagcgggggcgggggcgaagaagatttattccagtgaaacaacaactggaacttcaagtaactcctcccagagtacttccaactctgggttggccccaaatccaactaatgccaccaccaaggcggctggtggtgccctgcagtcaacagccagtctcttcgtggtctcactctctcttctgcatctctactcttaagagactcaggccaagaaacgtcttctaaatttccccatcttctaaacccaatccaaatggcgtctggaagtccaatgtggcaaggaaaaacaggtcttcatcgaatctactaattccacaccttttattgacacagaaaatgttgagaatcccaaatttgattgatttgaagaacatgtgagaggtttgactagatgatggatgccaatattaaatctgctggagtttcatgtacaagatgaaggagaggcaacatccaaaatagttaagacatgatttccttgaatgtggcttgagaaatatggacacttaatactaccttgaaaataagaatagaaataaaggatgggattgtggaatggagattcagttttcatttggttcattaattctataaggccataaaacaggtaatataaaaagcttccatgattctatttatatgtacatgagaaggaacttccaggtgttactgtaattcctcaacgtattgtttcgacagcactaatttaatgccgatatactctagatgaagttttacattgttgagctattgctgttctcttgggaactgaactcactttcctcctgaggctttggatttgacattgcatttgaccttttatgtagtaattgacatgtgccagggcaatgatgaatgagaatctacccccagatccaagcatcctgagcaactcttgattatccatattgagtcaaatggtaggcatttcctatcacctgtttccattcaacaagagcactacattcatttagctaaacggattccaaagagtagaattgcattgaccacgactaatttcaaaatgctttttattattattattttttagacagtctcactttgtcgcccaggccggagtgcagtggtgcgatctcagatcagtgtaccatttgcctcccgggctcaagcgattctcctgcctcagcctcccaagtagctgggattacaggcacctgccaccatgcccggctaatttttgtaattttagtagagacagggtttcaccatgttgcccaggctggtttcgaactcctgacctcaggtgatccacccgcctcggcctcccaaagtgctgggattacaggcttgagcccccgcgcccagccatcaaaatgctttttatttctgcatatgttgaatactttttacaatttaaaaaaatgatctgttttgaaggcaaaattgcaaatcttgaaattaagaaggcaaaaatgtaaaggagtcaaaactataaatcaagtatttgggaagtgaagactggaagctaatttgcattaaattcacaaacttttatactctttctgtatatacattttttttctttaaaaaacaactatggatcagaatagccacatttagaacactttttgttatcagtcaatatttttagatagttagaacctggtcctaagcctaaaagtgggcttgattctgcagtaaatcttttacaactgcctcgacacacataaacctttttaaaaatagacactccccgaagtcttttgttcgcatggtcacacactgatgcttagatgttccagtaatctaatatggccacagtagtcttgatgaccaaagtcctttttttccatctttagaaaactacatgggaacaaacagatcgaacagttttgaagctactgtgtgtgtgaatgaacactcttgctttattccagaatgctgtacatctattttggattgtatattgtgtttgtgtatttacgctttgattcatagtaacttcttatggaattgatttgcattgaacacaaactgtaaataaaaagaaatggctgaaagagcaa

SEQ ID NO: 66107 - DNA, 2398 bp, Homo sapiens
  misc_feature (158)..(158): n is a, c, g, or t
  misc_feature (384)..(384): n is a, c, g, or t
  misc_feature (392)..(393): n is a, c, g, or t
ctttaccccacgcttcagctccatgtgtgtactcggctcgcccccggccgtccccgctggggttacagtgccccaaggccaaacagcggtctgcacagccatcgcctccagctcagacagcgcggtccgacaccgcgacatctcgtcccccgggggtnaacccacccctctcctttgtccagttcaccaagcgacactccctcccgtattcactcctggtttcaagcagggctcgacatcctacactcttctcaagagggtctctccaccaccaaggggcccgctcagcctcaagggtaaaaattcaaggtgccacgcagggccacaaaggtcacgcaaggcaaccccagtgtcagagccttttcaagctgtccacgaacaaangggatccnngatttattccagtgaaacaacaactggaacttcaagtaactcctcccagagtacttccaactctgggttggccccaaatccaactaatgccaccaccaaggcggctggtggtgccctgcagtcaacagccagtctcttcgtggtctcactctctcttctgcatctctactcttaagagactcaggccaagaaacgtcttctaaatttccccatcttctaaacccaatccaaatggcgtctggaagtccaatgtggcaaggaaaaacaggtcttcatcgaatctactaattccacaccttttattgacacagaaaatgttgagaatcccaaatttgattgatttgaagaacatgtgagaggtttgactagatgatggatgccaatattaaatctgctggagtttcatgtacaagatgaaggagaggcaacatccaaaatagttaagacatgatttccttgaatgtggcttgagaaatatggacacttaatactaccttgaaaataagaatagaaataaaggatgggattgtggaatggagattcagttttcatttggttcattaattctataaggccataaaacaggtaatataaaaagcttccatgattctatttatatgtacatgagaaggaacttccaggtgttactgtaattcctcaacgtattgtttcgacagcactaatttaatgccgatatactctagatgaagttttacattgttgagctattgctgttctcttgggaactgaactcactttcctcctgaggctttggatttgacattgcatttgaccttttatgtagtaattgacatgtgccagggcaatgatgaatgagaatctacccccagatccaagcatcctgagcaactcttgattatccatattgagtcaaatggtaggcatttcctatcacctgtttccattcaacaagagcactacattcatttagctaaacggattccaaagagtagaattgcattgaccacgactaatttcaaaatgctttttattattattattttttagacagtctcactttgtcgcccaggccggagtgcagtggtgcgatctcagatcagtgtaccatttgcctcccgggctcaagcgattctcctgcctcagcctcccaagtagctgggattacaggcacctgccaccatgcccggctaatttttgtaattttagtagagacagggtttcaccatgttgcccaggctggtttcgaactcctgacctcaggtgatccacccgcctcggcctcccaaagtgctgggattacaggcttgagcccccgcgcccagccatcaaaatgctttttatttctgcatatgttgaatactttttacaatttaaaaaaatgatctgttttgaaggcaaaattgcaaatcttgaaattaagaaggcaaaaatgtaaaggagtcaaaactataaatcaagtatttgggaagtgaagactggaagctaatttgcattaaattcacaaacttttatactctttctgtatatacattttttttctttaaaaaacaactatggatcagaatagccacatttagaacactttttgttatcagtcaatatttttagatagttagaacctggtcctaagcctaaaagtgggcttgattctgcagtaaatcttttacaactgcctcgacacacataaacctttttaaaaatagacactccccgaagtcttttgttcgcatggtcacacactgatgcttagatgttccagtaatctaatatggccacagtagtcttgatgaccaaagtcctttttttccatctttagaaaactacatgggaacaaacagatcgaacagttttgaagctactgtgtgtgtgaatgaacactcttgctttattccagaatgctgtacatctattttggattgtatattgtgtttgtgtatttacgctttgattcatagtaacttcttatggaattgatttgcattgaacacaaactgtaaataaaaagaaatggctgaaagagcaa

SEQ ID NO: 66108 - DNA, 2392 bp, Homo sapiens
agtttgcagcgtcaggcagcgggtctgcgcccagcgagcggctccccagctcctgggaagatgcggacccgggacgcccccgtgagctcactgcgcctggctgacacgaggcgctcacagaacaaagcaagggctgggggatggcgcggccgcggggccggcgcgcagatcgctccggacccggacaccgcctgcgaggagcgccgaccagccgggaagggttcgcgctaggcggcgcccgggtcccgtcggccagggtgagcgtccggcccgcgtccgcgccacgcccgccgcgttcccctttcctctgcggcgggccgagagataaccctgcccgaggggtcccggcgcccgccccccacgcggtcgcactggaattcgcagcccctctcgggtccccggggcgcattttgcagtctgagtggcaatgcacttgctccaggacaggcggctaccccgccgcagcggaggcgcggacttttcttttggggggtctcgccggctcgccgcgctccccaccttgcctgcgcccgcccggagccagcggttctccaagcacccagcatcctgctagacgcgccgcgcaccgacggaggggacatgggcagagcaatggtggccaggctcgggctggggctgctgctgctggcactgctcctacccacgcagatttattccagtgaaacaacaactggaacttcaagtaactcctcccagagtacttccaactctgggttggccccaaatccaactaatgccaccaccaaggcggctggtggtgccctgcagtcaacagccagtctcttcgtggtctcactctctcttctgcatctctactcttaagagactcaggccaagaaacgtcttctaaatttccccatcttctaaacccaatccaaatggcgtctggaagtccaatgtggcaaggaaaaacaggtcttcatcgaatctactaattccacaccttttattgacacagaaaatgttgagaatcccaaatttgattgatttgaagaacatgtgagaggtttgactagatgatggatgccaatattaaatctgctggagtttcatgtacaagatgaaggagaggcaacatccaaaatagttaagacatgatttccttgaatgtggcttgagaaatatggacacttaatactaccttgaaaataagaatagaaataaaggatgggattgtggaatggagattcagttttcatttggttcattaattctataaggccataaaacaggtaatataaaaagcttccatgattctatttatatgtacatgagaaggaacttccaggtgttactgtaattcctcaacgtattgtttcgacagcactaatttaatgccgatatactctagatgaagttttacattgttgagctattgctgttctcttgggaactgaactcactttcctcctgaggctttggatttgacattgcatttgaccttttatgtagtaattgacatgtgccagggcaatgatgaatgagaatctacccccagatccaagcatcctgagcaactcttgattatccatattgagtcaaatggtaggcatttcctatcacctgtttccattcaacaagagcactacattcatttagctaaacggattccaaagagtagaattgcattccaaagtgctgggattacaggcttgagcccccgcgcccagccatcaaaatgctttttatttctgcatatgttgaatactttttacaatttaaaaaaatgatctgttttgaaggcaaaattgcaaatcttgaaattaagaaggcaaaaatgtaaaggagtcaaaactataaatcaagtatttgggaagtgaagactggaagctaatttgcattaaattcacaaacttttatactctttctgtatatacattttttttctttaaaaaacaactatggatcagaatagccacatttagaacactttttgttatcagtcaatatttttagatagttagaacctggtcctaagcctaaaagtgggcttgattctgcagtaaatcttttacaactgcctcgacacacataaacctttttaaaaatagacactccccgaagtcttttgttcgcatggtcacacactgatgcttagatgttccagtaatctaatatggccacagtagtcttgatgaccaaagtcctttttttccatctttagaaaactacatgggaacaaacagatcgaacagttttgaagctactgtgtgtgtgaatgaacactcttgctttattccagaatgctgtacatctattttggattgtatattgtgtttgtgtatttacgctttgattcatagtaacttcttatggaattgatttgcattgaacacaaactgtaaataaaaagaaatggctgaaagagcaa

SEQ ID NO: 66109 - DNA, 2543 bp, Homo sapiens
agtttgcagcgtcaggcagcgggtctgcgcccagcgagcggctccccagctcctgggaagatgcggacccgggacgcccccgtgagctcactgcgcctggctgacacgaggcgctcacagaacaaagcaagggctgggggatggcgcggccgcggggccggcgcgcagatcgctccggacccggacaccgcctgcgaggagcgccgaccagccgggaagggttcgcgctaggcggcgcccgggtcccgtcggccagggtgagcgtccggcccgcgtccgcgccacgcccgccgcgttcccctttcctctgcggcgggccgagagataaccctgcccgaggggtcccggcgcccgccccccacgcggtcgcactggaattcgcagcccctctcgggtccccggggcgcattttgcagtctgagtggcaatgcacttgctccaggacaggcggctaccccgccgcagcggaggcgcggacttttcttttggggggtctcgccggctcgccgcgctccccaccttgcctgcgcccgcccggagccagcggttctccaagcacccagcatcctgctagacgcgccgcgcaccgacggaggggacatgggcagagcaatggtggccaggctcgggctggggctgctgctgctggcactgctcctacccacgcagatttattccagtgaaacaacaactggaacttcaagtaactcctcccagagtacttccaactctgggttggccccaaatccaactaatgccaccaccaaggcggctggtggtgccctgcagtcaacagccagtctcttcgtggtctcactctctcttctgcatctctactcttaagagactcaggccaagaaacgtcttctaaatttccccatcttctaaacccaatccaaatggcgtctggaagtccaatgtggcaaggaaaaacaggtcttcatcgaatctactaattccacaccttttattgacacagaaaatgttgagaatcccaaatttgattgatttgaagaacatgtgagaggtttgactagatgatggatgccaatattaaatctgctggagtttcatgtacaagatgaaggagaggcaacatccaaaatagttaagacatgatttccttgaatgtggcttgagaaatatggacacttaatactaccttgaaaataagaatagaaataaaggatgggattgtggaatggagattcagttttcatttggttcattaattctataaggccataaaacaggtaatataaaaagcttccatgattctatttatatgtacatgagaaggaacttccaggtgttactgtaattcctcaacgtattgtttcgacagcactaatttaatgccgatatactctagatgaagttttacattgttgagctattgctgttctcttgggaactgaactcactttcctcctgaggctttggatttgacattgcatttgaccttttatgtagtaattgacatgtgccagggcaatgatgaatgagaatctacccccagatccaagcatcctgagcaactcttgattatccatattgagtcaaatggtaggcatttcctatcacctgtttccattcaacaagagcactacattcatttagctaaacggattccaaagagtagaattgcattgaccacgactaatttcaaaatgctttttattattattattttttagacagtctcactttgtcgcccaggccggagtgcagtggtgcgatctcagatcagtgtaccatttgcctcccgggctcaagcgattctcctgcctcagcctcccaagtagctgggattacaggcacctgccaccatgcccggctaatttttgtaattttagtagagacagggtttcaccatgttgcccaggctggtttcgaactcctgacctcaggtgatccacccgcctcggcctcccaaagtgctgggattacaggcttgagcccccgcgcccagccatcaaaatgctttttatttctgcatatgttgaatactttttacaatttaaaaaaatgatctgttttgaaggcaaaattgcaaatcttgaaattaagaaggcaaaaatgtaaaggagtcaaaactataaatcaagtatttgggaagtgaagactggaagctaatttgcattaaattcacaaacttttatactctttctgcagtaaatcttttacaactgcctcgacacacataaacctttttaaaaatagacactccccgaagtcttttgttcgcatggtcacacactgatgcttagatgttccagtaatctaatatggccacagtagtcttgatgaccaaagtcctttttttccatctttagaaaactacatgggaacaaacagatcgaacagttttgaagctactgtgtgtgtgaatgaacactcttgctttattccagaatgctgtacatctattttggattgtatattgtgtttgtgtatttacgctttgattcatagtaacttcttatggaattgatttgcattgaacacaaactgtaaataaaaagaaatggctgaaagagcaa

SEQ ID NO: 66110 - DNA, 2353 bp, Homo sapiens
agtttgcagcgtcaggcagcgggtctgcgcccagcgagcggctccccagctcctgggaagatgcggacccgggacgcccccgtgagctcactgcgcctggctgacacgaggcgctcacagaacaaagcaagggctgggggatggcgcggccgcggggccggcgcgcagatcgctccggacccggacaccgcctgcgaggagcgccgaccagccgggaagggttcgcgctaggcggcgcccgggtcccgtcggccagggtgagcgtccggcccgcgtccgcgccacgcccgccgcgttcccctttcctctgcggcgggccgagagataaccctgcccgaggggtcccggcgcccgccccccacgcggtcgcactggaattcgcagcccctctcgggtccccggggcgcattttgcagtctgagtggcaatgcacttgctccaggacaggcggctaccccgccgcagcggaggcgcggacttttcttttggggggtctcgccggctcgccgcgctccccaccttgcctgcgcccgcccggagccagcggttctccaagcacccagcatcctgctagacgcgccgcgcaccgacggaggggacatgggcagagcaatggtggccaggctcgggctggggctgctgctgctggcactgctcctacccacgcagatttattccagtgaaacaacaactggaacttcaagtaactcctcccagagtacttccaactctgggttggccccaaatccaactaatgccaccaccaaggcggctggtggtgccctgcagtcaacagccagtctcttcgtggtctcactctctcttctgcatctctactcttaagagactcaggccaagaaacgtcttctaaatttccccatcttctaaacccaatccaaatggcgtctggaagtccaatgtggcaaggaaaaacaggtcttcatcgaatctactaattccacaccttttattgacacagaaaatgttgagaatcccaaatttgattgatttgaagaacatgtgagaggtttgactagatgatggatgccaatattaaatctgctggagtttcatgtacaagatgaaggagaggcaacatccaaaatagttaagacatgatttccttgaatgtggcttgagaaatatggacacttaatactaccttgaaaataagaatagaaataaaggatgggattgtggaatggagattcagttttcatttggttcattaattctataaggccataaaacaggtaatataaaaagcttccatgattctatttatatgtacatgagaaggaacttccaggtgttactgtaattcctcaacgtattgtttcgacagcactaatttaatgccgatatactctagatgaagttttacattgttgagctattgctgttctcttgggaactgaactcactttcctcctgaggctttggatttgacattgcatttgaccttttatgtagtaattgacatgtgccagggcaatgatgaatgagaatctacccccagatccaagcatcctgagcaactcttgattatccatattgagtcaaatggtaggcatttcctatcacctgtttccattcaacaagagcactacattcatttagctaaacggattccaaagagtagaattgcattgaccacgactaatttcaaaatgctttttattattattattttttagacagtctcactttgtcgcccaggccggagtgcagtggtgcgatctcagatcagtgtaccatttgcctcccgggctcaagcgattctcctgcctcagcctcccaagtagctgggattacaggcacctgccaccatgcccggctaatttttgtaattttagtagagacagggtttcaccatgttgcccaggctggtttcgaactcctgacctcaggtgatccacccgcctcggcctcccaaagtgctgggattacaggcttgagcccccgcgcccagccatcaaaatgctttttatttctgcatatgttgaatactttttacaatttaaaaaaatgatctgttttgaaggcaaaattgcaaatcttgaaattaagaaggcaaaaatgtaaaggagtcaaaactataaatcaagtatttgggaagtgaagactggaagctaatttgcattaaattcacaaacttttatactctttctgtatatacattttttttctttaaaaaacaactatggatcagaatagccacatttagaacactttttgttatcagtcaatatttttagatagttagaacctggtcctaagcctaaaagtgggcttgattctgcagtaaatcttttacaactgcctcgactaagcttggaactctgctaccccg

SEQ ID NO: 66111 - DNA, 1850 bp, Homo sapiens
  misc_feature (1705)..(1706): n is a, c, g, or t
  misc_feature (1712)..(1712): n is a, c, g, or t
  misc_feature (1759)..(1759): n is a, c, g, or t
  misc_feature (1775)..(1775): n is a, c, g, or t
agtttgcagcgtcaggcagcgggtctgcgcccagcgagcggctccccagctcctgggaagatgcggacccgggacgcccccgtgagctcactgcgcctggctgacacgaggcgctcacagaacaaagcaagggctgggggatggcgcggccgcggggccggcgcgcagatcgctccggacccggacaccgcctgcgaggagcgccgaccagccgggaagggttcgcgctaggcggcgcccgggtcccgtcggccagggtgagcgtccggcccgcgtccgcgccacgcccgccgcgttcccctttcctctgcggcgggccgagagataaccctgcccgaggggtcccggcgcccgccccccacgcggtcgcactggaattcgcagcccctctcgggtccccggggcgcattttgcagtctgagtggcaatgcacttgctccaggacaggcggctaccccgccgcagcggaggcgcggacttttcttttggggggtctcgccggctcgccgcgctccccaccttgcctgcgcccgcccggagccagcggttctccaagcacccagcatcctgctagacgcgccgcgcaccgacggaggggacatgggcagagcaatggtggccaggctcgggctggggctgctgctgctggcactgctcctacccacgcagatttattccagtgaaacaacaactggaacttcaagtaactcctcccagagtacttccaactctgggttggccccaaatccaactaatgccaccaccaaggcggctggtggtgccctgcagtcaacagccagtctcttcgtggtctcactctctcttctgcatctctactcttaagagactcaggccaagaaacgtcttctaaatttccccatcttctaaacccaatccaaatggcgtctggaagtccaatgtggcaaggaaaaacaggtcttcatcgaatctactaattccacaccttttattgacacagaaaatgttgagaatcccaaatttgattgatttgaagaacatgtgagaggtttgactagatgatggatgccaatattaaatctgctggagtttcatgtacaagatgaaggagaggcaacatccaaaatagttaagacatgatttccttgaatgtggcttgagaaatatggacacttaatactaccttgaaaataagaatagaaataaaggatgggattgtggaatggagattcagttttcatttggttcattaattctataaggccataaaacaggtaatataaaaagcttccatgattctatttatatgtacatgagaaggaacttccaggtgttactgtaattcctcaacgtattgtttcgacagcactaatttaatgccgatatactctagatgaagttttacattgttgagctattgctgttctcttgggaactgaactcactttcctcctgaggctttggatttgacattgcatttgaccttttatgtagtaattgacatgtgccagggcaatgatgaatgagaatctacccccagatccaagcatcctgagcaactcttgattatccatattgagtcaaatggtaggcatttcctatcacctgtttccattcaacaagagcactacattcatttagctaaacggattccaaagagtagaattgcattgaccacgactaatttcaaaatgctttttattattattattttttagacagagtnngactcngtctttaaaaaaaaaaaaagattcatgtccttagattagattgtaanccactgggcaggtacntgtgtctaatgttttgtgtggcacctctcccattgttagagctcaataaacgttcaacaacaatgaaaaaaaaaa

SEQ ID NO: 66112 - DNA, 1628 bp, Homo sapiens
agtttgcagcgtcaggcagcgggtctgcgcccagcgagcggctccccagctcctgggaagatgcggacccgggacgcccccgtgagctcactgcgcctggctgacacgaggcgctcacagaacaaagcaagggctgggggatggcgcggccgcggggccggcgcgcagatcgctccggacccggacaccgcctgcgaggagcgccgaccagccgggaagggttcgcgctaggcggcgcccgggtcccgtcggccagggtgagcgtccggcccgcgtccgcgccacgcccgccgcgttcccctttcctctgcggcgggccgagagataaccctgcccgaggggtcccggcgcccgccccccacgcggtcgcactggaattcgcagcccctctcgggtccccggggcgcattttgcagtctgagtggcaatgcacttgctccaggacaggcggctaccccgccgcagcggaggcgcggacttttcttttggggggtctcgccggctcgccgcgctccccaccttgcctgcgcccgcccggagccagcggttctccaagcacccagcatcctgctagacgcgccgcgcaccgacggaggggacatgggcagagcaatggtggccaggctcgggctggggctgctgctgctggcactgctcctacccacgcagatttattccagtgaaacaacaactggaacttcaagtaactcctcccagagtacttccaactctgggttggccccaaatccaactaatgccaccaccaaggcggctggtggtgccctgcagtcaacagccagtctcttcgtggtctcactctctcttctgcatctctactcttaagagactcaggccaagaaacgtcttctaaatttccccatcttctaaacccaatccaaatggcgtctggaagtccaatgtggcaaggaaaaacaggtcttcatcgaatctactaattccacaccttttattgacacagaaaatgttgagaatcccaaatttgattgatttgaagaacatgtgagaggtttgactagatgatggatgccaatattaaatctgctggagtttcatgtacaagatgaaggagaggcaacatccaaaatagttaagacatgatttccttgaatgtggcttgagaaatatggacacttaatactaccttgaaaataagaatagaaataaaggatgggattgtggaatggagattcagttttcatttggttcattaattctataaggccataaaacaggtaatataaaaagcttccatgattctatttatatgtacatgagaaggaacttccaggtgttactgtaattcctcaacgtattgtttcgacagcactaatttaatgccgatatactctagatgaagttttacattgttgagctattgctgttctcttgggaactgaactcactttcctcctgaggctttggatttgacattgcatttgaccttttatgtagtaattgacatgtgccagggcaatgatgaatgagaatctacccccagatccaagcatcctgagcaactcttgattatccatattgagtcaaatggtaggcatttcctatcacctgtttccattcgaggcttcggggatacatctagaatcgaccat

SEQ ID NO: 66113 - DNA, 1460 bp, Homo sapiens
agtttgcagcgtcaggcagcgggtctgcgcccagcgagcggctccccagctcctgggaagatgcggacccgggacgcccccgtgagctcactgcgcctggctgacacgaggcgctcacagaacaaagcaagggctgggggatggcgcggccgcggggccggcgcgcagatcgctccggacccggacaccgcctgcgaggagcgccgaccagccgggaagggttcgcgctaggcggcgcccgggtcccgtcggccagggtgagcgtccggcccgcgtccgcgccacgcccgccgcgttcccctttcctctgcggcgggccgagagataaccctgcccgaggggtcccggcgcccgccccccacgcggtcgcactggaattcgcagcccctctcgggtccccggggcgcattttgcagtctgagtggcaatgcacttgctccaggacaggcggctaccccgccgcagcggaggcgcggacttttcttttggggggtctcgccggctcgccgcgctccccaccttgcctgcgcccgcccggagccagcggttctccaagcacccagcatcctgctagacgcgccgcgcaccgacggaggggacatgggcagagcaatggtggccaggctcgggctggggctgctgctgctggcactgctcctacccacgcagatttattccagtgaaacaacaactggaacttcaagtaactcctcccagagtacttccaactctgggttggccccaaatccaactaatgccaccaccaaggcggctggtggtgccctgcagtcaacagccagtctcttcgtggtctcactctctcttctgcatctctactcttaagagactcaggccaagaaacgtcttctaaatttccccatcttctaaacccaatccaaatggcgtctggaagtccaatgtggcaaggaaaaacaggtcttcatcgaatctactaattccacaccttttattgacacagaaaatgttgagaatcccaaatttgattgatttgaagaacatgtgagaggtttgactagatgatggatgccaatattaaatctgctggagtttcatgtacaagatgaaggagaggcaacatccaaaatagttaagacatgatttccttgaatgtggcttgagaaatatggacacttaatactaccttgaaaataagaatagaaataaaggatgggattgtggaatggagattcagttttcatttggttcattaattctataaggccataaaacagaaaactacatgggaacaaacagatcgaacagttttgaagctactgtgtgtgtgaatgaacactcttgctttattccagaatgctgtacatctattttggattgtatattgtgtttgtgtatttacgctttgattcatagtaacttcttatggaattgatttgcattgaacacaaactgtaaataaaaagaaatggctgaaagagcaa

SEQ ID NO: 66114 - DNA, 1031 bp, Homo sapiens
  misc_feature (9)..(9): n is a, c, g, or t
  misc_feature (83)..(83): n is a, c, g, or t
  misc_feature (87)..(88): n is a, c, g, or t
  misc_feature (91)..(91): n is a, c, g, or t
  misc_feature (106)..(106): n is a, c, g, or t
  misc_feature (111)..(111): n is a, c, g, or t
  misc_feature (117)..(117): n is a, c, g, or t
  misc_feature (128)..(128): n is a, c, g, or t
  misc_feature (134)..(134): n is a, c, g, or t
  misc_feature (136)..(136): n is a, c, g, or t
  misc_feature (139)..(139): n is a, c, g, or t
  misc_feature (146)..(146): n is a, c, g, or t
  misc_feature (149)..(149): n is a, c, g, or t
  misc_feature (154)..(154): n is a, c, g, or t
  misc_feature (156)..(156): n is a, c, g, or t
  misc_feature (158)..(158): n is a, c, g, or t
  misc_feature (164)..(164): n is a, c, g, or t
  misc_feature (188)..(188): n is a, c, g, or t
  misc_feature (190)..(190): n is a, c, g, or t
  misc_feature (203)..(203): n is a, c, g, or t
  misc_feature (209)..(210): n is a, c, g, or t
  misc_feature (225)..(225): n is a, c, g, or t
  misc_feature (231)..(231): n is a, c, g, or t
  misc_feature (233)..(233): n is a, c, g, or t
  misc_feature (237)..(237): n is a, c, g, or t
  misc_feature (239)..(239): n is a, c, g, or t
  misc_feature (245)..(245): n is a, c, g, or t
  misc_feature (247)..(247): n is a, c, g, or t
  misc_feature (254)..(254): n is a, c, g, or t
  misc_feature (264)..(264): n is a, c, g, or t
  misc_feature (269)..(273): n is a, c, g, or t
  misc_feature (276)..(277): n is a, c, g, or t
  misc_feature (287)..(287): n is a, c, g, or t
  misc_feature (293)..(295): n is a, c, g, or t
  misc_feature (346)..(346): n is a, c, g, or t
  misc_feature (351)..(353): n is a, c, g, or t
  misc_feature (360)..(360): n is a, c, g, or t
  misc_feature (364)..(364): n is a, c, g, or t
  misc_feature (383)..(383): n is a, c, g, or t
  misc_feature (387)..(387): n is a, c, g, or t
  misc_feature (395)..(395): n is a, c, g, or t
  misc_feature (401)..(401): n is a, c, g, or t
  misc_feature (406)..(406): n is a, c, g, or t
  misc_feature (408)..(408): n is a, c, g, or t
  misc_feature (422)..(422): n is a, c, g, or t
  misc_feature (440)..(440): n is a, c, g, or t
  misc_feature (448)..(448): n is a, c, g, or t
  misc_feature (450)..(450): n is a, c, g, or t
  misc_feature (452)..(452): n is a, c, g, or t
  misc_feature (462)..(463): n is a, c, g, or t
  misc_feature (465)..(465): n is a, c, g, or t
  misc_feature (478)..(478): n is a, c, g, or t
  misc_feature (482)..(484): n is a, c, g, or t
  misc_feature (487)..(489): n is a, c, g, or t
  misc_feature (493)..(493): n is a, c, g, or t
  misc_feature (496)..(496): n is a, c, g, or t
  misc_feature (499)..(499): n is a, c, g, or t
  misc_feature (502)..(502): n is a, c, g, or t
  misc_feature (505)..(505): n is a, c, g, or t
  misc_feature (509)..(509): n is a, c, g, or t
tttcccccnctgctctgttttgccggcccccttgcccctcttgcccttccgccggcccccctgtcccggcgtcccccctctcnctcnngtntttgggccgtgccgnctggncgctcntttgccttccnttcccncnctnttctccnctntctgncncncccttntttttctttcccccccccctctgncnccgcctcgccccntttcgnnccctttttgttctcngtcccncntttncnctcgtncncccctgnccctcccccnccccnnnnnccnncccccccccncccccnnncccccccccccccccccccccccccccccccccccctcccccccccccccnccccnnncgccccncctnctccccccccccccgcccncgcnctcccccntccccncctcncncccccgtccccttnctcccccccccccccccncccccccntncncccccccccnncnccccccccccccncccnnnttnnncccnccngtntgnccncctncccactcttgctttattccagaatgctgtacatctattttggattgtatattgtgtttgtgtatttacgctttgattcatagtaacttcttatggaattgatttgcattgaacacaaactgtaaataaaaagaaatggctgaaagagcaaaaaaaattcggcacgaggaaagtggctcatgccaaagaagaaaaccttagtatgcatcagatgctggatcagactttactggagttaaacaacatgtgaaaacctccttagctgcgaccacattctttcattttgttttgttttgttttgtttttaaacacctgcttaccccttaaatgcaatttatttacttttaccactgtcacagaaacatccacaagattccagctaggtcagggggggggggaaaacacatacaaaaaagggaagcccatggtcagggggattctgggttaaaatgtgccattttcccgggttgatggtgccacaactttgtagagagttttacaaaaacattgtgcttagtccgcg

SEQ ID NO: 66115 - DNA, 623 bp, Homo sapiens
cgctgcgaccggcgctccccggggcaggtggctgcatagtcttggcggaggtgaccaaagccacgtaatgtccgtagttcgctcatccgtccatgccagatggattgtggggaaggtgattgggacaaaaatgcaaaagactgctaaagtgagagtgaccaggcttgttctggatccctatttattaaagtattttaataagcggaaaacctactttgctcacgatgcccttcagcagtgcacagttggggatattgtgcttctcagagctttacctgttccacgagcaaagcatgtgaaacatgaactggctgagatcgttttcaaagttggaaaagtcatagatccagtgacaggaaagccctgtgctggaactacctacctggagagtccgttgagttcggaaaccacccagctaagcaaaaatctggaagaactcaatatctcttcagcacagtgaagcgggagtggaagaaggatctaaagggaaaaactgacatgtttatgttatggaaaaagaaatttttctaagtttcatcacaaactgtgtccagtttctctgtggtgttcatgaaatagctaaaagcaaatgaagtaaagggcatactatggtttttcacaaa

SEQ ID NO: 66116 - DNA, 2829 bp, Homo sapiens
  misc_feature (2687)..(2687): n is a, c, g, or t
agcggagcgtcttgcgccgccattgcggggaggctgtcctcagagcaggtctggcgcgccggtggctggaccggccccaggagcccagtcaccgggcgtcattggctcaggctgcggggccctcggcaccttctccctcccgggtccaccgcggcggcggcggcggcggcggcggcgacggcggcggcgtcagggggcggagcctgccgaagcgccctttgtctgcggaggtcaacatacctggcctaaggaggcaggattgagtgactctcactcaccactggtgttgctctttgaaagtggcgcttggcaccagcatgaactccccatcctcagcaatcccatcaggtgttttgggtcttcaacctaaaattctatcttacaagatccttgccaggatgcagatttgaatactatagtgaagtctgtacatgaagaaatgatgcttttagggaggaaaaaaaaaaggtaataacaaccttcaagagccccttcatctcaactcggcataaacaaggcaagattctgagagtggccgcccctggaagcagaaattattcttgtggctatccatgtggctcctgaggctctaatcagagatggggcacctttagtaccaggggagtgactgttgcccataaggtactggacatcaactttcaagagcagccccagctccttaagctgctggtcctggtgcatctgctgactttcatgtagaagatagcagagctttggcgacattacaacataagaactgcagagaggtgtaatcccagtggaagactgaatcgagagactcaaaaaggaaggaggggaacatggaggaggaagaaatgaatgatggctcacagatggtgagatctcaggaatcactgacgtttcaggatgtggccgtggacttcaccagagaggagtgggaccagctgtaccctgcccaaaagaacctctatcgagacgtgatgctggagaactacaggaatctagttgcactggggtatcagctttgtaagccagaggtaatcgcgcagttggagctagaggaagaatgggtgatagaaagagacagcctgctggatactcatccaggtgaccaaagccacgtaatgtccgtagttcgctcatccgtccatgccagatggattgtggggaaggtgattgggacaaaaatgcaaaagactgctaaagtgagagtgaccaggcttgttctggatccctatttattaaagtattttaataagcggaaaacctactttgctcacgatgcccttcagcagtgcacagttggggatattgtgcttctcagagctttacctgttccacgagcaaagcatgtgaaacatgaactggctgagatcgttttcaaagttggaaaagtcatagatccagtgacaggaaagccctgtgctggaactacctacctggagagtccgttgagttcggaaaccacccagctaagcaaaaatctggaagaactcaatatctcttcagcacagtgaagcgggagtggaagaaggatctaaagggaaaaactgacatgtttatgttatggaaaaagaaatttttctaagtttcatcacaaactgtgtccagtttctctgtggtgttcatgaaatagctaaaagcaaatgaagtaaagggcatactatggtttttcacaaaggtttatggtcgtgtttcaaattttcatcatttcagtgaacatacttccacgttacattaagtgtgcctagcagtctgttgcattttgtaagctcacagttttttgttttgagatggaatctcactctgtcacccaggctggagtgcagtggtgcaatcttggctcactgcaagctccgcctcccgggttcacgccgttctcctgcctcagcctcccgagtagctgggactacaggcgcctgccaccatgcccagctaatttttttttttttttttttgggtatttttagtagagacggggtttcaccgtgttagccaggatggtcttgatctcctgacctcgtgatctgcctgccttggcctctcagagtgctgggattacaggcgtgagccactgtgcttagcaagctcactgttttagaaggttttatttttgtcttttgagacagggtcttgctttgttgtgggggctggagtgcagtggtatgatcttggctcactgcagccttgacctccctggctctagcatctttccaccccagccttctgagtagctgggaacacaggagcgtaccactacacttggctgattttttgtaaattttgtagagacagggtctccctgtgttgcccaggttggtctcggactcctgggagcaatctgcccatcttggcctaacagtgctgggattacaggcctgagccactgtgcccagccggtttcctttatttcattcaaaggaattttgaatttatcttagaacctttattttgaaggaagaaagtcttttttttttttgagctggagtttcactcttgttgcccaggctggagtgcaatggcatgatctcagcccaccacgacctccgcctcccaggttcaagtgattctgcttcagcctcctgagtagctaggattacaggcatgtgccaccacgcccagctaattttgtatttttagtagggatggggtttctccatgtttgtcaggctagtcttgaactccggacctcaggtgatccgccngcctgggcctctcaaagtgcttggattacaggcatgagccactgcatgtaatgaccagccactggtcagaattctttcaatcaagctgtgttaataagaatattgatgtgtggaaaataaaattttacaattctgtgccact

SEQ ID NO: 66117 - DNA, 2055 bp, Homo sapiens
  misc_feature (1913)..(1913): n is a, c, g, or t
gcggggtattgctgccgggggaggatttgctggggacccaaggcaccctcgcgtgagagccctgagagcgaatcgcttcgtctgacctcggggttgtctggggcgagggcacgaatcaccccaacctttccgaagcctggtggaatggcttgtgaactgatctcaaaagcagcccaagtcatccgtcgctgggccggggagggggacaccgcggcggccccgccgagtgctacctgggcactgagcctgtggggagaggcgacccagcggggtggagagagataagggaccagtaacgtccagcgtttgtccgtggtgaccaaagccacgtaatgtccgtagttcgctcatccgtccatgccagatggattgtggggaaggtgattgggacaaaaatgcaaaagactgctaaagtgagagtgaccaggcttgttctggatccctatttattaaagtattttaataagcggaaaacctactttgctcacgatgcccttcagcagtgcacagttggggatattgtgcttctcagagctttacctgttccacgagcaaagcatgtgaaacatgaactggctgagatcgttttcaaagttggaaaagtcatagatccagtgacaggaaagccctgtgctggaactacctacctggagagtccgttgagttcggaaaccacccagctaagcaaaaatctggaagaactcaatatctcttcagcacagtgaagcgggagtggaagaaggatctaaagggaaaaactgacatgtttatgttatggaaaaagaaatttttctaagtttcatcacaaactgtgtccagtttctctgtggtgttcatgaaatagctaaaagcaaatgaagtaaagggcatactatggtttttcacaaaggtttatggtcgtgtttcaaattttcatcatttcagtgaacatacttccacgttacattaagtgtgcctagcagtctgttgcattttgtaagctcacagttttttgttttgagatggaatctcactctgtcacccaggctggagtgcagtggtgcaatcttggctcactgcaagctccgcctcccgggttcacgccgttctcctgcctcagcctcccgagtagctgggactacaggcgcctgccaccatgcccagctaatttttttttttttttttttgggtatttttagtagagacggggtttcaccgtgttagccaggatggtcttgatctcctgacctcgtgatctgcctgccttggcctctcagagtgctgggattacaggcgtgagccactgtgcttagcaagctcactgttttagaaggttttatttttgtcttttgagacagggtcttgctttgttgtgggggctggagtgcagtggtatgatcttggctcactgcagccttgacctccctggctctagcatctttccaccccagccttctgagtagctgggaacacaggagcgtaccactacacttggctgattttttgtaaattttgtagagacagggtctccctgtgttgcccaggttggtctcggactcctgggagcaatctgcccatcttggcctaacagtgctgggattacaggcctgagccactgtgcccagccggtttcctttatttcattcaaaggaattttgaatttatcttagaacctttattttgaaggaagaaagtcttttttttttttgagctggagtttcactcttgttgcccaggctggagtgcaatggcatgatctcagcccaccacgacctccgcctcccaggttcaagtgattctgcttcagcctcctgagtagctaggattacaggcatgtgccaccacgcccagctaattttgtatttttagtagggatggggtttctccatgtttgtcaggctagtcttgaactccggacctcaggtgatccgccngcctgggcctctcaaagtgcttggattacaggcatgagccactgcatgtaatgaccagccactggtcagaattctttcaatcaagctgtgttaataagaatattgatgtgtggaaaataaaattttacaattctgtgccact

SEQ ID NO: 66118 - DNA, 1305 bp, Homo sapiens
agcggagcgtcttgcgccgccattgcggggaggctgtcctcagagcaggtctggcgcgccggtggctggaccggccccaggagcccagtcaccgggcgtcattggctcaggctgcggggccctcggcaccttctccctcccgggtccaccgcggcggcggcggcggcggcggcggcgacggcggcggcgtcagggggcggagcctgccgaagcgccctttgtctgcggaggtcaacatacctggcctaaggaggcaggattgagtgactctcactcaccactggtgttgctctttgaaagtggcgcttggcaccagcatgaactccccatcctcagcaatcccatcaggtgttttgggtcttcaacctaaaattctatcttacaagatccttgccaggatgcagatttgaatactatagtgaagtctgtacatgaagaaatgatgcttttagggaggaaaaaaaaaaggtaataacaaccttcaagagccccttcatctcaactcggcataaacaaggcaagattctgagagtggccgcccctggaagcagaaattattcttgtggctatccatgtggctcctgaggctctaatcagagatggggcacctttagtaccaggggagtgactgttgcccataaggtactggacatcaactttcaagagcagccccagctccttaagctgctggtcctggtgcatctgctgactttcatgtagaagatagcagagctttggcgacattacaacataagaactgcagagaggtgtaatcccagtggaagactgaatcgagagactcaaaaaggaagttatgccttctcagaatgctgttttttctcaggaggggaacatggaggaggaagaaatgaatgatggctcacagatggtgagatctcaggaatcactgacgtttcaggatgtggccgtggacttcaccagagaggagtgggaccagctgtaccctgcccaaaagaacctctatcgagacgtgatgctggagaactacaggaatctagttgcactggggtatcagctttgtaagccagaggtaatcgcgcagttggagctagaggaagaatgggtgatagaaagagacagcctgctggatactcatccagcctaatttctaattctcttgctctcctttgtgatatgtccccaattcctacctctactactaacattgttttcttggagattaccactaatttccttccagtcaaatccagtggctacaaagccagttaggattgtgttgactttcccttcttgaaatgttcttccaccctggcttgtgatgca

SEQ ID NO: 66119 - DNA, 436 bp, Homo sapiens
  misc_feature (294)..(294): n is a, c, g, or t
ctccatcagccgctccagccgccccctgaagttgctcccaaagcgcacgtcatcctcaaacaccaggaccgggcaggccctggaccacctcttcccagatggagtaatggctgaggaagcagcccaccacgacctccgcctcccaggttcaagtgattctgcttcagcctcctgagtagctaggattacaggcatgtgccaccacgcccagctaattttgtatttttagtagggatggggtttctccatgtttgtcaggctagtcttgaactccggacctcaggtgatccgccngcctgggcctctcaaagtgcttggattacaggcatgagccactgcatgtaatgaccagccactggtcagaattctttcaatcaagctgtgttaataagaatattgatgtgtggaaaataaaattttacaattctgtgccact

SEQ ID NO: 66120 - DNA, 510 bp, Homo sapiens
tgtgcttattctgttgcggtgacgtacctcaaagaaacgggtatgcagtgttccatgggcaccagagatgctcgcagaggagcaagttcagaatgtgtcaagactctatccatagggtgttggtcaagttcactaaactgccagtgcacaggatacacatacatgtggtagtttttcttaaagtcccttaagagaaggtcaatgggatggtccccagccaaaagcctcttttccatatcaaaaatcttctgccattttaatctatttttcatcttttctttttccttttatcatcaaactcttgacacttgtatacaacccaccagcctaatttctaattctcttgctctcctttgtgatatgtccccaattcctacctctactactaacattgttttcttggagattaccactaatttccttccagtcaaatccagtggctacaaagccagttaggattgtgttgactttcccttcttgaaatgttcttccaccctggcttgtgatgca

SEQ ID NO: 66121 - DNA, 679 bp, Homo sapiens
tagttcgctcatccgtccatgccagatggattgtggggaaggtgattgggacaaaaatgcaaaagactgctaaagtgagagtgaccaggcttgttctggatccctatttattaaaggtgagaaacattcttgtttccgggtggctttggtaaatcaccaccatgtcctgggtcctaagcaaaaaaacatttatctctcagtaaagatgtcttgtctctcatctgctttgagccaggcattttgctggtctgtaggtataacacggtttacacattccaagaaaacagttaatgtcaatccactctaactgctgtagtcattctgtatgcaaagtactggccggatgaggtggctcacacctgtaatcccagcactttgggaggccgatgcggttggatcacctgagatcaggagttcgagaccagtctggccaacgtggtgaaaccccgtctctactaaaaatacaaaaattagctgggcatagtggtgcgcacctgtaatcctagctactctggaggctgaggcaggagaatctcttgaagccgggaggcggaggttgcaatgagccacaattgtaccattgcactccatcctggacaagagcaaaactctgcctaccatgcacaattcacaatagggtttgtgctcctataggaatctaatgccgctgctgatctga

SEQ ID NO: 66122 - DNA, 1790 bp, Homo sapiens
  misc_feature (1648)..(1648): n is a, c, g, or t
cgctgcgaccggcgctccccggggcaggtggctgcatagtcttggcggaggtgaccaaagccacgtaatgtccgtagttcgctcatccgtccatgccagatggattgtggggaaggtgattgggacaaaaatgcaaaagactgctaaagtgagagtgaccaggcttgttctggatccctatttattaaagtattttaataagcggaaaacctactttgctcacgatgcccttcagcagtgcacagttggggatattgtgcttctcagagctttacctgttccacgagcaaagcatgtgaaacatgaactggctgagatcgttttcaaagttggaaaagtcatagatccagtgacaggaaagccctgtgctggaactacctacctggagagtccgttgagttcggaaaccacccagctaagcaaaaatctggaagaactcaatatctcttcagcacagtgaagcgggagtggaagaaggatctaaagggaaaaactgacatgtttatgttatggaaaaagaaatttttctaagtttcatcacaaactgtgtccagtttctctgtggtgttcatgaaatagctaaaagcaaatgaagtaaagggcatactatggtttttcacaaaggtttatggtcgtgtttcaaattttcatcatttcagtgaacatacttccacgttacattaagtgtgcctagcagtctgttgcattttgtaagctcacagttttttgttttgagatggaatctcactctgtcacccaggctggagtgcagtggtgcaatcttggctcactgcaagctccgcctcccgggttcacgccgttctcctgcctcagcctcccgagtagctgggactacaggcgcctgccaccatgcccagctaatttttttttttttttttttgggtatttttagtagagacggggtttcaccgtgttagccaggatggtcttgatctcctgacctcgtgatctgcctgccttggcctctcagagtgctgggattacaggcgtgagccactgtgcttagcaagctcactgttttagaaggttttatttttgtcttttgagacagggtcttgctttgttgtgggggctggagtgcagtggtatgatcttggctcactgcagccttgacctccctggctctagcatctttccaccccagccttctgagtagctgggaacacaggagcgtaccactacacttggctgattttttgtaaattttgtagagacagggtctccctgtgttgcccaggttggtctcggactcctgggagcaatctgcccatcttggcctaacagtgctgggattacaggcctgagccactgtgcccagccggtttcctttatttcattcaaaggaattttgaatttatcttagaacctttattttgaaggaagaaagtcttttttttttttgagctggagtttcactcttgttgcccaggctggagtgcaatggcatgatctcagcccaccacgacctccgcctcccaggttcaagtgattctgcttcagcctcctgagtagctaggattacaggcatgtgccaccacgcccagctaattttgtatttttagtagggatggggtttctccatgtttgtcaggctagtcttgaactccggacctcaggtgatccgccngcctgggcctctcaaagtgcttggattacaggcatgagccactgcatgtaatgaccagccactggtcagaattctttcaatcaagctgtgttaataagaatattgatgtgtggaaaataaaattttacaattctgtgccact

SEQ ID NO: 66123 - DNA, 2861 bp, Homo sapiens
  misc_feature (2719)..(2719): n is a, c, g, or t
agcggagcgtcttgcgccgccattgcggggaggctgtcctcagagcaggtctggcgcgccggtggctggaccggccccaggagcccagtcaccgggcgtcattggctcaggctgcggggccctcggcaccttctccctcccgggtccaccgcggcggcggcggcggcggcggcggcgacggcggcggcgtcagggggcggagcctgccgaagcgccctttgtctgcggaggtcaacatacctggcctaaggaggcaggattgagtgactctcactcaccactggtgttgctctttgaaagtggcgcttggcaccagcatgaactccccatcctcagcaatcccatcaggtgttttgggtcttcaacctaaaattctatcttacaagatccttgccaggatgcagatttgaatactatagtgaagtctgtacatgaagaaatgatgcttttagggaggaaaaaaaaaaggtaataacaaccttcaagagccccttcatctcaactcggcataaacaaggcaagattctgagagtggccgcccctggaagcagaaattattcttgtggctatccatgtggctcctgaggctctaatcagagatggggcacctttagtaccaggggagtgactgttgcccataaggtactggacatcaactttcaagagcagccccagctccttaagctgctggtcctggtgcatctgctgactttcatgtagaagatagcagagctttggcgacattacaacataagaactgcagagaggtgtaatcccagtggaagactgaatcgagagactcaaaaaggaagttatgccttctcagaatgctgttttttctcaggaggggaacatggaggaggaagaaatgaatgatggctcacagatggtgagatctcaggaatcactgacgtttcaggatgtggccgtggacttcaccagagaggagtgggaccagctgtaccctgcccaaaagaacctctatcgagacgtgatgctggagaactacaggaatctagttgcactggggtatcagctttgtaagccagaggtaatcgcgcagttggagctagaggaagaatgggtgatagaaagagacagcctgctggatactcatccaggtgaccaaagccacgtaatgtccgtagttcgctcatccgtccatgccagatggattgtggggaaggtgattgggacaaaaatgcaaaagactgctaaagtgagagtgaccaggcttgttctggatccctatttattaaagtattttaataagcggaaaacctactttgctcacgatgcccttcagcagtgcacagttggggatattgtgcttctcagagctttacctgttccacgagcaaagcatgtgaaacatgaactggctgagatcgttttcaaagttggaaaagtcatagatccagtgacaggaaagccctgtgctggaactacctacctggagagtccgttgagttcggaaaccacccagctaagcaaaaatctggaagaactcaatatctcttcagcacagtgaagcgggagtggaagaaggatctaaagggaaaaactgacatgtttatgttatggaaaaagaaatttttctaagtttcatcacaaactgtgtccagtttctctgtggtgttcatgaaatagctaaaagcaaatgaagtaaagggcatactatggtttttcacaaaggtttatggtcgtgtttcaaattttcatcatttcagtgaacatacttccacgttacattaagtgtgcctagcagtctgttgcattttgtaagctcacagttttttgttttgagatggaatctcactctgtcacccaggctggagtgcagtggtgcaatcttggctcactgcaagctccgcctcccgggttcacgccgttctcctgcctcagcctcccgagtagctgggactacaggcgcctgccaccatgcccagctaatttttttttttttttttttgggtatttttagtagagacggggtttcaccgtgttagccaggatggtcttgatctcctgacctcgtgatctgcctgccttggcctctcagagtgctgggattacaggcgtgagccactgtgcttagcaagctcactgttttagaaggttttatttttgtcttttgagacagggtcttgctttgttgtgggggctggagtgcagtggtatgatcttggctcactgcagccttgacctccctggctctagcatctttccaccccagccttctgagtagctgggaacacaggagcgtaccactacacttggctgattttttgtaaattttgtagagacagggtctccctgtgttgcccaggttggtctcggactcctgggagcaatctgcccatcttggcctaacagtgctgggattacaggcctgagccactgtgcccagccggtttcctttatttcattcaaaggaattttgaatttatcttagaacctttattttgaaggaagaaagtcttttttttttttgagctggagtttcactcttgttgcccaggctggagtgcaatggcatgatctcagcccaccacgacctccgcctcccaggttcaagtgattctgcttcagcctcctgagtagctaggattacaggcatgtgccaccacgcccagctaattttgtatttttagtagggatggggtttctccatgtttgtcaggctagtcttgaactccggacctcaggtgatccgccngcctgggcctctcaaagtgcttggattacaggcatgagccactgcatgtaatgaccagccactggtcagaattctttcaatcaagctgtgttaataagaatattgatgtgtggaaaataaaattttacaattctgtgccact

SEQ ID NO: 66124 - DNA, 648 bp, Homo sapiens
cgctgcgaccggcgctccccggggcaggtggctgcatagtcttggcggaggtgaccaaagccacgtaatgtccgtagttcgctcatccgtccatgccagatggattgtggggaaggtgattgggacaaaaatgcaaaagactgctaaagtgagagtgaccaggcttgttctggatccctatttattaaagtattttaataagcggaaaacctactttgctcacgatgcccttcagcagtgcacagttggggatattgtgcttctcagagctttacctgttccacgagcaaagcatgtgaaacatgaactggctgagatcgttttcaaagttggaaaagtcatagatccagtgacaggaaagccctgtgctggaactacctacctggagagtccgttgagttcggaaaccacccagctaagcaaaaatctggaagaactcaatatctcttcagcacagtgaagcgggagtggaagaaggatctaaagggaaaaactgacatgtttatgttatggaaaaagaaatttttctaagtttcatcacaaactgtgtccagtttctctgtggtgttcatgaaatagctaaaagcaaatgaagtaaagggcatactatggtttttcacaaaaaagaacagaaaaaaaaagtcgacg

SEQ ID NO: 66125 - DNA, 153 bp, Homo sapiens
aggaagtacagatgcatttattgagcacctactatagtcatgccaaaaactgtgctaggctctttaacataaattatctctttcacttgcctataaaaggataagtttctgtattatgagtgcctagattaatgatggatgtcagagtaatgc

SEQ ID NO: 66126 - DNA, 173 bp, Homo sapiens
cccatgaatctgcattttaaatgagctccctgcgtaactcttatccatgttataattggagaaccaccactctaagctataccagatccctccaaaactcaaaagccccttttacctcagtgcccttgctatttctattcacactgtatggaatgtcctcaccttccaagcct

SEQ ID NO: 66127 - DNA, 1468 bp, Homo sapiens
tttttttttttttttgtagagacaaggtctcactgtgttgctcaagctggtctggaacttatggcctccagtgaaccacccccttcttggtctcccaaagtgctgggatgacaggcattagccaccacacatggctctggtcttatatattaaacatacagagatgaccagattataattcctgccctccagagtcttgctattagtagagtagatagacaaaaacaaaagtatgccaaaaaatgtggcagcatgctacatgatgtcataaaggtctgaccttttttttaaaatagcagaccagactttgggccatggggaaagaaagtgctgtgttctaccccaagatattatggaagattcttaagaatgggacttttagtctaagaaaaaacagaatgtggcagggagacgagggccttctaggcaaagagaatgaatgaatagcttatacgaaggcacaggggcaaggggagaacaaacaaaacaagcatagactgttcaagaacttcaagtgacttaggtgactcctgagctcagaattcatgcggcaggagcagcagcgggagatgactctagaaagctggactaggaaggtaccaggaaaggccttgtaggcgttactaaattcgttaatggacagtgctgagagaactgttcatgtgttaattaatctcattaatatatagtcacccagtgtaggtgcagaaaaggaattaagaaatattcatgcagccaaaaaaagaatgagattgtcttttgtggtaacatgaatggaactggaggccattattcttagcaaactaacacaggaacagaaaaccaaatactgcatgttctcacctataagtggaagctataaatgataagaatttattaacacaaagaaggaaacaacagacactggggtctacctgagggtggagggtgggaggagggagaggagcagaaaaataaccattgggtcctgggcttaatacctgggtgatgaaataatacgtacaacaaaccttggtgacatatgtttacctatgtaacaaaccttcatgtgtacccctgaacctaaaataatagttaaaaaaagtatttaaattatattttgtagtctttggtatctttaaattactaaatatttatttgtgctttcttgagtaaaaggcaaaatagtaacagtatagcttgttttataattataataaagtataagaaataaaatctattcaaagttagcattctaccagatgaaacattttataatgccacgtataattttgatataaaatattttaaatacatactcaaaaaggagtatttatttcatatagtattaacttgtcttaggaacaactctgcaattgtaagataagatgagcagcaacaaaatgtaatacacctggatttaagaggctagctattcataacagcaaaagccaacaaaaagttgtttcaaaggcaatcaggcatcaag

SEQ ID NO: 66128 - DNA, 234 bp, Homo sapiens
agcgagactccatctcaaaaaacaaaaaaagctcaaaacaaaagacgggctttccagagagagggaggagagaagacagcaaaaaccgtaaattgatctgtttccacttagccatgtttctaagtcacttttttgtctgggaactgtttcccggaatttaatttttttctgaggcagtgatcatatgcactgcagcctggatgatatatgcaatcatatgatcgcttgaggtgt

SEQ ID NO: 66129 - DNA, 1057 bp, Homo sapiens
aaggcagcatagtaaccattctctaaccaataatttcctgtatggaaacttccagtttttgcatgtttacttctgtagactttttggcaactacaggaattttgattcctgtctacccgtatggcaggccattcctcttggggctgattaggaaaagcaggaactatgagtgaagtatagaccagaagaggaggcagatgtccaagtcagtgtagaggtgttggcaggggaaccttgggagcagagagggctgacagctccttcacttgggcacggagctgggattcagcaaagagggacccatggtttatcctgggcataggcaggctgatgaaatgtgtgcctaggaaggaggataaataaaggatctgcagaagctgttctgtgtctaccattggaggcactctgcatatttgagaggagagtgggacgcagagagtaaggtcagcagtttgagggatttaataaaaaacagatactgacagtctgaatggaggaccagccagaaaagaatgcctcctatcttatttatgtctgaatatggcaaatgtataagcatctcctggcaaatgtggggaaaggagattctgctaagttttgagctgggaagaaatagtaaatgggagttaatggtataggaggtctttattagtaattaagacatataaagcatcactgacatgctctgtatttaattatttgttttaatgacttctaaaatccttttatagtggcttttataagttcagttctgaccttagtctctagtcacttttttcccataaagtttgaagttcaatagcaaatgtttctaatttgaagtttcagaaggccttcagttagtgattgggaaaggactatatattagctgtcaaaaaaagttgtctagataacccatgttgcgaggattcagatacaattgtaagagccccatttattttttgagtgctttccaactggaatcagtgatgggcatttatctacatgatctaatttcattttcactataattccaggaatgggcattcttaacttcatttcacagatgaggcaactg

SEQ ID NO: 66130 - DNA, 303 bp, Homo sapiens
agcttgggctctggaggcccttgggggcggctgcgccgggaaccctggccctttatccccaaccccaccccagaaatagggtccccggaggcgaacaagccgaggggcggagtgggccagggatcacctgccccgcaatgacctgcgccccgcccccaggcctgctggagctctcgcccgtggagcggggcgtggtgagcatcttcggcgtggccagccggttcttcgtggccatgagcagcaagggcaagctctatggctcggtgagtaccgcaggggtctggctaggcacctagttgggaa

SEQ ID NO: 66131 - DNA, 1220 bp, Homo sapiens
gggagcgggcgagtaggagggggcgccgggctatatatatagcggcctcggcctcgggcgggcctggcgctcagggaggcgcgcactgctcctcagagtcccagctccagccgcgcgctttccgcccggctcgccgctccatgcagccggggtagagcccggcgcccgggggccccgtcgcttgcctcccgcacctcctcggttgcgcactcccgcccgaggtcggccgtgcgctcccgcgggacgccacaggcgcagctctgccccccagcttcccgggcgcactgaccgcctgaccgacgcacgccctcgggccgggatgtcggggcccgggacggccgcggtagcgctgctcccggcggtcctgctggccttgctggcgccctgggcgggccgagggggcgccgccgcacccactgcacccaacggcacgctggaggccgagctggagcgccgctgggagagcctggtggcgctctcgttggcgcgcctgccggtggcagcgcagcccaaggaggcggccgtccagagcggcgccggcgactacctgctgggcatcaagcggctgcggcggctctactgcaacgtgggcatcggcttccacctccaggcgctccccgacggccgcatcggcggcgcgcacgcggacacccgcgacagcctgctggagctctcgcccgtggagcggggcgtggtgagcatcttcggcgtggccagccggttcttcgtggccatgagcagcaagggcaagctctatggctcgcccttcttcaccgatgagtgcacgttcaaggagattctccttcccaacaactacaacgcctacgagtcctacaagtaccccggcatgttcatcgccctgagcaagaatgggaagaccaagaaggggaaccgagtgtcgcccaccatgaaggtcacccacttcctccccaggctgtgaccctccagaggacccttgcctcagcctcgggaagcccctgggagggcagtgccgagggtcaccttggtgcactttcttcggatgaagagtttaatgcaagagtaggtgtaagatatttaaattaattatttaaatgtgtatatattgccaccaaattatttatagttctgcgggtgtgttttttaattttctggggggaaaaaaagacaaaacaaaaaaccaactctgacttttctggtgcaacagtggagaatcttaccattggatttctttaacttgt

SEQ ID NO: 66132 - DNA, 402 bp, Homo sapiens
taacagtctggactaaagactatctctggctcagtctctaacaagctgagaaatgacccagccccacagtcatcctggctgacttcttccttgcatctagttcttgctgttcaattgagcttgcacaaattttatccttcaagataaatgtgatgatatttgacagttgccttatggctagctgaagaaagtctttgtcagctaagaaacaggaaaaggatcctttaactttctgcacaggctttctttatctctggttcatggttccttcctcatgttaaactcgttccttcatacacagccacacaaagtccttgccctttcctgaccccagtcctgcacctgatgacttcagttcctctctatgactttgaacttggaataaatttttattttcacttg

SEQ ID NO: 66133 - DNA, 417 bp, Homo sapiens
ggatccatggaaagcaccttcattcaatgtaaatgaagaagtatttgctgacacaaatgatacctacattaagtggattttcctgaagaacaattatggagaattgaggagctgctttttctgcattttgcaaggcaagatagggaatacagttaggcctccaagagcacattttcacaattgaaagtatgtgtgagtgtggggtttggggggttggtggtgagaggacagtggttgaatatgctttgccagggatgcctatgatggcaagaacttgctggaaaagtgatcccgtggagtctctagaagaaacccagaacaatgaggctggccacaggtaaatcttaggcataagaaaacaagagtgtggatgatccaacagggagggggagtataaagagaattgggaagcagaat

SEQ ID NO: 66134 - DNA, 485 bp, Homo sapiens
atccaggtagcctcaccctgagtggcagcctggctgggtgagttctaaaaatgcccaagacctccaagactaggtgagatctgaagtaatgaaatgcctccattcactaaaggcctgaaattgtcctgactgcctcagtcccacggaccaagaagagcctttcaagctgtgatcccaatacttgtggctgctgtgagaataaggaaagcagtctaggcctccagtggaaggatcagatgtttgcccttcatacctcagagagccttcatccaagtaagatgggtggtgaggagctgtggatgacagcatgaaggatgaggactgatgcagcagccataattagattataggtttccatgggatgtgccatgactgcttacaaattgggcccagccatggaattgagttatcaactaagctgattcctgaggcacagatcatcctgtcctccacaacatgattaaagactacaaatccgctcaaaa

SEQ ID NO: 66135 - DNA, 2575 bp, Homo sapiens
cggcccgctggagaggaagcccgagagctgccgcgcgcctgccggacgagggcgtagaagccaggcgtcagagcccgggctccggtggggtcccccacccggccctcgggtcccccgccccctgctccctgcccatcccagcccacgcgaccctctcgcgcgcggaggggcgggtcctcgacggctacgggaaggtgccagcccgccccggatgggcatcgtggagccgggttgcggagacatgctgacgggcaccgagccgatgccggggagcgacgagggccgggcgcctggcgccgacccgcagcaccgctacttctacccggagccgggcgcgcaggacgcggacgagcgtcgcgggggcggcagcctggggtctccctacccggggggcgccttggtgcccgccccgccgagccgcttccttggagcctacgcctacccgccgcgaccccaggcggccggcttccccggcgcgggcgagtccttcccgccgcccgcggacgccgagggctaccagccgggcgagggctacgccgccccggacccgcgcgccgggctctacccggggccgcgtgaggactacgcgctacccgcgggactggaggtgtcggggaaactgagggtcgcgctcaacaaccacctgttgtggtccaagtttaatcagcaccagacagagatgatcatcaccaagcagggacggcggatgttcccattcctgtcatttactgtggccgggctggagcccaccagccactacaggatgtttgtggacgtggtcttggtggaccagcaccactggcggtaccagagcggcaagtgggtgcagtgtggaaaggccgagggcagcatgccaggaaaccgcctgtacgtccacccggactcccccaacacaggagcgcactggatgcgccaggaagtttcatttgggaaactaaagctcacaaacaacaagggggcgtccaacaatgtgacccagatgattgtgctccagtccctccataagtaccagccccggctgcatatcgttgaggtgaacgacggagagccagaggcagcctgcaacgcttccaacacgcatatctttactttccaagaaacccagttcattgccgtgactgcctaccagaatgccgagattactcagctgaaaattgataataacccctttgccaaaggattccgggagaactttgagtccatgtacacatctgttgacaccagcatcccctccccgcctggacccaactgtcaattccttgggggagatcactactctcctctcctacccaaccagtatcctgttcccagccgcttctaccccgaccttcctggccaggcgaaggatgtggttccccaggcttactggctgggggccccccgggaccacagctatgaggctgagtttcgagcagtcagcatgaagcctgcattcttgccctctgcccctgggcccaccatgtcctactaccgaggccaggaggtcctggcacctggagctggctggcctgtggcaccccagtaccctcccaagatgggcccggccagctggttccgccctatgcggactctgcccatggaacccggccctggaggctcagagggacggggaccagaggaccagggtccccccttggtgtggactgagattgcccccatccggccggaatccagtgattcaggactgggcgaaggagactctaagaggaggcgcgtgtccccctatccttccagtggtgacagctcctcccctgctggggccccttctccttttgataaggaagctgaaggacagttttataactattttcccaactgagcagatgacatgatgaaaggaacagaaacagtgttattaggttggaggacaccgactaatttgggaaacggatgaaggactgagaaggcccccgctccctctggcccttctctgtttagtagttggttggggaagtggggctcaagaaggattttggggttcaccagatgcttcctggcccacgatgaaacctgagaggggtgtccccttgccccatcctctgccctaactacagtcgtttacctggtgctgcgtcttgcttttggtttccagctggagaaaagaagacaagaaagtcttgggcatgaaggagctttttgcatctagtgggtgggaggggtcaggtgtgggacatgggagcaggagactccactttcttcctttgtacagtaactttcaaccttttcgttggcatgtgtgttaatccctgatccaaaaagaacaaatacacgtatgttataaccatcagcccgccagggtcagggaaaggactcacctgactttggacagctggcctgggctccccctgctcaaacacagtggggatcagagaaaaggggctggaaaggggggaatggcccacatctcaagaagcaagatattgtttgtggtggttgtgtgtgggtgtgtgttttttctttttctttctttttattttttttgaatgggggaggctatttattgtactgagagtggtgtctggatatattccttttgtcttcatcactttctgaaaataaacataaaactgttgaa

SEQ ID NO: 66136 - DNA, 198 bp, Homo sapiens
acctgcaggtcctagttggtcttgacaaatttgaggagatgtggctgagactgaagaagagataccaaataggactcctcataaagtagaaaccttttactcaaaagggcatttttcagggcatgttgtagttcctgcctgtttctttactgtctgtgaccttttttaaatattattaaacattctttcacaacatcg

SEQ ID NO: 66137 - DNA, 2493 bp, Homo sapiens
tgaggtcgtgaacagggaatttaacacatatgttaatgagaaaatgccaattaaaagttgttaattttatcgctaataagtgaattttttccccatatcccttctgggcttactgtgttcagtttttgtcagcgtctcataagaaggctatttttatttctattagagagacagctatgatggcttggataatcaggatggatgggaatgaggagcttgagaattccttaagttcacctcttaccttggctggaaagttgcaatgattttcatcagtcatgctctaacctagaaagccagaaatccaggaattgtgggaccagcatatcagcaactcgaagaatcaaggatcccagaccaggatacgataccttgccaagggatagaggtcaggaagactatatcccacctgcactatacagcctgtggtgactctgtctgaaagacccctggacttaaagtattcatccagtggtttaaaaacccaacgaaatacatcaataaatatgcaactgccttcaagagagacaaacccctattttaatagcttggagcaaaaggacctggtgggctattcatccacaagggccagttctgtgcccatcatcccttcagtgggtttagaggaaacctgcctgcaaatgccagggatttctgaagtcaaaagcatcaaatggtgcaaaaactcctattcagctgacgttgtcaatgtgagtattccagtcagcgattgtcttatagcagaacaacaagaagtgaaaatattgctagaaactgtccaggagcagatccgaattctgactgatgccagacggtcagaagactacgaactggccagcgtagaaaccgaggacagtgcaagcgaaaacacagcctttctccccctgagtcccacagccaaatcagaacgagaggcgcaatttgtcttaagaaatgaaatacaaagagactctgcattgaccaagtgacttgagatgtaggaatctgtgcattctatgctttgctcaacaggaaagagaggaaatcaaatacaaattatttatatgcattaatttaagagcatctacttagaagaaaccaaatagtctatcgccctcatatcatagtgttttttaacaaaatatttttttaagggaaagaaatgtttcaggagggataaagcttaccattaaagcttttgggtagaattctgaatccaatttcgtttagtcccaacactgtcctctttggctcttaggaagatgtgggcaattcagacccttggccccacagtgccagtgtctcattaaaaaacactggcagttacctggtttcaaaaagaggagagctgcatcccgcaggtggatgcaccagtgagcaggtggctcttgccatttggcttgccagtcccaagccctaaatttctattcacccaatagcctcatcacaggttatgtcatgtcgacacatgtagtgttttctatttgatttttggagaatgccacaaaagactctgcaatgggaaggaggacaggagatagaaggagaaaccgggggcaatcttaactactcttgtgtgccaccttcctctgagatttgaatgcacagatctcagctggaggtatgaaattattacagaaaaagagacaaaaaaatccttatatcgtgtcagagcgtttctcagtttttgtgtgcctgtgtgcacatgtgtgtgcgagcgtgtgtgtgtgtggacttgctcacgcgggcacatatgctgtaagcacatgtgttcattgtgcgtatgtgtgtgcatgtgtgcgcgtattacgcttgctaaaatttgttctgaaacatcagggaatctactattcagaaaaattatttccctcttagatcttttcactttaaatttttccattaagtataaagttcagttagttcttaaatcaaggtcacttgcatggtgggggtcgtataaaactcttgacactgtctagacccttttctggatgtgaatacttttgaagaggatcaactattggcctcattaatgatatccagtatccataaggtgagttcatcaaggatgtgtgtttattttgaatcatgcctacttaaattattaatacaagacaattaacaaattgacagttaccatttgctttctcatcattcctcattaccatttattttatagcaagtctgctatgtgtggaccagggcttcggcttctgtggttagtatgggaagaataaattgttgaaataaaaatacccagactattcagttcacaagaagccccccaaaagaacagtaaattgtgttgtatgttcatttggaataaagcaatatttttaccactgctaaggtgaactgaaacctctcctgaagatttgtctgtttatttaccctcactttcatgggacatatgaggaaattagtgttcacatatccagtctttttccaattattggtggtgttgagttgttatgtttacactgttttaaataaaaaggcaccgtatttgaaagc

SEQ ID NO: 66138 - DNA, 405 bp, Homo sapiens
tgttttcattccaccccagcaggagtctatcctcttgctgcagcccagggcaaagaagtggcatgctccataggaatgccttcagaaggacacccccgtcaccccgaagtaggctaggtggaattgtgggaccagcatatcagcaactcgaagaatcaaggatcccagaccaggatacgataccttgccaagggtaggtcttaaaacagcagtggaatttagggagggtgtctttaatgccatagctttaagttaagttttaagttccttggggttttattcattgatttattcattaactggctatatatgcttactgccatctttgttctacaaaaggtgaaccaactttgatgtatagttgtgatggaaaataggtatcagggaaacattagattagaaaga

SEQ ID NO: 66139 - DNA, 2548 bp, Homo sapiens
tgaggtcgtgaacagggaatttaacacatatgttaatgagaaaatgccaattaaaagttgttaattttatcgctaataagtgaattttttccccatatcccttctgggcttactgtgttcagtttttgtcagcgtctcataagaaggctatttttatttctattagagagacagctatgatggcttggataatcaggatggatgggaatgaggagcttgagaattccttaagttcacctcttaccttggctggaaagttgcaatgattttcatcagtcatgctctaacctagaaagccagaaatccaggaattgtgggaccagcatatcagcaactcgaagaatcaaggatcccagaccaggatacgataccttgccaagggatagaggtcaggaagactatatcccacctgcactatacagcctgtggtgactctgtctgaaagacccctggacttaaagtattcatccagtggtttaaaaacccaacgaaatacatcaataaatatgcaactgccttcaagagagacaaacccctattttaatagcttggagcaaaaggacctggtgggctattcatccacaagggccagttctgtgcccatcatcccttcagtgggtttagaggaaacctgcctgcaaatgccagggatttctgaagtcaaaagcatcaaatggtgcaaaaactcctattcagctgacgttgtcaatgtgagtattccagtcagcgattgtcttatagcagaacaacaagaagtgaaaatattgctagaaactgtccaggagcagatccgaattctgactgatgccagacggtcagaagactacgaactggccagcgtagaaaccgaggacagtgcaagcgaaaacacagcctttctccccctgagtcccacagccaaatcagaacgagaggcgcaatttgtcttaagaaatgaaatacaaagagactctgcattgaccaagtgacttgagatgtaggaatctgtgcattctatgctttgctcaacaggaaagagaggaaatcaaatacaaattatttatatgcattaatttaagagcatctacttagaagaaaccaaatagtctatcgccctcatatcatagtgttttttaacaaaatatttttttaagggaaagaaatgtttcaggagggataaagcttaccattaaagcttttgggtagaattctgaatccaatttcgtttagtcccaacactgtcctctttggctcttaggaagatgtgggcaattcagacccttggccccacagtgccagtgtctcattaaaaaacactggcagttacctggtttcaaaaagaggagagctgcatcccgcaggtggatgcaccagtgagcaggtggctcttgccatttggcttgccagtcccaagccctaaatttctattcacccaatagcctcatcacaggttatgtcatgtcgacacatgtagtgttttctatttgatttttggagaatgccacaaaagactctgcaatgggaaggaggacaggagatagaaggagaaaccgggggcaatcttaactactcttgtgtgccaccttcctctgagatttgaatgcacagatctcagctggaggtatgaaattattacagaaaaagagacaaaaaaatccttatatcgtgtcactaaaatcatgctaatagaaatgtttttccttgagattgtttagaggctctggaggagcgtttctcagtttttgtgtgcctgtgtgcacatgtgtgtgcgagcgtgtgtgtgtgtggacttgctcacgcgggcacatatgctgtaagcacatgtgttcattgtgcgtatgtgtgtgcatgtgtgcgcgtattacgcttgctaaaatttgttctgaaacatcagggaatctactattcagaaaaattatttccctcttagatcttttcactttaaatttttccattaagtataaagttcagttagttcttaaatcaaggtcacttgcatggtgggggtcgtataaaactcttgacactgtctagacccttttctggatgtgaatacttttgaagaggatcaactattggcctcattaatgatatccagtatccataaggtgagttcatcaaggatgtgtgtttattttgaatcatgcctacttaaattattaatacaagacaattaacaaattgacagttaccatttgctttctcatcattcctcattaccatttattttatagcaagtctgctatgtgtggaccagggcttcggcttctgtggttagtatgggaagaataaattgttgaaataaaaatacccagactattcagttcacaagaagccccccaaaagaacagtaaattgtgttgtatgttcatttggaataaagcaatatttttaccactgctaaggtgaactgaaacctctcctgaagatttgtctgtttatttaccctcactttcatgggacatatgaggaaattagtgttcacatatccagtctttttccaattattggtggtgttgagttgttatgtttacactgttttaaataaaaaggcaccgtatttgaaagc

SEQ ID NO: 66140 - DNA, 2494 bp, Homo sapiens
tgaggtcgtgaacagggaatttaacacatatgttaatgagaaaatgccaattaaaagttgttaattttatcgctaataagtgaattttttccccatatcccttctgggcttactgtgttcagtttttgtcagcgtctcataagaaggctatttttatttctattagagagacagctatgatggcttggataatcaggatggatgggaatgaggagcttgagaattccttaagttcacctcttaccttggctggaaagttgcaatgattttcatcagtcatgctctaacctagaaagccagaaatccaggaattgtgggaccagcatatcagcaactcgaagaatcaaggatcccagaccaggatacgataccttgccaagggatagaggtcaggaagactatatcccacctgcactatacagcctgtggtgactctgtctgaaagacccctggacttaaagtattcatccagtggtttaaaaacccaacgaaatacatcaataaatatgcaactgccttcaagagagacaaacccctattttaatagcttggagcaaaaggacctggtgggctattcatccacaagggccagttctgtgcccatcatcccttcagtgggtttagaggaaacctgcctgcaaatgccagggatttctgaagtcaaaagcatcaaatggtgcaaaaactcctattcagctgacgttgtcaatgtgagtattccagtcagcgattgtcttatagcagaacaacaagaagtgaaaatattgctagaaactgtccaggagcagatccgaattctgactgatgccagacggtcagaagactacgaactggccagcgtagaaaccgaggacagtgcaagcgaaaacacagcctttctccccctgagtcccacagccaaatcagaacgagaggcgcaatttgtcttaagaaatgaaatacaaagagactctgcattgaccaagtgacttgagatgtaggaatctgtgcattctatgctttgctcaacaggaaagagaggaaatcaaatacaaattatttatatgcattaatttaagagcatctacttagaagaaaccaaatagtctatcgccctcatatcatagtgttttttaacaaaatatttttttaagggaaagaaatgtttcaggagggataaagcttaccattaaagcttttgggtagaattctgaatccaatttcgtttagtcccaacactgtcctctttggctcttaggaagatgtgggcaattcagacccttggccccacagtgccagtgtctcattaaaaaacactggcagttacctggtttcagccatttggcttgccagtcccaagccctaaatttctattcacccaatagcctcatcacaggttatgtcatgtcgacacatgtagtgttttctatttgatttttggagaatgccacaaaagactctgcaatgggaaggaggacaggagatagaaggagaaaccgggggcaatcttaactactcttgtgtgccaccttcctctgagatttgaatgcacagatctcagctggaggtatgaaattattacagaaaaagagacaaaaaaatccttatatcgtgtcactaaaatcatgctaatagaaatgtttttccttgagattgtttagaggctctggaggagcgtttctcagtttttgtgtgcctgtgtgcacatgtgtgtgcgagcgtgtgtgtgtgtggacttgctcacgcgggcacatatgctgtaagcacatgtgttcattgtgcgtatgtgtgtgcatgtgtgcgcgtattacgcttgctaaaatttgttctgaaacatcagggaatctactattcagaaaaattatttccctcttagatcttttcactttaaatttttccattaagtataaagttcagttagttcttaaatcaaggtcacttgcatggtgggggtcgtataaaactcttgacactgtctagacccttttctggatgtgaatacttttgaagaggatcaactattggcctcattaatgatatccagtatccataaggtgagttcatcaaggatgtgtgtttattttgaatcatgcctacttaaattattaatacaagacaattaacaaattgacagttaccatttgctttctcatcattcctcattaccatttattttatagcaagtctgctatgtgtggaccagggcttcggcttctgtggttagtatgggaagaataaattgttgaaataaaaatacccagactattcagttcacaagaagccccccaaaagaacagtaaattgtgttgtatgttcatttggaataaagcaatatttttaccactgctaaggtgaactgaaacctctcctgaagatttgtctgtttatttaccctcactttcatgggacatatgaggaaattagtgttcacatatccagtctttttccaattattggtggtgttgagttgttatgtttacactgttttaaataaaaaggcaccgtatttgaaagc

SEQ ID NO: 66141 - DNA, 527 bp, Homo sapiens
gcaacactaagcacccgttcccaacaatttggtggcccgtaggggattaacattcccctctgggacagtctttggtcctctctcatggggaggtgccccactgcccattgtagcagcccctggaggacagccaggacctacccggagcaaggaatatagttggattctcagcaacgcagggaaagagagaggcttgcaggaccacagtgaccaggtgactccatgcacgggccaaggtcaaaggtctcttagcacaggccaccactagaatttccagcacaccagcaccaacccagggaccaccttctcatcaaagggtggaaggaagggaaactcgagcccacctgggaaggcccctatctggtgctgttaaccaccgagactgccgtccgcacagctgagaaaggatggacccaccatactctagttaagaaagcagcttcctcgtcagaatcatgggttgctgtaccaggattgagtcctaccaagttgaagttaaagaaagcttaatttttatataccttcta

SEQ ID NO: 66142 - DNA, 511 bp, Homo sapiens
ataaactgtggcacactcttagatcttttaaagagatttagtaggaactccatttgctgatatagagcagtctctgagttatgttgtgcaatgaaaaaatcaagcagcagagcagtataaatggtgtaatccattttccacataacttttaaaatgacacaccatatactttggtaaatgcacaaattctttttcaatggaaaatctacaagaagctgataacagtggcaactttgagggaaggatgagaagagaggttcttacctttcattcagtactgcttgattttcctacttcctactttgtgcattgattagttttagtggagaacttcagtaagtgtcatctgaaaggtggagttatgggacaattttggtttctcctttagagttttctgtaaaggatattcaataattgaagattctcaggccatataccagatacaccaagtttgggtggagatgctggcatgggactctagaaatcagcttgtcgtgtgattctgctcatc

SEQ ID NO: 66143 - DNA, 471 bp, Homo sapiens
aggctctggggagtgagtatgaggaaagagcaaacgtgggtgacgctgtcagggagtgaaaggatggaatgaggtgaggcgctagtttgagtagtttgaggccaaagcagggtggaaggacggcggtggtggtttttataggatcaaacagattttgacaaaatgaaacaaaagctatctgacaaaagggtagattgaataaatatgctggatatgtacacaggttaaagtgtttccatcacatgcagccagttcctgcttagttccatgtgagttaggcactgtgagggacggtcggtggcagagttttaattccaggcgagtacagcagccgggctgcttcctctattgctcaactgatgtgtgttcagaggatccaaactcatttcactgtcattctaaggaaaacatcatggacaatgtaaattttattctctttctaccctgtttaaaaaaactaaaaaaaaaacc

SEQ ID NO: 66144 - DNA, 1656 bp, Homo sapiens
tgcaacggagggtgttcctccctgagaaaagtagtagccagattgcctaaaaagatagacagggaagcttggcaccagaattgggaagagaaagaaagaacatatgtgaaggattggaacatgttcaagaaaagaatttaaaaggaaaggggcgtagaattcttggaatgacttacagaaaagcttaccaaggacaatcaccagattcagcctttccatttgctccatttgcacttgtgaaaaattacagaagctgtgttcataaggcttattaggtaattggtgataaagccagcagagagaggaaaatgagaatttcagctgaactaaggctaggtcacttttaacaatttgtgatgacccttttctctgcaacagagaagcttaggagcccggcactagatccagcccaccatttgctagattgggccaaatgtattttagattgtttgagaaaatgtccctaaaatgtgatattatggacattcctacactgaagatgaactaagtcttacaataaagaaaacaacatgtatataacccaacatctgactgtcctgcatacctcagctccatacagaatttcctataacttatgcacaaatttaccgcagttctggagtagaatataataaattaatgtccatgtctttagagcaaattaaagctggaaaacacagcataactcgggtcaggttaccagcgaggattgctatctctgtctttttttatctccttccttctttccttccttcctatttttttctgtggcagtactatggctcttgagagccaatgttaaatcttcaggaagaactggtttaagagttgccactaatactttgccagcaaagaccaaaactggcatttgcatggtttaattcaggatataagaaaagggaattttattaattaagctataagctccttgaagattcatgaataaaattatcaccttgaattgacctctacagaaagggcatttggctgctggtttcatagtaactagattgttaaacaaatggcatgagtttctttccttcacagggatcctatatgttattggtctaaaatccttgggtcttaaaggattttagcaagattttagcagacagaaactggatggggaccacatctccagcagaaacaatggcataggtaagcaaagaagagtggtagctagggcaagctccaagaattgccataaagaccctgttctgcttaacatgaagggcaagagaaaaatgtagttgagtttaagagagaaaaagtaggtcagagcagattcattaccttactaagaagtttggattttattctgtaaacagagtagaaatataaggtaatttgatctacgttttaggattattctggccctggtgtgcaggatgactataatgtgaatctggaaggagatagacaagttaggaagaagtttgtggtccaggccagagataactggagtccaccctagggtgttggtgggagaggtaggagatgaatagagtctatagaatttaacaagatattggccgggcgcagtggctcatgcctgtaatcccagcactttgggaggcctaggcgggcgcatcacgaggtcaggaaatcgagaccatcctggctaacacggtgaaaccctgtctctactaaaataca

SEQ ID NO: 66145 - DNA, 426 bp, Homo sapiens
caccagccagcaagaaggatacatgaacaactctagttcagcgatgatcatctcaagattttttaaaatttgagtaaggaaatcagacggtaaaatgtcctagtttttggcctattctaaaggcatttcattactaccaacaaaacgcttgcacaggggcaatgagccccctacgactgcatgcagcaggcacagcgacactgcacagtgcaacggttcaggcaagtggaaagggggaaacggcagatgccttccacacgaacactttacctatcgtcgtttttccagcattcttcacacctttccttcacgctctaataataagatggatacgctctaataataagatggctacctgactgtccggcatttgcattcagtactgcatattcctggtggtgggtacaaccccatctttgagcaaag

SEQ ID NO: 66146 - DNA, 428 bp, Homo sapiens
cccctggttcacgctttggccctggtttcgattcgagctcggttccccttgcgggtctcataatgcatgtggcacttaggtccaaggtctccagagggtgaaagctggagtctgtcaatgtcctactgagacagcacagccaacctagctagcaacatttgttttagtctgaacaatatatacttatagaattcagtcaaagatacacaatctgaaacagcttcatggggtggactctaacagtagttgcaatgttttagaatgagacttacttctctgctatctagatctgaactccttggcttctttacttagttcaagccccagcctaggaaagccagttacataaaagttggctcaggagtcttagagctttacctaaatatgagacccgcagggggatcctctagagccgacgtaatactgga

SEQ ID NO: 66147 - DNA, 2682 bp, Homo sapiens
tctgagccttggaagggctgcaagagggaggcagagtcctttggacaaagagccacttactgctctgatctgcttgctgagtcagcaaaccggctggaaagggggcaggaaatgtcctcccaagcccccatgccagacaagctggcaggtgtccctttgggaacctggcagcttgctggtgtcccccctgaacaccgtggtcctgcggacccagaactcacaaatgtcacgcaggagccagtttgtgcaggggagcccaggctgtggctggaccatggctgcgacccccatggcctgggtgggtcctgctagtgcatcctctgctctccaggggatgacgtgcgtcagtacctacgtcagtacttgatgggccctcggggtccgccagggccaccaggagccagtggagatgggtccctcctgtctttggactatgcagagctgagtagtcgcattctcagctacatgtcgagttctgggatcagcattgggcttcctggtcccccggggccccctggcttgccgggaacctcctatgaggagctcctctccttgctgcgagggtctgaattcagaggcatcgttggacccccaggtcccccgggtccaccagggatcccaggcaatgtgtggtccagcatcagcgtggaggacctctcgtcttacttacatactgccggcttgtcattcatcccaggccctccaggacctcctggtcccccagggcctcgagggcccccgggtgtctcaggagccctggcaacctatgcagctgaaaacagcgacagcttccggagcgagctgatcagctacctcacaagtcctgatgtgcgcagcttcattgttggccccccaggccctcctgggccgcagggaccccctggggacagccgcctcctgtccacggatgcctcccacagtcggggtagcagctcctcctcacacagctcatctgtcaggcggggcagctcctacagctcttccatgagcacaggaggaggtggtgcaggctccctgggtgcaggcggtgcctttggtgaagctgcaggagacaggggtccctatggcactgacatcggcccaggcggaggctatggggcagcagcagaaggcggcatgtatgctggcaatggcggactattgggagctgactttgctggagatctggattacaatgagctggctgtgagggtgtcagagagcatgcagcgtcagggcctactgcaagggatggcctacactgtccagggcccaccaggccagcctgggccacaggggccacccggcatcagcaaggtcttctctgcctacagcaacgtgactgcggacctcatggacttcttccaaacttatggagccattcaaggaccccctgggcaaaaaggagagatgggcactccaggacccaaaggtgacaggggccctgctgggccaccaggtcatcctgggccacctggccctcgaggacacaagggagaaaaaggagacaaaggtgaccaagtctatgctgggcggagaaggagaagaagtattgctgtcaagccgtgagctagccatggcaggacagctcctggaccaggtctcataatgcatgtggcacttaggtccaaggtctccagagggtgaaagctggagtctgtcaatgtcctactgagacagcacagccaacctagctagcaacatttgttttagtctgaacaatatatacttatagaattcagtcaaagatacacaatctgaaacagcttcatggggtggactctaacagtagttgcaatgttttagaatgagacttacttctctgctatctagatctgaactccttggcttctttacttagttcaagccccagcctaggaaagccagttacataaaagttggctcaggagtcttagagctttacctaaatatgagacccagaaaacggaggatgggggtggggcgccttcctggaggtgacacttgatgggggtgtgttctggttactgttctaaggctgtgccatcagctccttcctcccctgttcattctgcattctctagtcagttggctaagaagtgactcttgcaactaaaaaaattaagaaattcacttcccctctaggaggtgatgatagggtttctaatggttatatgtatatcacattcccatttgcttagaaagtctgattgtagctatgattgtccgtaggcccatactagagttcatggatatgttatactgaaccaggccagagcaaacagaaaaagaaggttgagggcaatggacaaggaaggaataaagggagaagagggaaaacagaaaacctgatgctggggacacagcatcagctcaagacgtcaccctccattctgcactcagaaaatggcacttgggggactgggcgcagttggtctttaaccacttttcaatgtctaaaaacatttgtttgtggtctataagatgaaacatcatttcaatcgtaaaatttcccattaaagaagtttttttttctaaacaaaaacaacgaggcaaccacgagaaagagagaaagcgagaaacaaaaaagaagagagaaagaagacagaagaaaaaacaagggagagacagagcacaacggagagagcgagcgacgaggagagacgcaacagagagcaagcagcgagcaggcaggaggacgagaggtagacgcgggacgggagc

SEQ ID NO: 66148 - DNA, 1236 bp, Homo sapiens
ggccacaagatatgttttaacttcctactgatcttctaactttcaggtgaccaagtctatgctgggcggagaaggagaagaagtattgctgtcaagccgtgagctagccatggcaggacagctcctggaccaggtctcataatgcatgtggcacttaggtccaaggtctccagagggtgaaagctggagtctgtcaatgtcctactgagacagcacagccaacctagctagcaacatttgttttagtctgaacaatatatacttatagaattcagtcaaagatacacaatctgaaacagcttcatggggtggactctaacagtagttgcaatgttttagaatgagacttacttctctgctatctagatctgaactccttggcttctttacttagttcaagccccagcctaggaaagccagttacataaaagttggctcaggagtcttagagctttacctaaatatgagacccagaaaacggaggatgggggtggggcgccttcctggaggtgacacttgatgggggtgtgttctggttactgttctaaggctgtgccatcagctccttcctcccctgttcattctgcattctctagtcagttggctaagaagtgactcttgcaactaaaaaaattaagaaattcacttcccctctaggaggtgatgatagggtttctaatggttatatgtatatcacattcccatttgcttagaaagtctgattgtagctatgattgtccgtaggcccatactagagttcatggatatgttatactgaaccaggccagagcaaacagaaaaagaaggttgagggcaatggacaaggaaggaataaagggagaagagggaaaacagaaaacctgatgctggggacacagcatcagctcaagacgtcaccctccattctgcactcagaaaatggcacttgggggactgggcgcagttggtctttaaccacttttcaatgtctaaaaacatttgtttgtggtctataagatgaaacatcatttcaatcgtaaaatttcccattaaagaagtttttttttctaaacaaaaacaacgaggcaaccacgagaaagagagaaagcgagaaacaaaaaagaagagagaaagaagacagaagaaaaaacaagggagagacagagcacaacggagagagcgagcgacgaggagagacgcaacagagagcaagcagcgagcaggcaggaggacgagaggtagacgcgggacgggagc

SEQ ID NO: 66149 - DNA, 1541 bp, Homo sapiens
ctgctttcccagcacctgcctcactgcataggttcccacgggtctgctccagagacaccagtctcatgagaaatctccagttattaacatttgagatgctcaaaattagacaaattctataaattctgaactttgtttcctcttacacgtccaaactccatcactatctctctgtgttactctgaacaaatgacttgatgtcccaagcttatggagccattcaaggaccccctgggcaaaaaggagagatgggcactccaggacccaaaggtgacaggggccctgctgggccaccaggtcatcctgggccacctggccctcgaggacacaagggagaaaaaggagacaaaggtgaccaagtctatgctgggcggagaaggagaagaagtattgctgtcaagccgtgagctagccatggcaggacagctcctggaccaggtctcataatgcatgtggcacttaggtccaaggtctccagagggtgaaagctggagtctgtcaatgtcctactgagacagcacagccaacctagctagcaacatttgttttagtctgaacaatatatacttatagaattcagtcaaagatacacaatctgaaacagcttcatggggtggactctaacagtagttgcaatgttttagaatgagacttacttctctgctatctagatctgaactccttggcttctttacttagttcaagccccagcctaggaaagccagttacataaaagttggctcaggagtcttagagctttacctaaatatgagacccagaaaacggaggatgggggtggggcgccttcctggaggtgacacttgatgggggtgtgttctggttactgttctaaggctgtgccatcagctccttcctcccctgttcattctgcattctctagtcagttggctaagaagtgactcttgcaactaaaaaaattaagaaattcacttcccctctaggaggtgatgatagggtttctaatggttatatgtatatcacattcccatttgcttagaaagtctgattgtagctatgattgtccgtaggcccatactagagttcatggatatgttatactgaaccaggccagagcaaacagaaaaagaaggttgagggcaatggacaaggaaggaataaagggagaagagggaaaacagaaaacctgatgctggggacacagcatcagctcaagacgtcaccctccattctgcactcagaaaatggcacttgggggactgggcgcagttggtctttaaccacttttcaatgtctaaaaacatttgtttgtggtctataagatgaaacatcatttcaatcgtaaaatttcccattaaagaagtttttttttctaaacaaaaacaacgaggcaaccacgagaaagagagaaagcgagaaacaaaaaagaagagagaaagaagacagaagaaaaaacaagggagagacagagcacaacggagagagcgagcgacgaggagagacgcaacagagagcaagcagcgagcaggcaggaggacgagaggtagacgcgggacgggagc

SEQ ID NO: 66150 - DNA, 2133 bp, Homo sapiens
cccaggccccagaggacaccaaggcgagcaaggcctcccaggtttctcaacctcagggtccagttctttcggactcaaccttcagggaccaccaggcccacctggcccccagggaccaaaaggtgacaaaggtgatccaggtgttccaggggctcttggcattcctagtggtccttctgaagggggatcatcaagtaccatgtacgtgtcaggcccgccaggccccctgggccccctgggcctccgggctctatcagcagctctggccaggagattcagcagtacatctctgagtacatgcagagtgacagtattagatcttacctatccggagttcagggtcccccaggcccacctggtcccccaggacctgtcaccaccatcacaggcgagactttcgactactcagagctggcaagccacgttgtgagctacttacggacttcggggtacggtgtcagcttgttctcgtcctccatctcttctgaagacatcctggctgtgctgcagcgggatgacgtgcgtcagtacctacgtcagtacttgatgggccctcggggtccgccagggccaccaggagccagtggagatgggtccctcctgtctttggactatgcagagctgagtagtcgcattctcagctacatgtcgagttctgggatcagcattgggcttcctggtcccccggggccccctggcttgccgggaacctcctatgaggagctcctctccttgctgcgagggtctgaattcagaggcatcgttggacccccaggtcccccgggtccaccagggatcccaggcaatgtgtggtccagcatcagcgtggaggacctctcgtcttacttacatactgccggcttgtcattcatcccaggccctccaggacctcctggtcccccagggcctcgagggcccccgggtgtctcaggagccctggcaacctatgcagctgaaaacagcgacagcttccggagcgagctgatcagctacctcacaagtcctgatgtgcgcagcttcattgttggccccccaggccctcctgggccgcagggaccccctggggacagccgcctcctgtccacggatgcctcccacagtcggggtagcagctcctcctcacacagctcatctgtcaggcggggcagctcctacagctcttccatgagcacaggaggaggtggtgcaggctccctgggtgcaggcggtgcctttggtgaagctgcaggagacaggggtccctatggcactgacatcggcccaggcggaggctatggggcagcagcagaaggcggcatgtatgctggcaatggcggactattgggagctgactttgctggagatctggattacaatgagctggctgtgagggtgtcagagagcatgcagcgtcagggcctactgcaagggatggcctacactgtccagggcccaccaggccagcctgggccacaggggccacccggcatcagcaaggtcttctctgcctacagcaacgtgactgcggacctcatggacttcttccaaacttatggagccattcaaggaccccctgggcaaaaaggagagatgggcactccaggacccaaaggtgacaggggccctgctgggccaccaggtcatcctgggccacctggccctcgaggacacaagggagaaaaaggagacaaaggtgaccaagtctatgctgggcggagaaggagaagaagtattgctgtcaagccgtgagctagccatggcaggacagctcctggaccaggtctcataatgcatgtggcacttaggtccaaggtctccagagggtgaaagctggagtctgtcaatgtcctactgagacagcacagccaacctagctagcaacatttgttttagtctgaacaatatatacttatagaattcagtcaaagatacacaatctgaaacagcttcatggggtggactctaacagtagttgcaatgttttagaatgagacttacttctctgctatctagatctgaactccttggcttctttacttagttcaagccccagcctaggaaagccagttacataaaagttggctcaggagtcttagagctttacctaaatatgagacccgcagggggatcctctagagccgacgtaatactgga

SEQ ID NO: 66151 - DNA, 1134 bp, Homo sapiens
ttgcaattgactctagaggacccccttgcgggtctcataatgcatgtggcacttaggtccaaggtctccagagggtgaaagctggagtctgtcaatgtcctactgagacagcacagccaacctagctagcaacatttgttttagtctgaacaatatatacttatagaattcagtcaaagatacacaatctgaaacagcttcatggggtggactctaacagtagttgcaatgttttagaatgagacttacttctctgctatctagatctgaactccttggcttctttacttagttcaagccccagcctaggaaagccagttacataaaagttggctcaggagtcttagagctttacctaaatatgagacccagaaaacggaggatgggggtggggcgccttcctggaggtgacacttgatgggggtgtgttctggttactgttctaaggctgtgccatcagctccttcctcccctgttcattctgcattctctagtcagttggctaagaagtgactcttgcaactaaaaaaattaagaaattcacttcccctctaggaggtgatgatagggtttctaatggttatatgtatatcacattcccatttgcttagaaagtctgattgtagctatgattgtccgtaggcccatactagagttcatggatatgttatactgaaccaggccagagcaaacagaaaaagaaggttgagggcaatggacaaggaaggaataaagggagaagagggaaaacagaaaacctgatgctggggacacagcatcagctcaagacgtcaccctccattctgcactcagaaaatggcacttgggggactgggcgcagttggtctttaaccacttttcaatgtctaaaaacatttgtttgtggtctataagatgaaacatcatttcaatcgtaaaatttcccattaaagaagtttttttttctaaacaaaaacaacgaggcaaccacgagaaagagagaaagcgagaaacaaaaaagaagagagaaagaagacagaagaaaaaacaagggagagacagagcacaacggagagagcgagcgacgaggagagacgcaacagagagcaagcagcgagcaggcaggaggacgagaggtagacgcgggacgggagc

SEQ ID NO: 66152 - DNA, 1157 bp, Homo sapiens
cccctggttcacgctttggccctggtttcgattcgagctcggttccccttgcgggtctcataatgcatgtggcacttaggtccaaggtctccagagggtgaaagctggagtctgtcaatgtcctactgagacagcacagccaacctagctagcaacatttgttttagtctgaacaatatatacttatagaattcagtcaaagatacacaatctgaaacagcttcatggggtggactctaacagtagttgcaatgttttagaatgagacttacttctctgctatctagatctgaactccttggcttctttacttagttcaagccccagcctaggaaagccagttacataaaagttggctcaggagtcttagagctttacctaaatatgagacccagaaaacggaggatgggggtggggcgccttcctggaggtgacacttgatgggggtgtgttctggttactgttctaaggctgtgccatcagctccttcctcccctgttcattctgcattctctagtcagttggctaagaagtgactcttgcaactaaaaaaattaagaaattcacttcccctctaggaggtgatgatagggtttctaatggttatatgtatatcacattcccatttgcttagaaagtctgattgtagctatgattgtccgtaggcccatactagagttcatggatatgttatactgaaccaggccagagcaaacagaaaaagaaggttgagggcaatggacaaggaaggaataaagggagaagagggaaaacagaaaacctgatgctggggacacagcatcagctcaagacgtcaccctccattctgcactcagaaaatggcacttgggggactgggcgcagttggtctttaaccacttttcaatgtctaaaaacatttgtttgtggtctataagatgaaacatcatttcaatcgtaaaatttcccattaaagaagtttttttttctaaacaaaaacaacgaggcaaccacgagaaagagagaaagcgagaaacaaaaaagaagagagaaagaagacagaagaaaaaacaagggagagacagagcacaacggagagagcgagcgacgaggagagacgcaacagagagcaagcagcgagcaggcaggaggacgagaggtagacgcgggacgggagc

SEQ ID NO: 66153 - DNA, 1372 bp, Homo sapiens
tactgagtcacaccgccatcctagctagcaacaattgttttagtctggaccatatatacttatagaattcagtccaagatacacaatctgaaacagcttcatggggtggactctaaccgtagttgcaatgttttagaatgagacttacttctctgctatctagatctgaactccttggcttctttacttagttcaagccccagcctaggaaagccagttacataaaagttggctcaggagtcttagagctttacctaaatatgagacccgtctcataatgcatgtggcacttaggtccaaggtctccagagggtgaaagctggagtctgtcaatgtcctactgagacagcacagccaacctagctagcaacatttgttttagtctgaacaatatatacttatagaattcagtcaaagatacacaatctgaaacagcttcatggggtggactctaacagtagttgcaatgttttagaatgagacttacttctctgctatctagatctgaactccttggcttctttacttagttcaagccccagcctaggaaagccagttacataaaagttggctcaggagtcttagagctttacctaaatatgagacccagaaaacggaggatgggggtggggcgccttcctggaggtgacacttgatgggggtgtgttctggttactgttctaaggctgtgccatcagctccttcctcccctgttcattctgcattctctagtcagttggctaagaagtgactcttgcaactaaaaaaattaagaaattcacttcccctctaggaggtgatgatagggtttctaatggttatatgtatatcacattcccatttgcttagaaagtctgattgtagctatgattgtccgtaggcccatactagagttcatggatatgttatactgaaccaggccagagcaaacagaaaaagaaggttgagggcaatggacaaggaaggaataaagggagaagagggaaaacagaaaacctgatgctggggacacagcatcagctcaagacgtcaccctccattctgcactcagaaaatggcacttgggggactgggcgcagttggtctttaaccacttttcaatgtctaaaaacatttgtttgtggtctataagatgaaacatcatttcaatcgtaaaatttcccattaaagaagtttttttttctaaacaaaaacaacgaggcaaccacgagaaagagagaaagcgagaaacaaaaaagaagagagaaagaagacagaagaaaaaacaagggagagacagagcacaacggagagagcgagcgacgaggagagacgcaacagagagcaagcagcgagcaggcaggaggacgagaggtagacgcgggacgggagc

SEQ ID NO: 66154 - DNA, 2251 bp, Homo sapiens
cccaggccccagaggacaccaaggcgagcaaggcctcccaggtttctcaacctcagggtccagttctttcggactcaaccttcagggaccaccaggcccacctggcccccagggaccaaaaggtgacaaaggtgatccaggtgttccaggggctcttggcattcctagtggtccttctgaagggggatcatcaagtaccatgtacgtgtcaggcccgccaggccccctgggccccctgggcctccgggctctatcagcagctctggccaggagattcagcagtacatctctgagtacatgcagagtgacagtattagatcttacctatccggagttcagggtcccccaggcccacctggtcccccaggacctgtcaccaccatcacaggcgagactttcgactactcagagctggcaagccacgttgtgagctacttacggacttcggggtacggtgtcagcttgttctcgtcctccatctcttctgaagacatcctggctgtgctgcagcgggatgacgtgcgtcagtacctacgtcagtacttgatgggccctcggggtccgccagggccaccaggagccagtggagatgggtccctcctgtctttggactatgcagagctgagtagtcgcattctcagctacatgtcgagttctgggatcagcattgggcttcctggtcccccggggccccctggcttgccgggaacctcctatgaggagctcctctccttgctgcgagggtctgaattcagaggcatcgttggacccccaggtcccccgggtccaccagggatcccaggcaatgtgtggtccagcatcagcgtggaggacctctcgtcttacttacatactgccggcttgtcattcatcccaggccctccaggacctcctggtcccccagggcctcgagggcccccgggtgtctcaggagccctggcaacctatgcagctgaaaacagcgacagcttccggagcgagctgatcagctacctcacaagtcctgatgtgcgcagcttcattgttggccccccaggccctcctgggccgcagggaccccctggggacagccgcctcctgtccacggatgcctcccacagtcggggtagcagctcctcctcacacagctcatctgtcaggcggggcagctcctacagctcttccatgagcacaggaggaggtggtgcaggctccctgggtgcaggcggtgcctttggtgaagctgcaggagacaggggtccctatggcactgacatcggcccaggcggaggctatggggcagcagcagaaggcggcatgtatgctggcaatggcggactattgggagctgactttgctggagatctggattacaatgagctggctgtgagggtgtcagagagcatgcagcgtcagggcctactgcaagggatggcctacactgtccagggcccaccaggccagcctgggccacaggggccacccggcatcagcaaggtcttctctgcctacagcaacgtgactgcggacctcatggacttcttccaaacttatggagccattcaaggaccccctgggcaaaaaggagagatgggcactccaggacccaaaggtgacaggggccctgctgggccaccaggtcatcctgggccacctggccctcgaggacacaagggagaaaaaggagacaaaggtgaccaagtctatgctgggcggagaaggagaagaagtattgctgtcaagccgtgagctagccatggcaggacagctcctggaccaggcccatactagagttcatggatatgttatactgaaccaggccagagcaaacagaaaaagaaggttgagggcaatggacaaggaaggaataaagggagaagagggaaaacagaaaacctgatgctggggacacagcatcagctcaagacgtcaccctccattctgcactcagaaaatggcacttgggggactgggcgcagttggtctttaaccacttttcaatgtctaaaaacatttgtttgtggtctataagatgaaacatcatttcaatcgtaaaatttcccattaaagaagtttttttttctaaacaaaaacaacgaggcaaccacgagaaagagagaaagcgagaaacaaaaaagaagagagaaagaagacagaagaaaaaacaagggagagacagagcacaacggagagagcgagcgacgaggagagacgcaacagagagcaagcagcgagcaggcaggaggacgagaggtagacgcgggacgggagc

SEQ ID NO: 66155 - DNA, 310 bp, Homo sapiens
ggctgactgcactgtgtgtgttgttggcttccagggtccagttctttcggactcaaccttcagggaccaccaggcccacctggcccccagggaccaaaaggtgacaaaggtcagtgagggagcagtgagaaggtggtgaggagtaggggtgagcctggtgcccagagcccagagcctgaagagatggcagcaagtactcatcagtgtaaagtcttgggagagagaagaggctggaggaaggaaaggccagagggtggaagggacaaggacatggtgatatagcctctgtacaagggagctgtggtattat

SEQ ID NO: 66156 - DNA, 116 bp, Homo sapiens
tgtatgctggcaatggcggactattgggagctgactttgctggagatctggattacaatgagctggctgtgagggtgtcagagagcatgcagcgtaagtggggacatttaggcctt

SEQ ID NO: 66157 - DNA, 2862 bp, Homo sapiens
cccaggccccagaggacaccaaggcgagcaaggcctcccaggtttctcaacctcagggtccagttctttcggactcaaccttcagggaccaccaggcccacctggcccccagggaccaaaaggtgacaaaggtgatccaggtgttccaggggctcttggcattcctagtggtccttctgaagggggatcatcaagtaccatgtacgtgtcaggcccgccaggccccctgggccccctgggcctccgggctctatcagcagctctggccaggagattcagcagtacatctctgagtacatgcagagtgacagtattagatcttacctatccggagttcagggtcccccaggcccacctggtcccccaggacctgtcaccaccatcacaggcgagactttcgactactcagagctggcaagccacgttgtgagctacttacggacttcggggtacggtgtcagcttgttctcgtcctccatctcttctgaagacatcctggctgtgctgcagcgggatgacgtgcgtcagtacctacgtcagtacttgatgggccctcggggtccgccagggccaccaggagccagtggagatgggtccctcctgtctttggactatgcagagctgagtagtcgcattctcagctacatgtcgagttctgggatcagcattgggcttcctggtcccccggggccccctggcttgccgggaacctcctatgaggagctcctctccttgctgcgagggtctgaattcagaggcatcgttggacccccaggtcccccgggtccaccagggatcccaggcaatgtgtggtccagcatcagcgtggaggacctctcgtcttacttacatactgccggcttgtcattcatcccaggccctccaggacctcctggtcccccagggcctcgagggcccccgggtgtctcaggagccctggcaacctatgcagctgaaaacagcgacagcttccggagcgagctgatcagctacctcacaagtcctgatgtgcgcagcttcattgttggccccccaggccctcctgggccgcagggaccccctggggacagccgcctcctgtccacggatgcctcccacagtcggggtagcagctcctcctcacacagctcatctgtcaggcggggcagctcctacagctcttccatgagcacaggaggaggtggtgcaggctccctgggtgcaggcggtgcctttggtgaagctgcaggagacaggggtccctatggcactgacatcggcccaggcggaggctatggggcagcagcagaaggcggcatgtatgctggcaatggcggactattgggagctgactttgctggagatctggattacaatgagctggctgtgagggtgtcagagagcatgcagcgtcagggcctactgcaagggatggcctacactgtccagggcccaccaggccagcctgggccacaggggccacccggcatcagcaaggtcttctctgcctacagcaacgtgactgcggacctcatggacttcttccaaacttatggagccattcaaggaccccctgggcaaaaaggagagatgggcactccaggacccaaaggtgacaggggccctgctgggccaccaggtcatcctgggccacctggccctcgaggacacaagggagaaaaaggagacaaaggtgaccaagtctatgctgggcggagaaggagaagaagtattgctgtcaagccgtgagctagccatggcaggacagctcctggaccaggtctcataatgcatgtggcacttaggtccaaggtctccagagggtgaaagctggagtctgtcaatgtcctactgagacagcacagccaacctagctagcaacatttgttttagtctgaacaatatatacttatagaattcagtcaaagatacacaatctgaaacagcttcatggggtggactctaacagtagttgcaatgttttagaatgagacttacttctctgctatctagatctgaactccttggcttctttacttagttcaagccccagcctaggaaagccagttacataaaagttggctcaggagtcttagagctttacctaaatatgagacccagaaaacggaggatgggggtggggcgccttcctggaggtgacacttgatgggggtgtgttctggttactgttctaaggctgtgccatcagctccttcctcccctgttcattctgcattctctagtcagttggctaagaagtgactcttgcaactaaaaaaattaagaaattcacttcccctctaggaggtgatgatagggtttctaatggttatatgtatatcacattcccatttgcttagaaagtctgattgtagctatgattgtccgtaggcccatactagagttcatggatatgttatactgaaccaggccagagcaaacagaaaaagaaggttgagggcaatggacaaggaaggaataaagggagaagagggaaaacagaaaacctgatgctggggacacagcatcagctcaagacgtcaccctccattctgcactcagaaaatggcacttgggggactgggcgcagttggtctttaaccacttttcaatgtctaaaaacatttgtttgtggtctataagatgaaacatcatttcaatcgtaaaatttcccattaaagaagtttttttttctaaacaaaaacaacgaggcaaccacgagaaagagagaaagcgagaaacaaaaaagaagagagaaagaagacagaagaaaaaacaagggagagacagagcacaacggagagagcgagcgacgaggagagacgcaacagagagcaagcagcgagcaggcaggaggacgagaggtagacgcgggacgggagc

SEQ ID NO: 66158 - DNA, 779 bp, Homo sapiens
cccaggccccagaggacaccaaggcgagcaaggcctcccaggtttctcaacctcagggtccagttctttcggactcaaccttcagggaccaccaggcccacctggcccccagggaccaaaaggtgacaaaggtgatccaggtgttccaggggctcttggcattcctagtggtccttctgaagggggatcatcaagtaccatgtacgtgtcaggcccgccaggccccctgggccccctgggcctccgggctctatcagcagctctggccaggagattcagcagtacatctctgagtacatgcagagtgacagtattagatcttacctatccggagttcagggtcccccaggcccacctggtcccccaggacctgtcaccaccatcacaggcgagactttcgactactcagagctggcaagccacgttgtgagctacttacggagtaagcccttccccatgccctgcacctggcaccttcctcctgtgggtctgcttttgctcccagagcctcatctcctcgtttgctgtttgctttgcccttctctggaacatgagttttaattccgaattcataataatcgggccactgggatacagtgtcaacaagggtctgtccagattcagggcggccacgctggagagacaccgagtgagccttcctgcaattgactaatgtgttcctaattataggttcttcccacctgtgcatgaaggttggcagcatctggcaggcattaggctaaagcatgttctcaaaaataaacttcctttcttacaaa

SEQ ID NO: 66159 - DNA, 1770 bp, Homo sapiens
ctccggggcgatgagggactagaggcgccctgaggcccgcctgcctcccgcgctctggccaccccggcgggaaaaggatcgggcgggcgggcggtcccacagtgcccgcctttgcgccgccccaccccctgggggcgctgccgagggggcgccagccgcccatgccgccccggcgcccagccgcgcctggcgcccgccgctgaagcgcaggacgcgccgccgcccgcgctcaccgccgtccgcgccagccgccccgagccgactgcccttctgcccccaagatgtggcacagcgtcgggctgactctgcttgtgttcgtggccacgctgctgatcgtcctgctgctgatggtgtgcggttggtattttgtatggcatctttttttatcaaaattcaagtttctccgggaactggtgggagacacaggatcccaagagggagatcatgagccttcagggtctgaaactgaagaagacacttcctcctctccacacagaatcagatccgctcgccaaaggagggcacctgctgatgaaggccacagacccctgacatagtcctgtacttgtgaaggatgaaaaggcagttgccagcttctgtcttttactgacttcgctttgaaatttactaatgactgaagaacatttgtattggattttaagtcgaattttaaaaaagatttacatgtaagccatataaaaataaagggaactgaaaccaaattggactattataaatttcatcttaaagataatcttttgtttcaccagctttctacttatacacttattccttggcttttgggcttattttcttgcactggtgcagatctggtaaacattaaaggcttgaaaaaccatattttgttagccctaaaatgtacatttttcttcccattttaacttatctgaaattgggatgcatctcattactgtcaaccaggtgatagtcatgtaacgctcctaccgtgtgcatgtgtgaatttacagcttgtcatcgtgtcatccctttaaccaacatgtgttttgttggtatcaaatgtgtcaggtttaattgacattttaaaatgtcttcaaaaagatcacactatgattcagcattgaaacgaaaagttattgtgtatgcagaaaagcatggaaacagagcagcagggcgtacatttgatattagtgaagcaaatattcgtcgctggagaaatgatcgcaattccatattttcctgcaaagcaacaacaaaatgttttacgggacctaagaaaggtaggtacccacaagtagatgaagctgtactacgtttcgtcagtgagacacgtgcaaaaggattgcctatcacacgccaagcaatgcaattgaaggcaggagaagttgccaaaaccctaggaattgatgaaacaaaattcaaagccacaagaggctggtgtgaccgattcatgcgtcgagcaggactatcattaaggcatcaaacatcgttttgtcccaagctccccactgccattaaacagaagacagtgttggagcactctttcaagaagtgctgcataaccagtactcttgacaacaccgggagagacgttctgtggaaaaatgcagacatcaatgactgtggtttgaaaagtgattcagaagagttggattcagaatatgaagttataattataacttaaccaatttatttcacacattttctttacatatgcacaagattgatgtgataaaaatctgtttaactcaaagcgctgtttcaataaatataaacattttctgtgatatg

SEQ ID NO: 66160 - DNA, 861 bp, Homo sapiens
ctccggggcgatgagggactagaggcgccctgaggcccgcctgcctcccgcgctctggccaccccggcgggaaaaggatcgggcgggcgggcggtcccacagtgcccgcctttgcgccgccccaccccctgggggcgctgccgagggggcgccagccgcccatgccgccccggcgcccagccgcgcctggcgcccgccgctgaagcgcaggacgcgccgccgcccgcgctcaccgccgtccgcgccagccgccccgagccgactgcccttctgcccccaagatgtggcacagcgtcgggctgactctgcttgtgttcgtggccacgctgctgatcgtcctgctgctgatggtgtgcggttggtattttgtatggcatctttttttatcaaaattcaagtttctccgggaactggtgggagacacaggatcccaagagggagatcatgagccttcagggtctgaaactgaagaagacacttcctcctctccacacagaatcagatccgctcgccaaaggagggcacctgctgatgaaggccacagacccctgacatagtcctgtacttgtgaaggatgaaaaggcagttgccagcttctgtcttttactgacttcgctttgaaatttactaatgactgaagaacatttgtattggattttaagtcgaattttaaaaaagatttacatgtaagccatataaaaataaagggaactgaaaccaaattggactattataaatttcatcttaaagataatcttttgtttcaccagctttctacttatacacttattccttggcttttgggcttattttcttgcactggtgcagatctggtaaacattaaaggcttgaaaaaccata

SEQ ID NO: 66161 - DNA, 1293 bp, Homo sapiens
ctccatggaaacggccaggcatccacccagccgagagcacgatggctactggggagctcggggacttgggtggctactacttcaggttcttgcctcagaaaaccttccagtctctgagctctaaggagatcaccagccggctccgccagtggtgaggaaccgaggcgcagggagagaagaggcccttggtcttcgcggctgtggaggcgcaggccgggcgtcgaggggcccgcgcgggtcggcgccattctgagtgaaccctgaggcttcctgagtgaaccccgaaccacccgggaagggcggatgctgtgggtgggatcggttatcggtgcgctctgagagggtgccagcccccagatgatttctttttcctcctctgccccaggtccatgctgggcagaatcaaggcgcaggcgttcggctttgaccagacctttcagtcctatcggaaggatgatttcgttatggcttttttcaaagacccaaatgttattcccaatttgaagttactttcagattcttctggacaatggatcatattaggaactgaagtgaaaaaaattgaagctataaatgttccttgcacacagctttcaatgtcattttttcatcggttatatgatgaagatattgtacgagacagtggacatattgttaaatgtttagattctttttgtgatccatttctcatttctgatgagttacgaagagttttgctagtggaagactcagaaaaatatgaaatattcagccaaccagatagagaagagttcctgttttgtcttttcaaacatctttgccttggtggagccctttgtcaatatgaggatgtgattagcccatatctggaaacaacaaagcttatctataaggatctggtgagtgttcgaaagaatcctcaaaccaagaaaatacagattacctcttctgtctttaaagtttcagcttatgattctgctggtatgtgctatccttcagcaaagaatcatgaacagacattttcttactttattgtggatcctatcaggcgtcaccttcatgttttataccactgttatggtgtgggagacatgtcttaatgttctttcagattatgtacctctactattttgtatttatcatttttctatcttaatactaacttatagataaacatatactttgcaaattaattcaagaaaaatgtaaggagcctacttagagcagaagaaagcaaacaccaagatgcctttttaaaaatttgtgtggaatactaaccggggatcaaatttcatccataataaaatctatacc

SEQ ID NO: 66162 - DNA, 547 bp, Homo sapiens
ctccatggaaacggccaggcatccacccagccgagagcacgatggctactggggagctcggggacttgggtggctactacttcaggttcttgcctcagaaaaccttccagtctctgagctctaaggagatcaccagccggctccgccagtggtccatgctgggcagaatcaaggcgcaggcgttcggctttgaccagacctttcagtcctatcggaaggatgatttcgttatggcttttttcaaagacccaaatgttattcccaatttgaagttactttcagattcttctggacaatggatcatattaggttttgctagtggaagactcagaaaaatatgaaatattcagccaaccagatagagaagagttcctgttttgtcttttcaaacatctttgccttggtggagccctttgtcaatatgaggatgtgattagcccatatctggaaacaacaaagcttatctataaggatctggtgaggtaatgttgctagatcacaatatgtaaatctctagttaatagaataaattatttgcttaaccttg

SEQ ID NO: 66163 - DNA, 714 bp, Homo sapiens
ctccatggaaacggccaggcatccacccagccgagagcacgatggctactggggagctcggggacttgggtggctactacttcaggttcttgcctcagaaaaccttccagtctctgagctctaaggagatcaccagccggctccgccagtggtccatgctgggcagaatcaaggcgcaggcgttcggctttgaccagacctttcagtcctatcggaaggatgatttcgttatggcttttttcaaagacccaaatgttattcccaatttgaagttactttcagattcttctggacaatggatcatattaggaactgaagtgaaaaaaattgaagctataaatgttccttgcacacagctttcaatgtcattttttcatcggttatatgatgaagatattgtacgagacagtggacatattgttaaatgtttagattctttttgtgatccatttctcatttctgatgagttacgaagagttttgctagtggaagactcagaaaaatatgaaatattcagccaaccagatagagaagagttcctgttttgtcttttcaaacatctttgccttggtggagccctttgtcaatatgaggatgtgattagcccatatctggaaacaacaaagcttatctataaggatctggtgaggtaatgttgctagatcacaatatgtaaatctctagttaatagaataaattatttgcttaaccttg

SEQ ID NO: 66164 - DNA, 1231 bp, Homo sapiens
ctccatggaaacggccaggcatccacccagccgagagcacgatggctactggggagctcggggacttgggtggctactacttcaggttcttgcctcagaaaaccttccagtctctgagctctaaggagatcaccagccggctccgccagtggtccatgctgggcagaatcaaggcgcaggcgttcggctttgaccagacctttcagtcctatcggaaggatgatttcgttatggcttttttcaaagacccaaatgttattcccaatttgaagttactttcagattcttctggacaatggatcatattaggaactgaagtgaaaaaaattgaagctataaatgttccttgcacacagctttcaatgtcattttttcatcggttatatgatgaagatattgtacgagacagtggacatattgttaaatgtttagattctttttgtgatccatttctcatttctgatgagttacgaagagttttgctagtggaagactcagaaaaatatgaaatattcagccaaccagatagagaagagttcctgttttgtcttttcaaacatctttgccttggtggagccctttgtcaatatgaggatgtgattagcccatatctggaaacaacaaagcttatctataaggatctggtgagtgttcgaaagaatcctcaaaccaagaaaatacagattacctcttctgtctttaaagtttcagcttatgattctgctggtatgtgctatccttcagcaaagaatcatgaacagacattttcttactttattgtggatcctatcaggcgtcaccttcatgttttataccactgttatggtgtgggagacatgtcttaatgttctttcagattatgtacctctactattttgtatttatcatttttctatcttaatactaacttatagataaacatatactttgcaaattaattcaagaaaaatgtaaggagcctacttagagcagaagaaagcaaacaccaagatgcctttttaaaaatttgtgtggaatactaaccggggatcaaatttcatccataataaaatctataccaaaaaagttgtggaatttttacagaaagttacaaggaattagaaatctagttcatatttgttgcattgtgattcaagtgaatcctcaattttccatgtattttaatttataagctaattaattatggattgaaaatgtagcagaaaactaaacatgtctaccactgatcatt

SEQ ID NO: 66165 - DNA, 872 bp, Homo sapiens
ctccatggaaacggccaggcatccacccagccgagagcacgatggctactggggagctcggggacttgggtggctactacttcaggttcttgcctcagaaaaccttccagtctctgagctctaaggagatcaccagccggctccgccagtggtccatgctgggcagaatcaaggcgcaggcgttcggctttgaccagacctttcagtcctatcggaaggatgatttcgttatggcttttttcaaagacccaaatgttattcccaatttgaagttactttcagattcttctggacaatggatcatattaggaactgaagtgaaaaaaattgaagctataaatgttccttgcacacagctttcaatgtcattttttcatcggttatatgatgaagatattgtacgagacagtggacatattgttaaatgtttagattctttttgtgatccatttctcatttctgatgagttacgaagagttttgctagtggaagactcagaaaaatatgaaatattcagccaaccagatagagaagagttcctgttttgtcttttcaaacatctttgccttggtggagccctttgtcaatatgaggatgtgattagcccatatctggaaacaacaaagcttatctataaggatctggtgagtgttcgaaagaatcctcaaaccaagaaaatacagattacctcttctgtctttaaagtttcagcttatgtaagtgtgagagaacttttgcaaccaaagaatttaattactttttattaatagagttgttacaactggagttaacaatcaggacaatgttatgcctaggagaaaagacaatgttatttagagttttgttaaaattaaaagttgatagagtatgct

SEQ ID NO: 66166 - DNA, 909 bp, Homo sapiens
tattgttttaaaagtatgcctggattcctatagctacattcattcaacaactcctaaactttaatttattaactagaactcattagggaaaaatgatcccaaaagagaaggagtctaattgctcaaccaaaatttcattgaacaaatatttactgagtgcctgttatgccattctaggcacagggggatactattctcgttgagcttaacttctagtagggaacacaatagacaagtgaaaaaataaaaacaagataatttcaggtagtggtaataaagaagaaaataaaatagggtaatgtgatgagaggaataggctagaagtggaagtggcttcagattgggtggtcagggaagactcctctgaagataacttcatttgctaggagacctaaatgacaagaaggacccacctataaaaagacctgagggaagaaagagctttctaggctgaggaaagagcccaatgtgtttgtggattagagttaaagccctgagtgactaaaacatcaggattgagaagattgttagagaaggtcagggaggtatgctgaggccatggtggtcatgatgaaaaggttgattttactcagatagcaatggaggccactgaagaattcctttcttgtctctcatgtgggtctcgatgtataagcctcttcacaacttggaaaaattaattgtaaaggctgctaattcctttttaaattttttaatttactatttgaataggtaatatatttacatggttcaaaattcagaaagtattaagaggaatacagtgggacttcttcccactcaggtgtacccagtttcctcccatgggagtaaccagcatccctagagccttgtgtcttttgggagatattctatatgttaaaacaaatgtatattttctattaaaaaatg

SEQ ID NO: 66167 - DNA, 306 bp, Homo sapiens
  misc_feature (101)..(102): n is a, c, g, or t
cagacagcaaaaattttcaactgatgaaatttctcttccttccaaaagtaagtaaaaaaacagcaaccaagaaacaacaacaacaaaaataaacaaaaaannctgtcttaaatatatttttaaagaattacctggaaatattaaaaaattatatttctaatcagtgaaacaaaaaatagcaatggagaaagatacaaagatgtgaaatgaaatctaaaaaggtcagaaaagagaagaaaaagaaaaacaaactcagcagcaaagcatcagccattaggtagctacagaagaatagattctaatgag

SEQ ID NO: 66168 - DNA, 434 bp, Homo sapiens
aagtcaattttccttggtcaaattatgcatatcaaaatgttaaatatacttttcttccatcaattttcagtcaatgataaattttaccacgtgcagttttaaccattatcagtttttgctatagactgtttgtgtccccccagattcctgttttgaaacctgtcccccagtatgatggtatttggaggtttgacctttgggaggtgataaggttgtgagggtagagccctcatgaatggcatcagtgcccttacaaaacaagccacagagagctccctttctgccttctgccatctgaggacacagtgagaagacagctatctgtgaaccagggggttggccctcaccagataccaaatcttctgggactttgagctaggacatcccagcttccagaactgtgaggaataaatttcagttattgatatgtcatc

SEQ ID NO: 66169 - DNA, 950 bp, Homo sapiens
aagaatttcccgattctcttccacgtgtggacagattggcacatatgtgtgtgtgcaaattgtacttgcagtggctgcctgggaaatgaaatttctgcaccttgccagagcatgttttccctctaaagagaggcagctcataattagtaatgctaatgtcggggtgagatgcaatagataatctaacaccagcaatgatgcccagagcatttatctttgatgctgggaatgcgttcattttctttatcttgccattactgtacctctattgggaaatttactctctcttcatagataggatcagatccagtacatatttataaaaccacacttacatttaaatacaggcctttcccatttcacagtgtttctagctcccctttccaatacatctctctctctttttctctctctctctctctctctctcacacacacacacacacacacacacacagccaaatcagacaccaatataaactgtagagttaacattctttttccaccctcacactttttttagctccgatctgtgttcaatttctgcctgagagagtgatatattcatatatttaggtatagttagaaaaagcaaaatggtaacaatagaatcttgatgggattgatctcctgcagcaaggagcaacagaaaaaaaaaaaaatggaatcaagaacccaggtgctttttataggttaattgtgcagggttatcatgtatctctttaaaatcaccatcttgattctgagctttggttctacacattagaattgttgcctgggcctggatttttccccttgcatgttgcgtgtggtagtccagcacatttgctgattgcaaatatacttgtctcttctcatgggcattactagtactcaggaaatcattgatgtggggtaaaatgagaaaaggattagttttattttggacagataaacaacatgtcattttac

SEQ ID NO: 66170 - DNA, 6232 bp, Homo sapiens
  misc_feature (1839)..(1839): n is a, c, g, or t
  misc_feature (1925)..(1925): n is a, c, g, or t
  misc_feature (1946)..(1946): n is a, c, g, or t
gcggagaggcggctgcggagcgctcgggctgctgctgctgctgctgggcgccgcgtgcctgataccgcggagcgcgcaggtgaggcggctggcgcgctgccccgccacttgcagctgtaccaaggagtctatcatctgcgtgggctcttcctgggtgcccaggatcgtgccgggcgacatcagctccctgagcctggtaaatgggacgttttcagaaatcaaggaccgaatgttttcccatctgccttctctgcagctgctattgctgaattctaactcattcacgatcatccgggatgatgcttttgctggactttttcatcttgaatacctgttcattgaagggaacaaaatagaaaccatttcaagaaatgcctttcgtggcctccgtgacctgactcacctttctttggccaataaccacataaaagcactaccaagggatgtcttcagtgatttagactctctgattgaactagatttgaggggtaataaatttgaatgtgactgcaaagccaagtggctatacctgtggttgaagatgacaaattccaccgtttctgatgtgctgtgtattggtccaccagagtatcaggaaaagaagctaaatgacgtgaccagctttgactatgaatgcacaactacagattttgttgttcatcagactttaccctaccagtcggtttcagtggatacgttcaactccaagaacgatgtgtacgtggccatcgcgcagcccagcatggagaactgcatggtgctggagtgggaccacattgaaatgaatttccggagctatgacaacattacaggtcagtccatcgtgggctgtaaggccattctcatcgatgatcaggtctttgtggtggtagcccagctcttcggtggctctcacatttacaaatacgacgagagttggaccaaatttgtcaaattccaagacatagaggtctctcgcatttccaagcccaatgacatcgagctgtttcagatcgacgacgagacgttctttgtcatcgcagacagctcaaaggctggtctgtccacagtttataaatggaacagcaaaggattctattcttaccagtcactgcacgagtggttcagggacacggatgcggagtttgttgatatcgatggaaaatcgcatctcatcctgtccagccgctcccaggtccccatcatcctccagtggaataaaagctctaagaagtttgtcccccatggtgacatccccaacatggaggacgtactggctgtgaagagcttccgaatgcaaaataccctctacctttcccttacccgcttcatcggggactcccgggtcatgaggtggaacagtaagcagtttgtggagatccaagctcttccatcccggggggccatgaccctgcagcccttttcttttaaagataatcactacctggccctggggagtgactatacattctctcagatataccagtgggataaagagaagcagctattcaaaaagtttaaggagatttacgtgcaggcgcctcgttcattcacagctgtctccaccgacaggagagatttcttttttgcatccagtttcaaagggaaaacaaagatttttgaacatataattgttgacttaagtttgtgaaggtgtggtgggtgaaactaagagaaatgtagcattagctctcacaaaagaggaccaagaaaaatcaacaaacaaatcaaagccaggctcagagctctgaaattaaaaagcactgaaatagttagatgttttcaaacttttagaactcacattttaatcagggattgcatttattggctaactgcatgacatgcccattctaccatttnaaaaaaaatcttaaagcctgtaatttctgagaaaagagtacagcatttactcttatcatctagaaatgtaatatgcttcccccccnctttttgatgaggaagaaganaattggataagatgggacagcacttataatgaaataaaaaaaaactttgagcccctctcattccactttagcaatctttttggtaagaactcttaaagccaaaagtctgctgaaaagatttgctgattattagtttaaaaatcttgtaacactcagcagtgctattttgagtcatcccagtttcctgaaagtaatgcccagtcttcctgaatcctccttaatagcagaaccttggtgattttgttggctcatatgaatgcttgtcatggatatgttaacaatttagtgtttgacattgcttcctctgccacaaagacaatactctggtgacacatgtctagacccagcacaggctgtaggcccaggagtgactcaaaggagtttttccctctttcttacggttcaaaggtgaccctggtggtggccagagcagtaatgcttgtttgatgctcttcatggctcatctgcttctcagaacccacccgttgagtttgtgggtaaccagcaggcaggccaaagactggtgcttttcatttcatcctttagagggatgaaacagttatttccgtctgatgagcattcggtagaatttttgaagtgagattttatgaagtcaaaggggactttacacagatctcgacctgctttgaaacctagaggtggccctttgatttgtgcgtgtccttgccctctggacaacttaatatttcaagtaatcgaataccaacttccctgccagcccacctgccttccgccccgcttgtgtaacagtcctgttttgttgagttgctgctattgcactgccagtgcagcccacaccaaatcacaacccaagatactcagataggaagactccttcctctcccagtactttaccaaaggaacccccgccaggacccacatggggccacgtgttggcagtggaatcagcctgtgcaggctggggatctcaggctgatcagtaggggccagctttggagccagccaagctgaatcccacactccaggtctgtgctcaagagaccagatggtgtatttccaaatgggcctctctggtatgggcaataggcaagctcctggggtctggttatgtggaagattcttagtggatgttccgcctggttagctggttctcttcagagaatataaagtgaatgcctttaggggtagctctgaaagagaaacccaacaacttcattcctagccatgaaagtagcacgatcatattgtactgtattgttattgtaaaatgactatttgccatgtcatgagtaggtagatgttttgccacaaatatgaatgtgtttgttgtttcctgactttaagcaatgaagattgagacaataaatagcactcagagaatgaagcattgatgttacatcagcactcttgggtacattctgggactgtaggctgaggcttctagcctcagaaaccacggattttaatgaacgaactcacccacgcatagtagtgttgttacttgaaacttctgcaaaataccaagcaaacaggagaaaagtggtttgttttcatttttaagtgcaaattacttttcttctgcacttttttttccctcttggtttctttgaacaggctacaaatgcccaggtccccccattggaggctgaaagggaaagagctttgccattcctccagtcctaaagatggcaagctattctttctgttgcatggaaccactcagataaacctgggcagaaaaatgggtacttggcaaactgtaggagatatttagacagtcccagcaactatgccagatcaaagtgatgttcccaattccagccacctgtagagatggcaaggtggcatcttttcacagtgttgctactgcagagaggtatcacattcccagctgcccctctgagggtaaatgagcgactgaccccctgcactcactattctgctcacattgccagattctgggaaaccaggaaacacaggatgctgggcttaggatggggagagctgttgagtccagatggggaattaggaggtgaaagaacgatctaaacaggtgatgggtggggtgtgagaagggggtgacccactcaactgcaatcaggttttccttttttataatgttattttatacaagactaaagcctgtagtctacagagcgcctgtgctgtggaaggagatatttgttctggccaacttactaaaggagcatagatgttcttggcacggggtggtgatatctttgcttcattaatcttactgctccatcccaagaatccctgaagttttaaacaacttctgcaagaagcattcttccagtagtaatgtaaaacaaaaaaccaaccaagcaacagcaaaaatgcaaagcagagaaatatgtggaccgtccccagtggagatcagcttgaaggagggggtggatctttcttctactttccctcccatcacccactgggtggtcgtctgctcagcttatttcttctttatgaactttgtggcgaggctcctggactgatccctctgtgcggccatgtggctttaaggcctttccttaaagggggcttgtccccatactccatggggtcgggaatgggtctattatcaagactctaaaaataactcttagacatgaagagcactgtgttattggacagtggctgataaggccaccttacatttagcaaagctttatatttttccaatgcacattagtactcacctcatttgttcataaatagctctgaagtttattgcagggcaggtattattctaatttcagagagaaggaaatagacatgaaaactatatgaattgcctgccatggttatccaatagggactggcaaagcaataactttccctctgatcagcagacattgtattttctttctaagacaccctgctatactctcccagagaaagactttcatttctagcatgattttgaatttggcagcaccttgagataaagtaaaaagtgcaataaaatatgcatagccagaagaaaaatcatactgaatagacaccattcaatcaactggtccatttaacaattaacaaacatgcaattgcatgccccactctttttacattcaaggccccactcttgaaagtggtccagaaattttggatagttttctgttgtactaaggaggatatctagctggtctggttgtttctccccctgcatagctatggggaggatgttgaggttgagacacatctggttcttgtcacattgtccaccagataaacaagaagagatctgtgaaggaaaaattcaaaacctgaatgcacgagtggtgatgaattgctctcggccgtcatcagccttcaggaagcacactggaaatggcagagttgcattttttcttccccatggagtgagagtctgtgtatttttaggaaagaaatcagcatgggatgccagaggtttggcggtcaggagtgctcatgatggaaatttctctggcctggggtataatgaaggtgagatgaagatctgcaggaggggagtctatttgcatgccacctaaagaaaacctcttaagctggcttcctgattcttctgcagaggtatcagcctctccttcgcagctgcggaaggaagttctttaattaggcagtggccaaagattctgttcaacagcttcctggagtggaatacaataatctagttgtatgcaatgatgcaattagaaagtggtccggatttgggtggcaatggaaggggaatggcaaagtggggcagatggctctggaggaaacttgggaaagtaaaaacaaactgaaagaaaaggaaaaaaggatgatgatttcttttgcctcagccaggcaagcagagggtagaatgaccaggaagattaacaacatctcaattattaatgaagagagccaactgtaatgctcattcaaataagaagcatattgtaaagctactgagattgaaaccaagttattattatccttactgtattccattgcttgtatcaaaatctactttttttctagtaggaaactatgcattccctatcagtccctttgattatcaggaatgtataagaattgtgataaaataggccaatatgctatttggtaccatttgtatgtattttaagtgcataacctaggtaaaataagaatagtttctatgtgtaaagaagcaagttttacagtatgcagactacagtggatgtattttaggctgtatacatatttagctctttttggtaaatagggtatacaaactatatgcctcttaattcaatatattcggtaagcctatgaataaaaagtggttcatgcct

SEQ ID NO: 66171 - DNA, 3323 bp, Homo sapiens
  misc_feature (1839)..(1839): n is a, c, g, or t
  misc_feature (1925)..(1925): n is a, c, g, or t
  misc_feature (1946)..(1946): n is a, c, g, or t
gcggagaggcggctgcggagcgctcgggctgctgctgctgctgctgggcgccgcgtgcctgataccgcggagcgcgcaggtgaggcggctggcgcgctgccccgccacttgcagctgtaccaaggagtctatcatctgcgtgggctcttcctgggtgcccaggatcgtgccgggcgacatcagctccctgagcctggtaaatgggacgttttcagaaatcaaggaccgaatgttttcccatctgccttctctgcagctgctattgctgaattctaactcattcacgatcatccgggatgatgcttttgctggactttttcatcttgaatacctgttcattgaagggaacaaaatagaaaccatttcaagaaatgcctttcgtggcctccgtgacctgactcacctttctttggccaataaccacataaaagcactaccaagggatgtcttcagtgatttagactctctgattgaactagatttgaggggtaataaatttgaatgtgactgcaaagccaagtggctatacctgtggttgaagatgacaaattccaccgtttctgatgtgctgtgtattggtccaccagagtatcaggaaaagaagctaaatgacgtgaccagctttgactatgaatgcacaactacagattttgttgttcatcagactttaccctaccagtcggtttcagtggatacgttcaactccaagaacgatgtgtacgtggccatcgcgcagcccagcatggagaactgcatggtgctggagtgggaccacattgaaatgaatttccggagctatgacaacattacaggtcagtccatcgtgggctgtaaggccattctcatcgatgatcaggtctttgtggtggtagcccagctcttcggtggctctcacatttacaaatacgacgagagttggaccaaatttgtcaaattccaagacatagaggtctctcgcatttccaagcccaatgacatcgagctgtttcagatcgacgacgagacgttctttgtcatcgcagacagctcaaaggctggtctgtccacagtttataaatggaacagcaaaggattctattcttaccagtcactgcacgagtggttcagggacacggatgcggagtttgttgatatcgatggaaaatcgcatctcatcctgtccagccgctcccaggtccccatcatcctccagtggaataaaagctctaagaagtttgtcccccatggtgacatccccaacatggaggacgtactggctgtgaagagcttccgaatgcaaaataccctctacctttcccttacccgcttcatcggggactcccgggtcatgaggtggaacagtaagcagtttgtggagatccaagctcttccatcccggggggccatgaccctgcagcccttttcttttaaagataatcactacctggccctggggagtgactatacattctctcagatataccagtgggataaagagaagcagctattcaaaaagtttaaggagatttacgtgcaggcgcctcgttcattcacagctgtctccaccgacaggagagatttcttttttgcatccagtttcaaagggaaaacaaagatttttgaacatataattgttgacttaagtttgtgaaggtgtggtgggtgaaactaagagaaatgtagcattagctctcacaaaagaggaccaagaaaaatcaacaaacaaatcaaagccaggctcagagctctgaaattaaaaagcactgaaatagttagatgttttcaaacttttagaactcacattttaatcagggattgcatttattggctaactgcatgacatgcccattctaccatttnaaaaaaaatcttaaagcctgtaatttctgagaaaagagtacagcatttactcttatcatctagaaatgtaatatgcttcccccccnctttttgatgaggaagaaganaattggataagatgggacagcacttataatgaaataaaaaaaaactttgagcccctctcattccactttagcaatctttttggtaagaactcttaaagccaaaagtctgctgaaaagatttgctgattattagtttaaaaatcttgtaacactcagcagtgctattttgagtcatcccagtttcctgaaagtaatgcccagtcttcctgaatcctccttaatagcagaaccttggtgattttgttggctcatatgaatgcttgtcatggatatgttaacaatttagtgtttgacattgcttcctctgccacaaagacaatactctggtgacacatgtctagacccagcacaggctgtaggcccaggagtgactcaaaggagtttttccctctttcttacggttcaaaggtgaccctggtggtggccagagcagtaatgcttgtttgatgctcttcatggctcatctgcttctcagaacccacccgttgagtttgtgggtaaccagcaggcaggccaaagactggtgcttttcatttcatcctttagagggatgaaacagttatttccgtctgatgagcattcggtagaatttttgaagtgagattttatgaagtcaaaggggactttacacagatctcgacctgctttgaaacctagaggtggccctttgatttgtgcgtgtccttgccctctggacaacttaatatttcaagtaatcgaataccaacttccctgccagcccacctgccttccgccccgcttgtgtaacagtcctgttttgttgagttgctgctattgcactgccagtgcagcccacaccaaatcacaacccaagatactcagataggaagactccttcctctcccagtactttaccaaaggaacccccgccaggacccacatggggccacgtgttggcagtggaatcagcctgtgcaggctggggatctcaggctgatcagtaggggccagctttggagccagccaagctgaatcccacactccaggtctgtgctcaagagaccagatggtgtatttccaaatgggcctctctggtatgggcaataggcaagctcctggggtctggttatgtggaagattcttagtggatgttccgcctggttagctggttctcttcagagaatataaagtgaatgcctttaggggtagctctgaaagagaaacccaacaacttcattcctagccatgaaagtagcacgatcatattgtactgtattgttattgtaaaatgactatttgccatgtcatgagtaggtagatgttttgccacaaatatgaatgtgtttgttgtttcctgactttaagcaatgaagattgagacaataaatagcactcagagaatgaagcattgatgtt

SEQ ID NO: 66172 - DNA, 1705 bp, Homo sapiens
gcggagaggcggctgcggagcgctcgggctgctgctgctgctgctgggcgccgcgtgcctgataccgcggagcgcgcaggtgaggcggctggcgcgctgccccgccacttgcagctgtaccaaggagtctatcatctgcgtgggctcttcctgggtgcccaggatcgtgccgggcgacatcagctccctgagcctggtaaatgggacgttttcagaaatcaaggaccgaatgttttcccatctgccttctctgcagctgctattgctgaattctaactcattcacgatcatccgggatgatgcttttgctggactttttcatcttgaatacctgttcattgaagggaacaaaatagaaaccatttcaagaaatgcctttcgtggcctccgtgacctgactcacctttctttggccaataaccacataaaagcactaccaagggatgtcttcagtgatttagactctctgattgaactagatttgaggggtaataaatttgaatgtgactgcaaagccaagtggctatacctgtggttgaagatgacaaattccaccgtttctgatgtgctgtgtattggtccaccagagtatcaggaaaagaagctaaatgacgtgaccagctttgactatgaatgcacaactacagataaacaagaagagatctgtgaaggaaaaattcaaaacctgaatgcacgagtggtgatgaattgctctcggccgtcatcagccttcaggaagcacactggaaatggcagagttgcattttttcttccccatggagtgagagtctgtgtatttttaggaaagaaatcagcatgggatgccagaggtttggcggtcaggagtgctcatgatggaaatttctctggcctggggtataatgaaggtgagatgaagatctgcaggaggggagtctatttgcatgccacctaaagaaaacctcttaagctggcttcctgattcttctgcagaggtatcagcctctccttcgcagctgcggaaggaagttctttaattaggcagtggccaaagattctgttcaacagcttcctggagtggaatacaataatctagttgtatgcaatgatgcaattagaaagtggtccggatttgggtggcaatggaaggggaatggcaaagtggggcagatggctctggaggaaacttgggaaagtaaaaacaaactgaaagaaaaggaaaaaaggatgatgatttcttttgcctcagccaggcaagcagagggtagaatgaccaggaagattaacaacatctcaattattaatgaagagagccaactgtaatgctcattcaaataagaagcatattgtaaagctactgagattgaaaccaagttattattatccttactgtattccattgcttgtatcaaaatctactttttttctagtaggaaactatgcattccctatcagtccctttgattatcaggaatgtataagaattgtgataaaataggccaatatgctatttggtaccatttgtatgtattttaagtgcataacctaggtaaaataagaatagtttctatgtgtaaagaagcaagttttacagtatgcagactacagtggatgtattttaggctgtatacatatttagctctttttggtaaatagggtatacaaactatatgcctcttaattcaatatattcggtaagcctatgaataaaaagtggttcatgcct

SEQ ID NO: 66173 - DNA, 793 bp, Homo sapiens
gggcatgctgggggtgctagataccgaaggcagatgccgtccctttggactcgcttcgtccaacgcccccacgagtttcggtggcccttcgccccacgctataagagcagtcacttccggaactgctgcccttcgcctttgccgcgaaaagtgcctgacgggggctgggaagggggagggggaaggagtcaacgactccctccccgtcgtcattggctgagcgcctcgtgacgtcactctgaggcgcctcatgcggcgccgcgcacgggtcccagagccttctgggtagcggtttaaccccgcctcttgcgtcggcgccttccttttcctccctgtcgccaccgaggtcgcacgcgtgagacttctccgccgcctccgccgcagacgccgccgcgatgcgctacgtcgcctcctacctgctggctgccctagggggcaactcctcccccagcgccaaggacatcaagaagatcttggacagcgtgggtatcgaggcggacgacgaccggctcaacaaggttatcagtgagctgaatggaaaaaacattgaagacgtcattgcccagggtattggcaagcttgccagtgtacctgctggtggggctgtagccgtctctgctgccccaggctctgcagcccctgctgctggttctgcccctgctgcagcagaggagaagaaagatgagaagaaggaggagtctgaagagtcagatgatgacatgggatttggcctttttgattaaattcctgctcccctgcaaataaagcctttttacacatctcaaaaaaaaaa

SEQ ID NO: 66174 - DNA, 497 bp, Homo sapiens
aggggggggaaactaatagcgcaggacgaggcgggtgttaatcggcagaggccaccgaggtcgcacgcgtgagacttctccgccgcagacgccgccgcgatgcgctacgtcgcctcctacctgctggctgccctagggggcaactcctcccccagcgccaaggacatcaagaagatcttggacagcgtgggtatcgaggcggacgacgaccggctcaacaaggttatcagtgagctgaatggaaaaaacattgaagacgtcattgcccagggtattggcaagcttgccagtgtacctgctggtggggctgtagccgtctctgctgccccaggctctgcagcccctgctgctggttctgcccctgctgcagcagaggagaagaaagatgagaagaaggaggagtctgaagagtcagatgatgacatgggatttggcctttttgattaaattcctgctcccctgcaaataaagcctttttacacatctcaaaaaaaaaa

SEQ ID NO: 66175 - DNA, 478 bp, Homo sapiens
ccgggggggaaaaaaaactacggctaggtgcgaggctggtggcgcacgcgtgagacttctccgccgcagacgccgccgcgatgcgctacgtcgcctcctacctgctggctgccctagggggcaactcctcccccagcgccaaggacatcaagaagatcttggacagcgtgggtatcgaggcggacgacgaccggctcaacaaggttatcagtgagctgaatggaaaaaacattgaagacgtcattgcccagggtattggcaagcttgccagtgtacctgctggtggggctgtagccgtctctgctgccccaggctctgcagcccctgctgctggttctgcccctgctgcagcagaggagaagaaagatgagaagaaggaggagtctgaagagtcagatgatgacatgggatttggcctttttgattaaattcctgctcccctgcaaataaagcctttttacacatctcaaaaaaaaaa

SEQ ID NO: 66176 - DNA, 586 bp, Homo sapiens
cccgggctgcaggaattcggcacgaggtcgcacgcgtgagacttctccgccgcctccgccgcagacgccgccgcgatgcgctacgtcgcctcctacctgctggctgccctagggggcaactcctcccccagcgccaaggacatcaagaagatcttggacagcgtgggtatcgaggcggacgacgaccggctcaacaaggttatcagtgagctgaatggaaaaaacattgaagacgtcattgcccagggtattggcaagcttgccagtgtacctgctggtggggctgtagccgtctctgctgccccaggctctgcagcccctgctgctggttctgcccctgctgcagcagaggagaagaaagatgagaagaaggaggagtctgaagagtcagatgatgacatgggatttggcctttttgattaaattcctgctcccctgcaaataaagcctttttacacatctcaaaaaaaaaaaagaacatgaaagatacaagaaggcagagataaagagacagaagatgccagagggatggaggacagtgccctgacagggagtatgaatgaatggagggggacctaggtgcctg

SEQ ID NO: 66177 - DNA, 214 bp, Homo sapiens
ttcggcacgaggctgctggttctgcccctgctgcaggggctgcagagcctggggcagcccctgctgctggttctgcccctgctgcagcagaggagaagaaagatgagaagaaggaggagtctgaagagtcagatgatgacatgggatttggcctttttgattaaattcctgctcccctgcaaataaagcctttttacacatctcaaaaaaaaaa

SEQ ID NO: 66178 - DNA, 131 bp, Homo sapiens
cagctcaagggcccctgggtgggagcataggaggagtctgaagagtcagatgatgacatgggatttggcctttttgattaaattcctgctcccctgcaaataaagcctttttacacatctcaaaaaaaaaa

SEQ ID NO: 66179 - DNA, 244 bp, Homo sapiens
tactactactaaattcgcggccgcgtcgacggggctgtagccgtctctgctgccccaggctctgcagcccctgctgctggttctgcccctgctgcagcagaggagaagaaagatgagaagaaggaggagtctgaagagtcagatgatgacatgggatttggcctttttgattaaattcctgctcccctgcaaataaagcctttttacacatctcaaaaaaaaaaaagtcgacgcggccgcgaat

SEQ ID NO: 66180 - DNA, 1061 bp, Homo sapiens
gggcatgctgggggtgctagataccgaaggcagatgccgtccctttggactcgcttcgtccaacgcccccacgagtttcggtggcccttcgccccacgctataagagcagtcacttccggaactgctgcccttcgcctttgccgcgaaaagtgcctgacgggggctgggaagggggagggggaaggagtcaacgactccctccccgtcgtcattggctgagcgcctcgtgacgtcactctgaggcgcctcatgcggcgccgcgcacgggtcccagagccttctgggtagcggtttaaccccgcctcttgcgtcggcgccttccttttcctccctgtcgccaccgaggtcgcacgcgtgagacttctccgccgcctccgccgcagacgccgccgcgatgcgctacgtcgcctcctacctgctggctgccctagggggcaactcctcccccagcgccaaggacatcaagaagatcttggacagcgtgggtatcgaggcggacgacgaccggctcaacaaggttatcagtgagctgaatggaaaaaacattgaagacgtcattgcccagggtattggcaagcttgccagtgtacctgctggtggggctgtagccgtctctgctgccccaggctctgcagcccctgctgctggttctgcccctgctgcagcagaggagaagaaagatgagaagaaggaggagtctgaagagtcagatgatgacatgggatttggcctttttgattaaattcctgctcccctgcaaataaagcctttttacacatctcaaaaaaaaaaaaaaaagaaaaaaaaaaaaaaaaaaaaaaaataaaaaaaaaaaaaacaaaaagaaaaaaaagacaaaaaacaggaagaaacacacgaaagaaagaaacgcgaagaatatcgcaggcgagcaaaaacacacacgagacggagaagaacagaaggggaaagacagccgaaaacaagtgaggcgacacgcacgagagaaagcagaggaaggggcgacaccacacacagaaaggggggggaaggaacggggaagagaaacgagagacggaaa

SEQ ID NO: 66181 - DNA, 1095 bp, Homo sapiens
gggcatgctgggggtgctagataccgaaggcagatgccgtccctttggactcgcttcgtccaacgcccccacgagtttcggtggcccttcgccccacgctataagagcagtcacttccggaactgctgcccttcgcctttgccgcgaaaagtgcctgacgggggctgggaagggggagggggaaggagtcaacgactccctccccgtcgtcattggctgagcgcctcgtgacgtcactctgaggcgcctcatgcggcgccgcgcacgggtcccagagccttctgggtagcggtttaaccccgcctcttgcgtcggcgccttccttttcctccctgtcgccaccgaggtcgcacgcgtgagacttctccgccgcctccgccgcagacgccgccgcgatgcgctacgtcgcctcctacctgctggctgccctagggggcaactcctcccccagcgccaaggacatcaagaagatcttggacagcgtgggtatcgaggcggacgacgaccggctcaacaaggttatcagtgagctgaatggaaaaaacattgaagacgtcattgcccagggtattggcaagcttgccagtgtacctgctggtggggctgtagccgtctctgctgccccaggctctgcagcccctgctgctggttctgcccctgctgcagcagaggagaagaaagatgagaagaaggaggagtctgaagagtcagatgatgacatgggatttggcctttttgattaaattcctgctcccctgcaaataaagcctttttacacatctcaaaaaaaaaaaaacccaagatgacaaagaaaagaaggaacaatggtcgtgccaaaaaaggccgcggcccacgtcagcctattcgctgcactaactgtgcccgatgcgtgcccaaggacaaggccattaagaaattcgtcattcgaaacatagtggaggccgcagcagtcagggacatttctgaagcgagcgtcttcgatgcctatgtgcttcccaagctgtatgtgaagctacattactgtgtgagttgtgcaattcacagcaaagtagtcaggaatcgatctcgtgaagcccgcaaggaccgaacaccccc

SEQ ID NO: 66182 - DNA, 577 bp, Homo sapiens
agatgtgtaaaaaggctttatttgcaggggagcaggaatttaatcaaaaaggccaaatcccatgtcatcatctgactcttcagactcctccttcttctcatctttcttctcctctgctgcagcaggggcagaaccagcagcaggggctgagagcctggggcagcagagacggctacagccccaccagcaggtacactggcaagcttgccaataccctgggcaactcctcccccagcgccaaggacatcaagaagatcttggacagcgtgggtatcgaggcggacgacgaccggctcaacaaggttatcagtgagctgaatggaaaaaacattgaagacgtcattgcccagggtattggcaagcttgccagtgtacctgctggtggggctgtagccgtctctgctgccccaggctctgcagcccctgctgctggttctgcccctgctgcagcagaggagaagaaagatgagaagaaggaggagtctgaagagtcagatgatgacatgggatttggcctttttgattaaattcctgctcccctgcaaataaagcctttttacacatctcaaaaaaaaaa

SEQ ID NO: 66183 - DNA, 473 bp, Homo sapiens
cccgggctgcaggaattcggcacgaggtcgcacgcgtgagacttctccgccgcctccgccgcagacgccgccgcgatgcgctacgtcgcctcctacctgctggctgccctagggggcaactcctcccccagcgccaaggacatcaagaagatcttggacagcgtgggtatcgaggcggacgacgaccggctcaacaaggttatcagtgagctgaatggaaaaaacattgaagacgtcattgcccagggtattggcaagcttgccagtgtacctgctggtggggctgtagccgtctctgctgccccaggctctgcagcccctgctgctggttctgcccctgctgcagcagaggagaagaaagatgagaagaaggaggagtctgaagagtcagatgatgacatgggatttggcctttttgattaaattcctgctcccctgcaaataaagcctttttacacatctcaaaaaaaaaa

SEQ ID NO: 66184 - DNA, 691 bp, Homo sapiens
aggggggggaaactaatagcgcaggacgaggcgggtgttaatcggcagaggccaccgaggtcgcacgcgtgagacttctccgccgcagacgccgccgcgtgagtgtggtgaccgggcccggggtgccggctggggacgcggagtccgtggggatgcggggtgggcggcggggtatttttgggacggaggcctacgggccgagccacgcgcggcctcgcccggcggccccgggatgggccggcaggaggccgccggggtaactccgccgtcgcgtcctctccgcccgcctcaggatgcgctacgtcgcctcctacctgctggctgccctagggggcaactcctcccccagcgccaaggacatcaagaagatcttggacagcgtgggtatcgaggcggacgacgaccggctcaacaaggttatcagtgagctgaatggaaaaaacattgaagacgtcattgcccagggtattggcaagcttgccagtgtacctgctggtggggctgtagccgtctctgctgccccaggctctgcagcccctgctgctggttctgcccctgctgcagcagaggagaagaaagatgagaagaaggaggagtctgaagagtcagatgatgacatgggatttggcctttttgattaaattcctgctcccctgcaaataaagcctttttacacatctcaaaaaaaaaa

SEQ ID NO: 66185 - DNA, 765 bp, Homo sapiens
aggggggggaaactaatagcgcaggacgaggcgggtgttaatcggcagaggccaccgaggtcgcacgcgtgagacttctccgccgcagacgccgccgcgatgcgctacgtcgcctcctacctgctggctgccctagggggcaactcctcccccagcgccaaggacatcaagaagatcttggacagcgtgggtatcgaggcggacgacgaccggctcaacaaggttatcagtgagctgaatggaaaaaacattgaagacgtcattgcccagggtattggcaagcttgccagtgtacctgctggtggggctgtagccgtctctgctgccccaggctctgcagcccctgctgctggttctgcccctgctgcagcagaggagaagaaagatgagaagaaggaggagtctgaagagtcagatgatgacatgggatttggcctttttgattaaattcctgctcccctgcaaataaagcctttttacacatctcaaaaaaaaaaaaaaaagaaaaaaaaaaaaaaaaaaaaaaaataaaaaaaaaaaaaacaaaaagaaaaaaaagacaaaaaacaggaagaaacacacgaaagaaagaaacgcgaagaatatcgcaggcgagcaaaaacacacacgagacggagaagaacagaaggggaaagacagccgaaaacaagtgaggcgacacgcacgagagaaagcagaggaaggggcgacaccacacacagaaaggggggggaaggaacggggaagagaaacgagagacggaaa

SEQ ID NO: 66186 - DNA, 906 bp, Homo sapiens
gggcatgctgggggtgctagataccgaaggcagatgccgtccctttggactcgcttcgtccaacgcccccacgagtttcggtggcccttcgccccacgctataagagcagtcacttccggaactgctgcccttcgcctttgccgcgaaaagtgcctgacgggggctgggaagggggagggggaaggagtcaacgactccctccccgtcgtcattggctgagcgcctcgtgacgtcactctgaggcgcctcatgcggcgccgcgcacgggtcccagagccttctgggtagcggtttaaccccgcctcttgcgtcggcgccttccttttcctccctgtcgccaccgaggtcgcacgcgtgagacttctccgccgcctccgccgcagacgccgccgcgatgcgctacgtcgcctcctacctgctggctgccctagggggcaactcctcccccagcgccaaggacatcaagaagatcttggacagcgtgggtatcgaggcggacgacgaccggctcaacaaggttatcagtgagctgaatggaaaaaacattgaagacgtcattgcccagggtattggcaagcttgccagtgtacctgctggtggggctgtagccgtctctgctgccccaggctctgcagcccctgctgctggttctgcccctgctgcagcagaggagaagaaagatgagaagaaggaggagtctgaagagtcagatgatgacatgggatttggcctttttgattaaattcctgctcccctgcaaataaagcctttttacacatctcaaaaaaaaaaaagaacatgaaagatacaagaaggcagagataaagagacagaagatgccagagggatggaggacagtgccctgacagggagtatgaatgaatggagggggacctaggtgcctg

SEQ ID NO: 66187 - DNA, 721 bp, Homo sapiens
aggggggggaaactaatagcgcaggacgaggcgggtgttaatcggcagaggccaccgaggtcgcacgcgtgagacttctccgccgcagacgccgccgcgatgcgctacgtcgcctcctacctgctggctgccctagggggcaactcctcccccagcgccaaggacatcaagaagatcttggacagcgtgggtatcgaggcggacgacgaccggctcaacaaggttatcagtgagctgaatggaaaaaacattgaagacgtcattgcccagggtattggcaagcttgccagtgtacctgctggtggggctgtagccgtctctgctgccccaggctctgcagcccctgctgctggttctgcccctgctgcagcagaggagaagaaagatgagaagaaggaggagtctgaagagtcagatgatgacatgggatttggcctttttgattaaattcctgctcccctgcaaataaagcctttttacacatctcaaaaaaaaaaatctctcaaaaaacaaaaaacaaaacaaacaaacaacaacaacacaaaaaaaaaaaaaaagacccccgggggcctcattgtccggggggcgggaagaaaaggggagatagaaagggccacggggccaagggggctaccgggcccacgtttctcgtgcacagggggggaactcccggggcccccaaagggggggcgtatatggccgaacgcagggaacccgcatg

SEQ ID NO: 66188 - DNA, 445 bp, Homo sapiens
tccctatttaacaaaaaacgtgggtcacactagccagtgtcttaccctaatcatgtggagtaaaacaggggttaactagcttccagaattcctggatgaatcactgcccacagcccccactgtgttcctggccccaggctggtccaggggaggaaacctgacctataggagatcatctgcctactggccagtcacggatgtgtcatacagggcactgtccactgagacatgactcagaccataaattctgttctcagaatttagaattgggaaaccaagctgccggttggtgagggtcaccagtagcaccaggtcaggatgtggggagtaatgagaccatggccattgccactatgaggaatgacagactaggtgagaaaaggaggatacagcagactccacaagggagaaaaaatgagaaaggccacggggccccagatagggg

SEQ ID NO: 66189 - DNA, 2836 bp, Homo sapiens
cctccatcctccccattccctccggttccgggctctcccttcgctccaagcctcaggccaccggcttggatggacgctccgaggctacccgtgcgtccaggggtcttgcttccgaagttggtcctgctctttgtctacgcagatgattgccttgctcagtgtggcaaagattgcaaatcttactgctgtgatggaaccacgccctactgttgctcctactacgcttatattgggaatatcctctcgggcactgcaattgcgggcattgtttttggaatagtatttatcatgggggtcattgctgggattgccatatgcatctgcatgtgcatgaagaaccacagggcgacccgcgtgggcatcctcaggacgactcacatcaacaccgtctcctcctatcctggaccaccaccctacggtcacgaccacgagatggaatactgtgcagacttgcctcctccatactcccccaccccacagggtccagcacagcgttctccaccccctccttatcctggaaacgcaaggaaataatctatctcccagaacagaacatgtgccaatgggcgatcttgcctggaataaaatgcctctactcagaaacaggcaggaaagaattgctccaaggaatactttttggggtcagataatgtgtcaggtggaatatccctgctaggagatataggatttctactctgctcaaagctgaccccatctggagtattaatgtttggttctatggaaccacattttaagagatctgctgatccacctaagcacattcagggaagagtaatgtaattgacaaaatatctgataatcatgttgtttaagggctaggtgaagaaagtttcagtattgatcctggaaaaaaagaagatctaagtaggatgggagaatgatttggcccacacaaggaagcaactttattctatatagctttaaaagtcagaactagaattgttcattctttcattcatcaataaatgtattttgagtgcctaagagtttactatgtgcctagcactgtttgaggtcctgatggaagttacaggatgggtactctggttttagtacaagaaagagcaatgactagattgctttgtgaagctcttggtagagacacgctccagaagggataacaaaatcaaatagtagatgggttcattgggcctcagaagttctgctcgtattttaggtgggtgtgaagtgaatttctatatgtccaggagtgaatacaacagaaagagttggatcttatttatttaattagggagttaaaacaagaccaaaaagactcaacagccgcttgaagccaagaactcttcaatgccagctactgccacctaaaaatcatctggctttatagtggatcagaataaaggttattctaactgtggggagaaaaaaaaaattgtatcaagttccacaggtagcagacacttcacttccaagtaaaagatgagaaatcaattattcccacaggattttaggtcagggagcaaaaatctcagaacttgaccatgaagatacacaacagactcgcaaaaataaagtgggaaatgaagttcagattcccttctgtagatttccttaaaactattatttttttcttcttcgtaaaattttgataatctgttctcttaaaaaagttaatgacacaattaagatactgacatcaaattgttgccttttaccaaaatgcaaattttatgaagtgcctacctttatatgtataaagcatttaataaataattctaatgtgccatattttgctgtgagtgaccttaacatttatatttttatatgaattgtttcatgtatttataaaaattgtatattgaacattggaaatagatgattagatttttgtgtcattttacaattaaatctaaaatgcttaatccaatatcatcatcaaaattcagtgaaatcccaaaacagtgccaagaattttgctgaatgaaacaatcaaacaaagcattttaaggtgtaagttatagtacctgtacttgcagataagaagcttactatatcattattataagtagcatatattactttcaaatacctatattagaaagatattgatctgactgaaatataacctacctgccagtaaggtccaaaggctgaatttgttttgaatgagttccttgatctttaagcactgatgattttcttatatatgaggatgcaaagcattcaagagtttcagcctgttctggtgaggggctccctgacttacataaagttttcagtgcaattttaatagtacatatgctttaatttatttttcttctgcgtgtggtcagacccaattacactgtggctaagactctcaaagtgccagggtttctgtgatgattctgagaatgctgaatacaaatataccttatattctttaaggaaaacggaaaggaaagatcagcagaaatagggttttctcatcttcaccatcaataaacatttattgcgtacctcctatattctgcaaattttccccaaatagaagccagttcagtccacaccatctcttctttgagttgtttatggcctcccttaaggcattttacaaacccataagcctacaatagatgagtatttttactatttgtattaagtgtcataatagcatcaatgtgcacattaccagtatagactgttggagttcactgattgttttcatagatgatgcttcttggggaaaaatagtataggatgtgaaagttttgaattacggttatttaaaaactaacatttgctatggccaaagtgtttacaataagcaataaagtgaaagaacctattataacacagattaaaaaaaaaatgt

SEQ ID NO: 66190 - DNA, 1518 bp, Homo sapiens
cctccatcctccccattccctccggttccgggctctcccttcgctccaagcctcaggccaccggcttggatggacgctccgaggctacccgtgcgtccaggggtcttgcttccgaagttggtcctgctctttgtctacgcagatgattgccttgctcagtgtggcaaagattgcaaatcttactgctgtgatggaaccacgccctactgttgctcctactacgcttatattgggaatatcctctcgggcactgcaattgcgggcattgtttttggaatagtatttatcatgggggtcattgctgggattgccatatgcatctgcatgtgcatgaagaaccacagggcgacccgcgtgggcatcctcaggacgactcacatcaacaccgtctcctcctatcctggaccaccaccctacggtcacgaccacgagatggaatactgtgcagacttgcctcctccatactcccccaccccacagggtccagcacagcgttctccaccccctccttatcctggaaacgcaaggaaataatctatctcccagaacagaacatgtgccaatgggcgatcttgcctggaataaaatgcctctactcagaaacaggcaggaaagaattgctccaaggaatactttttggggtcagataatgtgtcaggtggaatatccctgctaggagatataggatttctactctgctcaaagctgaccccatctggagtattaatgtttggttctatggaaccacattttaagagatctgctgatccacctaagcacattcagggaagagtaatgtaattgacaaaatatctgataatcatgttgtttaagggctaggtgaagaaagtttcagtattgatcctggaaaaaaagaagatctaagtaggatgggagaatgatttggcccacacaaggaagcaactttattctatatagctttaaaagtcagaactagaattgttcattctttcattcatcaataaatgtattttgagtgcctaagagtttactatgtgcctagcactgtttgaggtcctgatggaagttacaggatgggtactctggttttagtacaagaaagagcaatgactagattgctttgtgaagctcttggtagagacacgctccagaagggataacaaaatcaaatagtagatgggttcattgggcctcagaagttctgctcgtattttaggtgggtgtgaagtgaatttctatatgtccaggagtgaatacaacagaaagagttggatcttatttatttaattagggagttaaaacaagaccaaaaagactcaacagccgcttgaagccaagaactcttcaatgccagctactgccacctaaaaatcatctggctttatagtggatcagaataaaggttattctaactgtggggagaaaaaaaaaattgtatcaagttccacaggtagcagacaggaaggacagagagagaagaataaggagttttaaaaacttaaatataaaaaagtagctttgattttagggggaacg

SEQ ID NO: 66191 - DNA, 2782 bp, Homo sapiens
cctccatcctccccattccctccggttccgggctctcccttcgctccaagcctcaggccaccggcttggatggacgctccgaggctacccgtgcgtccaggggtcttgcttccgaagttggtcctgctctttgtctacgcagatgattgccttgctcagtgtggcaaagattgcaaatcttactgctgtgatggaaccacgccctactgttgctcctactacgcttatattgggaatatcctctcgggcactgcaattgcgggcattgtttttggaatagtatttatcatgggggtcattgctgggattgccatatgcatctgcatgtgcatgaagaaccacagggcgacccgcgtgggcatcctcaggacgactcacatcaacaccgtctcctcctatcctggaccaccaccctacggtcacgaccacgagatggaatactgtgcagacttgcctcctccatactcccccaccccacagggtccagcacagcgttctccaccccctccttatcctggaaacgcaaggaaataatctatctcccagaacagaacatgtgccaatgggcgatcttgcctggaataaaatgcctctactcagaaacaggcaggaaagaattgctccaaggaatactttttggggtcagataatgtgtcaggtggaatatccctgctaggagatataggatttctactctgctcaaagctgaccccatctggagtattaatgtttggttctatggaaccacattttaagagatctgctgatccacctaagcacattcagggaagagtaatgtaattgacaaaatatctgataatcatgttgtttaagggctaggtgaagaaagtttcagtattgatcctggaaaaaaagaagatctaagtaggatgggagaatgatttggcccacacaaggaagcaactttattctatatagctttaaaagtcagaactagaattgttcattctttcattcatcaataaatgtattttgagtgcctaagagtttactatgtgcctagcactgtttgaggtcctgatggaagttacaggatgggtactctggttttagtacaagaaagagcaatgactagattgctttgtgaagctcttggtagagacacgctccagaagggataacaaaatcaaatagtagatgggttcattgggcctcagaagttctgctcgtattttaggtgggtgtgaagtgaatttctatatgtccaggagtgaatacaacagaaagagttggatcttatttatttaattagggagttaaaacaagaccaaaaagactcaacagccgcttgaagccaagaactcttcaatgccagctactgccacctaaaaatcatctggctttatagtggatcagaataaaggttattctaactgtggggagaaaaaaaaaattgtatcaagttccacaggtagcaggtcagggagcaaaaatctcagaacttgaccatgaagatacacaacagactcgcaaaaataaagtgggaaatgaagttcagattcccttctgtagatttccttaaaactattatttttttcttcttcgtaaaattttgataatctgttctcttaaaaaagttaatgacacaattaagatactgacatcaaattgttgccttttaccaaaatgcaaattttatgaagtgcctacctttatatgtataaagcatttaataaataattctaatgtgccatattttgctgtgagtgaccttaacatttatatttttatatgaattgtttcatgtatttataaaaattgtatattgaacattggaaatagatgattagatttttgtgtcattttacaattaaatctaaaatgcttaatccaatatcatcatcaaaattcagtgaaatcccaaaacagtgccaagaattttgctgaatgaaacaatcaaacaaagcattttaaggtgtaagttatagtacctgtacttgcagataagaagcttactatatcattattataagtagcatatattactttcaaatacctatattagaaagatattgatctgactgaaatataacctacctgccagtaaggtccaaaggctgaatttgttttgaatgagttccttgatctttaagcactgatgattttcttatatatgaggatgcaaagcattcaagagtttcagcctgttctggtgaggggctccctgacttacataaagttttcagtgcaattttaatagtacatatgctttaatttatttttcttctgcgtgtggtcagacccaattacactgtggctaagactctcaaagtgccagggtttctgtgatgattctgagaatgctgaatacaaatataccttatattctttaaggaaaacggaaaggaaagatcagcagaaatagggttttctcatcttcaccatcaataaacatttattgcgtacctcctatattctgcaaattttccccaaatagaagccagttcagtccacaccatctcttctttgagttgtttatggcctcccttaaggcattttacaaacccataagcctacaatagatgagtatttttactatttgtattaagtgtcataatagcatcaatgtgcacattaccagtatagactgttggagttcactgattgttttcatagatgatgcttcttggggaaaaatagtataggatgtgaaagttttgaattacggttatttaaaaactaacatttgctatggccaaagtgtttacaataagcaataaagtgaaagaacctattataacacagattaaaaaaaaaatgt

SEQ ID NO: 66192 - DNA, 2469 bp, Homo sapiens
gtccggcatatcgtcagtattttgttaactattaatattgtgcagtagcacacagttgttaaacctggatttgcattcttaccttgcctcatactaaccatatgaagcaggacatatcacttgcccttcatgaacctcagtttactcatgagtaaaatgggcatgtgttactaaccacttcaggttgactttgtggagctttatcatatgtgaagcacatggtacaatccttgtgaaaaagtaagcaattcagcaaatgtttgctaatagtatttattatttttagtcttaaagaaattgaaaattttcttgctttttttttccttacttccttcagtgtacacactcccatttctatctcaatttgaatatgtccagtgaaggtagaaatataatctatctccttttgaaggcaaggaggagtgaagcatttaggaatactagttttaaagatgagaagtctaattattttgattaataatcacattagcttagtcattcctcaacatagctctctctctttgcatctatatataatcctattatttacttaccaatttttatatatactcctgtttactaaaacattgacattattcatgtaggctaactgttcattatctatggcttacctatcacgtatattatgttcacaatacacatcaatggcaagtagggttctctctcaggtggtacagtagctcatatagtatctatttagagtcttggttgagaagcaaacatctgggcttattggaaataagcgtggccactgaactacgagtaatacttcatgtatgggtaatttcagtcctttggtagagtgaatagtagctatgagaaacaagttgagaataaaaatattggaaaataagcatattttgatattttattctatatgaatattcatgttaaaatgaataattttcactttcagaaattttattttaaattaaatctaacattactatagattattaaataaaatactgatcttaggggataaaaaatgtagatgacttcaaaaataataatccagatctaattgttttttgggactttagtaacctcaataactaaaattttaggtttcataaaatattttgaaaacatgaatatatagattagaaattttgcaagatgattttttactccctttattgttgtatgtattcattttatttgggttataagaccatacagcaacaagaaaaagttgtgatggtacttttagttagcatatcagcaacatcagaccattagaacatcatacagaatcaatactccccagagctcacctaagattagaatacagacatgatatgtttatgacatatctacaggcaatttgctctcctccagaaaaagttgccactaacattttattcatttctctctggccttaggtccaagcacatatgcagagagctcaagtagacggagcacacataactgaattcaccaggtttatggtatcctgggccattgagttaatagctttaattgtgaacttagagaaaatgagaagccaaggacatctcagtccttagagttataattatataaatgtatttatatatgttatataaaaatatatttatatattatgtatgttataaatatttaaataaatatgttataaatatacatgttatatatgttatatatgaatatataaatatgtatataatttagaaaacattggttccctgagcactaataacagttgcttctcattagatagtcataagctacttctcaataacagccaaaatatatagtcactttagtttataatgctaaattctgtgagctacaggacttttatttattccaagtccctggcacaaagagtgtgcttaataaacacttttaagtcaaaggaaaaatacaaatatgctgaatatattgaaccacattttcatgtgttctacacctttagtaagagtgtccttattttaaatgcagaaaacccgtttgtttgataaatataaaactatttactatttacagttttgagggactgcaacacagtgagtggggttgtaaatgtttgactttaacctggtggattttggtgctatattgccaccttgtggttactcatctaaaaatggacttttcttcaaaaacaaaaatcaaaaatagacaaaacaaagaataactgttttgcttttgtgatatatggtgcaaacataagtttgtgctgtgtgcttacacacacacacagacatacagtcacacacacacacatgcatgcacaccagaaacctgagtctgaaagtagtgactgtgcttgaaaaggagagaaatggaacatctttccaagagtaatcctttaatgccgaaagtctctcatataggaaaattagctaagtggcctgtctattattttcaaacacacaatgatatgatttcaatggttaagtaaaaatgtctttccactctttataataaagaactaataat

SEQ ID NO: 66193 - DNA, 608 bp, Homo sapiens
gttaagcctgcaggttctccaatgcatccagttatgaatcccttccctctccttgcacaaggccagttcagaaacctgactctgcactccgtagaggagaaaaccttcccattgatcccaaatgatgattgatctctcccattagagcctgctcaccccttagggaacttggaaaggagatgagaaagcaagagaaagtaaaagcaagcagagcatccctctccaccccctgcacctgccttaccacaggttttaaagaatttcctccagtctttgaacagctccagggagacagcctgagctcccgttcagtctgtagaaggttctttctctagataagtgtttcccaacctggctacacaacagaaggactcaaggaattcattaaaaacatcagtttctatgcctgaccccagagattctgatttggaacacatgcagtagctttggctttcttgtgctaaaatgttcttcccaccatctctgccaactgaactcctgaatctttaaggacaagctcaaatgctaccagcttctagaagcttccaagatttcttccagttagttctctctcaagaattccagtaaatttccagagcactttgtca

SEQ ID NO: 66194 - DNA, 315 bp, Homo sapiens
tattttttagtagagacagggtttcaccatattggcaaggctggtctcgaactcctgacctcatgatctgccctcgctggcctcccaaagtgttgggattagaggcgtgagccgccgtgccaaccataaagcattcttcatttttctattggtttctttctctacaggagctaaataagatggagagaaagtgaaatatctcaggcattaccataaaaattatatgaatcagaatatggttttatctaagcagaaaacaactcatagtaccactgtgatcaaagaaggtagaagggtcagagaaaattatagtta

SEQ ID NO: 66195 - DNA, 1556 bp, Homo sapiens
ccctttgacggcttagagcccacctcgccgaatttgaaaaggcggccccggagaggcgtgggcgccccccacacatttccagctcgcacccgggctccgaccgctcgccccgctcctctcgctgtgctcccggccggtgccgcgggttcggtccgggcgccggtgcgctcctgccggtcctcgtgcccgggactccgggtccccgcgggctgctgcgcacgatgaagctggccctgctcctgccctgggcgtgttgctgcctctgcgggtcggcgctggccaccggcttcctctatcccttctcggccgcagctctgcagcagcacggctaccccgagcccggcgccggctcccctggcagcggctacgcgagccgccggcactggtgccatcacacagtgacacggacggtgtcctgccaggtgcagaatggctcggagacggtggtccagcgcgtgtaccagagctgccggtggccggggccctgcgccaacctcgtaagttacaggactctgatcagacccacctacagagtgtcctaccgcacggtgacggtgctggagtggagatgctgccctggcttcaccgggagcaactgtgatgaggaatgcatgaactgcacccggctcagtgacatgagtgagcgactgaccacactggaggccaaggtcctcctgctagaagcagcagaacggccctccagcccggacaacgacctgccagcccccgagagcactccgccgacctggaatgaggacttcctccccgacgccatccctcttgctcaccctgtgccacgacagagaaggcccacgggcccagccgggcccccggggcagacaggaccaccagggcctgcaggcccccccgggtctaaaggtgaccgaggccagacaggagagaagggtccagcggggccgcctgggctcctggggcctccagggccccgtgggcttcctggagagatggggcgccccggccccccaggaccacccggcccagcaggcaacccaggcccctcaccaaacagcccccagggcgccctctactccctgcagccgcctacagacaaagacaatggagactcaaggctggcctctgccatcgtggacacagtgctggcaggtgtcccaggaccccggggtccccctggtccaccaggtccccctgggcctcgaggtcccccaggacccccaggaacacctggatcccagggcctggctggagagcgaggcacagtggggccgtccggtgaacctggcgtgaagggggaagaaggagagaaagccgccactgcagagggcgagggggtgcagcagctgagagaggccctgaagatcctggcagagcgagtcctcatcctggagcacatgattgggatccacgatcccctggcctccccagagggaggttctggccaggatgctgccctgagagccaacctcaagatgaagaggggtggcgcccaacccgatggggtccttgctgccctgcttgggcccgaccctggacagaagagcgtggaccaggccagcagcaggaagtgagagcccact

SEQ ID NO: 66196 - DNA, 3055 bp, Homo sapiens
  misc_feature (7)..(7): n is a, c, g, or t
tcggggnaacaacctaggctaggtgcggggctgggtgttgaagtcggccgagggtcacctgggaagagtctgcagagcctttgcccgccagcgccttcgctctttggctccctgagttagtccggttgtttgcgatcgccgcggccggggctgcgaaccgaagggctcgctccgcgccgcctgggtctctacctcatccgtaggtgtggccctgatggtgtggcaggctctggactcctaaagctctggagcgaatttaagattttattcatgtgcatggcatagaagatgaattcttccacttccaccatgagtgaagagcctgacgctctatcggtagttaaccagttacgggatctagcagcagatccgttaaacagaagagccatcgtccaggatcagggatgtctgcctggccttattttatttatggaccatcccaaccctccagtcgtccactccgctttgcttgctcttcgatacttggcagaatgccgtgcaaacagagaaaagatgaaaggagaactgggtatgatgttgagcttacaaaatgttatacagaaaactacaactccaggagaaacaaaacttctggcctctgaaatctatgacattcttcagtcctccaatatggcagatggtgatagttttaatgagatgaattcacgtcgaaggaaagctcaattttttctgggaactacaaacaaacgtgccaaaacagtggttttgcatatagatggccttgatgatacgtctcggagaaatctatgtgaagaggctttgttaaaaattaaaggtgttattagctttacttttcaaatggctgttcaaaggtgtgtggtgcgaatccgttcagatttgaaagctgaggctttggcatcagcaatagcatcaaccaaggttatgaaagctcagcaagttgtgaaaagtgaaagtggagaagagatgttggtcccattccaagatactcctgtggaagttgaacagaacacagagctacctgactacctgcctgaggatgagagtcccacaaaggaacaggacaaagcggtgtcccgggtcggctcacacccagaaggtggagctagctggcttagcacagctgcaaactttttatccagatcattttattggtgacttcacttttgggctcaaggactgtgtgaaccaacaaggggccagttttccattgttgtggtgaactgtcaagtgcaatttgcaataagttatcatgaaaagtttttagattacacgatcgcatatgctgcatttcacattttattggacattttaccccactgagtggtaaaaaggacagaggctacagatggagttgctttgtttatgaaagtattttggtttgttttctttcatttaattgcctcatatttaaaaaccatgggtccactgttaaaaccacatgtgtatgtgcagctttacattttattttacgtgaagcatgtgattaggaaaactcattttcttttcaagcctcaggacctacctgaagagaagttttcttgtagctcaagttgtgcatgaattactgaatattttactgtgcttttcttcatgaagggtacatgctttgtactcttcactgaaagctgaaaacatttcttgttaccctcttttgtgcctttttattttgccaaccgtgtttatagaaaggacattactaatgacattttgcagattaaaaacattcatttgaacacagtagtcccctagaaaaacaactctacaaaaattttgcagccttattcattataattttgataaaattaacacaaaatcagtcaagaaggaaacatgtatattagtgaagtgtttttggagactgtttgaatgtgaccaaatgtggttctagttgacttcttttcactttggcttatatcaattcttgagagttaatgtgatcatgatattgcaaacaactataaatggtctctaggccttactttgtgattatacgttatctccggctagaaaaaaataatggtagtaaagaaactgacaaactgaaaataagaaaacaaaaatcaaatgcctataataccataatgccagtttggtatagagtccaactttaaaacatgaattgctcgacagagttctattcagtaggtgtttctttgtattgtcttttgtgaatttattatgaaaatgctgcgttgtgttgaatgaaaaagacccaaattactgcttatgaagaaataaagccagcattgatcacttaatcctgtttctcatgtccagccagaaaaaagaacttcagtgaaggtaagataaataaatacatacacatatgtttttttggtagataagtgctaattacatatatgtaatgctttattaaatttctgaaatatttggtaactaaaattttctttttggaaattaataaatccagatacatattaatgttgatatgagtaaaaacaaataggaagaaattgaaatttcttttcatcaacatgtagagctgctattttactatttggagaatatgatgtgaaaattggacctcaaagggtttccttgtgttttcattgtaaaataccatcatcagtgagagtcttgagttcactaacattgtcaccttctggagagagagttaatggggggcattgaggatgatatttttttacatgtgtttggtttctgattcaagtgacacgcacaaactgaaaaaaaaaaaacaaaaaaagcaacaataactttcagggcacctattgctctaaatgcataatataacttgctgccagaaccagatgtgtttaaaaaagaaaataaaaccaccttctttctgtagccattaaagcaaactttactgttctaacaaatttgtattttattttgcattgccacacatctgcttatttaaaaactacatccctttggtagtaatgtttcaggacaagtaggtattacagcttgatgtttgtgtgttctaattctaagagttctttattccagatcatatagagtagttaagacaactgtaacagcattttttgaaatacattgtaaaataataaaaggtaacataatt

SEQ ID NO: 66197 - DNA, 2183 bp, Homo sapiens
ggcggcagctgcatgctgcggtcgactctaagatccccctgcaaactttttatccagatcattttattggtgacttcacttttgggctcaaggactgtgtgaaccaacaaggggccagttttccattgttgtggtgaactgtcaagtgcaatttgcaataagttatcatgaaaagtttttagattacacgatcgcatatgctgcatttcacattttattggacattttaccccactgagtggtaaaaaggacagaggctacagatggagttgctttgtttatgaaagtattttggtttgttttctttcatttaattgcctcatatttaaaaaccatgggtccactgttaaaaccacatgtgtatgtgcagctttacattttattttacgtgaagcatgtgattaggaaaactcattttcttttcaagcctcaggacctacctgaagagaagttttcttgtagctcaagttgtgcatgaattactgaatattttactgtgcttttcttcatgaagggtacatgctttgtactcttcactgaaagctgaaaacatttcttgttaccctcttttgtgcctttttattttgccaaccgtgtttatagaaaggacattactaatgacattttgcagattaaaaacattcatttgaacacagtagtcccctagaaaaacaactctacaaaaattttgcagccttattcattataattttgataaaattaacacaaaatcagtcaagaaggaaacatgtatattagtgaagtgtttttggagactgtttgaatgtgaccaaatgtggttctagttgacttcttttcactttggcttatatcaattcttgagagttaatgtgatcatgatattgcaaacaactataaatggtctctaggccttactttgtgattatacgttatctccggctagaaaaaaataatggtagtaaagaaactgacaaactgaaaataagaaaacaaaaatcaaatgcctataataccataatgccagtttggtatagagtccaactttaaaacatgaattgctcgacagagttctattcagtaggtgtttctttgtattgtcttttgtgaatttattatgaaaatgctgcgttgtgttgaatgaaaaagacccaaattactgcttatgaagaaataaagccagcattgatcacttaatcctgtttctcatgtccagccagaaaaaagaacttcagtgaaggtaagataaataaatacatacacatatgtttttttggtagataagtgctaattacatatatgtaatgctttattaaatttctgaaatatttggtaactaaaattttctttttggaaattaataaatccagatacatattaatgttgatatgagtaaaaacaaataggaagaaattgaaatttcttttcatcaacatgtagagctgctattttactatttggagaatatgatgtgaaaattggacctcaaagggtttccttgtgttttcattgtaaaataccatcatcagtgagagtcttgagttcactaacattgtcaccttctggagagagagttaatggggggcattgaggatgatatttttttacatgtgtttggtttctgattcaagtgacacgcacaaactgaaaaaaaaaaaacaaaaaaagcaacaataactttcagggcacctattgctctaaatgcataatataacttgctgccagaaccagatgtgtttaaaaaagaaaataaaaccaccttctttctgtagccattaaagcaaactttactgttctaacaaatttgtattttattttgcattgccacacatctgcttatttaaaaactacatccctttggtagtaatgtttcaggacaagtaggtattacagcttgatgtttgtgtgttctaattctaagagttctttattccagatcatatagagtagttaagacaactgtaacagcattttttgaaatacattgtaaaataataaaaggtaacataattaaaatcgagtggatattaaaaaaatatggtataagcattattgattatttatttttaaattttattttaagttctggggtacatgtatacatatgtaacaaacctgcacgttgtgcacatgtaccctagaacttaaagtataataaaaaaatataaaaatgatataaataaacttttgttttcacttgggct

SEQ ID NO: 66198 - DNA, 808 bp, Homo sapiens
agcggccgctcgcgatctagaactagcttttcatcaacatgtagagctgctattttactatttggagaatatgatgtgaaaattggacctcaaagggtttccttgtgttttcattgtaaaataccatcatcagtgagagtcttgagttcactaacattgtcaccttctggagagagagttaatggggggcattgaggatgatatttttttacatgtgtttggtttctgattcaagtgacacgcacaaactgaaaaaaaaaaaacaaaaaaagcaacaataactttcagggcacctattgctctaaatgcataatataacttgctgccagaaccagatgtgtttaaaaaagaaaataaaaccaccttctttctgtagccattaaagcaaactttactgttctaacaaatttgtattttattttgcattgccacacatctgcttatttaaaaactacatccctttggtagtaatgtttcaggacaagtaggtattacagcttgatgtttgtgtgttctaattctaagagttctttattccagatcatatagagtagttaagacaactgtaacagcattttttgaaatacattgtaaaataataaaaggtaacataattaaaatcgagtggatattaaaaaaatatggtataagcattattgattatttatttttaaattttattttaagttctggggtacatgtatacatatgtaacaaacctgcacgttgtgcacatgtaccctagaacttaaagtataataaaaaaatataaaaatgatataaataaacttttgttttcacttgggct

SEQ ID NO: 66199 - DNA, 1027 bp, Homo sapiens
  misc_feature (7)..(7): n is a, c, g, or t
tcggggnaacaacctaggctaggtgcggggctgggtgttgaagtcggccgagggtcacctgggaagagtctgcagagcctttgcccgccagcgccttcgctctttggctccctgagttagtccggttgtttgcgatcgccgcggccggggctgcgaaccgaagggctcgctccgcgccgcctgggtctctacctcatccgtaggtgtggccctgatggtgtggcaggctctggactcctaaagctctggagcgaatttaagattttattcatgtgcatggcatagaagatgaattcttccacttccaccatgagtgaagagcctgacgctctatcggtagttaaccagttacgggatctagcagcagatccgttaaacagaagagccatcgtccaggatcagggatgtctgcctggccttattttatttatggaccatcccaaccctccagtcgtccactccgctttgcttgctcttcgatacttggcagaatgccgtgcaaacagagaaaagatgaaaggagaactgggtatgatgttgagcttacaaaatgttatacagaagtaagtacaatagacagtgtctcatttatttatatacttacttatattatcactgcagcctcaacctcccaagctccagctattctcccacctcatcctcccaagtagctgggactacagacatgtgccattatacctggctaatttttaaattattttgtagagacatggtctcactatgttgcctaggctgctgtcctgggatcaagcaatccttctgcctcagcctcccaaagtgctggaattacaggcatgagccatcacatcctgcccagatagttgtgtttttttttaaatggaactaaattcttttacaggacctcagttcagaaaggatgctagagaagtgattagtcagagggatagaagcagtgattaaccaggaagaggagcgctggcttaaggatgacaacagaagcatcttccttttttttctgaaacgggtctagtatggtaatcaatag

SEQ ID NO: 66200 - DNA, 3247 bp, Homo sapiens
  misc_feature (7)..(7): n is a, c, g, or t
tcggggnaacaacctaggctaggtgcggggctgggtgttgaagtcggccgagggtcacctgggaagagtctgcagagcctttgcccgccagcgccttcgctctttggctccctgagttagtccggttgtttgcgatcgccgcggccggggctgcgaaccgaagggctcgctccgcgccgcctgggtctctacctcatccgtaggtgtggccctgatggtgtggcaggctctggactcctaaagctctggagcgaatttaagattttattcatgtgcatggcatagaagatgaattcttccacttccaccatgagtgaagagcctgacgctctatcggtagttaaccagttacgggatctagcagcagatccgttaaacagaagagccatcgtccaggatcagggatgtctgcctggccttattttatttatggaccatcccaaccctccagtcgtccactccgctttgcttgctcttcgatacttggcagaatgccgtgcaaacagagaaaagatgaaaggagaactgggtatgatgttgagcttacaaaatgttatacagaaaactacaactccaggagaaacaaaacttctggcctctgaaatctatgacattcttcagtcctccaatatggcagatggtgatagttttaatgagatgaattcacgtcgaaggaaagctcaattttttctgggaactacaaacaaacgtgccaaaacagtggttttgcatatagatggccttgatgatacgtctcggagaaatctatgtgaagaggctttgttaaaaattaaaggtgttattagctttacttttcaaatggctgttcaaaggtgtgtggtgcgaatccgttcagatttgaaagctgaggctttggcatcagcaatagcatcaaccaaggttatgaaagctcagcaagttgtgaaaagtgaaagtggagaagagatgttggtcccattccaagatactcctgtggaagttgaacagaacacagagctacctgactacctgcctgaggatgagagtcccacaaaggaacaggacaaagcggtgtcccgggtcggctcacacccagaaggtggagctagctggcttagcacagctgcaaactttttatccagatcattttattggtgacttcacttttgggctcaaggactgtgtgaaccaacaaggggccagttttccattgttgtggtgaactgtcaagtgcaatttgcaataagttatcatgaaaagtttttagattacacgatcgcatatgctgcatttcacattttattggacattttaccccactgagtggtaaaaaggacagaggctacagatggagttgctttgtttatgaaagtattttggtttgttttctttcatttaattgcctcatatttaaaaaccatgggtccactgttaaaaccacatgtgtatgtgcagctttacattttattttacgtgaagcatgtgattaggaaaactcattttcttttcaagcctcaggacctacctgaagagaagttttcttgtagctcaagttgtgcatgaattactgaatattttactgtgcttttcttcatgaagggtacatgctttgtactcttcactgaaagctgaaaacatttcttgttaccctcttttgtgcctttttattttgccaaccgtgtttatagaaaggacattactaatgacattttgcagattaaaaacattcatttgaacacagtagtcccctagaaaaacaactctacaaaaattttgcagccttattcattataattttgataaaattaacacaaaatcagtcaagaaggaaacatgtatattagtgaagtgtttttggagactgtttgaatgtgaccaaatgtggttctagttgacttcttttcactttggcttatatcaattcttgagagttaatgtgatcatgatattgcaaacaactataaatggtctctaggccttactttgtgattatacgttatctccggctagaaaaaaataatggtagtaaagaaactgacaaactgaaaataagaaaacaaaaatcaaatgcctataataccataatgccagtttggtatagagtccaactttaaaacatgaattgctcgacagagttctattcagtaggtgtttctttgtattgtcttttgtgaatttattatgaaaatgctgcgttgtgttgaatgaaaaagacccaaattactgcttatgaagaaataaagccagcattgatcacttaatcctgtttctcatgtccagccagaaaaaagaacttcagtgaaggtaagataaataaatacatacacatatgtttttttggtagataagtgctaattacatatatgtaatgctttattaaatttctgaaatatttggtaactaaaattttctttttggaaattaataaatccagatacatattaatgttgatatgagtaaaaacaaataggaagaaattgaaatttcttttcatcaacatgtagagctgctattttactatttggagaatatgatgtgaaaattggacctcaaagggtttccttgtgttttcattgtaaaataccatcatcagtgagagtcttgagttcactaacattgtcaccttctggagagagagttaatggggggcattgaggatgatatttttttacatgtgtttggtttctgattcaagtgacacgcacaaactgaaaaaaaaaaaacaaaaaaagcaacaataactttcagggcacctattgctctaaatgcataatataacttgctgccagaaccagatgtgtttaaaaaagaaaataaaaccaccttctttctgtagccattaaagcaaactttactgttctaacaaatttgtattttattttgcattgccacacatctgcttatttaaaaactacatccctttggtagtaatgtttcaggacaagtaggtattacagcttgatgtttgtgtgttctaattctaagagttctttattccagatcatatagagtagttaagacaactgtaacagcattttttgaaatacattgtaaaataataaaaggtaacataattaaaatcgagtggatattaaaaaaatatggtataagcattattgattatttatttttaaattttattttaagttctggggtacatgtatacatatgtaacaaacctgcacgttgtgcacatgtaccctagaacttaaagtataataaaaaaatataaaaatgatataaataaacttttgttttcacttgggct

SEQ ID NO: 66201 - DNA, 335 bp, Homo sapiens
ctgactgacagcagataattgcctactcttcgccatgccctgtggccattatttatgtgcatgatcctagatatggtggtcattcccattttacagatgagaaaactgaggctccaaaaggttaactggtatggtcatacagctagtgtgcagcacagctgggattcaaacccaggaaccagcggtgagcaagatcggacaaagcccctgccctcagggaggtttcctggagtcctctgcgattgtgggtgaggggtgacatgtgctgtttgtctgcatgatgatttgaataaagttataactctggcaagtgcttatcaaggagagctctatgg

SEQ ID NO: 66202 - DNA, 232 bp, Homo sapiens
ttgagtatctaaatcactgtattataatcaacttcgttttctgtaaattctttcataacttagggaatcatggttgctgaagtagagaatgtcacatattgataagtaaagcaatgacctcacttgaagtcaaaagttactatatctctttcctaaatctaatatattgcttagcttaactgaaataggtcatttaaatcgcttgtcatttggcagaaagaagaatattttt

SEQ ID NO: 66203 - DNA, 363 bp, Homo sapiens
gtctctcctaagaaaatctctgagggattggaaatacttatcctgaaaggctaagggagttggtggtgtgtgggggttcaatccccaaagaacgtaaaaatcccatgtcctccacctgttgagttggaaaatgtggggctgcctaatggtctccccctcggctctcctgatgatatctgttcaagaaatgagaactatggtctattttcagtcttggtagaagattggctcagtgggactggcaaatagtggagaaatgggcacacattcacagggccaataccctgaagatccaaacgaaagaaattcttacccccacaaaataagtgaacttaatcaaaaaataaaatggaggatatgatt

SEQ ID NO: 66204 - DNA, 1038 bp, Homo sapiens
gcagttatcatagagcacagtccctcacatcacacagctgcagagatgaataaacaaagaggaaccttctcagaagtgagtctggcccaggacccaaagccgcagcaaaggaaacctaaaggcaataaaagctccatttcaggaaccgaacaggaaatattccaagtagaattaaaccttcaaaatgcttctctgaatcatcaagggattgacaaaatatatgactgccaaggtttactgccacctccagagaagctcactgccgaggtcctaggaatcatttgcattgtcctgatggccactgtgttaaaaacaatagttcttattcctttcctggagcagaacaattcttccccgaatacaagaacgcagaaagcacgtccttgtggccattgtcctgaggagtggattacatattccaacagttgttactacattggtaaggaaagaagaacttgggaagagagtttgcaggcctgtgcttcaaagaactcttctagtctgctttctatagataatgaagaagaaatgaaatttctggccagcattttaccttcctcatggattggtgtgtttcgtaacagcagtcatcatccatgggtgacaataaatggtttggctttcaaacatgagataaaagactcagatcatgctgaacgtaactgtgcaatgctacatgtacgtggacttatatcagaccagtgtggatcttcaagaatcattagacggggtttcatcatgttgaccaggctggtcttgaactcctgagctcaagaaatcaacacatcttggcctcccaagttgctgggattactgacacaagccaccgcccctgagtgctcatgtaccatttagcttgtgttttaaaaatctactttttctgccctccctatttttaactagatgatgttttaaaaattacttttccctctctatatagtttgatttaagcattagtcatttacaacaaatattaatattaaaatgcagaccgttatgattggaaaataaatcaatgaacaatataaaaaaaaaaaa

SEQ ID NO: 66205 - DNA, 843 bp, Homo sapiens
  misc_feature (756)..(756): n is a, c, g, or t
  misc_feature (797)..(797): n is a, c, g, or t
  misc_feature (839)..(839): n is a, c, g, or t
gcagttatcatagagcacagtccctcacatcacacagctgcagagatgaataaacaaagaggaaccttctcagaagtgagtctggcccaggacccaaagccgcagcaaaggaaacctaaaggcaataaaagctccatttcaggaaccgaacaggaaatattccaagtagaattaaaccttcaaaatgcttctctgaatcatcaagggattgacaaaatatatgactgccaaggtttactgccacctccagagaagctcactgccgaggtcctaggaatcatttgcattgtcctgatggccactgtgttaaaaacaatagttcttattcctttcctggagcagaacaattcttccccgaatacaagaacgcagaaagcacgtccttgtggccattgtcctgaggagtggattacatattccaacagttgttactacattggtaaggaaagaagaacttgggaagagagtttgcaggcctgtgcttcaaagaactcttctagtctgctttctatagataatgaagaagaaatgaaatttctggccagcattttaccttcctcatggattggtgtgtttcgtaacagcagtcatcatccatgggtgacaataaatggtttggctttcaaacatgagataaaagactcagatcatgctgaacgtaactgtgcaatgctacatgtacgtggacttatatcagaccagtgtggatcttcaagaatcatttaagaccggggtttcaacaatgtttggaccaangctggggccttggaactccctgggaggctccaaaggaaaanccaaacaaccaatcctttgggggggcccttccccccaaaaangggt

SEQ ID NO: 66206 - DNA, 843 bp, Homo sapiens
gcagttatcatagagcacagtccctcacatcacacagctgcagagatgaataaacaaagaggaaccttctcagaagtgagtctggcccaggacccaaagccgcagcaaaggaaacctaaaggcaataaaagctccatttcaggaaccgaacaggaaatattccaagtagaattaaaccttcaaaatgcttctctgaatcatcaagggattgacaaaatatatgactgccaaggtttactgccacctccagagaagctcactgccgaggtcctaggaatcatttgcattgtcctgatggccactgtgttaaaaacaatagttcttattcctttcctggagcagaacaattcttccccgaatacaagaacgcagaaagcacgtccttgtggccattgtcctgaggagtggattacatattccaacagttgttactacattggtaaggaaagaagaacttgggaagagagtttgcaggcctgtgcttcaaagaactcttctagtctgctttctatagataatgaagaagaaatgaaatttctggccagcattttaccttcctcatggattggtgtgtttcgtaacagcagtcatcatccatgggtgacaataaatggtttggctttcaaacatgagataaaagactcagatcatgctgaacgtaactgtgcaatgctacatgtacgtggacttatatcagaccagtgtggatcttcaagaatcattgtgagcataagctttagaattaaagcgcttgagcttgcagtgcatcagataaaattttatatttgttcaaacagaaatgatattatgattgcataagccttaaaatgaattgtgttattt

SEQ ID NO: 66207 - DNA, 227 bp, Homo sapiens
gaagcatgctgaggtgactgggactccagatctacggacttgcccaggtggtggcggggacatccactgcaatagacagtgggattccaaggtggggctgctcaggaaccagagagaggctagcaccgcaggcaacggtgcaggtgaatggactgaacgatttcatccgttcttccaaggtggggctgctcaggaaccagtgagaggctagcaccgcaggcaacggt

SEQ ID NO: 66208 - DNA, 2015 bp, Homo sapiens
aatctattataatttttttttaatttattggtgaacccgcaagacacgctttacattttcaacacatcattatttgaaccacctcctccaggatatgaaaatgtttcggatattgtaccatctttcagtgctttctctcctcaaggaatgccagagggtgatctagtgcatgttaactatgcacgaactgaagacttctttaaattggaacgggacatgaaaatcaattgctctgggaaaattgtaattgccagatataggaaagttttcagaggaaataaggttaaaaatgcccagctggcaggggccaaaggagtcattctctactcagaccctgctgactactttgctcctggggtgaagtcctatccagacggttggaatcttcctggaggtggtgtccagcgtggaaatatcctaaatctgaatggtgcaggagaccctctcacaccaggttacccagcaaatgaatacgcttataggcatggaattgcagaggctgttggtcttccaagtattcctgttcatccagttggatactatgatgcacagaagctcctagaaaaaatgggtggctcagcaccaccagatagcagctggagaggaagtctcaaagtgtcctacaatgttggacctggctttactggaaacttttctacacaaaaagtcaagatgcacatccactctaccaatgaagtgacgagaatttacaatgtgataggtactctcagaggagcagtggaaccagacagatatgtcattctgggaggtcaccgggactcatgggtgtttggtggtattgaccctcagagtggagcagctgttgttcatgaaactgtgaggagctttggaacactgaaaaaggaagggtggagacctagaagaacaattttgtttgcaagctgggatgcagaagaatttggtcttcttggttctactgagtgggcagaggataattcaagactccttcaagagcgtggcgtggcttatattaatgctgactcatctatagaaggaaactacactctgagagttgattgtacaccactgatgtacagcttggtatacaacctaacaaaagagctgaaaagccctgatgaaggctttgaaggcaaatctctttatgaaagttggactaaaaaaagtccttccccagagttcagtggcatgcccaggataagcaaattgggatctggaaatgattttgaggtgttcttccaacgacttggaattgcttcaggcagagcacggtatactaaaaattgggaaacaaacaaattcagcggctatccactgtatcacagtgtctatgaaacatatgagttggtggaaaagttttatgatccaatgtttaaatatcacctcactgtggcccaggttcgaggagggatggtgtttgagctagccaattccatagtgctcccttttgattgtcgagattatgctgtagttttaagaaagtatgctgacaaaatctacaatatttctatgaaacatccacaggaaatgaagacatacagtttatcatttgattcacttttttctgcagtaaaaaattttacagaaattgcttccaagttcagcgagagactccaggactttgacaaaagcaacccaatattgttaagaatgatgaatgatcaactcatgtttctggaaagagcatttattgatccattagggttaccagacagacctttttataggcatgtcatctatgctccaagcagccacaacaagtatgcaggggagtcattcccaggaatttatgatgctctgtttgatattgaaagcaaagtggacccttccaaggcctggggagatgtgaagagacagatttctgttgcagccttcacagtgcaggcagctgcagagactttgagtgaagtagcctaagaggattctttagagactctgtattgaatttgtgtggtatgtcactcaaagaataataatgggtatattgataaattttaaaattggtatatttgaaataaagttgaatattatatata

SEQ ID NO: 66209 - DNA, 390 bp, Homo sapiens
tatgcaatccaggaattgcagagtgctctggtttctcttgtatatcatttgggcacctaataaacagcaaacgattttatcaacaggcatgtcatctatgctccaagcagccacaacaagtatgcaggggagtcattcccaggaatttatgatgctctgtttgatattgaaagcaaagtggacccttccaaggcctggggagatgtgaagagacagatttctgttgcagccttcacagtgcaggcagctgcagagactttgagtgaagtagcctaagaggattctttagagactctgtattgaatttgtgtggtatgtcactcaaagaataataatgggtatattgataaattttaaaattggtatatttgaaataaagttgaatattat

SEQ ID NO: 66210 - DNA, 1974 bp, Homo sapiens
agcaaatactcactaccacaaataagaacatttccaaatctgatgttctgaggatttttagagcttatagtagcaaaaagaaaagggaaattctctctgagatgtccttttttgtaggcctaatgacaaaaggttgaagataaagttctagtactcatttaagtgtaatattgaaaattgatattaccaaatctggaacaaccaatttaaaataaggaaagaaagacactgtgttttctaggttaaaaatgcccagctggcaggggccaaaggagtcattctctactcagaccctgctgactactttgctcctggggtgaagtcctatccagacggttggaatcttcctggaggtggtgtccagcgtggaaatatcctaaatctgaatggtgcaggagaccctctcacaccaggttacccagcaaatgaatacgcttataggcatggaattgcagaggctgttggtcttccaagtattcctgttcatccagttggatactatgatgcacagaagctcctagaaaaaatgggtggctcagcaccaccagatagcagctggagaggaagtctcaaagtgtcctacaatgttggacctggctttactggaaacttttctacacaaaaagtcaagatgcacatccactctaccaatgaagtgacgagaatttacaatgtgataggtactctcagaggagcagtggaaccagacagatatgtcattctgggaggtcaccgggactcatgggtgtttggtggtattgaccctcagagtggagcagctgttgttcatgaaactgtgaggagctttggaacactgaaaaaggaagggtggagacctagaagaacaattttgtttgcaagctgggatgcagaagaatttggtcttcttggttctactgagtgggcagaggataattcaagactccttcaagagcgtggcgtggcttatattaatgctgactcatctatagaaggaaactacactctgagagttgattgtacaccactgatgtacagcttggtatacaacctaacaaaagagctgaaaagccctgatgaaggctttgaaggcaaatctctttatgaaagttggactaaaaaaagtccttccccagagttcagtggcatgcccaggataagcaaattgggatctggaaatgattttgaggtgttcttccaacgacttggaattgcttcaggcagagcacggtatactaaaaattgggaaacaaacaaattcagcggctatccactgtatcacagtgtctatgaaacatatgagttggtggaaaagttttatgatccaatgtttaaatatcacctcactgtggcccaggttcgaggagggatggtgtttgagctagccaattccatagtgctcccttttgattgtcgagattatgctgtagttttaagaaagtatgctgacaaaatctacaatatttctatgaaacatccacaggaaatgaagacatacagtttatcatttgattcacttttttctgcagtaaaaaattttacagaaattgcttccaagttcagcgagagactccaggactttgacaaaagcaacccaatattgttaagaatgatgaatgatcaactcatgtttctggaaagagcatttattgatccattagggttaccagacagacctttttataggcatgtcatctatgctccaagcagccacaacaagtatgcaggggagtcattcccaggaatttatgatgctctgtttgatattgaaagcaaagtggacccttccaaggcctggggagatgtgaagagacagatttctgttgcagccttcacagtgcaggcagctgcagagactttgagtgaagtagcctaagaggattctttagagactctgtattgaatttgtgtggtatgtcactcaaagaataataatgggtatattgataaattttaaaattggtatatttgaaataaagttgaatattatatata

SEQ ID NO: 66211 - DNA, 434 bp, Homo sapiens
aatacactttattgaagcaggtacagaactgctgtgtaattaatttcaagacacttattttctctcaaaagtgcttctaaaacaagtttccatgcttgaagcgttgagtgtcaagtatctgggagatttgcttttgtaggacggttcatttcccacttgtgccagaatgagtcattttgtgtgtaagtgtcaagcttggagaggttctaattaagtgcaaattacaatgaaattaataaatgacaccaatttttagattttaaaatgtgctttgagagaatgcaatgtgggcttagattgatggtaattctcatattttaagttgtgattcaatattatgtagcattaaaactcaattaagtaaaaaataaatgaagaatcaagtagagagaatactcatctctcagatgcctcagcttctccaatgatggctt

SEQ ID NO: 66212 - DNA, 438 bp, Homo sapiens
agtttactggtcacctgcactaacagcctgagagaaaaggacactgcatatcacagagagatgcatagatgttacactcagaaagagagtgaacaactagaagatgtggaagaaaattccaagggccaattttgaaacaaaccaggcagagacccagatgcagaatcctgcaggctgagggatgttaggaagagttagcccaccactgctgcgctgaaaccaggatgacgcaaactgggcctcaggccagtagatcaataaaccaaactccctgtcacctcagactctgcacctgttaaagccctgtaaagagccgacatgtaaggacttatactgactggatacagagaatatggagcaaatcaaacgtatttaaatagtaaattatcatattgttataaataaaaatttacattgcatttccttttagaatgttac

SEQ ID NO: 66213 - DNA, 437 bp, Homo sapiens
agtttactggtcacctgcactaacagcctgagagaaaaggacactgcatatcacagagagatgcatagatgttacactcagaaagagagtgaacaactagaagatgtggaagaaaattccaagggccaattttgaaacaaaccaggcagagacccagatgcagaatcctgcaggctgagggatgttaggaagagttagcccaccactgctgcgctgaaaccaggatgacgcaaactgggcctcaggccaggcttagaatataaactgacaccttgaagaagtgaccatcttgtaatcaacactttattctaaggataacagagataaatgatataaggatctctgtttcttaatggcattgttgagccctaaactttctactgctagatattttatcgcatgaaataaataagccttagttgcttaaaaaaatttca

SEQ ID NO: 66214 - DNA, 601 bp, Homo sapiens
agtttactggtcacctgcactaacagcctgagagaaaaggacactgcatatcacagagagatgcatagatgttacactcagaaagagagtgaacaactagaagatgtggaagaaccagtttggctctggagtcaagaattctcaaaacagctttctgaacctgaatcgcacgcagtaaagctggtgttctcctgaagccaacatttatggtatcaccttgctgatccaggcaaaatggcaaaagtgtagtgaacataaagccaggggctgagattgtggatgtcctctgtaccaagtttcttattatgaaaattccaagggccaattttgaaacaaaccaggcagagacccagatgcagaatcctgcaggctgagggatgttaggaagagttagcccaccactgctgcgctgaaaccaggatgacgcaaactgggcctcaggccaggatcaacatcttgtctagacagagaaatattgatggagatcagaaaatttattagagtatttgaaggtcttgtgggactggagagacaacgttggacacttaagtggaaaatctgacacataacagaactgagactatcattgtattttttaaaa

SEQ ID NO: 66215 - DNA, 525 bp, Homo sapiens
agtttactggtcacctgcactaacagcctgagagaaaaggacactgcatatcacagagagatgcatagatgttacactcagaaagagagtgaacaactagaagatgtggaagaaccagtttggctctggagtcaagaattctcaaaacagctttctgaacctgaatcgcacgcagtaaagctggtgttctcctgaagccaacatttatggtatcaccttgctgatccaggcaaaatggcaaaagtgtagtgaacataaagccaggggctgagattgtggatgtcctctgtaccaagtttcttattatggtaagggtagaagttcaccaggtcagtaatgtgattttgtccaaagagccatttctggagatctagcctaaacattgctcctccaactcttcccataatttgttaacaattgaataattgttctgtttaaaatagtttggatgttttatgttttctgcaactttactgttatcataacaaagacataaataaagatctaaataaagtcagaaataca

SEQ ID NO: 66216 - DNA, 648 bp, Homo sapiens
agtttactggtcacctgcactaacagcctgagagaaaaggacactgcatatcacagagagatgcatagatgttacactcagaaagagagtgaacaactagaagatgtggaagaaccagtttggctctggagtcaagaattctcaaaacagctttctgaacctgaatcgcacgcagtaaagctggtgttctcctgaagccaacatttatggtatcaccttgctgatccaggcaaaatggcaaaagtgtagtgaacataaagccaggggctgagattgtggatgtcctctgtaccaagtttcttattatgaaaattccaagggccaattttgaaacaaaccaggcagagacccagatgcagaatcctgcaggctgagggatgttaggaagagttagcccaccactgctgcgctgaaaccaggatgacgcaaactgggcctcaggccaggtgtattccttggagtataactgaaggtttacttggtaattctatgtttaactttttttggaacttctggactatcttccaaagcaacagtaccattgtacattttcaccagccacgtatgacagtcacactctctccacattcttgccaaaacttgttatcatttttcaaataaaagacagcctagtgtgtatctgaaaga

SEQ ID NO: 66217 - DNA, 445 bp, Homo sapiens
gggactacaggcatgtgccaccatgccttgctaacttttgtatttttagtagagatggggtttcccatgttggccaggctgtttttgaactcctgaagtaaagtgatccacctgccttggcctttcaaagtgttgggattacaggtgtgagcgaccgcacccagcctactttcttttatttagaactcagtttcccagcctccattacaactgggttcaagaatataacctaggctttgccagtcaggctcatccatatcaaacttaaattcaggtataagcaaccagaggaaagtggctcattatggagctccttgccttgctggtatgaattgccctaatagccaggcggctgccttagttggcagcactagcagtgacgttagtttctcagtggttgcaacatggagtttctgatgtaatagtggtattgacagagagctgc

SEQ ID NO: 66218 - DNA, 1232 bp, Homo sapiens
agcggggttgcaggtgggcgcgcgttgcctaacgaccttccgcgcggacggtgggcaggcgacggcggcgtgtggatggaggccttcgcccttggcccagcgcggcggggcaggcggcggacccgggccgccggctccctgctctctcgggccgccatcctcctctttatctccgccttcctggtgcgggtgccctcatcagttggacacttggttcgattaccaagagcttttcgcttgaccaaagattcagtgaaaatagtgggatcaacaagttttccagtgaaagcgtatgtcatgctccatcaaaagagtccacacgtgttatgtgtaacgcaacaactgcgaaatgctgaactgatagacccatcattccaatggtatgggcctaaaggaaaagttgtttcagtagaaaaccgcactgcacaaataacatccacaggaagccttgtattccaaaattttgaggagagtatgagtggaatttatacatgtttcctcgaatataaacctactgtggaagaaattgttaaacgtcttcaactaaaatatgctatatatgcttatcgtgagcctcattattattatcagttcacagctcgatatcatgcagctccctgcaatagcatttataatatttcttttgagaagaaacttcttcagattttaagcaaactgcttcttgacctttcatgtgaaatttccttacttaagtctgaatgccatcgcgttaaaatgcaaagagctggtttgcaaaatgaattgttctttgcattttcagtttcatctctagacactgaaaaaggacccaagcgatgtacagaccataactgtgaaccttacaaaagactttttaaggctaaaaatctcatagagagattttttaatcaacaagtagaaattcttggcagacgtgcagaacaattacctcaaatatactatattgaaggtactctccaaatggtttggattaatcgctgctttccaggatatggaatgaatgtccagcaacatccaaaatgtcctgagtgctgtgtgatctgcagccctggatcatataacccccgtgatggaattcattgccttcaatgcaatagcagcctggtgtatggagcaaaaacgtgcttataagccattatcttcagttattcagtggtttattaaatgcaaagtatatatttgaaatattaacataataaattattatgccaaaattaatcatattttacaaa

SEQ ID NO: 66219 - DNA, 567 bp, Homo sapiens
agcggggttgcaggtgggcgcgcgttgcctaacgaccttccgcgcggacggtgggcaggcgacggcggcgtgtggatggaggccttcgcccttggcccagcgcggcggggcaggcggcggacccgggccgccggctccctgctctctcgggccgccatcctcctctttatctccgccttcctggtgcgggtgccctcatcagttggacacttggttcgattaccaagagcttttcgcttgaccaaagattcagtgaaaatagtgggatcaacaagttttccagtgaaagcgtatgtcatgctccatcaaaagagtccacacgtgttatgtgtaacgcaacaactgcgaaatgctgaactgatagacccatcattccaatggtatgggcctaaaggaaaagttgtttcagaaaggactggaagaggtctaatgtcttaaagtttgaagaacagagaagctttttggactgtagtttaaactgcactgtacttatcattttatggatatctcaaagatagtttcccttgatttgagccaaataaatcatgtaattatgtgaaaaaaaaa

SEQ ID NO: 66220 - DNA, 1414 bp, Homo sapiens
aacatgacctttttttatcccccttcaggagagtggcttcttcccatttaaaccctggaaaatataattggctacaaatttcaagattttttcccaatttatggattaccttcaagttccatacaactggcaccatctaccaacaagagtgagcatccaggaacctcgttagaaacttttctcagtggaaattaacttatcttcattccactttaagtgtgcaagacttgcaaataaaggtcgtgtcttaaaagcggctcagatgaaactaccaatttggctgctgctgctaccgcttttaaacaattaaaatatggcttagctactgagtccaatcacaggctataatatgtgattggcctctattttccttcatgtttttggttggacacttggttcgattaccaagagcttttcgcttgaccaaagattcagtgaaaatagtgggatcaacaagttttccagtgaaagcgtatgtcatgctccatcaaaagagtccacacgtgttatgtgtaacgcaacaactgcgaaatgctgaactgatagacccatcattccaatggtatgggcctaaaggaaaagttgtttcagtagaaaaccgcactgcacaaataacatccacaggaagccttgtattccaaaattttgaggagagtatgagtggaatttatacatgtttcctcgaatataaacctactgtggaagaaattgttaaacgtcttcaactaaaatatgctatatatgcttatcgtgagcctcattattattatcagttcacagctcgatatcatgcagctccctgcaatagcatttataatatttcttttgagaagaaacttcttcagattttaagcaaactgcttcttgacctttcatgtgaaatttccttacttaagtctgaatgccatcgcgttaaaatgcaaagagctggtttgcaaaatgaattgttctttgcattttcagtttcatctctagacactgaaaaaggacccaagcgatgtacagaccataactgtgaaccttacaaaagactttttaaggctaaaaatctcatagagagattttttaatcaacaagtagaaattcttggcagacgtgcagaacaattacctcaaatatactatattgaaggtactctccaaatggtttggattaatcgctgctttccaggatatggaatgaatgtccagcaacatccaaaatgtcctgagtgctgtgtgatctgcagccctggatcatataacccccgtgatggaattcattgccttcaatgcaatagcagcctggtgtatggagcaaaaacgtgcttataagccattatcttcagttattcagtggtttattaaatgcaaagtatatatttgaaatattaacataataaattattatgccaaaattaatcatattttacaaa

SEQ ID NO: 66221 - DNA, 1298 bp, Homo sapiens
  misc_feature (1114)..(1114): n is a, c, g, or t
  misc_feature (1152)..(1152): n is a, c, g, or t
agcggggttgcaggtgggcgcgcgttgcctaacgaccttccgcgcggacggtgggcaggcgacggcggcgtgtggatggaggccttcgcccttggcccagcgcggcggggcaggcggcggacccgggccgccggctccctgctctctcgggccgccatcctcctctttatctccgccttcctggtgcgggtgccctcatcagttggacacttggttcgattaccaagagcttttcgcttgaccaaagattcagtgaaaatagtgggatcaacaagttttccagtgaaagcgtatgtcatgctccatcaaaagagtccacacgtgttatgtgtaacgcaacaactgcgaaatgctgaactgatagacccatcattccaatggtatgggcctaaaggaaaagttgtttcagtagaaaaccgcactgcacaaataacatccacaggaagccttgtattccaaaattttgaggagagtatgagtggaatttatacatgtttcctcgaatataaacctactgtggaagaaattgttaaacgtcttcaactaaaatatgctatatatgcttatcgtgagcctcattattattatcagttcacagctcgatatcatgcagctccctgcaatagcatttataatatttcttttgagaagaaacttcttcagattttaagcaaactgcttcttgacctttcatgtgaaatttccttacttaagtctgaatgccatcgcgttaaaatgcaaagagctggtttgcaaaatgaattgttctttgcattttcagtttcatctctagacactgaaaaaggacccaagcgatgtacagaccataactgtgaaccttacaaaagactttttaaggctaaaaatctcatagagagattttttaatcaacaagtagaaattcttggcagacgtgcagaacaattacctcaaatatactatattgaaggtactctccaaatggtttggattaatcgctgctttccaggatatggaatgaatgtccagcaacatccaaaatgtcctgagtgctgtgtgatctgcagccctggatcatataacccccgtgatggaattcattgccttcaatgcaaaaattttttttttttttggngaaaaaagggggggggcgccccccccccaaaagggggncccccctttagcagcctggtgtatggagcaaaaacgtgcttataagccattatcttcagttattcagtggtttattaaatgcaaagtatatatttgaaatattaacataataaattattatgccaaaattaatcatattttacaaa

SEQ ID NO: 66222 - DNA, 134 bp, Homo sapiens
tttactttaggtttttgcttcatcatgtatgctgggaaaaccttcggacttctttgagtgttccccttttttctacatacttgcattactttgaagccatatgttatgtcattcttttctatacttgaacacta

SEQ ID NO: 66223 - DNA, 294 bp, Homo sapiens
taaactagatacacacgtgccaatattttatattatattcataagcttcttagcgcagccaggtgacaactctactagaatcactatcctgacagaactctacatacaagctgtcatttttgaccacatttccagaaggaagacttaagtaccaacatgttaatttcctaataatttgctaaatttaaataaattccgtagacagagcaaattagaataataaatgagccctgtagctggaaggcaaattagaacaataaagttaataaagaagttagaaagaaaactgtaaaa

SEQ ID NO: 66224 - DNA, 883 bp, Homo sapiens
ctgccctcctgcttccgttgctagggacgcttcggccgaggataccgcaatggatcaggaagaggggctgaaggccttggacaatattgtcactcaattcaacgcctatgaagatttcctggactcgcagatcactactgtggacttgtactacctggaggatgaaaccctggcccgccagttggtggagctaggctaccgagggactggagagagagtgaaaagggaagattttgaagcaaggaaagcggctatagagattgcaagactggctgaaagagctcagcaaaagtcagactctcagttaatctttcctagatctggacaaagaaaagcctcaaagaaaacctgtttccatcaatgctgattctctacagatgcaaatctctcccacaaagacgctaacaagtgctggtaaagacctacaagataattttctgacggccctggcaatgagagaagaagacaatcgcagtggaaaactgagtgtatacaaaaatggttaaaactctgtccaagcttttcaaagaaacaacagctggaccaaccatcaaaatgtgaccaccaaggagatacgatggatgggttgagtttacttcctcactaagaagataaggggagacttcacctagaaagtgccggtttaaactgcaactaaaatagcagttttctggtataccagctagagggaaggcctctcacgcgggcggccactggctaccaaggggatcggagggagcccgaaagtttccgggggacgaccactgggccgggggaggggcgaccgaaggccagggggccccaagcaacggggcttaggacggggggcgcgaacagaaattgcaccgcccggtcaggtgggccgcacaaaggggcgggagac

SEQ ID NO: 66225 - DNA, 490 bp, Homo sapiens
ctgccctcctgcttccgttgctagggacgcttcggccgaggataccgcaatggatcaggaagaggggctgaaggccttggacaatattgtcactcaattcaacgcctatgaagatttcctggactcgcagatcactactgtggacttgtactacctggaggatgaaaccctggcccgccagttggtggagctaggctaccgagggactggagagagagtgaaaagggaagattttgaagcaaggaaagcggctatagagattgcaagactggctgaaagagctcagcaaaagacgctaacaagtgctggtaaagacctacaagataattttctgacggccctggcaatgagagaagaagacaatcgcagtggaaaactgagtgtaagtacatttcatccaacagcttaaaatgtatacactaaatgcacaattaatattaaaaaatgtaacattaaatatctttcttaaagtaatttacaagatataaaa

SEQ ID NO: 66226 - DNA, 767 bp, Homo sapiens
ctgccctcctgcttccgttgctagggacgcttcggccgaggataccgcaatggatcaggaagaggggctgaaggccttggacaatattgtcactcaattcaacgcctatgaagatttcctggactcgcagatcactactgtggacttgtactacctggaggatgaaaccctggcccgccagttggtggagctaggctaccgagggactggagagagagtgaaaagggaagattttgaagcaaggaaagcggctatagagattgcaagactggctgaaagagctcagcaaaagacgctaacaagtgctggtaaagacctacaagataattttctgacggccctggcaatgagagaagaagacaatcgcagtggaaaactgagttccgtgatctttattcgtgacagaaattctcatgggcaagagatatcaggatacatcgactatgcccacaggctaaagacggaagattttgaagtctactttactggaaaaaaaagacttcttccaaggcctacagatataaggcgcagccaggtgacaactctactagaatcactatcctgacagaactctacatacaagctgtcatttttgaccacatttccagaaggaagacttaagtaccaacatgttaatttcctaataatttgctaaatttaaataaattccgtagacagagcaaattagaataataaatgagccctgtagctggaaggcaaattagaacaataaagttaataaagaagttagaaagaaaactgtaaaa

SEQ ID NO: 66227 - DNA, 897 bp, Homo sapiens
ctgccctcctgcttccgttgctagggacgcttcggccgaggataccgcaatggatcaggaagaggggctgaaggccttggacaatattgtcactcaattcaacgcctatgaagatttcctggactcgcagatcactactgtggacttgtactacctggaggatgaaaccctggcccgccagttggtggagctaggctaccgagggactggagagagagtgaaaagggaagattttgaagcaaggaaagcggctatagagattgcaagactggctgaaagagctcagcaaaagacgctaacaagtgctggtaaagacctacaagataattttctgacggccctggcaatgagagaagaagacaatcgcagtggaaaactgagttccgtgatctttattcgtgacagaaattctcatgggcaagagatatcaggatacatcgactatgcccacaggctaaagacggaagattttgaagtctactttactggaaaaaaaagacttcttccaaggcctacagatataagcttttacaactgggacgctgatattgctgttagtaattcaagtcccaactatcaagtgattgccgataatccagaaggcttacttttcagatacaaaagagacagaaaaattcttaatgtggacccaaaggcgcagccaggtgacaactctactagaatcactatcctgacagaactctacatacaagctgtcatttttgaccacatttccagaaggaagacttaagtaccaacatgttaatttcctaataatttgctaaatttaaataaattccgtagacagagcaaattagaataataaatgagccctgtagctggaaggcaaattagaacaataaagttaataaagaagttagaaagaaaactgtaaaa

SEQ ID NO: 66228 - DNA, 515 bp, Homo sapiens
ctgccctcctgcttccgttgctagggacgcttcggccgaggataccgcaatggatcaggaagaggggctgaaggccttggacaatattgtcactcaattcaacgcctatgaagatttcctggactcgcagatcactactgtggacttgtactacctggaggatgaaaccctggcccgccagttggtggagctaggctaccgagggactggagagagagtgaaaagggaagattttgaagcaaggaaagcggctatagagattgcaagactggctgaaagagctcagcaaaagacgctaacaagtgctggtaaagacctacaagataattttctgacggccctggcaatgagagaagaagacaatcgcagtggaaaactgagtatactggaacccatcttgaatcatgctatggaccgaaagtctgtgacctccccacctaaattcatacgttgaaatcttcactccctaagtgatagtattaggaggtgagggcctttgaaggacaattacatca

SEQ ID NO: 66229 - DNA, 532 bp, Homo sapiens
gtgagaatgcattgtgtaaatgatcatagcacagtgcttttctgtacgtctcaggtcggatttcctggcagcagaccctgagacagagggtcacatgcaggaagtggatcaggcagtccttgcgggggaataaaggaggcaggaccgtgcagagggagaagttgacctgcacggtcaactttgtaggtagccccagcaaaggccccagccaatcttgggggcaccggggtggcgctgcagaattgttctgaattgaggcaaaggtttgggcccttcctacccctggatggtgcggaaggccccctgcagaaggctgatccctggagaggtagctctctttagtcaagggcagatccagaagaggcacctgtctgagagctgtggtcatgaatacttccagcagctggaggaatgaaggttttgtgctgaaagggttggagggctctgagggtgtgtgacagcacctaattacactgttcatttccagatttctacaatttctgcagtaacatttattttataataaaaaaag

SEQ ID NO: 66230 - DNA, 454 bp, Homo sapiens
atagcctggatagccaatgcaatcctaagcaaagagaacaaagcttgaggcatcacactatctgactttagactatactagaagggtacagtaatcaaaacagcatggtactggtagacgcacagaccaatggaacagttaagagaactcagaaataaagccacacaactacgaccatctgatctttgagaaagttgacaaaaacaagcaatggggaaaggattcattattcaacaagtggtgccaggttaactggatagccatgtaaagaagattgaaactggaccccttcctttcaccacatacaaaaattaactcaagatgcattaaagacttaaatgtaaaacctaaaactataaaattataaccctagaagaaagcctaggaaataccattatgtgatattggccctgatgaagatttcatgacaaaaactccagtagcaattgtgaaa

SEQ ID NO: 66231 - DNA, 1026 bp, Homo sapiens
tggatgattcttagcctatggagagtaaagcacaggtttttaagtttcttagatacactgtattgatgaggatacagactaagctgctgaaacaggagatcccagattatagtgacttcagctttttcagtcctcctggtggctggttcagggcttgtttggtggcttgtggggtcatcacattgtatactctcctgtcctgtgtgccagcacctggtcacatggccacccctgactgcaaggaagatgggaaaatgtcatcgttagctgggtaaccaggggcccagctaaaactcagggttctttttctaatagttgaaagggagagtgagtatcacagagccccagcagtttctctcctaagcatcttttattttccaatgaggacactgccaggccagttgtgtcttccttggctagagctttgatctgcaaacttggagctgattctgacctcagaccctggggtgacgagaggagctctatgattctagttagaccagcctaatggatgaatcctgactccctcacttgctgtttgtgtggccttcagttcggctgttgagcctctctgacattccgattcactggtaatgataactgtctcacaaagtcattgtaacaagtattttgagaacatccaggataatgccagtcatatgatgagttttcagtaaaagttcctttgttccttcctctataggatgaatcatagaaatcatctacttacctaacgcttccagtgaaacaagttaatttgctcagagcctgatttaatttgcattattgcatcaggatgacacctctttacagtaaagttatttatacttctccaaatgcaaaatttaaaattattttggctggacgtggtggctctcgcctgtaatcccagcactttgggaggccgaggaaggtggatcacttgaggtcaggagttcgagaccagcctggcaacatggtgaaaccctgtctctactaaaaatgcaaaaattagctgggcgtggtggcgcacacctgtaatcccag

SEQ ID NO: 66232 - DNA, 485 bp, Homo sapiens
cagcagggcagggctgtagccaggtgagcagagggcagaatcctcccctggaatacattagaccctgtggtgacattagttcatgctcagtgctctgttcacaatctctggtcctcacaacggccctgttagcgggttaggtgtgggcatgcagtgaggtgggtcctggaacttgtacccaggcttgtctgacaccagagcccatgctctccaccacagccgtgtctccaacctctccctagtgcttggtgctactgcaaggacttctttttccttctccccttaactgtcatgataaagtgacagcatctcagacaaatttaaaaattccctgaaggaatcagctggttggcgctgaactttgcagggtgccgtgaacaccctgggctggagtctgaatgcattgctttcctcatgcaacagtattgactgagccactgtaaacacacaagagtgtgcagtggcttcggggtccgagccgatcg

SEQ ID NO: 66233 - DNA, 689 bp, Homo sapiens
cagcagggcagggctgtagccaggtgagcagagggcagaatcctcccctggaatacattagaccttgtgtcttccttggctagagctttgatctgcaaacttggagctgattctgacctcagaccctggggtgacgagaggagctctatgattctagttagaccagcctaatggatgaatcctgactccctcacttgctgtttgtgtggccttcagttcggctgttgagcctctctgacattccgattcactggtaatgataactgtctcacaaagtcattgtaacaagtattttgagaacatccaggataatgccagtcatatgatgagttttcagtaaaagttcctttgttccttcctctataggatgaatcatagaaatcatctacttacctaacgcttccagtgaaacaagttaatttgctcagagcctgatttaatttgcattattgcatcaggatgacacctctttacagtaaagttatttatacttctccaaatgcaaaatttaaaattattttggctggacgtggtggctctcgcctgtaatcccagcactttgggaggccgaggaaggtggatcacttgaggtcaggagttcgagaccagcctggcaacatggtgaaaccctgtctctactaaaaatgcaaaaattagctgggcgtggtggcgcacacctgtaatcccag

SEQ ID NO: 66234 - DNA, 967 bp, Homo sapiens
cagcagggcagggctgtagccaggtgagcagagggcagaatcctcccctggaatacattagaccctgtggtgacattagttcatgctcagtgctctgttcacaatctctggtcctcacaacggccctgttagcgggttaggtgtgggcatgcagtgaggtgggtcctggaacttgtacccaggcttgtctgacaccagagcccatgctctccaccacagccgtgtctccaacctctccctagtgcttggtgctactgcaaggacttctttttccttctccccttaactgtcatgataaagtgacagcatctcagacaaatttaaaaattccctgaaggaatcagctggttggcgctgaactttgcagggtgccgtgaacaccctgggctggagtctgaatgcattgctttcctcatgcaacagtattgactgagccactgtaaacacacaagagttttgctgggtgctgagtgtattgtgagttttcatcgtctgtgctaatgctcatcttactgagcataataacctggagcatgacctatattgaattcacttggtggttgctgcaggatgcttaaaggaatgaaacttgagggtaggttaagggaagcaatggtgatgagctgagctttcaccaggtggcacctggctctggatgctgatgtgtttggatcagtggtagaaaacaagcaaatagaatggcgagttagacagtttccactgcgcacagcacttgggtgttttccatgctataaatctttattttttccactttggtttgagtgggatcacttccattggagctaatccagaaattgctaattcagtgggaattgtgagtctataagttaggaataaattgagcttaacatgcaatatattggaaatgatcctagatcctggatccttcctcttcccaaacagtgagctgtgagggagtcactcctcccaccaggttagaaccatc

SEQ ID NO: 66235 - DNA, 1063 bp, Homo sapiens
gcaatcccaaagccttttcaaccgcaggattgtcaggtttaggtgagtctcatgtggctgctgcacctccagatatatgctctcgaacagtgtggcctgatgaaactatgggaccctttggacctcaagatcagaggttccagcttcctgggaacataggttttgattgtcacctcaatgggactgcttcacagaagaaaagcctggttcataaaactttgcctgatgttctagcagaacctttatcaagtgaaagacatgagtttgtgatggcacaatatgtgaatgaatttcagggtaatgatgcacctgttgaacaagaaattaacagtgcagaaacttactttgaaagtgccagagtagagtgtgcaatacaaacatgtccagaattgctgcgaaaagattttgaatcactgtttccagaagtagctaatggcaaactaatgattctgactgtaacacaaaaaactaagaatgatatgactgtttggagtgaagaagtagaaattgaaagagaagtgctcttagaaaagttcatcaatggtgctaaggaaatttgctatgctcttcgagctgagggttattgggctgactttattgacccatcatctggtttggcattttttggaccatatacaaacaacactctttttgaaactgatgaacgctaccgacatttaggattctctgttgatgaccttggatgctgtaaagtgattcgtcatagtctctggggtacccatgtagttgtagggagtatcttcactaatgcaacaccagacagccatattatgaagaaattaagtggaaattagcagaaatatccattcatttgctgtactatttgtatgtaatatttgggattttaaaattgcaaatgttcatttattcatatcattgaatacacgttgaacacatccacattgtataggatgtggtaattagcttgtaaccagggtatgatctgctattgttatttctcctctttattggaaaaaggcctcagttttaattattttcttcccaaaataaatcacacatttggttacaaaaaaaaaaaaaa

SEQ ID NO: 66236 - DNA, 1164 bp, Homo sapiens
gcaatcccaaagccttttcaaccgcaggattgtcaggtttaggtgagtctcatgtggctgctgcacctccagatatatgctctcgaacagtgtggcctgatgaaactatgggaccctttggacctcaagatcagaggttccagcttcctgggaacataggttttgattgtcacctcaatgggactgcttcacagaagaaaagcctggttcataaaactttgcctgatgttctagcagaacctttatcaagtgaaagacatgagtttgtgatggcacaatatgtgaatgaatttcagggtaatgatgcacctgttgaacaagaaattaacagtgcagaaacttactttgaaagtgccagagtagagtgtgcaatacaaacatgtccagaattgctgcgaaaagattttgaatcactgtttccagaagtagctaatggcaaactaatgattctgactgtaacacaaaaaactaagaatgatatgactgtttggagtgaagaagtagaaattgaaagagaagtgctcttagaaaagttcatcaatggtgctaaggaaatttgctatgctcttcgagctgagggttattgggctgactttattgacccatcatctggtttggcattttttggaccatatacaaacaacactctttttgaaactgatgaacgctaccgacatttaggattctctgttgatgaccttggatgctgtaaagtgattcgtcatagtctctggggtacccatgtagttgtagggagtatcttcactaatgcaacaccagacagccatattatgaagaaattaagtggaaattagcagaaatatccattcatttgctgtactatttgtatgtaatatttgggttgatctataaacactgtcagactaaagtttttaaaatatacttatttctaagtatttatttcagcatttatgaatttgcaacattggcaagtgatttgggattttaaaattgcaaatgttcatttattcatatcattgaatacacgttgaacacatccacattgtataggatgtggtaattagcttgtaaccagggtatgatctgctattgttatttctcctctttattggaaaaaggcctcagttttaattattttcttcccaaaataaatcacacatttggttacaaaaaaaaaaaaaa

SEQ ID NO: 66237 - DNA, 726 bp, Homo sapiens
tttggttcaatgccaactgaagtttgtcggcatcaccgttagccgttcagatgttccctaaggccgacatagcttggaatgttccggtttccctgatcacttggccattatttcgactgttccgcggctggagaacacccactacaagagttaggtggtgccacagatccatacccactgtcaggtcccttggacatggtttctggggtttagccctggctcccaataaggggccacgtgtgctgtggccaggcctgcagacagacctcaagggacagggaatgctgaggcctcgaggggcctcccggggcccaggactctggcttctctcctcagacttctattttttaaagactgtgaaatgtttgtcttttctgttttttaaatgatcatgaaaccaaaaagagactgatcatccaggcctcagcctcatcctccccaggacccctgtccaggatggagggtccaatcctaggacagccttgttcctcagcacccctagcatgaacttgtgggatggtggggttggcttccctggcatgatggacaaaggcctggcgtcggccagaggggctgctccagtgggcaggggtagctagcgtgtgccaggcagatcctctggacacgtaacctatgtcagacactacatgatgactcaaggccaataataaagacatttcctacctgcaaaaaaaccacaaaaaactcgagactagttctctctcc

SEQ ID NO: 66238 - DNA, 2633 bp, Homo sapiens
cgcgcaacttgcggccaaactttccccccggcctcccgcgctcggatggcggcccgctgagttggccgcagcccccgggcgagcggcggccaggccagaggacgccccctgcgcggctcgggccgggccatggcccgcgcgcccccgccggggccccagggcggcgggacgcgagtcctctgggcccccggcccgcgcctctagcgtgcccctcccggccccgggcccggccccgcgcacgcgtgggaaagttggcctggaaccggcccgaccagttccgcccgggcgcgaggaccggccgcaggaagttgctgcaaaacttttttggggggtgcagcccgtgccccccgcgcgccggggccgaatgcgcgccgcgtagggtcccccgggccgagaggggtgcccggagggaagagcgcggtgggggcgccccggccccgctgccctggggctatggccatggtgaccggcggctggggcggccccggcggcgacacgaacggcgtggacaaggcgggcggctacccgcgcgcggccgaggacgactcggcctcgccccccggtgccgccagcgacgccgagccgggcgacgaggagcggccggggctgcaggtggactgcgtggtgtgcggggacaagtcgagcggcaagcattacggtgtcttcacctgcgagggctgcaagagctttttcaagcgaagcatccgccgcaacctcagctacacctgccggtccaaccgtgactgccagatcgaccagcaccaccggaaccagtgccagtactgccgtctcaagaagtgcttccgggtgggcatgaggaaggaggcggtgcagcgcggccgcatcccgcactcgctgcctggtgccgtggccgcctcctcgggcagccccccgggctcggcgctggcggcagtggcgagcggcggagacctcttcccggggcagccggtgtccgaactgatcgcgcagctgctgcgcgctgagccctaccctgcggcggccggacgcttcggcgcagggggcggcgcggcgggcgcggtgctgggcatcgacaacgtgtgcgagctggcggcgcggctgctcttcagcaccgtggagtgggcgcgccacgcgcccttcttccccgagctgccggtggccgaccaggtggcgctgctgcgcctgagctggagcgagctcttcgtgctgaacgcggcgcaggcggcgctgcccctgcacacggcgccgctactggccgccgccggcctccacgccgcgcctatggccgccgagcgcgccgtggctttcatggaccaggtgcgcgccttccaggagcaggtggacaagctgggccgcctgcaggtcgactcggccgagtatggctgcctcaaggccatcgcgctcttcacgcccgacgcctgtggcctctcagacccggcccacgttgagagcctgcaggagaaggcgcaggtggccctcaccgagtatgtgcgggcgcagtacccgtcccagccccagcgcttcgggcgcctgctgctgcggctccccgccctgcgcgcggtccctgcctccctcatctcccagctgttcttcatgcgcctggtggggaagacgcccattgagacactgatcagagacatgctgctgtcggggagtaccttcaactggccctacggctcgggccagtgaccatgacggggccacgtgtgctgtggccaggcctgcagacagacctcaagggacagggaatgctgaggcctcgaggggcctcccggggcccaggactctggcttctctcctcagacttctattttttaaagactgtgaaatgtttgtcttttctgttttttaaatgatcatgaaaccaaaaagagactgatcatccaggcctcagcctcatcctccccaggacccctgtccaggatggagggtccaatcctaggacagccttgttcctcagcacccctagcatgaacttgtgggatggtggggttggcttccctggcatgatggacaaaggcctggcgtcggccagaggggctgctccagtgggcaggggtagctagcgtgtgccaggcagatcctctggacacgtaacctatgtcagacactacatgatgactcaaggccaataataaagacatttcctacctgaaaaaaaaaaaaaaaaaaaaaaaaaaaaaagggggggcggcaaaaatttcccccgagggggccccgaaaggatgaacccgcatccccagctttcgttgctaccaagatggggtcccctattacggcgacttcgtgttattctagcagtccatacgacgacgggggacggtcgttttcaaacacaacgctgcgtactgtgggaaaacggtggtatggctagtgggaaaaatttggggtggaagagagaacccttaaaatgtcctgtggaggagtggggcacaaatattgtgcggcaacaacataacctctagagagaaagtttataagcgctcttaggggatacatattatacagaattttgaaggcgtggtcaacaggggggtatacacatacctgagaaataatgactgagcagtgattggagaacagtgtgaggagcgaaggagaagaagtgaatttgcatcggaacacatctttttaaccagggatcatgttgaaaa

SEQ ID NO: 66239 - DNA, 1674 bp, Homo sapiens
cggccgcgcggatcgatacggcgcgcccttggggtcaaatatcacttccaaagtcgctgtggctacggaggcggcagacggagggaggctggggtggcacggggcggccttcttcgcatgaggggcccagcggtgggggtgggggtgggagctgggcttgcccatctcagggaacccctctgggctcactctgggccttgggtcaccggaaatcgccactggaaggccggcagggccaccggaattgactgaaacgtccctctcccccaggggtccaaccgtgactgccagatcgaccagcaccaccggaaccagtgccagtactgccgtctcaagaagtgcttccgggtgggcatgaggaaggaggcggtgcagcgcggccgcatcccgcactcgctgcctggtgccgtggccgcctcctcgggcagccccccgggctcggcgctggcggcagtggcgagcggcggagacctcttcccggggcagccggtgtccgaactgatcgcgcagctgctgcgcgctgagccctaccctgcggcggccggacgcttcggcgcagggggcggcgcggcgggcgcggtgctgggcatcgacaacgtgtgcgagctggcggcgcggctgctcttcagcaccgtggagtgggcgcgccacgcgcccttcttccccgagctgccggtggccgaccaggtggcgctgctgcgcctgagctggagcgagctcttcgtgctgaacgcggcgcaggcggcgctgcccctgcacacggcgccgctactggccgccgccggcctccacgccgcgcctatggccgccgagcgcgccgtggctttcatggaccaggtgcgcgccttccaggagcaggtggacaagctgggccgcctgcaggtcgactcggccgagtatggctgcctcaaggccatcgcgctcttcacgcccgacgcctgtggcctctcagacccggcccacgttgagagcctgcaggagaaggcgcaggtggccctcaccgagtatgtgcgggcgcagtacccgtcccagccccagcgcttcgggcgcctgctgctgcggctccccgccctgcgcgcggtccctgcctccctcatctcccagctgttcttcatgcgcctggtggggaagacgcccattgagacactgatcagagacatgctgctgtcggggagtaccttcaactggccctacggctcgggccagtgaccatgacggggccacgtgtgctgtggccaggcctgcagacagacctcaagggacagggaatgctgaggcctcgaggggcctcccggggcccaggactctggcttctctcctcagacttctattttttaaagactgtgaaatgtttgtcttttctgttttttaaatgatcatgaaaccaaaaagagactgatcatccaggcctcagcctcatcctccccaggacccctgtccaggatggagggtccaatcctaggacagccttgttcctcagcacccctagcatgaacttgtgggatggtggggttggcttccctggcatgatggacaaaggcctggcgtcggccagaggggctgctccagtgggcaggggtagctagcgtgtgccaggcagatcctctggacacgtaacctatgtcagacactacatgatgactcaaggccaataataaagacatttcctacctg

SEQ ID NO: 66240 - DNA, 2056 bp, Homo sapiens
cgcgcaacttgcggccaaactttccccccggcctcccgcgctcggatggcggcccgctgagttggccgcagcccccgggcgagcggcggccaggccagaggacgccccctgcgcggctcgggccgggccatggcccgcgcgcccccgccggggccccagggcggcgggacgcgagtcctctgggcccccggcccgcgcctctagcgtgcccctcccggccccgggcccggccccgcgcacgcgtgggaaagttggcctggaaccggcccgaccagttccgcccgggcgcgaggaccggccgcaggaagttgctgcaaaacttttttggggggtgcagcccgtgccccccgcgcgccggggccgaatgcgcgccgcgtagggtcccccgggccgagaggggtgcccggagggaagagcgcggtgggggcgccccggccccgctgccctggggctatggccatggtgaccggcggctggggcggccccggcggcgacacgaacggcgtggacaaggcgggcggctacccgcgcgcggccgaggacgactcggcctcgccccccggtgccgccagcgacgccgagccgggcgacgaggagcggccggggctgcaggtggactgcgtggtgtgcggggacaagtcgagcggcaagcattacggtgtcttcacctgcgagggctgcaagagctttttcaagcgaagcatccgccgcaacctcagctacacctgccggtccaaccgtgactgccagatcgaccagcaccaccggaaccagtgccagtactgccgtctcaagaagtgcttccgggtgggcatgaggaaggaggcggtgcagcgcggccgcatcccgcactcgctgcctggtgccgtggccgcctcctcgggcagccccccgggctcggcgctggcggcagtggcgagcggcggagacctcttcccggggcagccggtgtccgaactgatcgcgcagctgctgcgcgctgagccctaccctgcggcggccggacgcttcggcgcagggggcggcgcggcgggcgcggtgctgggcatcgacaacgtgtgcgagctggcggcgcggctgctcttcagcaccgtggagtgggcgcgccacgcgcccttcttccccgaggctgcccctgcacacggcgccgctactggccgccgccggcctccacgccgcgcctatggccgccgagcgcgccgtggctttcatggaccaggtgcgcgccttccaggagcaggtggacaagctgggccgcctgcaggtcgactcggccgagtatggctgcctcaaggccatcgcgctcttcacgcccgacgcctgtggcctctcagacccggcccacgttgagagcctgcaggagaaggcgcaggtggccctcaccgagtatgtgcgggcgcagtacccgtcccagccccagcgcttcgggcgcctgctgctgcggctccccgccctgcgcgcggtccctgcctccctcatctcccagctgttcttcatgcgcctggtggggaagacgcccattgagacactgatcagagacatgctgctgtcggggagtaccttcaactggccctacggctcgggccagtgaccatgacggggccacgtgtgctgtggccaggcctgcagacagacctcaagggacagggaatgctgaggcctcgaggggcctcccggggcccaggactctggcttctctcctcagacttctattttttaaagactgtgaaatgtttgtcttttctgttttttaaatgatcatgaaaccaaaaagagactgatcatccaggcctcagcctcatcctccccaggacccctgtccaggatggagggtccaatcctaggacagccttgttcctcagcacccctagcatgaacttgtgggatggtggggttggcttccctggcatgatggacaaaggcctggcgtcggccagaggggctgctccagtgggcaggggtagctagcgtgtgccaggcagatcctctggacacgtaacctatgtcagacactacatgatgactcaaggccaataataaagacatttcctacctg

SEQ ID NO: 66241 - DNA, 487 bp, Homo sapiens
gcaggctagggaaatttctttattattggccttgagtcatcatgtagtgtctgacataggttacgtgtccagaggatctgcctggcacacgctagctacccctcccggggcccaggactctggcttctctcctcagacttctattttttaaagactgtgaaatgtttgtcttttctgttttttaaatgatcatgaaaccaaaaagagactgatcatccaggcctcagcctcatcctccccaggacccctgtccaggatggagggtccaatcctaggacagccttgttcctcagcacccctagcatgaacttgtgggatggtggggttggcttccctggcatgatggacaaaggcctggcgtcggccagaggggctgctccagtgggcaggggtagctagcgtgtgccaggcagatcctctggacacgtaacctatgtcagacactacatgatgactcaaggccaataataaagacatttcctacctg

SEQ ID NO: 66242 - DNA, 287 bp, Homo sapiens
gatgcttctgccttggcctcccaaagtgctgggactgtggccgtgagccatcatgcccggccccctgttcttacccacagtggcgagtggtgtcccctagtcacccctgtgggctctgtgttctctagctgcctcccacctgtctgacttgcctttgtccccctagacgcctgtggcctctcagacccggcccacgttgagagcctgcaggagaaggcgcaggtggccctcaccgagtatgtgcgggcgcagtacccgtcccagccccagcgcttcgggcgcctgct

SEQ ID NO: 66243 - DNA, 412 bp, Homo sapiens
cagggaatgctgaggcctcgaggggcctcccggggcccaggactctggcttctctcctcagacttctattttttaaagactgtgaaatgtttgtcttttctgttttttaaatgatcatgaaaccaaaaagagactgatcatccaggcctcagcctcatcctccccaggacccctgtccaggatggagggtccaatcctaggacagccttgttcctcagcacccctagcatgaacttgtgggatggtggggttggcttccctggcatgatggacaaaggcctggcgtcggccagaggggctgctccagtgggcaggggtagctagcgtgtgccaggcagatcctctggacacgtaacctatgtcagacactacatgatgactcaaggccaataataaagacatttcctacctg

SEQ ID NO: 66244 - DNA, 2133 bp, Homo sapiens
cgcgcaacttgcggccaaactttccccccggcctcccgcgctcggatggcggcccgctgagttggccgcagcccccgggcgagcggcggccaggccagaggacgccccctgcgcggctcgggccgggccatggcccgcgcgcccccgccggggccccagggcggcgggacgcgagtcctctgggcccccggcccgcgcctctagcgtgcccctcccggccccgggcccggccccgcgcacgcgtgggaaagttggcctggaaccggcccgaccagttccgcccgggcgcgaggaccggccgcaggaagttgctgcaaaacttttttggggggtgcagcccgtgccccccgcgcgccggggccgaatgcgcgccgcgtagggtcccccgggccgagaggggtgcccggagggaagagcgcggtgggggcgccccggccccgctgccctggggctatggccatggtgaccggcggctggggcggccccggcggcgacacgaacggcgtggacaaggcgggcggctacccgcgcgcggccgaggacgactcggcctcgccccccggtgccgccagcgacgccgagccgggcgacgaggagcggccggggctgcaggtggactgcgtggtgtgcggggacaagtcgagcggcaagcattacggtgtcttcacctgcgagggctgcaagagctttttcaagcgaagcatccgccgcaacctcagctacacctgccggtccaaccgtgactgccagatcgaccagcaccaccggaaccagtgccagtactgccgtctcaagaagtgcttccgggtgggcatgaggaaggaggcggtgcagcgcggccgcatcccgcactcgctgcctggtgccgtggccgcctcctcgggcagccccccgggctcggcgctggcggcagtggcgagcggcggagacctcttcccggggcagccggtgtccgaactgatcgcgcagctgctgcgcgctgagccctaccctgcggcggccggacgcttcggcgcagggggcggcgcggcgggcgcggtgctgggcatcgacaacgtgtgcgagctggcggcgcggctgctcttcagcaccgtggagtgggcgcgccacgcgcccttcttccccgagctgccggtggccgaccaggtggcgctgctgcgcctgagctggagcgagctcttcgtgctgaacgcggcgcaggcggcgctgcccctgcacacggcgccgctactggccgccgccggcctccacgccgcgcctatggccgccgagcgcgccgtggctttcatggaccaggtgcgcgccttccaggagcaggtggacaagctgggccgcctgcaggtcgactcggccgagtatggctgcctcaaggccatcgcgctcttcacgcccgacgcctgtggcctctcagacccggcccacgttgagagcctgcaggagaaggcgcaggtggccctcaccgagtatgtgcgggcgcagtacccgtcccagccccagcgcttcgggcgcctgctgctgcggctccccgccctgcgcgcggtccctgcctccctcatctcccagctgttcttcatgcgcctggtggggaagacgcccattgagacactgatcagagacatgctgctgtcggggagtaccttcaactggccctacggctcgggccagtgaccatgacggggccacgtgtgctgtggccaggcctgcagacagacctcaagggacagggaatgctgaggcctcgaggggcctcccggggcccaggactctggcttctctcctcagacttctattttttaaagactgtgaaatgtttgtcttttctgttttttaaatgatcatgaaaccaaaaagagactgatcatccaggcctcagcctcatcctccccaggacccctgtccaggatggagggtccaatcctaggacagccttgttcctcagcacccctagcatgaacttgtgggatggtggggttggcttccctggcatgatggacaaaggcctggcgtcggccagaggggctgctccagtgggcaggggtagctagcgtgtgccaggcagatcctctggacacgtaacctatgtcagacactacatgatgactcaaggccaataataaagacatttcctacctg

SEQ ID NO: 66245 - DNA, 627 bp, Homo sapiens
acggccgctcggcgcctggagaaggctgtgcgggcggggacggctgcagcccttgccggagagggcgggccggggtcagctgcggcgggcgggccggcgcggggagctgtgggcggcagctgcgtctcctgccaccgccctccctccgccacgatgccggggatcgacaagctgcccatcgaggagacgctggaggacagcccgcagacaaggtctttactaggtgtatttgaagaagatgccacagctatttccaactatatgaaccagttgtatcaagctatgcatcggatttatgatgcacagaatgaattaagtgcagcaacacacctgacctcaaaacttttaaaagaatatgaaaaacagcgttttccattgggaggtgatgatgaagttatgagctctacattgcaacagttttcaaaagttatagatgagcttagctcttgtcatgcagtgctttcaactcaacttgctgatgccatgatgttccccattacccagtttaaagaaagagatctgaaagaaatactaacattaaaggaagtatttcagattgcaagtaatgatcatgatgctgcgattaatagatatagccgtttatcaaaaaaaagagaaaatgacaag

SEQ ID NO: 66246 - DNA, 6049 bp, Homo sapiens
acggccgctcggcgcctggagaaggctgtgcgggcggggacggctgcagcccttgccggagagggcgggccggggtcagctgcggcgggcgggccggcgcggggagctgtgggcggcagctgcgtctcctgccaccgccctccctccgccacgatgccggggatcgacaagctgcccatcgaggagacgctggaggacagcccgcagacaaggtctttactaggtgtatttgaagaagatgccacagctatttccaactatatgaaccagttgtatcaagctatgcatcggatttatgatgcacagaatgaattaagtgcagcaacacacctgacctcaaaacttttaaaagaatatgaaaaacagcgttttccattgggaggtgatgatgaagttatgagctctacattgcaacagttttcaaaagttatagatgagcttagctcttgtcatgcagtgctttcaactcaacttgctgatgccatgatgttccccattacccagtttaaagaaagagatctgaaagaaatactaacattaaaggaagtatttcagattgcaagtaatgatcatgatgctgcgattaatagatatagccgtttatcaaaaaaaagagaaaatgacaaggtgaagtatgaagtaacagaagatgtgtacacatccagaaagaaacaacaccagaccatgatgcattatttttgtgcattaaatactcttcagtacaagaagaaaatagcattgttagaacctctacttgggtacatgcaagctcagataagtttctttaagatgggttctgaaaatcttaatgaacaactggaagaatttttagctaatattggaacaagcgttcagaatgttcgcagggaaatggacagtgatatagagaccatgcaacagacaatagaggatttggaagtagccagtgatcccttatatgtgcctgacccagaccccaccaaatttcctgttaatcgaaatttaacccgaaaggctggataccttaatgctaggaataaaacaggcttggtgtcatctacctgggacagacagttttacttcacgcagggtggaaatttaatgagtcaggcccgtggggatgtagcaggaggcctggccatggacatagacaactgttcagtgatggctgtggactgtgaagacagacgatattgttttcagatcacctctttcgatggaaaaaaatcttcaattttgcaagcagagagtaaaaaagatcatgaagagtggatctgtacaataaacaacatatctaaacaaatatacttaagtgaaaatccagaggaaactgctgcacgagtaaatcaatcagctctggaagctgtcactccttccccatctttccagcagaggcacgagagcctgcggccagcagcaggacaatctcggccaccgacagctcgaaccagcagttcaggatccttaggatctgagtctacaaatttggctgccctctctctagattctcttgttgccccagacaccccaatacagtttgacataatttctcctgtgtgtgaagatcagcctggccaggcaaaagcctttggccagggaggcaggcgtacaaatccatttggagaatctggaggaagtacaaaatctgaaactgaagattctattcttcatcagttatttattgtccgattccttggttcaatggaggtgaaatcagatgaccatccagatgttgtttatgaaactatgcgccaaatcttagctgcccgggccatccataacatctttcgtatgacagaatcgcatttattagtcacttgtgactgtttaaagttaattgatccacagacacaagttacaaggctcacgtttccattaccttgtgtagttttgtatgctacacaccaggaaaataagcgcctttttggatttgttcttcggacatcaagcgggagaagtgaaagtaatctgtcatcagtctgctatatatttgagtcaaacaatgagggggaaaagatatgtgattctgttggactggcaaaacagatagctttgcatgctgaactggatcgtagggcatcagaaaaacaaaaagaaatagagagagtaaaagagaagcaacagaaagaactcaataaacaaaaacagattgaaaaggacttggaagaacaaagtcggttgatagctgcttccagtagaccaaaccaagccagtagtgaggggcagtttgttgtccttagcagtagccagtcagaagagagtgatttgggagaaggaggaaagaagagagaatcagaagcataagcttatacttttggtagatattcccccttggaatttgacagtttctatggtgaaatggcagaaggtaacaactatgttgaaatatcaaggaggagattaagctttatatttgcttatttgttgtagctacattttaaaaaaaagattgaacttgatgacttaggtttgcattgatcttttttcccccttaaacataatgtactatgtattaacatctaaaggaaacctgctcatctccctgaagcagactgctgaggaattacatttgctcaagaattttttccgtcaaattgtgaacttttaattcttgcattgtaattggctgtgtccataagaaatcatttattcttcaggcttagacattcatggatatgcttttctttcattaggaacattttgctggtgatgaggaagcatttagctgaataagtttaaagccctttatacagagaattctacaagtttgcaaatattttaacaatattaaatgtgcaatagaacttttataaaataattagaacagagattttacagttaaggtttcaaattgtggcaggtggtactgttgatctcagggtactttctgggattgctcacatttctctaatgtactgcacttgatgccagtaggaaagaagcttaagtgtcttcagttcaagattgatagagcccttggcattttattatcacattcttagttctcaggttgggacttcaattactgctgcagagcagtagtggttaaaaataagatattggaatttattaaaagatttttgttcaatacattttagattaggattgacaagtaaagatactgctatggaatgatacattgtattttctgcattgtgtgaaatagtttttattgaaagtcaagtgacatttcaaaagaagttctataacaattatgtttcatgcttaaagtaaaaattcccagagtttagtttagaaaatgtaatcttttaaatttcagactgatatattcccagtattttcataatgccatgttttgataaagtactgaatcaccactttatatccacaaaggcaaataactaatgtatgataatagaataatttgcactaattattgtaaatatgtctactcttcaaatgagtaaaaggtccaattttgtgaaagattgaaaatgaattgaatgcctagtagagtataggagaagttgaccaaggaaggatttaacctggtgccaaggttaaaataacatttctctactgcctattgtttatgttaaaccttaattttttttctgtaatcacttttaacactgctaatagaaattatgttttcatgtgtttcacatgaaaaagtatatatatacaaagttaatatagtgggtaaaatactttacatagtcacacatttacaaatttttcaagaggttagccactaagactttaataattttacaagggaaaaagcctttttttttctttgatatacagttttttcttcttagttctgcattagaaatggcatctgttttaggtctcaaaatataactcagctgtttcacactgtatatgtacattgttttctgtaggaataggataatgatatataggatcatgatattccttctatccatgtgccaaatgggtgtaatgtttatttactgatgctttatgttaccaaaacatacagtaaaaaagtagaaatttatgaaatacttttgataaaaagtttattttgtgcttaccaaaaggaatgctttcacaatagtgtatcagttcttttgttttgttaaagttggaatttattctgttgccagcatttaagtagtcatggcaagtcctgtttttaagaccttttggagactggagctttctgttccattaagtcttttgtttatactacaaattgtcacctcacttagttcagatgaaatctgttactctacaaggaaggtgttcatcattaggaggcagctttactaagctggtgctttgcatggtagcaagtgctgccctttatcagcaccctgggtcatagtgtaggctagagttaaggcactggcagacttagggatgctggacagacctgtagttcgttttaagtcatgttcacaggaatttctacaataataaacccatcatctccataggtcagatcgaagtgcattccaatgctaaatagaagttatgagtgggtttaacaattttagatgattcagcttttgttccattactgttgaactatatgaactattccattactgcagagatttaagtatctgttttaataagctctttttgttatttaaaggctgcccatgggtttctgcctagtggtaaagctgattgttaccctcctttgaaatcccttctagttctgagatgctttgagggtaactggattcgattttgggatatcttttctcacattcagacttacacttaatggtgttagaaatcaacaaaactcctttttaaaaagaaaagatattaagcctgcctacttctacaatgcattctgttacctatttgaacagtatgtttgtaactatggcaatgaagtcagtagataggaaaccagttattccttctacctttaaaaattttgagaacttgccaaccagggattaaagctattatcttgaacagagtccctaaagctagtctagtttttgccacatctgcaatgattattgtttaatttcaaaagaatcctcaggctctacaatctaggggtggtaaatgtgtttccactatacttgggaaaaggtcagtaggatgtgcatcctagggaagataaaatcgtatatggtaaaggcatttgagttaattttgcattatatctaggaaccatattatttaaaatttgaatcctattaatgctgagagatcctaagagctagtatgttgtaaaacctgccacctgaataaaatgaaaaaaaaagtgtttttttgagacagagtcttgctctgttgcccaggctggagtgcagtggtgtgatcttgggtcactgcaaactccgcctcccaggttcacgccattctcctgcctcagcctcccgagtagctgggaccacaggggcccaccaccgcgcccggctaattttttgtatttttagtagagacggggtttcaccgtgttagccaggatgttctcgatctcctgacctcatgatccgcccgcctcggcctcccaaagtgctgggattacaggcgtgagccaccgtgcccggccctaaaatgaaattattaatgttggttctgaaacagcctcttagcattcagattgtattttaaatacttaaacacaccaattgtagaaagcaaccctttatttttagcaagtttggtttactcttctcccatgagattttgtctttctacattaactagtaagacataaagatttgaaactggaactatattatactttttaaccaatctctgtggcttcactcatgaaatttacttcagttaatatgagactgggggttaagttgtaactaatatgcaaaattgctttgtatatttggtgattttgtaatgtaagtgaattgattcttatttcactgatactattaatcatgcagtgtacaattcaaaatcatgcaatgtttcactttagaattggatttgaagaactcgactttatgtgatcatggtattggtatacatgtggggtggagaacttattttttcattttgtcacaataggtatatactgacaaggcttcaggaaaaaagttgttagaagattttttaatgtataataaagtccatgatttttgta

SEQ ID NO: 66247 - DNA, 681 bp, Homo sapiens
gagctgtgaaatggctaggcatttccagaaaaatgttgaaaaatcgcggatggtctttatgtagagtgtttaatgcaatcggattacataaactgggattacaggcgtgagccaccgtgcccggccctaaaatgaaattattaatgttggttctgaaacagcctcttagcattcagattgtattttaaatacttaaacacaccaattgtagaaagcaaccctttatttttagcaagtttggtttactcttctcccatgagattttgtctttctacattaactagtaagacataaagatttgaaactggaactatattatactttttaaccaatctctgtggcttcactcatgaaatttacttcagttaatatgagactgggggttaagttgtaactaatatgcaaaattgctttgtatatttggtgattttgtaatgtaagtgaattgattcttatttcactgatactattaatcatgcagtgtacaattcaaaatcatgcaatgtttcactttagaattggatttgaagaactcgactttatgtgatcatggtattggtatacatgtggggtggagaacttattttttcattttgtcacaataggtatatactgacaaggcttcaggaaaaaagttgttagaagattttttaatgtataataaagtccatgatttttgta

SEQ ID NO: 66248 - DNA, 681 bp, Homo sapiens
acggccgctcggcgcctggagaaggctgtgcgggcggggacggctgcagcccttgccggagagggcgggccggggtcagctgcggcgggcgggccggcgcggggagctgtgggcggcagctgcgtctcctgccaccgccctccctccgccacgatgccggggatcgacaagctgcccatcgaggagacgctggaggacagcccgcagaatagagtccaagaagcagagcagcaaagaatatgaagacttttaaagctcatgacaaggtctttactaggtgtatttgaagaagatgccacagctatttccaactatatgaaccagttgtatcaagctatgcatcggatttatgatgcacagaatgaattaagtgcagcaacacacctgacctcaaaacttttaaaagaatatgaaaaacagcgttttccattgggaggtgatgatgaagttatgagctctacattgcaacagttttcaaaagttatagatgagcttagctcttgtcatgcagtgctttcaactcaacttgctgatgccatgatgttccccattacccagtttaaagaaagagatctgaaagaaatactaacattaaaggaagtatttcagattgcaagtaatgatcatgatgctgcgattaatagatatagccgtttatcaaaaaaaagagaaaatgacaag

SEQ ID NO: 66249 - DNA, 814 bp, Homo sapiens
  misc_feature (814)..(814): n is a, c, g, or t
cggacgcgtgggattcaaaatcatgcaatgtttcactttagaattgtacactgcatgattaatagtatcagtgaaataagaatcaattcacttacattacaatgcagtgtacaattcaaaatcatgcaatgtttcactttagaattggatttgaagaactcgactttatgtgatcatggtattggtatacatgtggggtggagaacttattttttcattttgtcacaataggtatatactgacaaggcttcaggaaaaaagttgttagaagattttttaatgtataataaagtccatgatttttgtaaaaaaaaaaaaaaaaaaaaaaaaaaaaaaaaaaaaaaaaaagggggggcgcgccgccaaaaaattccccccggggggccccattccgccccccgtttttttgtaaaaggggcccccaaaagggggagccgcgataataaaagcacagaggcacagcgggcccgccgtcgttttaaacaacagcgtgccgggaagcggggaaacaccgcggtccgtagcgtctgggggatatccttgtgtcgggagagggaacccctatactttcggtgggggcgtggccgcacaatcatggcggcagaaccatcatccctctcccagagagattttaccggcgcccgcagggcgaaattaataacacttctacacggcggcttttatgtggtgttcaaacaccaagccgcgcatatattgcttcggccggctctgaaaaaacttcggctcaacggaactattgtattttcgagcaaacatctttttccgccgggagcattgtggtgatataaccaan

SEQ ID NO: 66250 - DNA, 529 bp, Homo sapiens
ggtgtctagaggatcccacgcgtcaagcaacagaaagaactcaataaacaaaaacagattgaaaaggtatacagtcctaatgtctggatctttatgtgttgtttgtgaagacttaattcagcactatgactttcagatttgaatttccaaatgaagggctgtttctgcttgttcagccacttcataaacagatgattcataccatagcagaaaagggtcacatctgttttttgatatgatgtttacattatagttacgttgacatgtaatatgactgtttcaaaaatataccagaactttaatatttcagaggaggttgtctctgtcaaagcagttgagaggctgtgtagacttaactgccattgctgaaagccattttgccttctatgggggggaaataaataaatatatatgttatatgaaatatataatgaaatgtatatttttaatattgccaggagtgtcaaatcattgtccatccaacagaataattttaaaagacaaatttcagagcaaaacttgaagaatg

SEQ ID NO: 66251 - DNA, 5995 bp, Homo sapiens
acggccgctcggcgcctggagaaggctgtgcgggcggggacggctgcagcccttgccggagagggcgggccggggtcagctgcggcgggcgggccggcgcggggagctgtgggcggcagctgcgtctcctgccaccgccctccctccgccacgatgccggggatcgacaagctgcccatcgaggagacgctggaggacagcccgcagacaaggtctttactaggtgtatttgaagaagatgccacagctatttccaactatatgaaccagttgtatcaagctatgcatcggatttatgatgcacagaatgaattaagtgcagcaacacacctgacctcaaaacttttaaaagaatatgaaaaacagcgttttccattgggaggtgatgatgaagttatgagctctacattgcaacagttttcaaaagttatagatgagcttagctcttgtcatgcagtgctttcaactcaacttgctgatgccatgatgttccccattacccagtttaaagaaagagatctgaaagaaatactaacattaaaggaagtatttcagattgcaagtaatgatcatgatgctgcgattaatagatatagccgtttatcaaaaaaaagagaaaatgacaaggtgaagtatgaagtaacagaagatgtgtacacatccagaaagaaacaacaccagaccatgatgcattatttttgtgcattaaatactcttcagtacaagaagaaaatagcattgttagaacctctacttgggtacatgcaagctcagataagtttctttaagatgggttctgaaaatcttaatgaacaactggaagaatttttagctaatattggaacaagcgttcagaatgttcgcagggaaatggacagtgatatagagaccatgcaacagacaatagaggatttggaagtagccagtgatcccttatatgtgcctgacccagaccccaccaaatttcctgttaatcgaaatttaacccgaaaggctggataccttaatgctaggaataaaacaggcttggtgtcatctacctgggacagacagttttacttcacgcagggtggaaatttaatgagtcaggcccgtggggatgtagcaggaggcctggccatggacatagacaactgttcagtgatggctgtggactgtgaagacagacgatattgttttcagatcacctctttcgatggaaaaaaatcttcaattttgcaagcagagagtaaaaaagatcatgaagagtggatctgtacaataaacaacatatctaaacaaatatacttaagtgaaaatccagaggaaactgctgcacgagtaaatcaatcagctctggaagctgtcactccttccccatctttccagcagaggcacgagagcctgcggccagcagcaggacaatctcggccaccgacagctcgaaccagcagttcaggatccttaggatctgagtctacaaatttggctgccctctctctagattctcttgttgccccagacaccccaatacagtttgacataatttctcctgtgtgtgaagatcagcctggccaggcaaaagcctttggccagggaggcaggcgtacaaatccatttggagaatctggaggaagtacaaaatctgaaactgaagattctattcttcatcagttatttattgtccgattccttggttcaatggaggtgaaatcagatgaccatccagatgttgtttatgaaactatgcgccaaatcttagctgcccgggccatccataacatctttcgtatgacagaatcgcatttattagtcacttgtgactgtttaaagttaattgatccacagacacaagttacaaggctcacgtttccattaccttgtgtagttttgtatgctacacaccaggaaaataagcgcctttttggatttgttcttcggacatcaagcgggagaagtgaaagtaatctgtcatcagtctgctatatatttgagtcaaacaatgagggggaaaagatatgtgattctgttggactggcaaaacagatagctttgcatgctgaactggatcgtagggcatcagaaaaacaaaaagaaatagagagagtaaaagagaagcaacagaaagaactcaataaacaaaaacagattgaaaaggacttggaagaacaaagtcggttgatagctgcttccagtagaccaaaccaagccagtagtgaggggcagtttgttgtccttagcagtagccagtcagaagagagtgatttgggagaaggaggaaagaagagagaatcagaagcataagcttatacttttggtagatattcccccttggaatttgacagtttctatggtgaaatggcagaaggtaacaactatgttgaaatatcaaggaggagattaagctttatatttgcttatttgttgtagctacattttaaaaataatgtactatgtattaacatctaaaggaaacctgctcatctccctgaagcagactgctgaggaattacatttgctcaagaattttttccgtcaaattgtgaacttttaattcttgcattgtaattggctgtgtccataagaaatcatttattcttcaggcttagacattcatggatatgcttttctttcattaggaacattttgctggtgatgaggaagcatttagctgaataagtttaaagccctttatacagagaattctacaagtttgcaaatattttaacaatattaaatgtgcaatagaacttttataaaataattagaacagagattttacagttaaggtttcaaattgtggcaggtggtactgttgatctcagggtactttctgggattgctcacatttctctaatgtactgcacttgatgccagtaggaaagaagcttaagtgtcttcagttcaagattgatagagcccttggcattttattatcacattcttagttctcaggttgggacttcaattactgctgcagagcagtagtggttaaaaataagatattggaatttattaaaagatttttgttcaatacattttagattaggattgacaagtaaagatactgctatggaatgatacattgtattttctgcattgtgtgaaatagtttttattgaaagtcaagtgacatttcaaaagaagttctataacaattatgtttcatgcttaaagtaaaaattcccagagtttagtttagaaaatgtaatcttttaaatttcagactgatatattcccagtattttcataatgccatgttttgataaagtactgaatcaccactttatatccacaaaggcaaataactaatgtatgataatagaataatttgcactaattattgtaaatatgtctactcttcaaatgagtaaaaggtccaattttgtgaaagattgaaaatgaattgaatgcctagtagagtataggagaagttgaccaaggaaggatttaacctggtgccaaggttaaaataacatttctctactgcctattgtttatgttaaaccttaattttttttctgtaatcacttttaacactgctaatagaaattatgttttcatgtgtttcacatgaaaaagtatatatatacaaagttaatatagtgggtaaaatactttacatagtcacacatttacaaatttttcaagaggttagccactaagactttaataattttacaagggaaaaagcctttttttttctttgatatacagttttttcttcttagttctgcattagaaatggcatctgttttaggtctcaaaatataactcagctgtttcacactgtatatgtacattgttttctgtaggaataggataatgatatataggatcatgatattccttctatccatgtgccaaatgggtgtaatgtttatttactgatgctttatgttaccaaaacatacagtaaaaaagtagaaatttatgaaatacttttgataaaaagtttattttgtgcttaccaaaaggaatgctttcacaatagtgtatcagttcttttgttttgttaaagttggaatttattctgttgccagcatttaagtagtcatggcaagtcctgtttttaagaccttttggagactggagctttctgttccattaagtcttttgtttatactacaaattgtcacctcacttagttcagatgaaatctgttactctacaaggaaggtgttcatcattaggaggcagctttactaagctggtgctttgcatggtagcaagtgctgccctttatcagcaccctgggtcatagtgtaggctagagttaaggcactggcagacttagggatgctggacagacctgtagttcgttttaagtcatgttcacaggaatttctacaataataaacccatcatctccataggtcagatcgaagtgcattccaatgctaaatagaagttatgagtgggtttaacaattttagatgattcagcttttgttccattactgttgaactatatgaactattccattactgcagagatttaagtatctgttttaataagctctttttgttatttaaaggctgcccatgggtttctgcctagtggtaaagctgattgttaccctcctttgaaatcccttctagttctgagatgctttgagggtaactggattcgattttgggatatcttttctcacattcagacttacacttaatggtgttagaaatcaacaaaactcctttttaaaaagaaaagatattaagcctgcctacttctacaatgcattctgttacctatttgaacagtatgtttgtaactatggcaatgaagtcagtagataggaaaccagttattccttctacctttaaaaattttgagaacttgccaaccagggattaaagctattatcttgaacagagtccctaaagctagtctagtttttgccacatctgcaatgattattgtttaatttcaaaagaatcctcaggctctacaatctaggggtggtaaatgtgtttccactatacttgggaaaaggtcagtaggatgtgcatcctagggaagataaaatcgtatatggtaaaggcatttgagttaattttgcattatatctaggaaccatattatttaaaatttgaatcctattaatgctgagagatcctaagagctagtatgttgtaaaacctgccacctgaataaaatgaaaaaaaaagtgtttttttgagacagagtcttgctctgttgcccaggctggagtgcagtggtgtgatcttgggtcactgcaaactccgcctcccaggttcacgccattctcctgcctcagcctcccgagtagctgggaccacaggggcccaccaccgcgcccggctaattttttgtatttttagtagagacggggtttcaccgtgttagccaggatgttctcgatctcctgacctcatgatccgcccgcctcggcctcccaaagtgctgggattacaggcgtgagccaccgtgcccggccctaaaatgaaattattaatgttggttctgaaacagcctcttagcattcagattgtattttaaatacttaaacacaccaattgtagaaagcaaccctttatttttagcaagtttggtttactcttctcccatgagattttgtctttctacattaactagtaagacataaagatttgaaactggaactatattatactttttaaccaatctctgtggcttcactcatgaaatttacttcagttaatatgagactgggggttaagttgtaactaatatgcaaaattgctttgtatatttggtgattttgtaatgtaagtgaattgattcttatttcactgatactattaatcatgcagtgtacaattcaaaatcatgcaatgtttcactttagaattggatttgaagaactcgactttatgtgatcatggtattggtatacatgtggggtggagaacttattttttcattttgtcacaataggtatatactgacaaggcttcaggaaaaaagttgttagaagattttttaatgtataataaagtccatgatttttgta

SEQ ID NO: 66252 - DNA, 6072 bp, Homo sapiens
acggccgctcggcgcctggagaaggctgtgcgggcggggacggctgcagcccttgccggagagggcgggccggggtcagctgcggcgggcgggccggcgcggggagctgtgggcggcagctgcgtctcctgccaccgccctccctccgccacgatgccggggatcgacaagctgcccatcgaggagacgctggaggacagcccgcagacaaggtctttactaggtgtatttgaagaagatgccacagctatttccaactatatgaaccagttgtatcaagctatgcatcggatttatgatgcacagaatgaattaagtgcagcaacacacctgacctcaaaacttttaaaagaatatgaaaaacagcgttttccattgggaggtgatgatgaagttatgagctctacattgcaacagttttcaaaagttatagatgagcttagctcttgtcatgcagtgctttcaactcaacttgctgatgccatgatgttccccattacccagtttaaagaaagagatctgaaagaaatactaacattaaaggaagtatttcagattgcaagtaatgatcatgatgctgcgattaatagatatagccgtttatcaaaaaaaagagaaaatgacaaggtgaagtatgaagtaacagaagatgtgtacacatccagaaagaaacaacaccagaccatgatgcattatttttgtgcattaaatactcttcagtacaagaagaaaatagcattgttagaacctctacttgggtacatgcaagctcagataagtttctttaagatgggttctgaaaatcttaatgaacaactggaagaatttttagctaatattggaacaagcgttcagaatgttcgcagggaaatggacagtgatatagagaccatgcaacagacaatagaggatttggaagtagccagtgatcccttatatgtgcctgacccagaccccaccaaatttcctgttaatcgaaatttaacccgaaaggctggataccttaatgctaggaataaaacaggcttggtgtcatctacctgggacagacagttttacttcacgcagggtggaaatttaatgagtcaggcccgtggggatgtagcaggaggcctggccatggacatagacaactgttcagtgatggctgtggactgtgaagacagacgatattgttttcagatcacctctttcgatggaaaaaaatcttcaattttgcaagcagagagtaaaaaagatcatgaagagtggatctgtacaataaacaacatatctaaacaaatatacttaagtgaaaatccagaggaaactgctgcacgagtaaatcaatcagctctggaagctgtcactccttccccatctttccagcagaggcacgagagcctgcggccagcagcaggacaatctcggccaccgacagctcgaaccagcagttcaggatccttaggatctgagtctacaaatttggctgccctctctctagattctcttgttgccccagacaccccaatacagtttgacataatttctcctgtgtgtgaagatcagcctggccaggcaaaagcctttggccagggaggcaggcgtacaaatccatttggagaatctggaggaagtacaaaatctgaaactgaagattctattcttcatcagttatttattgtccgattccttggttcaatggaggtgaaatcagatgaccatccagatgttgtttatgaaactatgcgccaaatcttagctgcccgggccatccataacatctttcgtatgacagaatcgcatttattagtcacttgtgactgtttaaagttaattgatccacagacacaagttacaaggctcacgtttccattaccttgtgtagttttgtatgctacacaccaggaaaataagcgcctttttggatttgttcttcggacatcaagcgggagaagtgaaagtaatctgtcatcagtctgctatatatttgagtcaaacaatgagggggaaaagatatgtgattctgttggactggcaaaacagatagctttgcatgctgaactggatcgtagggcatcagaaaaacaaaaagaaatagagagagtaaaagagaagcaacagaaagaactcaataaacaaaaacagattgaaaaggacttggaagaacaaagtcggttgatagctgcttccagtagaccaaaccaagccagtagtgaggggcagtttgttgtccttagcagtagccagtcagaagagagtgatttgggagaaggaggaaagaagagagaatcagaagcataagcttatacttttggtagatattcccccttggaatttgacagtttctatggtgaaatggcagaaggtaacaactatgttgaaatatcaaggaggagattaagctttatatttgcttatttgttgtagctacattttaaaaaaaagattgaacttgatgacttaggtttgcattgatcttttttcccccttaaacataatgtactatgtattaacatctaaaggaaacctgctcatctccctgaagcagactgctgaggaattacatttgctcaagaattttttccgtcaaattgtgaacttttaattcttgcattgtaattggctgtgtccataagaaatcatttattcttcaggcttagacattcatggatatgcttttctttcattaggaacattttgctggtgatgaggaagcatttagctgaataagtttaaagccctttatacagagaattctacaagtttgcaaatattttaacaatattaaatgtgcaatagaacttttataaaataattagaacagagattttacagttaaggtttcaaattgtggcaggtggtactgttgatctcagggtactttctgggattgctcacatttctctaatgtactgcacttgatgccagtaggaaagaagcttaagtgtcttcagttcaagattgatagagcccttggcattttattatcacattcttagttctcaggttgggacttcaattactgctgcagagcagtagtggttaaaaataagatattggaatttattaaaagatttttgttcaatacattttagattaggattgacaagtaaagatactgctatggaatgatacattgtattttctgcattgtgtgaaatagtttttattgaaagtcaagtgacatttcaaaagaagttctataacaattatgtttcatgcttaaagtaaaaattcccagagtttagtttagaaaatgtaatcttttaaatttcagactgatatattcccagtattttcataatgccatgttttgataaagtactgaatcaccactttatatccacaaaggcaaataactaatgtatgataatagaataatttgcactaattattgtaaatatgtctactcttcaaatgagtaaaaggtccaattttgtgaaagattgaaaatgaattgaatgcctagtagagtataggagaagttgaccaaggaaggatttaacctggtgccaaggttaaaataacatttctctactgcctattgtttatgttaaaccttaattttttttctgtaatcacttttaacactgctaatagaaattatgttttcatgtgtttcacatgaaaaagtatatatatacaaagttaatatagtgggtaaaatactttacatagtcacacatttacaaatttttcaagaggttagccactaagactttaataattttacaagggaaaaagcctttttttttctttgatatacagttttttcttcttagttctgcattagaaatggcatctgttttaggtctcaaaatataactcagctgtttcacactgtatatgtacattgttttctgtaggaataggataatgatatataggatcatgatattccttctatccatgtgccaaatgggtgtaatgtttatttactgatgctttatgttaccaaaacatacagtaaaaaagtagaaatttatgaaatacttttgataaaaagtttattttgtgcttaccaaaaggaatgctttcacaatagtgtatcagttcttttgttttgttaaagttggaatttattctgttgccagcatttaagtagtcatggcaagtcctgtttttaagaccttttggagactggagctttctgttccattaagtcttttgtttatactacaaattgtcacctcacttagttcagatgaaatctgttactctacaaggaaggtgttcatcattaggaggcagctttactaagctggtgctttgcatggtagcaagtgctgccctttatcagcaccctgggtcatagtgtaggctagagttaaggcactggcagacttagggatgctggacagacctgtagttcgttttaagtcatgttcacaggaatttctacaataataaacccatcatctccataggtcagatcgaagtgcattccaatgctaaatagaagttatgagtgggtttaacaattttagatgattcagcttttgttccattactgttgaactatatgaactattccattactgcagagatttaagtatctgttttaataagctctttttgttatttaaaggctgcccatgggtttctgcctagtggtaaagctgattgttaccctcctttgaaatcccttctagttctgagatgctttgagggtaactggattcgattttgggatatcttttctcacattcagacttacacttaatggtgttagaaatcaacaaaactcctttttaaaaagaaaagatattaagcctgcctacttctacaatgcattctgttacctatttgaacagtatgtttgtaactatggcaatgaagtcagtagataggaaaccagttattccttctacctttaaaaattttgagaacttgccaaccagggattaaagctattatcttgaacagagtccctaaagctagtctagtttttgccacatctgcaatgattattgtttaatttcaaaagaatcctcaggctctacaatctaggggtggtaaatgtgtttccactatacttgggaaaaggtcagtaggatgtgcatcctagggaagataaaatcgtatatggtaaaggcatttgagttaattttgcattatatctaggaaccatattatttaaaatttgaatcctattaatgctgagagatcctaagagctagtatgttgtaaaacctgccacctgaataaaatgaaaaaaaaagtgtttttttgagacagagtcttgctctgttgcccaggctggagtgcagtggtgtgatcttgggtcactgcaaactccgcctcccaggttcacgccattctcctgcctcagcctcccgagtagctgggaccacaggggcccaccaccgcgcccggctaattttttgtatttttagtagagacggggtttcaccgtgttagccaggatgttctcgatctcctgacctcatgatccgcccgcctcggcctcccaaagtgctgggattacaggcgtgagccaccgtgcccggccctaaaatgaaattattaatgttggttctgaaacagcctcttagcattcagattgtattttaaatacttaaacacaccaattgtagaaagcaaccctttatttttagcaagtttggtttactcttctcccatgagattttgtctttctacattaactagtaagacataaagatttgaaactggaactatattatactttttaaccaatctctgtggcttcactcatgaaatttacttcagttaatatgagactgggggttaagttgtaactaatatgcaaaattgctttgtatatttggtgattttgtaatgtaagtgaattgattcttatttcactgatactattaatcatgcagtgtacaattcaaaatcatgcaatgtttcactttagaattggatttgaagaactcgactttatgtgatcatggtattggtatacatgtggggtggagaacttattttttcattttgtcacaataggtatatactgacaaggcttcaggaaaaaagttgttagaagattttttaatgtataataaagtccatgatttttgtacagtgttttttaatgaaaaattt

SEQ ID NO: 66253 - DNA, 4849 bp, Homo sapiens
tactactactaaattcgcggccgcgtcgacaaaaaagatcatgaagagtggatctgtacaataaacaacatatctaaacaaatatacttaagtgaaaatccagaggaaactgctgcacgagtaaatcaatcagctctggaagctgtcactccttccccatctttccagcagaggcacgagagcctgcggccagcagcaggacaatctcggccaccgacagctcgaaccagcagttcaggatccttaggatctgagtctacaaatttggctgccctctctctagattctcttgttgccccagacaccccaatacagtttgacataatttctcctgtgtgtgaagatcagcctggccaggcaaaagcctttggccagggaggcaggcgtacaaatccatttggagaatctggaggaagtacaaaatctgaaactgaagattctattcttcatcagttatttattgtccgattccttggttcaatggaggtgaaatcagatgaccatccagatgttgtttatgaaactatgcgccaaatcttagctgcccgggccatccataacatctttcgtatgacagaatcgcatttattagtcacttgtgactgtttaaagttaattgatccacagacacaagttacaaggctcacgtttccattaccttgtgtagttttgtatgctacacaccaggaaaataagcgcctttttggatttgttcttcggacatcaagcgggagaagtgaaagtaatctgtcatcagtctgctatatatttgagtcaaacaatgagggggaaaagatatgtgattctgttggactggcaaaacagatagctttgcatgctgaactggatcgtagggcatcagaaaaacaaaaagaaatagagagagtaaaagagaagcaacagaaagaactcaataaacaaaaacagattgaaaaggacttggaagaacaaagtcggttgatagctgcttccagtagaccaaaccaagccagtagtgaggggcagtttgttgtccttagcagtagccagtcagaagagagtgatttgggagaaggaggaaagaagagagaatcagaagcataagcttatacttttggtagatattcccccttggaatttgacagtttctatggtgaaatggcagaaggtaacaactatgttgaaatatcaaggaggagattaagctttatatttgcttatttgttgtagctacattttaaaaaaaagattgaacttgatgacttaggtttgcattgatcttttttcccccttaaacataatgtactatgtattaacatctaaaggaaacctgctcatctccctgaagcagactgctgaggaattacatttgctcaagaattttttccgtcaaattgtgaacttttaattcttgcattgtaattggctgtgtccataagaaatcatttattcttcaggcttagacattcatggatatgcttttctttcattaggaacattttgctggtgatgaggaagcatttagctgaataagtttaaagccctttatacagagaattctacaagtttgcaaatattttaacaatattaaatgtgcaatagaacttttataaaataattagaacagagattttacagttaaggtttcaaattgtggcaggtggtactgttgatctcagggtactttctgggattgctcacatttctctaatgtactgcacttgatgccagtaggaaagaagcttaagtgtcttcagttcaagattgatagagcccttggcattttattatcacattcttagttctcaggttgggacttcaattactgctgcagagcagtagtggttaaaaataagatattggaatttattaaaagatttttgttcaatacattttagattaggattgacaagtaaagatactgctatggaatgatacattgtattttctgcattgtgtgaaatagtttttattgaaagtcaagtgacatttcaaaagaagttctataacaattatgtttcatgcttaaagtaaaaattcccagagtttagtttagaaaatgtaatcttttaaatttcagactgatatattcccagtattttcataatgccatgttttgataaagtactgaatcaccactttatatccacaaaggcaaataactaatgtatgataatagaataatttgcactaattattgtaaatatgtctactcttcaaatgagtaaaaggtccaattttgtgaaagattgaaaatgaattgaatgcctagtagagtataggagaagttgaccaaggaaggatttaacctggtgccaaggttaaaataacatttctctactgcctattgtttatgttaaaccttaattttttttctgtaatcacttttaacactgctaatagaaattatgttttcatgtgtttcacatgaaaaagtatatatatacaaagttaatatagtgggtaaaatactttacatagtcacacatttacaaatttttcaagaggttagccactaagactttaataattttacaagggaaaaagcctttttttttctttgatatacagttttttcttcttagttctgcattagaaatggcatctgttttaggtctcaaaatataactcagctgtttcacactgtatatgtacattgttttctgtaggaataggataatgatatataggatcatgatattccttctatccatgtgccaaatgggtgtaatgtttatttactgatgctttatgttaccaaaacatacagtaaaaaagtagaaatttatgaaatacttttgataaaaagtttattttgtgcttaccaaaaggaatgctttcacaatagtgtatcagttcttttgttttgttaaagttggaatttattctgttgccagcatttaagtagtcatggcaagtcctgtttttaagaccttttggagactggagctttctgttccattaagtcttttgtttatactacaaattgtcacctcacttagttcagatgaaatctgttactctacaaggaaggtgttcatcattaggaggcagctttactaagctggtgctttgcatggtagcaagtgctgccctttatcagcaccctgggtcatagtgtaggctagagttaaggcactggcagacttagggatgctggacagacctgtagttcgttttaagtcatgttcacaggaatttctacaataataaacccatcatctccataggtcagatcgaagtgcattccaatgctaaatagaagttatgagtgggtttaacaattttagatgattcagcttttgttccattactgttgaactatatgaactattccattactgcagagatttaagtatctgttttaataagctctttttgttatttaaaggctgcccatgggtttctgcctagtggtaaagctgattgttaccctcctttgaaatcccttctagttctgagatgctttgagggtaactggattcgattttgggatatcttttctcacattcagacttacacttaatggtgttagaaatcaacaaaactcctttttaaaaagaaaagatattaagcctgcctacttctacaatgcattctgttacctatttgaacagtatgtttgtaactatggcaatgaagtcagtagataggaaaccagttattccttctacctttaaaaattttgagaacttgccaaccagggattaaagctattatcttgaacagagtccctaaagctagtctagtttttgccacatctgcaatgattattgtttaatttcaaaagaatcctcaggctctacaatctaggggtggtaaatgtgtttccactatacttgggaaaaggtcagtaggatgtgcatcctagggaagataaaatcgtatatggtaaaggcatttgagttaattttgcattatatctaggaaccatattatttaaaatttgaatcctattaatgctgagagatcctaagagctagtatgttgtaaaacctgccacctgaataaaatgaaaaaaaaagtgtttttttgagacagagtcttgctctgttgcccaggctggagtgcagtggtgtgatcttgggtcactgcaaactccgcctcccaggttcacgccattctcctgcctcagcctcccgagtagctgggaccacaggggcccaccaccgcgcccggctaattttttgtatttttagtagagacggggtttcaccgtgttagccaggatgttctcgatctcctgacctcatgatccgcccgcctcggcctcccaaagtgctgggattacaggcgtgagccaccgtgcccggccctaaaatgaaattattaatgttggttctgaaacagcctcttagcattcagattgtattttaaatacttaaacacaccaattgtagaaagcaaccctttatttttagcaagtttggtttactcttctcccatgagattttgtctttctacattaactagtaagacataaagatttgaaactggaactatattatactttttaaccaatctctgtggcttcactcatgaaatttacttcagttaatatgagactgggggttaagttgtaactaatatgcaaaattgctttgtatatttggtgattttgtaatgtaagtgaattgattcttatttcactgatactattaatcatgcagtgtacaattcaaaatcatgcaatgtttcactttagaattggatttgaagaactcgactttatgtgatcatggtattggtatacatgtggggtggagaacttattttttcattttgtcacaataggtatatactgacaaggcttcaggaaaaaagttgttagaagattttttaatgtataataaagtccatgatttttgta

SEQ ID NO: 66254 - DNA, 4731 bp, Homo sapiens
tggtttattatgttgattttttgttgtgtatgtctaaacttccaattcatctgtgtcttctaaagtgcaccaacattgatcagttagtgtgtgagggcagaggccttcatcatagtaatttagtgatcaatagtgtttcttaataggatggggcattttagagctttttttttttaaatgttaactgtggttttaataattagatttcttctatgtggctcatggtaactgaccatgtgttcatattttcttctaaactttttaggcgtacaaatccatttggagaatctggaggaagtacaaaatctgaaactgaagattctattcttcatcagttatttattgtccgattccttggttcaatggaggtgaaatcagatgaccatccagatgttgtttatgaaactatgcgccaaatcttagctgcccgggccatccataacatctttcgtatgacagaatcgcatttattagtcacttgtgactgtttaaagttaattgatccacagacacaagttacaaggctcacgtttccattaccttgtgtagttttgtatgctacacaccaggaaaataagcgcctttttggatttgttcttcggacatcaagcgggagaagtgaaagtaatctgtcatcagtctgctatatatttgagtcaaacaatgagggggaaaagatatgtgattctgttggactggcaaaacagatagctttgcatgctgaactggatcgtagggcatcagaaaaacaaaaagaaatagagagagtaaaagagaagcaacagaaagaactcaataaacaaaaacagattgaaaaggacttggaagaacaaagtcggttgatagctgcttccagtagaccaaaccaagccagtagtgaggggcagtttgttgtccttagcagtagccagtcagaagagagtgatttgggagaaggaggaaagaagagagaatcagaagcataagcttatacttttggtagatattcccccttggaatttgacagtttctatggtgaaatggcagaaggtaacaactatgttgaaatatcaaggaggagattaagctttatatttgcttatttgttgtagctacattttaaaaaaaagattgaacttgatgacttaggtttgcattgatcttttttcccccttaaacataatgtactatgtattaacatctaaaggaaacctgctcatctccctgaagcagactgctgaggaattacatttgctcaagaattttttccgtcaaattgtgaacttttaattcttgcattgtaattggctgtgtccataagaaatcatttattcttcaggcttagacattcatggatatgcttttctttcattaggaacattttgctggtgatgaggaagcatttagctgaataagtttaaagccctttatacagagaattctacaagtttgcaaatattttaacaatattaaatgtgcaatagaacttttataaaataattagaacagagattttacagttaaggtttcaaattgtggcaggtggtactgttgatctcagggtactttctgggattgctcacatttctctaatgtactgcacttgatgccagtaggaaagaagcttaagtgtcttcagttcaagattgatagagcccttggcattttattatcacattcttagttctcaggttgggacttcaattactgctgcagagcagtagtggttaaaaataagatattggaatttattaaaagatttttgttcaatacattttagattaggattgacaagtaaagatactgctatggaatgatacattgtattttctgcattgtgtgaaatagtttttattgaaagtcaagtgacatttcaaaagaagttctataacaattatgtttcatgcttaaagtaaaaattcccagagtttagtttagaaaatgtaatcttttaaatttcagactgatatattcccagtattttcataatgccatgttttgataaagtactgaatcaccactttatatccacaaaggcaaataactaatgtatgataatagaataatttgcactaattattgtaaatatgtctactcttcaaatgagtaaaaggtccaattttgtgaaagattgaaaatgaattgaatgcctagtagagtataggagaagttgaccaaggaaggatttaacctggtgccaaggttaaaataacatttctctactgcctattgtttatgttaaaccttaattttttttctgtaatcacttttaacactgctaatagaaattatgttttcatgtgtttcacatgaaaaagtatatatatacaaagttaatatagtgggtaaaatactttacatagtcacacatttacaaatttttcaagaggttagccactaagactttaataattttacaagggaaaaagcctttttttttctttgatatacagttttttcttcttagttctgcattagaaatggcatctgttttaggtctcaaaatataactcagctgtttcacactgtatatgtacattgttttctgtaggaataggataatgatatataggatcatgatattccttctatccatgtgccaaatgggtgtaatgtttatttactgatgctttatgttaccaaaacatacagtaaaaaagtagaaatttatgaaatacttttgataaaaagtttattttgtgcttaccaaaaggaatgctttcacaatagtgtatcagttcttttgttttgttaaagttggaatttattctgttgccagcatttaagtagtcatggcaagtcctgtttttaagaccttttggagactggagctttctgttccattaagtcttttgtttatactacaaattgtcacctcacttagttcagatgaaatctgttactctacaaggaaggtgttcatcattaggaggcagctttactaagctggtgctttgcatggtagcaagtgctgccctttatcagcaccctgggtcatagtgtaggctagagttaaggcactggcagacttagggatgctggacagacctgtagttcgttttaagtcatgttcacaggaatttctacaataataaacccatcatctccataggtcagatcgaagtgcattccaatgctaaatagaagttatgagtgggtttaacaattttagatgattcagcttttgttccattactgttgaactatatgaactattccattactgcagagatttaagtatctgttttaataagctctttttgttatttaaaggctgcccatgggtttctgcctagtggtaaagctgattgttaccctcctttgaaatcccttctagttctgagatgctttgagggtaactggattcgattttgggatatcttttctcacattcagacttacacttaatggtgttagaaatcaacaaaactcctttttaaaaagaaaagatattaagcctgcctacttctacaatgcattctgttacctatttgaacagtatgtttgtaactatggcaatgaagtcagtagataggaaaccagttattccttctacctttaaaaattttgagaacttgccaaccagggattaaagctattatcttgaacagagtccctaaagctagtctagtttttgccacatctgcaatgattattgtttaatttcaaaagaatcctcaggctctacaatctaggggtggtaaatgtgtttccactatacttgggaaaaggtcagtaggatgtgcatcctagggaagataaaatcgtatatggtaaaggcatttgagttaattttgcattatatctaggaaccatattatttaaaatttgaatcctattaatgctgagagatcctaagagctagtatgttgtaaaacctgccacctgaataaaatgaaaaaaaaagtgtttttttgagacagagtcttgctctgttgcccaggctggagtgcagtggtgtgatcttgggtcactgcaaactccgcctcccaggttcacgccattctcctgcctcagcctcccgagtagctgggaccacaggggcccaccaccgcgcccggctaattttttgtatttttagtagagacggggtttcaccgtgttagccaggatgttctcgatctcctgacctcatgatccgcccgcctcggcctcccaaagtgctgggattacaggcgtgagccaccgtgcccggccctaaaatgaaattattaatgttggttctgaaacagcctcttagcattcagattgtattttaaatacttaaacacaccaattgtagaaagcaaccctttatttttagcaagtttggtttactcttctcccatgagattttgtctttctacattaactagtaagacataaagatttgaaactggaactatattatactttttaaccaatctctgtggcttcactcatgaaatttacttcagttaatatgagactgggggttaagttgtaactaatatgcaaaattgctttgtatatttggtgattttgtaatgtaagtgaattgattcttatttcactgatactattaatcatgcagtgtacaattcaaaatcatgcaatgtttcactttagaattggatttgaagaactcgactttatgtgatcatggtattggtatacatgtggggtggagaacttattttttcattttgtcacaataggtatatactgacaaggcttcaggaaaaaagttgttagaagattttttaatgtataataaagtccatgatttttgta

SEQ ID NO: 66255 - DNA, 2259 bp, Homo sapiens
gaggatcccggtcatcttctacactcaatttctacactatgtacattgttttctgtaggaataggataatgatatataggatcatgatattccttctatccatgtgccaaatgggtgtaatgtttatttactgatgctttatgttaccaaaacatacagtaaaaaagtagaaatttatgaaatacttttgataaaaagtttattttgtgcttaccaaaaggaatgctttcacaatagtgtatcagttcttttgttttgttaaagttggaatttattctgttgccagcatttaagtagtcatggcaagtcctgtttttaagaccttttggagactggagctttctgttccattaagtcttttgtttatactacaaattgtcacctcacttagttcagatgaaatctgttactctacaaggaaggtgttcatcattaggaggcagctttactaagctggtgctttgcatggtagcaagtgctgccctttatcagcaccctgggtcatagtgtaggctagagttaaggcactggcagacttagggatgctggacagacctgtagttcgttttaagtcatgttcacaggaatttctacaataataaacccatcatctccataggtcagatcgaagtgcattccaatgctaaatagaagttatgagtgggtttaacaattttagatgattcagcttttgttccattactgttgaactatatgaactattccattactgcagagatttaagtatctgttttaataagctctttttgttatttaaaggctgcccatgggtttctgcctagtggtaaagctgattgttaccctcctttgaaatcccttctagttctgagatgctttgagggtaactggattcgattttgggatatcttttctcacattcagacttacacttaatggtgttagaaatcaacaaaactcctttttaaaaagaaaagatattaagcctgcctacttctacaatgcattctgttacctatttgaacagtatgtttgtaactatggcaatgaagtcagtagataggaaaccagttattccttctacctttaaaaattttgagaacttgccaaccagggattaaagctattatcttgaacagagtccctaaagctagtctagtttttgccacatctgcaatgattattgtttaatttcaaaagaatcctcaggctctacaatctaggggtggtaaatgtgtttccactatacttgggaaaaggtcagtaggatgtgcatcctagggaagataaaatcgtatatggtaaaggcatttgagttaattttgcattatatctaggaaccatattatttaaaatttgaatcctattaatgctgagagatcctaagagctagtatgttgtaaaacctgccacctgaataaaatgaaaaaaaaagtgtttttttgagacagagtcttgctctgttgcccaggctggagtgcagtggtgtgatcttgggtcactgcaaactccgcctcccaggttcacgccattctcctgcctcagcctcccgagtagctgggaccacaggggcccaccaccgcgcccggctaattttttgtatttttagtagagacggggtttcaccgtgttagccaggatgttctcgatctcctgacctcatgatccgcccgcctcggcctcccaaagtgctgggattacaggcgtgagccaccgtgcccggccctaaaatgaaattattaatgttggttctgaaacagcctcttagcattcagattgtattttaaatacttaaacacaccaattgtagaaagcaaccctttatttttagcaagtttggtttactcttctcccatgagattttgtctttctacattaactagtaagacataaagatttgaaactggaactatattatactttttaaccaatctctgtggcttcactcatgaaatttacttcagttaatatgagactgggggttaagttgtaactaatatgcaaaattgctttgtatatttggtgattttgtaatgtaagtgaattgattcttatttcactgatactattaatcatgcagtgtacaattcaaaatcatgcaatgtttcactttagaattggatttgaagaactcgactttatgtgatcatggtattggtatacatgtggggtggagaacttattttttcattttgtcacaataggtatatactgacaaggcttcaggaaaaaagttgttagaagattttttaatgtataataaagtccatgatttttgta

SEQ ID NO: 66256 - DNA, 2599 bp, Homo sapiens
acggccgctcggcgcctggagaaggctgtgcgggcggggacggctgcagcccttgccggagagggcgggccggggtcagctgcggcgggcgggccggcgcggggagctgtgggcggcagctgcgtctcctgccaccgccctccctccgccacgatgccggggatcgacaagctgcccatcgaggagacgctggaggacagcccgcagacaaggtctttactaggtgtatttgaagaagatgccacagctatttccaactatatgaaccagttgtatcaagctatgcatcggatttatgatgcacagaatgaattaagtgcagcaacacacctgacctcaaaacttttaaaagaatatgaaaaacagcgttttccattgggaggtgatgatgaagttatgagctctacattgcaacagttttcaaaagttatagatgagcttagctcttgtcatgcagtgctttcaactcaacttgctgatgccatgatgttccccattacccagtttaaagaaagagatctgaaagaaatactaacattaaaggaagtatttcagattgcaagtaatgatcatgatgctgcgattaatagatatagccgtttatcaaaaaaaagagaaaatgacaaggtgaagtatgaagtaacagaagatgtgtacacatccagaaagaaacaacaccagaccatgatgcattatttttgtgcattaaatactcttcagtacaagaagaaaatagcattgttagaacctctacttgggtacatgcaagctcagataagtttctttaagatgggttctgaaaatcttaatgaacaactggaagaatttttagctaatattggaacaagcgttcagaatgttcgcagggaaatggacagtgatatagagaccatgcaacagacaatagaggatttggaagtagccagtgatcccttatatgtgcctgacccagaccccaccaaatttcctgttaatcgaaatttaacccgaaaggctggataccttaatgctaggaataaaacaggcttggtgtcatctacctgggacagacagttttacttcacgcagggtggaaatttaatgagtcaggcccgtggggatgtagcaggaggcctggccatggacatagacaactgttcagtgatggctgtggactgtgaagacagacgatattgttttcagatcacctctttcgatggaaaaaaatcttcaattttgcaagcagagagtaaaaaagatcatgaagagtggatctgtacaataaacaacatatctaaacaaatatacttaagtgaaaatccagaggaaactgctgcacgagtaaatcaatcagctctggaagctgtcactccttccccatctttccagcagaggcacgagagcctgcggccagcagcaggacaatctcggccaccgacagctcgaaccagcagttcaggatccttaggatctgagtctacaaatttggctgccctctctctagattctcttgttgccccagacaccccaatacagtttgacataatttctcctgtgtgtgaagatcagcctggccaggcaaaagcctttggccagggaggcaggcgtacaaatccatttggagaatctggaggaagtacaaaatctgaaactgaagattctattcttcatcagttatttattgtccgattccttggttcaatggaggtgaaatcagatgaccatccagatgttgtttatgaaactatgcgccaaatcttagctgcccgggccatccataacatctttcgtatgacagaatcgcatttattagtcacttgtgactgtttaaagttaattgatccacagacacaagttacaaggctcacgtttccattaccttgtgtagttttgtatgctacacaccaggaaaataagcgcctttttggatttgttcttcggacatcaagcgggagaagtgaaagtaatctgtcatcagtctgctatatatttgagtcaaacaatgagggggaaaagatatgtgattctgttggactggcaaaacagatagctttgcatgctgaactggatcgtagggcatcagaaaaacaaaaagaaatagagagagtaaaagagaagcaacagaaagaactcaataaacaaaaacagattgaaaaggtatacagtcctaatgtctggatctttatgtgttgtttgtgaagacttaattcagcactatgactttcagatttgaatttccaaatgaagggctgtttctgcttgttcagccacttcataaacagatgattcataccatagcagaaaagggtcacatctgttttttgatatgatgtttacattatagttacgttgacatgtaatatgactgtttcaaaaatataccagaactttaatatttcagaggaggttgtctctgtcaaagcagttgagaggctgtgtagacttaactgccattgctgaaagccattttgccttctatgggggggaaataaataaatatatatgttatatgaaatatataatgaaatgtatatttttaatattgccaggagtgtcaaatcattgtccatccaacagaataattttaaaagacaaatttcagagcaaaacttgaagaatg

SEQ ID NO: 66257 - DNA, 2057 bp, Homo sapiens
acggccgctcggcgcctggagaaggctgtgcgggcggggacggctgcagcccttgccggagagggcgggccggggtcagctgcggcgggcgggccggcgcggggagctgtgggcggcagctgcgtctcctgccaccgccctccctccgccacgatgccggggatcgacaagctgcccatcgaggagacgctggaggacagcccgcagacaaggtctttactaggtgtatttgaagaagatgccacagctatttccaactatatgaaccagttgtatcaagctatgcatcggatttatgatgcacagaatgaattaagtgcagcaacacacctgacctcaaaacttttaaaagaatatgaaaaacagcgttttccattgggaggtgatgatgaagttatgagctctacattgcaacagttttcaaaagttatagatgagcttagctcttgtcatgcagtgctttcaactcaacttgctgatgccatgatgttccccattacccagtttaaagaaagagatctgaaagaaatactaacattaaaggaagtatttcagattgcaagtaatgatcatgatgctgcgattaatagatatagccgtttatcaaaaaaaagagaaaatgacaaggtgaagtatgaagtaacagaagatgtgtacacatccagaaagaaacaacaccagaccatgatgcattatttttgtgcattaaatactcttcagtacaagaagaaaatagcattgttagaacctctacttgggtacatgcaagctcagataagtttctttaagatgggttctgaaaatcttaatgaacaactggaagaatttttagctaatattggaacaagcgttcagaatgttcgcagggaaatggacagtgatatagagaccatgcaacagacaatagaggatttggaagtagccagtgatcccttatatgtgcctgacccagaccccaccaaatttcctgttaatcgaaatttaacccgaaaggctggataccttaatgctaggaataaaacaggcttggtgtcatctacctgggacagacagttttacttcacgcagggtggaaatttaatgagtcaggcccgtggggatgtagcaggaggcctggccatggacatagacaactgttcagtgatggctgtggactgtgaagacagacgatattgttttcagatcacctctttcgatggaaaaaaatcttcaattttgcaagcagagagtaaaaaagatcatgaagagtggatctgtacaataaacaacatatctaaacaaatatacttaagtgaaaatccagaggaaactgctgcacgagtaaatcaatcagctctggaagctgtcactccttccccatctttccagcagaggcacgagagcctgcggccagcagcaggacaatctcggccaccgacagctcgaaccagcagttcaggatccttaggatctgagtctacaaatttggctgccctctctctagattctcttgttgccccagacaccccaatacagtttgacataatttctcctgtgtgtgaagatcagcctggccaggcaaaagcctttggccagggaggcaggcgtacaaatccatttggagaatctggaggaagtacaaaatctgaaactgaagattctattcttcatcagttatttattgtccgattccttggttcaatggaggtgaaatcagatgaccatccagatgttgtttatgaaactatgcgccaaatcttagctgcccgggccatccataacatctttcgtatgacagaatcgcatttattagtcacttgtgactgtttaaagttaattgatccacagacacaagttacaaggctcacggtgagttccacatgatttaagctttgttttaggtccctttgtatatatacacatcttacaacttgataataatcctgatcctgtatattcaagtgtgatagtatcagctatgattggtctttggctgttgtagttaagtctatggccatctccaaaaagttgtcattgaacattttatgtaacttaaaagaattaacacaattcttttt

SEQ ID NO: 66258 - DNA, 1051 bp, Homo sapiens
acggccgctcggcgcctggagaaggctgtgcgggcggggacggctgcagcccttgccggagagggcgggccggggtcagctgcggcgggcgggccggcgcggggagctgtgggcggcagctgcgtctcctgccaccgccctccctccgccacgatgccggggatcgacaagctgcccatcgaggagacgctggaggacagcccgcagacaaggtctttactaggtgtatttgaagaagatgccacagctatttccaactatatgaaccagttgtatcaagctatgcatcggatttatgatgcacagaatgaattaagtgcagcaacacacctgacctcaaaacttttaaaagaatatgaaaaacagcgttttccattgggaggtgatgatgaagttatgagctctacattgcaacagttttcaaaagttatagatgagcttagctcttgtcatgcagtgctttcaactcaacttgctgatgccatgatgttccccattacccagtttaaagaaagagatctgaaagaaatactaacattaaaggaagtatttcagattgcaagtaatgatcatgatgctgcgattaatagatatagccgtttatcaaaaaaaagagaaaatgacaaggtgaagtatgaagtaacagaagatgtgtacacatccagaaagaaacaacaccagaccatgatgcattatttttgtgcattaaatactcttcagtacaagaagaaaatagcattgttagaacctctacttgggtacatgcaagctcagataagtttctttaagatgggttctgaaaatcttaatgaacaactggaagaatttttagctaatattggaacaagcgttcagaatgttcgcagggaaatggacagtgatatagagaccatgcaacagacaatagaggatttggaagtagccagtgatcccttatatgtgcctgacccagaccccaccaaatttcctgttaatcgaaatttaacccgaaaggctggataccttaatgctaggaaatcatgatgctcgattaatagatatagccgtttat

SEQ ID NO: 66259 - DNA, 150 bp, Homo sapiens
aaattcttgctttagtacgtttgtggaaaggtgcacatgtgaagaccattgaaagcatttgtaagttttgaaaagtactgttgtattgttaacactcatttcttttttccagatcatgatgctgcgattaatagatatagccgtttatca

SEQ ID NO: 66260 - DNA, 445 bp, Homo sapiens
ggggcgggatttcccgcacggccgctcggcgcctggagaaggctgtgcgggcggggacggctgcagcccttgccggagagggcgggccggggtcagctgcggcgggcgggccggcgcggggagctgtgggcggcagctgcgtctcctgccaccgccctccctccgccacgatgccggggatcgacaagctgcccatcgaggagacgctggaggacagcccgcaggtgaggcgcgggagctggtgggcgacgagggagagcccagctggccgaccccaggtctggcgcctccgcggctcccgcaggtgcccgccccggcccaggtgggggccgccgccgccctaggtcaccgcccgtcgcaggccgcgcccggagttgtggaggctgggcccgccgcccaaggcccgcgtgggcctgctcggctgggccgagggccgcaggcggag

SEQ ID NO: 66261 - DNA, 408 bp, Homo sapiens
gagactgtatctcaaaaaaaaaaaaggaatccaagatgcttgattttccaagaatgttaactaaaatagtatattagctctttcatattagcaagtaaataaaatgattttgctaagcaaggttaacagtgatactattaccaacatagcatttagaatttggataattgtttaccattgaatataaactgttgatgtgctttcttatgtataaatgcaaaaaaatattgaaaggttaccatgtgatattaactgaaatgtctaaaatttaaagttatttcatatttaattcattagttttattcatctgttctttaggatcgtagggcatcagaaaaacaaaaagaaatagagagagtaaaagagaagcaacagaaagaactcaataaacaaaaacagattgaaaag

SEQ ID NO: 66262 - DNA, 277 bp, Homo sapiens
gctattcttcgggacatcgctattgatcggcacctcgctattcatcggcacctctctattcatcggcaccagtgcagtgtacaattcaaaatcatgcaatgtttcactttagaattggatttgaagaactcgactttatgtgatcatggtattggtatacatgtggggtggagaacttattttttcattttgtcacaataggtatatactgacaaggcttcaggaaaaaagttgttagaagattttttaatgtataataaagtccatgatttttgta

SEQ ID NO: 66263 - DNA, 404 bp, Homo sapiens
tgctttggacaaatggacctgcggtaggagagagggacaacagtaggagcaggcagatcttgctgtttcaaccaaaacctcatgctgaccagagttgaggaacagaagaagatggtgaaggcctgcaggtataggtgttcagcatgtcatctgaaatattccccacagaggcaaaaagaaaggaaattatctctgaaaaggaatgggaggacaagtcagcagaatatgtcaatgttttggttgaagaagctgcttgaatctgggcttttctgtgccatgtgttctcccagggccagcacaaagaagggcttttggtgcaggcccaagaccaccataatcatcattgattattcctctccacgccagtgtctctaaataaactttctcttctttctctgaaaaaa

SEQ ID NO: 66264 - DNA, 432 bp, Homo sapiens
caggctttctgtgctcatggcttgtcttctttgtgctgtagagcctccctctaatcttgtccatgcagtaaagagagatcacacaaaccctggacctacctctttgaggtggtactctcaaactctttgaaggtctgtatttgatggaatctctgggaaactgagttgggaaggtccctatatgaaaaacacgtgggttcttggagtgtacatctttaattttcttatttgtctctttagtcagcagaatatgtcaatgttttggttgaagaagctgcttgaatctgggcttttctgtgccatgtgttctcccagggccagcacaaagaagggcttttggtgcaggcccaagaccaccataatcatcattgattattcctctccacgccagtgtctctaaataaactttctcttctttctctgaaaaaagtg

SEQ ID NO: 66265 - DNA, 616 bp, Homo sapiens
aagacacaagtattagagctaaaagtataaaacttagaagaaaacacaggtgtaaatcttcatgacttcatggattaggcaggggttacctagaatgacaccaaaatcgtaagctatcaaagaaaaaaatagatacattggacttcatcaaaactaaacaccttgatgttttaaagcacagcatcaaaaaagtaaaggcaaaccacaaattgttaaaaaaagtatttataaatcatatatttgataagggacttacacctagaatatatgaagatttatcacaacttgataataaaaggaaaaatgaccaaatggaaaaaatggatacaagccaggctcagtggctcacgcctgtaatcccagcactttgggaggccaaggtgggcagatcgcttgaattcagcagtttaagaccagcctggccaacatggcaaaaccctatctctaccaaaaatagaaaaaattagctgggtgtggtggtgtgtgcctgtagtccagctacttaggaggctgaggcacgaggatcacctgagcctgggaggtggaaggagcagtaaggcaagactatgccactgcactccagcctgggcaacacagtgagaccctgtctcaaaaa

SEQ ID NO: 66266 - DNA, 398 bp, Homo sapiens
aagggaatggaactgagcaccttcaaagtgttctttctgtgaacatccacagtacaaattctatccctcttcagccccccagccccgccccatatttcacctctaattgcacctccagaactgtaggctcaagaacatatctctttggaaaatctataacaatcttagaattaagaagaaaaaagtgatacatcctttggatgctgtaccagacgctgcgtgggaccctctggatgtcaaaataattgggcaaggctcctgctccccagccactcacagtgcagttggcaggacataactgccaacaattattacaaaacaaagtcacctgtgtcataacagggttaagtgcagggtgctgagggaggctggggagggtgactgacagccactgcctg

SEQ ID NO: 66267 - DNA, 220 bp, Homo sapiens
tttctgttgcatatcaaatgggatttattgacttccttttctcaaaaatgtcatatagaaaacatttctaccctctaaaaattactaataacattagcatcaatgatttacaagtagacacaagtaaggtgaaacacagattaactcataccatcaaattcatatggccaagtataatcccattatataactattttctatcactaagcatagtccagct

SEQ ID NO: 66268 - DNA, 356 bp, Homo sapiens
tgacatttgagaagggagaacaggattatggaagatcaggagtggaagtgaggaggaggggcattctaggcagaggggaaagcatgaaaatttgggataaaatgtttaagagacttttatgcagtggtttttgcggctacacaatgggttcattgaagaaggtggcagggattaaaagtgggaagatgggttggagaaaaggtaatttggtttgagattggccaagtgggcagggacagagacacttataagagcctttagggtataggatgaagcggtgtgaggtagtgagacgtgtctggagataagaggaggacagcaggtaggtctgggaacctacatcgagaggtaatacg

SEQ ID NO: 66269 - DNA, 591 bp, Homo sapiens
acataattcccctatgcacatacaggactgaactgtaaatctgcattagaatttcaagataatctgcctgggcaaggtgactcatgcctgtaatcccagcatcttgggaggctgaggcaggagggtcgcttatgcacagggtcaagactgcagtgagccgtgattgttctactgcaccctagcatgtgcaacagagcaagaccctgtcccccacaccccaaaaaagtttttcaaggaagcctaaaataatgaatctggcaagatagagtagaggccaggtgcagcggctcatgtctgtgatcccaaaatgtagtgttggcacaaacctttattgaagtataatttatattacagaaaggggtgcctaagtggttcactaaatttttcacaaactgagtgtatctatttaagcctcaccagactgagcaaccaacattatcagcactgagcagccccctcatgcccgcttctggtccatgcccatacccacccccaccccaggctgacagcatactgacatctaaccatatggactggagtttcttgtttctgtgctctgtataaagagaggacacacgggatgtgtaccta

SEQ ID NO: 66270 - DNA, 468 bp, Homo sapiens
agtttgagaccagcctgggcaacataatgagaccatatctctaccaaaaatacaaatgtgcaccaccatgcctggcaacttttcaaatttgttttattttttgtagagacagggtctccctatgttgttcaggctggtcttgaacttctgggctcaggggaccctcctgtttcggcctcccaaaatgtagtgttggcacaaacctttattgaagtataatttatattacagaaaggggtgcctaagtggttcactaaatttttcacaaactgagtgtatctatttaagcctcaccagactgagcaaccaacattatcagcactgagcagccccctcatgcccgcttctggtccatgcccatacccacccccaccccaggctgacagcatactgacatctaaccatatggactggagtttcttgtttctgtgctctgtataaagagaggacacacgggatgtgtaccta

SEQ ID NO: 66271 - DNA, 745 bp, Homo sapiens
gtggaggttgcagtgagccaagattgcaccactgcactccagcctgggcaacagagtaagactctgtctcaaaaaaaaaaattcttttggtgggttaatgttacccagaagcagatcatactgtgctcacacatcttctgtccacatcataccaatgctagaataaagggggtaaacagaaaaacaggttttcttgggaaatgacatatggaagttgctgcacaggggtctctaatggcagaggtgcctccagggggctttgatatgtcagcagtagcagcgcacactgcaatgccttccttgcttgtagtaagtggcctctgggttcttaaaacaagaccctattgtgtaagatgctggacttgggaaaaacccctggcaggggctgcattgaggctggtgactcctgttggggcattgtgtgctgcatagtgtaataggcagccactctaggcccagcatggtggctcacgcctgtaatcccagcactttggaaggccgaggtgggcggatcacttgaggtcaggagttcgagaccagcccggccaacatggtgaaactccgtctccactaaaagcacaaaaattagccaggtgtggtggcgggcacctataatcccagctactagggaggctgaggcaggagaattgcttgaacctggtggggcagaggttgcagtgagccgagataacgctactgcactccagcctgggcaacagagtaaaactccgtctcaaaaaaaaaa

SEQ ID NO: 66272 - DNA, 201 bp, Homo sapiens
attaaaatagaaattctagaagagaaaaatataatgattacaaacaagagctcagtagccaaattaagagcagaacagttttagctaaatagaagactacgaactaggagacagtagaaaatatatagacagaagaacagaggaacaagtggataggaaaagcaagttaagcaaaaacagtcaaacaaacaaaaaaaagcc

SEQ ID NO: 66273 - DNA, 395 bp, Homo sapiens
aactacttaaaaatcctgttccaacaatgtgaaatctgagttttttttacatccaaattttttgtttaagtcatagacaaaacatatgtgaacagactggttacgcaagtagaacgtagtaaatttttatatgggaacagttgcatcctcactactagtacaaaaaataaaaatttaagcaatttataatactcttcatattaacgaaatgtggatgtttttaaatgatgtccagtgataaggttttatgagagtagtatacttacacattactggcaatagtgtaaattgctaaactttagatggcagcatgactatatagctaatgaatacttccatagtttttgacttgtaactcaatttttatgaatttgtccttaaaatgtcaatcattt

SEQ ID NO: 66274 - DNA, 950 bp, Homo sapiens
  misc_feature (1)..(1): n is a, c, g, or t
  misc_feature (4)..(4): n is a, c, g, or t
  misc_feature (6)..(6): n is a, c, g, or t
  misc_feature (267)..(267): n is a, c, g, or t
  misc_feature (498)..(498): n is a, c, g, or t
  misc_feature (548)..(548): n is a, c, g, or t
  misc_feature (573)..(573): n is a, c, g, or t
  misc_feature (689)..(689): n is a, c, g, or t
naangngggcaaaggacatgaacagacacttttcaaaagaagacatacatgcgccaacaaacgtgaaaaaatgcccaatatcactaatcattagggaagtaaaaatcaaaaccacagtgagaatggcttacaccagtcagaatggctattattaaaaagtcaaaaaataacatatgctgacaagattgcagagaaaagcgaatgcttatacactgctggtgggagcataaatcagttcaaccgttctggaaagcagtgtggcgattngtcaaagatctaaaaacagaactacgatttgacccagcagtcccactactgagtattgtaagaatttgccagtaaagtgatctggacctgaagatttctttttcagaaggttttacctaaaaattaaatttaaaaaataattatagctttaaataattatacttttagggtacatacccaaaggactataaattgttctatcacaaagacatatgcacatgttatgttcantgcagcactattcacaatagcaaaaacatagaatcaagctgagtgcccancaatggtagaccgttaagaaaatgnggtacgtatacactatggaaaactatgcagccataaaaaagaatgagatcatgtcctttgcaggacatggatggaactggaggccattatccctagcaaactaacgcaggaacagnaaaccaagcaccacacgttctcacttacaagtgggagctaaataatgagaacagaagaacagaaatagaggaacaatagacactgggacctacttgaaggaggagagtgggaagagggagaggttcagaacaaaaaacctgtcgggtactgtgcttagtacctgggtaatgaaataatctgtacaccagacccccacgtcatgagtttacctatataacaaatctgcacatgtaccccgaacctaaaattaaaattttttt

SEQ ID NO: 66275 - DNA, 470 bp, Homo sapiens
tgccaggcggcgccccgcgggctgccgccgccgctgccttgaagaagcagttcaacctcatcagcaggtggccgacctgactatgggccggtcggctctggaccgaaccacagcccagcccgaggccagcgggacgcccgctgccgctcaatcgccccctggtccttggcgaccatctgggacgggccgctgcctcctctgtagcaacccctcgggtgccccctgcccattgtccctaccccggcgagcattgccctgcgaggactacacccgatgcttctcctctcttccggaggacacagccagcctgggaccgctgccctgtgctaaaactccgatgacttctgtccctaacgctgtgccgagcgctgtgctgtggggggcagcattgtcagactttccgggttgacccgctgttgggagtcctttaagtgcatggtagcaagaaataaagggatatatgaaagcca

SEQ ID NO: 66276 - DNA, 2712 bp, Homo sapiens
  misc_feature (219)..(219): n is a, c, g, or t
  misc_feature (522)..(522): n is a, c, g, or t
  misc_feature (1208)..(1208): n is a, c, g, or t
  misc_feature (1242)..(1242): n is a, c, g, or t
  misc_feature (1573)..(1573): n is a, c, g, or t
  misc_feature (1803)..(1803): n is a, c, g, or t
  misc_feature (2238)..(2238): n is a, c, g, or t
  misc_feature (2461)..(2461): n is a, c, g, or t
  misc_feature (2574)..(2574): n is a, c, g, or t
gtggaaaaagcacttgaatctgtccaattgaatgaattgcactatgaattgaatgtgttactatccctttcacatcctatgtctaaaaacaaaaatgtttattaaacttctatagaatgattttcatcactatttccttggtccaaatacgtttataagggaattaaataacatagttggaaattttttaagccctcaattataatttttatacacatntaagacaaaaaagtgagtacctttgctaatcacttttaaatttcaaatcttaggtcaacctaagatttttttttacactaaaaatatgaagttaaaatcaaatgttattttaaaatcagaaatactattgatggatttaaagacaagtaattttaatgttacagaatattagtaatacaatcttaaagcaaagtatgtttttatgtctaacaactaacttattcagttaattgatttaatttgaaaggctgtataatatataagataataggtatgacagatttcctactaaggagacaaggncagggtagagcatattgctacagaaaagatagacattctttaaagtttcacttaaaagatctgcaaaagccaaaaagaaacaaaaagtcacagatttatagatgagcaatgtttgatatataaaataaaaatattgttaaattctgacaagaacatgaaaacaaagccatgattcacccaccggaagcattagagcatgttgggaatgcacaaaaattgatgcatcctcttttggtgatgattccaggcagagttgagtatcagtggccctagcaattatatgtaaaggcaatgctacttgcaagtttcccatcatataaaacctgtttatgatgttctgccaaatgaatatcactcttagatttaaacttgaaggtactctgaaaaaataaaactaaggtaaaccctgtttttaaaagcaacaattaaaaagccaaagttttaaagcagagaaacatttgcaataagaaagtacttgtgtacctttcatgtgtcagggactattcagtggtgttacttacttcgttatagtcacttcaattcaatgagagttaagttttattatgccaataaagatgctcagatcttcattttctaatttaaagtttttgattactggcaaaatcatttcattagaaaaaaatatcaaacctgattttatatataataggattgtacttgactanatcatagcataagtttaacttttcttgttaatantttaaaaagtatttatgtaaataaacagtgcctgacacgtgaattacttacaaaaaagactatcatttgaggctataaaaagttaatatgcaaaaatattcatatctttactaaaaagcaaatcaacctatgaaataccaatgctactcaacaataatatcacaatatacatactaaactcagaagataagtttgttaaaacatgttattactttttatgaaagacaactaaacatatgccatctataacaagaaaggtattgttagacgtggttaaaattgctctgcagatatgagtctaataatgataaatgatatttaacctttgcantcatcacatatcaatattactattactttcaacttacaactatgaaagcttaatgttaagaaattaagatttagaagggaaggggccagcatgtaattctaagtcttttgatttatagtccatattcaatgtatcactagtgaaatcatcttaaaatcctgactctgccactaatctttctcagcttaggaagtcatttagctgatgtggctccagttttctcactcaangttataatagggttaaatcaaatgtcccaaactcaagttcttacaggaggcacacagatatgcatgtaagcgaatttggccagatggggacttcctcaaactagagaatgtttgtccttcctaaaagtggcccctactcctcagttcaagtcaattgttcaatgttgctagttcttccatatttttcaagagaaacatgaaatccgaatttttatctaaaagcactatattttacaatttaattaaaacattttaacactgtgaagaccaatcatgtcagtttttacttctggactagtgtgtagagactaatacaaaactggatgcaaactattaattattaggcatgtgccaagacaagagcaacatgaataattaaaaatttgtgtatgctgtagtctgaagtatttcattgataatactttttttttgaangaggagggtagtgttatcactagaatgcttaagaactcagcatatctgcattcaaaaaaacaatgactgaattaaaacacacaagatatgttgttaaacactaaatcagctttccgtgtctgcattttacaaatgctgaaacatttgtacatcccattgtctagaacaaaactcctgctttcattttgttcatcttgcttacactggaattaacaagttttantatattatcttaaaagatttaaaatacttttgtggaaatgtaagatgtttaataaaacctattcttatttggaaatacattggtcttagtttttctgagtccatgatacatancataccctattttggtttgtaggaggaaaacaagtttatgtaatgaaatctaacactttcaggttaaaaaagtgtataatgtaatttaaatataaacatggaatccattaaataaaactaattttcttatctcccctt

SEQ ID NO: 66277 - DNA, 416 bp, Homo sapiens
atcaaacacacagatataaagcatgtaaagatgctgctatcttttagcaattgaaaaattaacatttcagaatgtgattagtgttaaagtggtttttgtcttgtgaacattgtgaaggggagaacgcatgggaaaggtctttttaaattctgtctgagacagtattcttagagttctgggttttttagtcttaaactaaaatgaattaagtctcaatttgctatcaaaatatacaagctgttatacattggccactaaggtgaagtgcaagcacacttgtgataggcgtattatgtgaagtcagaactttaaaaataaggaaacaaacacttttttgaaaggctggaaaaacttccttaacatttaaaaatagttcttaaacagagaaaaatttgtcaggtgattgattggcctta

SEQ ID NO: 66278 - DNA, 656 bp, Homo sapiens
ttggaaaacctttcgtgtatcataatgtgcctccttttgaaagactgaaaggaaaagttaatgtattatttcatttccatcctcagagggcagcaaaaggaaagtagttaaaagtgtctgtgatgatctactattaagtcaaaaggttgtaaatagttacaatcctaattcttttttttttctttgagacagagtctcgctctgtggcccaggctggagtgcagtggcacgatcttggctcactgcaagctccatctcccgggttcacaccattctcctgcctcagcctcccaaagtgctgggattacaggtgtgagccactgccccggccgtctccaaacttcttatttaaattgatgactaaaaattataacaccaagaagtgcctaccacttatcaggcatagtgtgagacactttacatcatctgtaatgctgtcaccaaaaccctgaaagttaggtattgggtttggtttacacacaaagaagctgaaactgaaagaggtagtttatcgagcatcacagagctagtagctatgattgtaaaccaaatatgactgattctacgatgtgctttctcttgccactgaagtagcaactcatgtttttatgagttgttttatgagtaacctatagtaagtagtttagttaatattg

SEQ ID NO: 66279 - DNA, 445 bp, Homo sapiens
tttagtagagacgggatttcaccatgttagccaggatggtctcgatctcctgacctcgttatccgcccgcctgtgcctcccaaagtgctgggattacaggtgtgagccactgccccggccgtctccaaacttcttatttaaattgatgactaaaaattataacaccaagaagtgcctaccacttatcaggcatagtgtgagacactttacatcatctgtaatgctgtcaccaaaaccctgaaagttaggtattgggtttggtttacacacaaagaagctgaaactgaaagaggtagtttatcgagcatcacagagctagtagctatgattgtaaaccaaatatgactgattctacgatgtgctttctcttgccactgaagtagcaactcatgtttttatgagttgttttatgagtaacctatagtaagtagtttagttaatattg

SEQ ID NO: 66280 - DNA, 632 bp, Homo sapiens
ttaaatagcacagaggtaaatgcacaaaggagggaggaattatcatagttttgaagagcatgagttctgattctagctcctccacttcctagctctgggatcctgagacaatttacttacctcttgtcatgtaaaatggcataataatagtgcccattcatagagatgctgtggttatattcagttattcattcaacaaatattcactgaggccctaagtgccaggcattatatctagtagctattcttgccttgtagaaattacagcagaatgggagagagattatgtacaattcattcaatttcatatgtagcaaatactatgaatggaatttacagggtgctatgagagcatatagtggcctaaaatgtgatgattctgtcagtaaacagctactgagcacctactatatactacttgtggttctaggtgctagggatatggtaaacagactccaagctggtctccaaccttccaacccatcacttttccacatagcagccataaacatttttgtaaataaatattacattatatcacccaagtgctgaaactcttttggtgtcttccaattgcacttagaatctaatctcgctatggcagttacctgacccaacctggccctaccaag

SEQ ID NO: 66281 - DNA, 2830 bp, Homo sapiens
  misc_feature (1)..(2): n is a, c, g, or t
  misc_feature (11)..(11): n is a, c, g, or t
nntggtgtggngtgtgtatgtgaacatgcgtgctccctgcgctgccggctctggctctcccccatccttcctcacagagcagcgcaggtttggccacagatgtcaggagcccgcggcttccctgctgagctaagagccctcttcaggccttgtggtgtcactatagctgacagtgtcaagtctcacgccctttacgaagcagagaggggttttgatgccgcattgtttagcagtatgcagacctctccctaggggctgtagatttcctgccttctgaacaatctcgaggggagcgtggatttccgtcccggcggcaccctcgggttttccctcccctgccccctccgccgcgctctcccccttcgcacattcggaaaccctcttgggagctgaatcatgttctcgccttttttggtcctagttgagctctcttccactttcatcaccagaggcttgagatctgtgaaagaatcagttcctcgcaggctgcggtctgcgccgcgcctcctttgtatgtcacgctcagagaggagcagtgcccttggagtgccctgctcttgctgagagccgcacgatagatgtctttgaatgactgactttaattaaagtgtggcgggctggagataaaatgattctgaatatcttatttggggggaaaaaaaagccagcttctttcttaagggagaaaaaaaggactccagcgccaggagtctcttcggtatccctgagagtcgggggaactctttaaatgcggcccttgatggtgttgtggagggagagtgaattctgggaatctctcagcagctttttgccaaacagatgggccaggagccgcggaaccaggctgaggaatgttgcctcacgatctcacatatccattcctggcacccaccagcccagggaatgcctctaccagttgtcagcgagaggcttacacagcatcttaaataaaagggattattgaaccaagaggccagggactgatggaaatgcccaccttgctggctcattgaaaaagtttggcaaggttgtcaggagacatgaattagatgggcttgggtcttgtgccctttgctaaaccaagtgctgtattgggaaagagacggggagagaagtgttggagatgctctttagtcaggcctgagtcacttgcccaaccctggagttggagttggggatggagccaggatctccaaaccacatgcccctagagtttcagggaaaatatggattgtgaattgaagatggggggtgatgtaaggcagacaaggacagaaaatccctcttccagctgtgatttggctgtgagtttggcgctcgagacaccatacgctcctgaggtttgttaaggggtttcaggatattgtggacaaaagggaatagcaaacgatgttcagtccataagtaccatttggaggaggaaataattgaaattgctgctgatcaaaaagctttttgtctccagtttggatgttggagacaggtttctgtgtaagagagtgagggtgtacaacatgactgagaaagaaaacaatgagttaaggcacataagtgcgcatgggtgtcacctggaggccttcttataacacagatggtcaggcccaccccaagtttctcatgcagtagaggtggagctcaagaatttgcatttctattttactttatttatttgctttatttatgtttgagacagggccttgctctgttgcatgggctgtagtacagtggtgcaatcatagctcactgcagcctccaactcctgggctcaagtgatcctcccaactcagcctccctcccaagtagtgaggactacaatcacacgccaccatgcctggctgtataatttgcacttctaaggtgttcccaggtgatgctgatgttgctggcccagggaccacacattcagtactgctgttaaggcaaaagacttaaacactccatatatgaaagaaagaaaaagagagagagagagagagagagagagaggaaggaaggaaggcaggcaagcaggcaatgcttcaataaatccattaaaacacattcaaacttcagaaataaacgtgttcaaataagaccagcagtccttggtggtggcttatcatttcacccatttgacagttttaaaagattgaccgaactcagtattgattaaggtttaggggaaaggctgtctcatatactgtgtttacaaatgtgaatgagtacagcctttccagagggcagtttggctatgtgtatcaaaatataaaatgtgtttgttttgacactacaatctcacttctagaattttactctaagaaaagataagtgtgtgaaaagaaatttaagtgtgtgaaaagatgcatatgcatgggattgctcatcacggtttcatttataatgaggaacagcaaacccgttaaatatccctccatggggagcaagtcaggcaaattctgtacagacacacaaaggcatgttatgcagtgaagagaaggaggcacatgtgggttctgcagagaggcagatcccaatgaggggtcaggacgggtcttggctgcacatcctggtttcctcttcatccatggggagcagcaccttatgaagaaaacaagcggcataatgaataaatactcacctctagcaaaagataatatgtataattaaatcaataaatattaatttgttaaatgttaataaatgtaaataaatattcatatatattaacgtgttgatttaaatattactattcattaatataaacaataaattgatacttgttaacattaaatatcaataaattttatgtattaatataaataaacactaataaaacaaatatttaaacatg

SEQ ID NO: 66282 - DNA, 2489 bp, Homo sapiens
aaatatttctttcactaggaaaaatagattcggaaaccctcttgggagctgaatcatgttctcgccttttttggtcctagttgagctctcttccactttcatcaccagaggcttgagatctgtgaaagaatcagttcctcgcaggctgcggtctgcgccgcgcctcctttgtatgtcacgctcagagaggagcagtgcccttggagtgccctgctcttgctgagagccgcacgatagatgtctttgaatgactgactttaattaaagtgtggcgggctggagataaaatgattctgaatatcttatttggggggaaaaaaaagccagcttctttcttaagggagaaaaaaaggactccagcgccaggagtctcttcggtatccctgagagtcgggggaactctttaaatgcggcccttgatggtgttgtggagggagagtgaattctgggaatctctcagcagctttttgccaaacagatgggccaggagccgcggaaccaggctgaggaatgttgcctcacgatctcacatatccattcctggcacccaccagcccagggaatgcctctaccagttgtcagcgagaggcttacacagcatcttaaataaaagggattattgaaccaagaggccagggactgatggaaatgcccaccttgctggctcattgaaaaagtttggcaaggttgtcaggagacatgaattagatgggcttgggtcttgtgccctttgctaaaccaagtgctgtattgggaaagagacggggagagaagtgttggagatgctctttagtcaggcctgagtcacttgcccaaccctggagttggagttggggatggagccaggatctccaaaccacatgcccctagagtttcagggaaaatatggattgtgaattgaagatggggggtgatgtaaggcagacaaggacagaaaatccctcttccagctgtgatttggctgtgagtttggcgctcgagacaccatacgctcctgaggtttgttaaggggtttcaggatattgtggacaaaagggaatagcaaacgatgttcagtccataagtaccatttggaggaggaaataattgaaattgctgctgatcaaaaagctttttgtctccagtttggatgttggagacaggtttctgtgtaagagagtgagggtgtacaacatgactgagaaagaaaacaatgagttaaggcacataagtgcgcatgggtgtcacctggaggccttcttataacacagatggtcaggcccaccccaagtttctcatgcagtagaggtggagctcaagaatttgcatttctattttactttatttatttgctttatttatgtttgagacagggccttgctctgttgcatgggctgtagtacagtggtgcaatcatagctcactgcagcctccaactcctgggctcaagtgatcctcccaactcagcctccctcccaagtagtgaggactacaatcacacgccaccatgcctggctgtataatttgcacttctaaggtgttcccaggtgatgctgatgttgctggcccagggaccacacattcagtactgctgttaaggcaaaagacttaaacactccatatatgaaagaaagaaaaagagagagagagagagagagagagagaggaaggaaggaaggcaggcaagcaggcaatgcttcaataaatccattaaaacacattcaaacttcagaaataaacgtgttcaaataagaccagcagtccttggtggtggcttatcatttcacccatttgacagttttaaaagattgaccgaactcagtattgattaaggtttaggggaaaggctgtctcatatactgtgtttacaaatgtgaatgagtacagcctttccagagggcagtttggctatgtgtatcaaaatataaaatgtgtttgttttgacactacaatctcacttctagaattttactctaagaaaagataagtgtgtgaaaagaaatttaagtgtgtgaaaagatgcatatgcatgggattgctcatcacggtttcatttataatgaggaacagcaaacccgttaaatatccctccatggggagcaagtcaggcaaattctgtacagacacacaaaggcatgttatgcagtgaagagaaggaggcacatgtgggttctgcagagaggcagatcccaatgaggggtcaggacgggtcttggctgcacatcctggtttcctcttcatccatggggagcagcaccttatgaagaaaacaagcggcataatgaataaatactcacctctagcaaaagataatatgtataattaaatcaataaatattaatttgttaaatgttaataaatgtaaataaatattcatatatattaacgtgttgatttaaatattactattcattaatataaacaataaattgatacttgttaacattaaatatcaataaattttatgtattaatataaataaacactaataaaacaaatatttaaacatg

SEQ ID NO: 66283 - DNA, 1927 bp, Homo sapiens
  misc_feature (203)..(203): n is a, c, g, or t
  misc_feature (739)..(739): n is a, c, g, or t
  misc_feature (872)..(872): n is a, c, g, or t
  misc_feature (1537)..(1537): n is a, c, g, or t
  misc_feature (1920)..(1920): n is a, c, g, or t
tgtgacggatggctgtgcatctaatgtaactgcatctagatacattgtgaggggtaaataggttattttggaagaaggagaaatgtaatgcttttacctttggataaattgcatttgtgataacagtgaggtatcgaaatactaatgtattcatttaatagaatttattttacatgattgttttagatatggagggtatgtcngctgcctttgatgaattctcagttctttgggaaatttagtgatgtgcttatttatatttgtatatattaggcatatgccccttactgggtaattgtgaaaattaaaaacataaatatgccaaacacttggagcagtccatggcacatagtttacacttgataaatgttttttctgttcccacaatcatcaacaccatcattttaattttaaacctcatccttattgttatccatcatcatagtgatgatgcgctgaattcatgtgattatagtgggattcgaaaaaagaatttgggagacacttgaggttaaattggtgtttgcttgtactgaaggaggaaaaatgaagagactgtgaaaacttgatttcttgcttggatgacagcaggaatagtatccttaactgatttagagaatgtaggatggggaccgtttaggcaatagaaatataatgagactgctttaaaacagttattctaaactgtaattgtatattttgatgaaaatgtctaggacttaaattgaaaaattgagantagaccttgggagagagagaaataggatggaaataaagctttaggagttattaaggcataaatggtgtatgacattgtgaataggtgagactatacaaagatggatggtagaggaagaagacatgaataatgntgatggagtataaagtctgagcagaaataaaagaaactgagatgagtccatgggagagagagaagataaagatgacggagttttcagaggaattcatgctgggaatttctatttaaaatgagtgagaaatattaaaggacaaaatagtcaaacagcaaggatttggtgactcaagcctggaactaaggtgagacatgagaaagaatacaactggagaatcactgggaatgaggtgaaaaaagatgaaattatagagtataactttaagaagcttaaaacagtagaaattctgtcataaagccctgggaaatgaccacactttggaaatgggagaaagaagagtggaaaaaagaggtagttacaccaaaacagttctaggagataaatataatttttcccttttcacaaatggaagctgaagttcagtgaaggaaagaatgaaagtgctcaaatagaaggggtgtgtctgaagaagatgaggacttggattcctagagtaactttaaagagcagaaatgcagatttatctttctggaaggaaaaatatgagtgagtgtaatgacaaattcgctggattacagagagtcggtaatggagctcttcccagctggatcttcgaagcaaagggtgagtttatttggctaagagtcaagatggagctgtgngtggagtgttgaatccatgaaacataaataaaaagatcggctagccgcagctgcagtgaagttaggcaagagatagtgtcagtgaatgtgggaaagcactaggaaaaaaataaaacgcactttgggaggccaagacgtatgggtcacctgaggtcaggagtttgagacagcctaggtcaacatggtgaaacccagattctactaaaaatacaaaattagctgggcgtggtggctcgtgcctgtaattccagctacttgggaggttgaggcaggagaatcacttggacctgggaggcggaggttccagtgggccgagatcacgccattgcaccccatcctgggcaacaagagcgacaaaactccgtccccacccgccaaaaaanaaaaaaa

SEQ ID NO: 66284 - DNA, 378 bp, Homo sapiens
ctgagcaaaagccagtaagtcagatactaatgaatggattagcaaattatagggactaatgaaattaaataaagattattcaactaaactagtggctcctcccagtagtttagagcgttgctgaccaccttctttttgtccactcacatattagaattaaaaatgtcaaagtaaaattaaaataacattctcacctacaagaggtagggagaaggaaagtaatatttatctttaatgttattttcagttgtgcatttattatgtatatttttgcataaaataacttgtagtttttgtttggacaagccaatcaaatgagtctttaagatgaagaaggagagcgaacccacaagagatgagtttcgtatgtcttctcaa

SEQ ID NO: 66285 - DNA, 322 bp, Homo sapiens
cctaactttcaaaatattctttcttctttgctataaattgctccatgctgcatctccattgctgtgtttctcttgtttaaattctttaaactaagaatacaagaacccaactttcacaacagccatcaacacacgtggcaattttaaaatgtgttcacagttctttgatactcttccagtattcttcccttttctcttgaatgtggatgtactgagtgactcgcttctaaaggacttagtgtggtataaatgagtatgtgatttcagagagtagttcattaaaaacacactgccacttcagcctcccttcagtccctcgttt

SEQ ID NO: 66286 - DNA, 456 bp, Homo sapiens
ttagcctcccttgttcccctctctgttaggtcctacttctggccttcatgtgctcatgaagcctaggagggcctggccctgcaggacacactagccagcctcactctcttcaagaccaagaggctgagtagacaaggaggctctggggcccaacaaggcccaggagtcattctctcactgtgtgtgtccccacctgtccttctctgtccctgccacactcccacctacctgcccctaaacatcccctagggcccttctgtacttctctctctatggagaagcagtttagcaaagtagttatgagatcaggctctgggctgggacttgacttgactcatgcctgtaatcccagcattttgggaggccaaggttgttggatcacttaaacccaggagtttgagaccagcccgagcaacatagtgagactcctgcttctggctctaccacttaccagtt

SEQ ID NO: 66287 - DNA, 182 bp, Homo sapiens
acattgcaatcacttttcaacgtgagatttggaggggacgaatattcaaaccatatcagtgcccacagtggcaactggcttgctaacataccccacattgttgcccccatcccctgcctcacttccccgctcccctacctatgtttcctgggatcaaactgcaaataaactgcttccactca

SEQ ID NO: 66288 - DNA, 358 bp, Homo sapiens
gcctctttggaggcccctggatgctaggctagggatgctgagctgctgaccagacacttcctggcaacattgggagggacccatgaggaaacaatctcctgtttgaagatacaggaagatattgccggaatcaggcgtctattctttctcctgaccagcaggccaatctcaggggaccaggtcttcctgggcttggcctcgacacttcctagcaacatcctttgctgagtgtgtgaaaatgctgcttctccaaataaacgaggacaatggggaccaaagcctgtcttggacaggatttccagcctcccctggtttctgccaatgagatgtatataatatagaaggttaaaaaaaaaca

SEQ ID NO: 66289 - DNA, 733 bp, Homo sapiens
tttttttttttaaataatggctgtttttccaatctggcattttgtaatgtcactaaagttcacttcaaaatgcaaatatatcctaagacaataaccagctgtccctgcggtcatgtgaggtggtacttttcaagctcaatttggtttctggatgcattcttctaaattattttttatatacactgtaaataagtacatatgtgtatatatgtaaatatgtgtgtgtgtgtatgtgtgtgtgtgtgtatatatatatattactttatctctatatctacgttatccaggatactttggctcaacatttcttaagtcaaattttgcagaccagtcaatattcatcaaactactttaagatggagccaagtggcctacaagagaatactgctaaggctgttaacacatataatttatgcaggagaatattccaagcttcctgactgcatcacacttttaactttttcttacattcgaaactacacttagaatcataacaaacttcatttttcaaacgtttgactttgaggtgtgtacaagtatactctgactctataaacttactcttctttaaagcagatcatcctatttatcataagattattaaaaatgtatacctttgcttttatttgccataaaaaaagctttctttggaataaaatagatttttatccaaagatgcagaactgttttcaagataaatccaatctgatcaatttgacagattaagactctc

SEQ ID NO: 66290 - DNA, 374 bp, Homo sapiens
ccactgtgtctggcctgccatgagctttagaagccagaaagctgcacttgttaaaattgtttgtaaagtaagaataaaccatctatgaaaatgaattctatgaacaaaaggaataagctttagaaagcttggactttgcaaaatatagtcttgtttcaaacagctcttttttggctttttaaaaactcctggtctggtgtggtggctcacacctgtaatcctagctctttgggaggccaaggtgggcgaatcacctgagattaggagttcaagaccagcttggccaatgtggtgaaaccccgtctctactaaaaatacaaaaataagccaagagtggtggtgtacacctgtaatcccagctactcaggagtttg

SEQ ID NO: 66291 - DNA, 311 bp, Homo sapiens
cattccactgcactctagctggggcaacagaatgaaactccgtctctaaaaaataaataaaaataaagacttccatgtctgttattgttttctctaaattcaaaattcagtatacttttggaggcattacctcaggactaaatggaatgtaaagccagtcattctaaatggagatttgggcctaacgtgggaagacaatttggggagataatagtaaatctgctagagaaaaggtgacttcttaactggctccactcatattatttaaaaatatatctttcttcctatatggtcgtggtgataataaaatg

SEQ ID NO: 66292 - DNA, 502 bp, Homo sapiens
gtgatcctcccacctgagcacccacaagtagctgggactgcaggtgcacacaccaccacacccagctagtttgttattttttgtagagacaaggtcttgccatgttgcccaggctggccttaaacccctgggctcaagcagtcctcccacctcggcctcccaaagtgctgggattacaagtgtgagccactatgcccagcctacactctttttccaaataaagtcacatccccaggaactgggccttcagacatgagcgctccttggtgagccaccgttcacccgttacggtcctccaaaccaaatgcctggttcttcgttgctgttttccaaatgctacctccttactggctgactagcaatggggagtaaagcccacctctgctcctgcctctctgggaaagtattgcctccttggtctctggttcccatctccaaaagaagctttaggctctccccccgctgtgacttgctgtcatcatggaacagatttttgttgtgc

SEQ ID NO: 66293 - DNA, 609 bp, Homo sapiens
aaaatcctattctagggaaatcccttccatgactcttgctaatgacggtatttgtagacccttctgccatttaatgtcctggtgccttggaagcgctcagtcaccttgtgggtgacgaggctgctccagaatgtagtttgcttagccttgctcatcctagtaccaggcctttatggatgcagattttggaataagaaaataagtgaaaagaaaatctaatttcttgatctgattgaagtaagagaggaagctagatagatatcttttttttaaaaaaaaaattatactttaagagaattttaggtgcattattcttagtttgtgacaaaaatgtgatatttctactttatatgttttattaagtataagcagaacataattatttactagtatggttactaatgagcacattgctatttattttatatatatatatttatttttttctttttaaaaatttcttaactgagagtatgtgcaattattgactactttgcagaactggtggcaaatataatttgcatggtagtatgcatgaaaacaattgaatttgaataattttaacttttgttaagtaagtggttcataataaaagttatgtatttgtca

SEQ ID NO: 66294 - DNA, 380 bp, Homo sapiens
gaacacatatctctattcagccatacaaagtgcaactcaccttaaaaaaaaaatcctcaaagtaagccactgaaattaaaacttgaaatattcaaatacatatatcgcttttaaaaattgagaatatgtagtagttcctctgctgtaagatttgtatggaagaatcataatagcttctctaagtagctgatgttgactttaatcattcatttaacaaatctttattcgagcaacaatcataagccaagcatagttttaggtgttggaatacactaacaaaacaggccaagtttctgcttttgtggaactttaattttaattgcagaaccagaaaatcagtaaatcagtaaatgcataacataaaaaatggtgcaaagggg

SEQ ID NO: 66295 - DNA, 300 bp, Homo sapiens
cttctcatgccagtctaatgattgtttttagaaaaggatatacattgaccttcaatgtaataagaaatgcaacactttacggtgtccaactgctaagatttatttccaacttgtcagacacaactattttgcccaatccaaatcaaagggaatcaaggctgtgaaatccacacaggacatcaacgcacacataaatgaaaactacagatgtgtcagaggcaaccatatacacacaaataatgtaactactaaattccatgaagtagctgtccaggaatactttccaaataacttcagcaa

SEQ ID NO: 66296 - DNA, 571 bp, Homo sapiens
ggtggcaattgaacaatgagaacacatggacacaggaaggggaacatcacacaccggggcctgttgtggggttggggtcgggggagggatagcattaggagatatacctaatgttaaatgacgagttaatgggtgcagcacaccaacatggcacatgtatacctatgtaacaaacctgcacgttgtgcacatgtaccctaaaacttaaagtataataatgaaaaaaagaaaaacccatggatttgaaatgttgacagtgacagcgcagaaagttcaaggaaatattaaataaaaaaattgaaagccatgatagcaacagtaataacaagtgcctttgacatcattttttactgcttctgccactcgatctcctataagtcaccaagtcctgtgttaaatgtctcttaaatgtttcttgtttgggatgattaaaatcttttggaaatagtggcgattattgtacattataaatgtaatcaatgccactgaattgtacccttaataaggcaaaaagggcaaactttctgttgtatatattttaccagaataaatttttttacaagaaaaaaaa

SEQ ID NO: 66297 - DNA, 4957 bp, Homo sapiens
tccccgccccaggcgcacttctccaccagatgcagtcatctctgcgtcacacgtactgcaccgaatccacctcctctgctgtccatgctcacgatccagtggccaaggctatgggacttttccagcacaccacaaccctgactcccagaagccttcccgatacctttcacacccttctctctcacaccatgtgaaaacattctggggagcctctgcctctgaatcccctgcagaagtgcgcctgggtgcgcacccaggcgcacttctcacgcacgactcgctgctcgaggtgtgcgatgactacagcctcgacgacaacgagtacttctttgaccgccacccgggcgccttcacctccatcctcaacttctaccgcactgggcgactgcacatgatggaggagatgtgcgcgctcagcttcagccaagagctcgactactggggcatcgacgagatctacctggagtcctgctgccaggcccgctaccaccagaagaaagagcagatgaacgaggagctcaagcgtgaggccgagaccctacgggagcgggaaggcgaggagttcgataacacgtgctgcgcagagaagaggaaaaaactctgggacctactggagaagcccaattcctctgtggctgccaagatccttgccataatttccatcatgttcatcgtcctctccaccattgccctgtccctcaacacgctgcctgagctacagagcctcgatgagttcggccagtccacagacaacccccagctggcccacgtggaggccgtgtgcatcgcatggttcaccatggagtacctgctgaggttcctctcctcgcccaagaagtggaagttcttcaagggcccactcaatgccattgacttgttggccattctgccatactatgtcaccattttcctcaccgaatccaacaagagcgtgctgcaattccagaatgtccgccgcgtggtccagatcttccgcatcatgcgaattctccgcatccttaagcttgcacgccactccactggcctccagtctctgggcttcactttgcggaggagctacaatgagttgggcttgctcatcctcttccttgccatgggcattatgatcttctccagccttgtcttctttgctgagaaggatgaggacgacaccaagttcaaaagcatcccagcctctttctggtgggccaccatcaccatgactactgttgggtatggagacatctaccccaagactctcctggggaaaattgttgggggactctgctgcattgcaggagtcctggtgattgctcttcccatccccatcatcgtcaataacttctctgagttctataaggagcagaagagacaggagaaagcaatcaaacggcgagaggctctggagagagccaagaggaatggcagcatcgtatccatgaacatgaaggatgcttttgcccggagcattgagatgatggacattgtggttgagaaaaatggggagaatatgggtaagaaagacaaagtacaagataaccacttgtctcctaacaaatggaaatggacaaagaggacactgtctgaaaccagctcaagtaagtcctttgaaaccaaggaacagggatcccctgaaaaagccagatcgtcttctagtcctcagcacctgaacgttcagcagttggaagacatgtacaataagatggccaagacccaatcccaacccatcctcaataccaaggagtcagcagcacagagcaaaccaaaggaagaacttgaaatggagagtatccccagccccgtagcccctctgcccactcgcacagaaggggtcattgacatgcgaagtatgtcaagcattgatagtttcattagctgtgccacagacttccctgaggccaccagattctcccacagccctttgacatcactccccagcaagactgggggcagcacagccccagaagtgggctggcggggagctctgggtgccagtggtggtaggtttgtggaggccaaccccagccctgatgccagccagcactctagtttcttcatcgagagccccaagagttccatgaaaactaacaaccctttgaagctccgagcacttaaagtcaacttcatggagggtgaccccagtccactcctccccgttctagggatgtaccatgaccctctcaggaaccgggggagtgctgcggctgctgtcgctggactggagtgtgccacgcttttggacaaggctgtgctgagcccagagtcctccatctacaccacagcaagtgctaagacacccccccggtctcctgagaaacacacagcaatagcgttcaactttgaggcgggtgtccaccagtacattgacgcagacacagatgatgagggacagctgctctacagtgtggactccagcccccccaaaagcctccctgggagcaccagtccgaagttcagcacggggacaagatcggagaaaaaccactttgaaagctcccctttacccacctcccctaagttcttaaggcagaactgtatttactccacagaagcattgactggaaaaggccccagtggtcaggaaaagtgcaaacttgagaaccacatctcccctgacgtccgtgtgttgccagggggaggagcccatggaagcacacgagatcagagcatctgaactgccctgccttggaggagagacttttgggtgaggtccaaagaggagagctgttcagcttacctgccacagagcttttctgcatgaactctggaacagaaaggccctgtaaagccctcagagagaagagagactccagagaaggctccctaagaccttgagagccatgacaggtccatcagcatgaagttggccaagccatagggcacagcacctccttgtaacaactctatagccctctttgggagatgacatgagtggaactcacagccaccactaccaccactttagacaggaccgaggccacatactccccattctctcgtggctttccatctcagcctcggagggcaacattgacagtcctcctggcttcagctagagaaggatgctggaacaagcggctggtgttgaaagagtgggttgaccaatttggtattgaatgttgcccagccacccctaggaacacctgtccatcacctcctggatggattccactgttagacagctacagggaatgattggtcatggggaagtctctgcgccataagccacgatcccagcgcaaaacccttactcaaatgtcttcattgacttcggtatttcatagtacctgagattttattttgagataccatcagggtgagttgcaccacttgtactcaattctaattgccccctggcaatctgggaagggttcagaaggtgggcacccagccaacagcatgaactcagagcattgttttagggttggaggaggaacacgctttctttacatcactagtgtagactcaaaagatatgcaagtgtcaaatatgcaaaagaaatagtttattcaaagagactgtgtgttactgaagaacagcataaaaatatgatttttttacttgcaaaaatgaaaggaaaaaaataccacgcattgaaatgcccagttcagactgaataattcctgctgcagcaaggaaagtacctactataatagaaattctgttttgttttctgtggttttcaagttaaaaaaaaaaaagttaaaataaaaagcactttatgtttttcaaaaataggttctgccagggacagtgtcaacatcttgcactttaaaataagcactatttcccatagcccaattgttgggactgtagttggattgttgctacctgcccatttctggccagcatgggtaatattgtgctggtattactgtctgccatatcaaagtctgtgggctccttccctgcccctctgaaaccttcccttaaccctcatgggtcaggaggggttcttgccccttgggtggggcctctcatgaagtcaagtatacaggagacatgcacatctcaaaaggacacagtgacagttggacattgggtgttttactctgttctctttcttgtcaaccagctattggtttttcagtgtcactgtctgtactaaaagctcaactctccttcctgcagccatcgatgcagccagtacagacaaaagcaataagtatttgtgtgcatcctgagtggttctggtgtatttcttggtgttggttttcctgtcctcgtttgatgacctggcattgtcctgcctgcttttagtccaacagcatggtgttgttggccattcctcagtacagtggcattaggttgaaccactgatgaatacaatgctatagtgttggctcacctgtcagtaaagatgacatgttattggtctgcctgtctgtagtacaatggaacaatgttgttctcttaatgtaatgttgatggatgatgtcccaagtacaatagtgtagttctgtctatcctcaatacagtaacaggcatatgtcttcccagtggaagaaagatatggtattggttcacctagtcttaagtctcaatatcatctgttgctggtctgcctgttagtacaatggcatgatccacctctcagtacacaaatatcatggagctgttctgcctgctcttcatacataaggcataaggttgagccacctgccacacatatgatgagatgggatcattccaccacccttaaaaatatgtcttctctgctgtatacaaacccaattcataacacttctcagcatctccagagactgtagatccccccaagagggtgcagtcctgttctttgccgcattaacagagaaaacgagaacgtcactcttcctaggtatcttcagagtattcgcgcagcaactgcaaagggacttaggggcagggagagtgtgaggtcatcccgtgccaggcagaggaagcagcactcccaaaacactttgctgaacacgcagtctgagctgggggcctcttg

SEQ ID NO: 66298 - DNA, 397 bp, Homo sapiens
accgccacccgggcgccttcacctccatcctcaacttctaccgcactgggcgactgcacatgatggaggagatgtgcgcgctcagcttcagccaagagctcgactactggggcatcgacgagatctacctggagtcctgctgccaggcccgctaccaccagaagaaagagcagatgaacgaggagctcaagcgtgaggccgagaccctacgggagcgggaaggcgaggagttcgataacacgtgctgcgcagagaagaggaaaaaactctgggacctactggagaagcccaattcctctgtggctgccaaggtgagtctgggatctgggggctgctggtctggggggatctgcttgcatccccatattgaggaccactgctggaggactctggcttt

SEQ ID NO: 66299 - DNA, 5066 bp, Homo sapiens
  misc_feature (27)..(27): n is a, c, g, or t
  misc_feature (47)..(47): n is a, c, g, or t
  misc_feature (65)..(65): n is a, c, g, or t
  misc_feature (69)..(69): n is a, c, g, or t
  misc_feature (94)..(95): n is a, c, g, or t
cctgcccaggagcgccgccctggggcngtcgggatggaggtgagaanaggccgtgacgcgcgcgngggnccccctgcacccccagcagcccacnncgctccctgcccccctcccgcagcagcgggccttgccgtcgagtgacagcggcctggggggcagggggggcgggggcggccggatcagcgatgccggcgggcatgacgaagcatggctcccgctccaccagctcgctgccgcccgagcccatggagatcgtgcgcagcaaggcgtgctctcggcgggtccgcctcaacgtcggggggctggcgcacgaggtactctggcgtaccctggaccgcctgccccgcacgcggctgggcaagctccgcgactgcaacacgcacgactcgctgctcgaggtgtgcgatgactacagcctcgacgacaacgagtacttctttgaccgccacccgggcgccttcacctccatcctcaacttctaccgcactgggcgactgcacatgatggaggagatgtgcgcgctcagcttcagccaagagctcgactactggggcatcgacgagatctacctggagtcctgctgccaggcccgctaccaccagaagaaagagcagatgaacgaggagctcaagcgtgaggccgagaccctacgggagcgggaaggcgaggagttcgataacacgtgctgcgcagagaagaggaaaaaactctgggacctactggagaagcccaattcctctgtggctgccaagatccttgccataatttccatcatgttcatcgtcctctccaccattgccctgtccctcaacacgctgcctgagctacagagcctcgatgagttcggccagtccacagacaacccccagctggcccacgtggaggccgtgtgcatcgcatggttcaccatggagtacctgctgaggttcctctcctcgcccaagaagtggaagttcttcaagggcccactcaatgccattgacttgttggccattctgccatactatgtcaccattttcctcaccgaatccaacaagagcgtgctgcaattccagaatgtccgccgcgtggtccagatcttccgcatcatgcgaattctccgcatccttaagcttgcacgccactccactggcctccagtctctgggcttcactttgcggaggagctacaatgagttgggcttgctcatcctcttccttgccatgggcattatgatcttctccagccttgtcttctttgctgagaaggatgaggacgacaccaagttcaaaagcatcccagcctctttctggtgggccaccatcaccatgactactgttgggtatggagacatctaccccaagactctcctggggaaaattgttgggggactctgctgcattgcaggagtcctggtgattgctcttcccatccccatcatcgtcaataacttctctgagttctataaggagcagaagagacaggagaaagcaatcaaacggcgagaggctctggagagagccaagaggaatggcagcatcgtatccatgaacatgaaggatgcttttgcccggagcattgagatgatggacattgtggttgagaaaaatggggagaatatgggtaagaaagacaaagtacaagataaccacttgtctcctaacaaatggaaatggacaaagaggacactgtctgaaaccagctcaagtaagtcctttgaaaccaaggaacagggatcccctgaaaaagccagatcgtcttctagtcctcagcacctgaacgttcagcagttggaagacatgtacaataagatggccaagacccaatcccaacccatcctcaataccaaggagtcagcagcacagagcaaaccaaaggaagaacttgaaatggagagtatccccagccccgtagcccctctgcccactcgcacagaaggggtcattgacatgcgaagtatgtcaagcattgatagtttcattagctgtgccacagacttccctgaggccaccagattctcccacagccctttgacatcactccccagcaagactgggggcagcacagccccagaagtgggctggcggggagctctgggtgccagtggtggtaggtttgtggaggccaaccccagccctgatgccagccagcactctagtttcttcatcgagagccccaagagttccatgaaaactaacaaccctttgaagctccgagcacttaaagtcaacttcatggagggtgaccccagtccactcctccccgttctagggatgtaccatgaccctctcaggaaccgggggagtgctgcggctgctgtcgctggactggagtgtgccacgcttttggacaaggctgtgctgagcccagagtcctccatctacaccacagcaagtgctaagacacccccccggtctcctgagaaacacacagcaatagcgttcaactttgaggcgggtgtccaccagtacattgacgcagacacagatgatgagggacagctgctctacagtgtggactccagcccccccaaaagcctccctgggagcaccagtccgaagttcagcacggggacaagatcggagaaaaaccactttgaaagctcccctttacccacctcccctaagttcttaaggcagaactgtatttactccacagaagcattgactggaaaaggccccagtggtcaggaaaagtgcaaacttgagaaccacatctcccctgacgtccgtgtgttgccagggggaggagcccatggaagcacacgagatcagagcatctgaactgccctgccttggaggagagacttttgggtgaggtccaaagaggagagctgttcagcttacctgccacagagcttttctgcatgaactctggaacagaaaggccctgtaaagccctcagagagaagagagactccagagaaggctccctaagaccttgagagccatgacaggtccatcagcatgaagttggccaagccatagggcacagcacctccttgtaacaactctatagccctctttgggagatgacatgagtggaactcacagccaccactaccaccactttagacaggaccgaggccacatactccccattctctcgtggctttccatctcagcctcggagggcaacattgacagtcctcctggcttcagctagagaaggatgctggaacaagcggctggtgttgaaagagtgggttgaccaatttggtattgaatgttgcccagccacccctaggaacacctgtccatcacctcctggatggattccactgttagacagctacagggaatgattggtcatggggaagtctctgcgccataagccacgatcccagcgcaaaacccttactcaaatgtcttcattgacttcggtatttcatagtacctgagattttattttgagataccatcagggtgagttgcaccacttgtactcaattctaattgccccctggcaatctgggaagggttcagaaggtgggcacccagccaacagcatgaactcagagcattgttttagggttggaggaggaacacgctttctttacatcactagtgtagactcaaaagatatgcaagtgtcaaatatgcaaaagaaatagtttattcaaagagactgtgtgttactgaagaacagcataaaaatatgatttttttacttgcaaaaatgaaaggaaaaaaataccacgcattgaaatgcccagttcagactgaataattcctgctgcagcaaggaaagtacctactataatagaaattctgttttgttttctgtggttttcaagttaaaaaaaaaaaagttaaaataaaaagcactttatgtttttcaaaaataggttctgccagggacagtgtcaacatcttgcactttaaaataagcactatttcccatagcccaattgttgggactgtagttggattgttgctacctgcccatttctggccagcatgggtaatattgtgctggtattactgtctgccatatcaaagtctgtgggctccttccctgcccctctgaaaccttcccttaaccctcatgggtcaggaggggttcttgccccttgggtggggcctctcatgaagtcaagtatacaggagacatgcacatctcaaaaggacacagtgacagttggacattgggtgttttactctgttctctttcttgtcaaccagctattggtttttcagtgtcactgtctgtactaaaagctcaactctccttcctgcagccatcgatgcagccagtacagacaaaagcaataagtatttgtgtgcatcctgagtggttctggtgtatttcttggtgttggttttcctgtcctcgtttgatgacctggcattgtcctgcctgcttttagtccaacagcatggtgttgttggccattcctcagtacagtggcattaggttgaaccactgatgaatacaatgctatagtgttggctcacctgtcagtaaagatgacatgttattggtctgcctgtctgtagtacaatggaacaatgttgttctcttaatgtaatgttgatggatgatgtcccaagtacaatagtgtagttctgtctatcctcaatacagtaacaggcatatgtcttcccagtggaagaaagatatggtattggttcacctagtcttaagtctcaatatcatctgttgctggtctgcctgttagtacaatggcatgatccacctctcagtacacaaatatcatggagctgttctgcctgctcttcatacataaggcataaggttgagccacctgccacacatatgatgagatgggatcattccaccacccttaaaaatatgtcttctctgctgtatacaaacccaattcataacacttctcagcatctccagagactgtagatccccccaagagggtgcagtcctgttctttgccgcattaacagagaaaacgagaacgtcactcttcctaggtatcttcagagtattcgcgcagcaactgcaaagggacttaggggcagggagagtgtgaggtcatcccgtgccaggcagaggaagcagcactcccaaaacactttgctgaacacgcagtctgagctgggggcctcttg

SEQ ID NO: 66300 - DNA, 1397 bp, Homo sapiens
tccccgccccaggcgcacttctccaccagatgcagtcatctctgcgtcacacgtactgcaccgaatccacctcctctgctgtccatgctcacgatccagtggccaaggctatgggacttttccagcacaccacaaccctgactcccagaagccttcccgatacctttcacacccttctctctcacaccatgtgaaaacattctggggagcctctgcctctgaatcccctgcagaagtgcgcctgggtgcgcacccaggcgcacttctcacgcacgactcgctgctcgaggtgtgcgatgactacagcctcgacgacaacgagtacttctttgaccgccacccgggcgccttcacctccatcctcaacttctaccgcactgggcgactgcacatgatggaggagatgtgcgcgctcagcttcagccaagagctcgactactggggcatcgacgagatctacctggagtcctgctgccaggcccgctaccaccagaagaaagagcagatgaacgaggagctcaagcgtgaggccgagaccctacgggagcgggaaggcgaggagttcgataacacgtgctgcgcagagaagaggaaaaaactctgggacctactggagaagcccaattcctctgtggctgccaagatccttgccataatttccatcatgttcatcgtcctctccaccattgccctgtccctcaacacgctgcctgagctacagagcctcgatgagttcggccagtccacagacaacccccagctggcccacgtggaggccgtgtgcatcgcatggttcaccatggagtacctgctgaggttcctctcctcgcccaagaagtggaagttcttcaagggcccactcaatgccattgacttgttggccattctgccatactatgtcaccattttcctcaccgaatccaacaagagcgtgctgcaattccagaatgtccgccgcgtggtccagatcttccgcatcatgcgaattctccgcatccttaagcttgcacgccactccactggcctccagtctctgggcttcactttgcggaggagctacaatgagttgggcttgctcatcctcttccttgccatgggcattatgatcttctccagccttgtcttctttgctgagaaggatgaggacgacaccaagttcaaaagcatcccagcctctttctggtgggccaccatcaccatgactactgttgggtatggagacatctaccccaagactctcctggggaaaattgttgggggactctgctgcattgcaggagtcctggtgattgctcttcccatccccatcaaaacaataatttgttgcgtcaaaagaaggtgagaaaacggaaaaagaaaaaagataagaaagtaaaggggggaaaacaactaagaat

SEQ ID NO: 66301 - DNA, 3711 bp, Homo sapiens
gcgaggacagctgaataactgggagctcgaagttgcttgctgcctccgggagtggtctgcttggctgtcgcgttttccttttcttttttttttaaaaaaaaaaaagccaaacgtttgctcaccatcacctgcagaagtgagtttttattgaagaagctccagctgctttctccttattgccggcagcctggcaagcctcccttagagtgagctacttctcaggccgggcacgacagcagtgctagcacatttgaaaaagcaggaaaccgcccctgcatgcagagcttccagcctgagaaccccaggccagtcctcccagcagctgtgtagccagagagccttggtactgtggtcacatccctcaaaagtgaacagtcgccatcggaggcgtttggaggagaccgtgatgttgcagatgctgtggcatttcctagctagctttttccccagggctgggtgccacggctccagagagggggacgatcgtgaagtcagaggcaccccagcccctgcctggagagaccagatggcaagctttttggggaaacaggacggaagggctgaggccacggaaaaaagacccaccattttgctggtggttggacctgcagagcagtttcctaagaaaattgtacaagctggagataaggaccttgatgggcagctagactttgaagaatttgtccattatctccaagatcatgagaagaagctgaggctggtgtttaagagtttggacaaaaagaatgatggacgcattgacgcgcaggagatcatgcagtccctgcgggacttgggagtcaagatatctgaacagcaggcagaaaaaattctcaagagaatacgaacgggccatttctggggccctgtcacctacatggataaaaacggcacgatgaccatcgactggaacgagtggagagactaccacctcctccaccccgtggaaaacatccccgagatcatcctctactggaagcattccacgatctttgatgtgggtgagaatctaacggtcccggatgagttcacagtggaggagaggcagacggggatgtggtggagacacctggtggcaggaggtggggcaggggccgtatccagaacctgcacggcccccctggacaggctcaaggtgctcatgcaggtccatgcctcccgcagcaacaacatgggcatcgttggtggcttcactcagatgattcgagaaggaggggccaggtcactctggcggggcaatggcatcaacgtcctcaaaattgcccccgaatcagccatcaaattcatggcctatgagcagatcaagcgccttgttggtagtgaccaggagactctgaggattcacgagaggcttgtggcagggtccttggcaggggccatcgcccagagcagcatctacccaatggaggtcctgaagacccggatggcgctgcggaagacaggccagtactcaggaatgctggactgcgccaggaggatcctggccagagagggggtggccgccttctacaaaggctatgtccccaacatgctgggcatcatcccctatgccggcatcgaccttgcagtctacgagacgctcaagaatgcctggctgcagcactatgcagtgaacagcgcggaccccggcgtgtttgtgctcctggcctgtggcaccatgtccagtacctgtggccagctggccagctaccccctggccctagtcaggacccggatgcaggcgcaagcctctattgagggcgctccggaggtgaccatgagcagcctcttcaaacatatcctgcggaccgagggggccttcgggctgtacagggggctggcccccaacttcatgaaggtcatcccagctgtgagcatcagctacgtggtctacgagaacctgaagatcaccctgggcgtgcagtcgcggtgacggggggagggccgcccggcagtggactcgctgatcctgggccgcagcctggggtgtgcagccatctcattctgtgaatgtgccaacactaagctgtctcgagccaagctgtgaaaaccctagacgcacccgcagggagggtggggagagctggcaggcccagggcttgtcctgctgaccccagcagaccctcctgttggttccagcgaagaccacaggcattccttagggtccagggtcagcaggctccgggctcacatgtgtaaggacaggacattttctgcagtgcctgccaatagtgagcttggagcctggaggccggcttagttcttccatttcacccttgcagccagctgttggccacggcccctgccctctggtctgccgtgcatctccctgtgccctcttgctgcctgcctgtctgctgaggtaaggtgggaggagggctacagcccacatcccaccccctcgtccaatcccataatccatgatgaaaggtgaggtcacgtggcctcccaggcctgacttcccaacctacagcattgacgccaacttggctgtgaaggaagaggaaaggatctggccttgtggtcactggcatctgagccctgctgatggctggggctctcgggcatgcttgggagtgcagggggctcgggctgcctggcctggctgcacagaaggcaagtgctggggctcatggtgctctgagctggcctggaccctgtcaggatgggccccacctcagaaccaaactcactgtccccactgtggcatgagggcagtggagcaccatgtttgagggcgaagggcagagcgtttgtgtgttctggggagggaaggaaaaggtgttggaggccttaattatggactgttgggaaaagggttttgtccagaaggacaagccggacaaatgagcgacttctgtgcttccagaggaagacgagggagcaggagcttggctgactgctcagagtctgttctgacgccctgggggttcctgtccaaccccagcaggggcgcagcgggaccagccccacattccacttgtgtcactgcttggaacctatttattttgtatttatttgaacagagttatgtcctaactatttttatagatttgtttaattaatagcttgtcattttcaagttcattttttattcatatttatgttcatggttgattgtaccttcccaagcccgcccagtgggatgggaggaggaggagaaggggggccttgggccgctgcagtcacatctgtccagagaaattccttttgggactggaggcagaaaagcggccagaaggcagcagccctggctcctttcctttggcaggttggggaagggcttgcccccagccttaggatttcagggtttgactgggggcgtggagagagagggaggaacctcaataaccttgaaggtggaatccagttatttcctgcgctgcgagggtttctttatttcactcttttctgaatgtcaaggcagtgaggtgcctctcactgtgaatttgtggtgggcgggggctggaggagagggtggggggctggctccgtccctcccagccttctgctgcccttgcttaacaatgccggccaactggcgacctcacggttgcacttccattccaccagaatgacctgatgaggaaatcttcaataggatgcaaagatcaatgcaaaaattgttatatatgaacatataactggagtcgtcaaaaagcaaattaagaaagaattggacgttagaagttgtcatttaaagcagccttctaataaagttgtttcaaagct

SEQ ID NO: 66302 - DNA, 291 bp, Homo sapiens
ctttccaaccaggagcaccaatggctcttctctcgtttacaggatgtgcgagacgtcagcgccacgttcctttcagacctggaagagaactttgagaacaatatcgtcgtccttctagacgctcaagaatgcctggctgcagcactatgcagtgaacagcgcggaccccggcgtgtttgtgctcctggcctgtggcaccatgtccagtacctgtggccagctggccagctaccccctggccctagtcaggacccggatgcaggcgcaaggtaaggctggccctggacagtc

SEQ ID NO: 66303 - DNA, 3244 bp, Homo sapiens
  misc_feature (23)..(23): n is a, c, g, or t
ggtgagggcagtggagcacccancaggccgccaacatgctctgtctgtgcctgtacgtgccggtcatcggggaagcccagaccgagttccagtactttgagtcgaaggggctccctgccgagctgaagtccattttcaagctcagtgtcttcatcccctcccaggaattctccacctaccgccagtggaagcagaaaattgtacaagctggagataaggaccttgatgggcagctagactttgaagaatttgtccattatctccaagatcatgagaagaagctgaggctggtgtttaagagtttggacaaaaagaatgatggacgcattgacgcgcaggagatcatgcagtccctgcgggacttgggagtcaagatatctgaacagcaggcagaaaaaattctcaagagcatggataaaaacggcacgatgaccatcgactggaacgagtggagagactaccacctcctccaccccgtggaaaacatccccgagatcatcctctactggaagcattccacgatctttgatgtgggtgagaatctaacggtcccggatgagttcacagtggaggagaggcagacggggatgtggtggagacacctggtggcaggaggtggggcaggggccgtatccagaacctgcacggcccccctggacaggctcaaggtgctcatgcaggtccatgcctcccgcagcaacaacatgggcatcgttggtggcttcactcagatgattcgagaaggaggggccaggtcactctggcggggcaatggcatcaacgtcctcaaaattgcccccgaatcagccatcaaattcatggcctatgagcagatcaagcgccttgttggtagtgaccaggagactctgaggattcacgagaggcttgtggcagggtccttggcaggggccatcgcccagagcagcatctacccaatggaggtcctgaagacccggatggcgctgcggaagacaggccagtactcaggaatgctggactgcgccaggaggatcctggccagagagggggtggccgccttctacaaaggctatgtccccaacatgctgggcatcatcccctatgccggcatcgaccttgcagtctacgagacgctcaagaatgcctggctgcagcactatgcagtgaacagcgcggaccccggcgtgtttgtgctcctggcctgtggcaccatgtccagtacctgtggccagctggccagctaccccctggccctagtcaggacccggatgcaggcgcaagcctctattgagggcgctccggaggtgaccatgagcagcctcttcaaacatatcctgcggaccgagggggccttcgggctgtacagggggctggcccccaacttcatgaaggtcatcccagctgtgagcatcagctacgtggtctacgagaacctgaagatcaccctgggcgtgcagtcgcggtgacggggggagggccgcccggcagtggactcgctgatcctgggccgcagcctggggtgtgcagccatctcattctgtgaatgtgccaacactaagctgtctcgagccaagctgtgaaaaccctagacgcacccgcagggagggtggggagagctggcaggcccagggcttgtcctgctgaccccagcagaccctcctgttggttccagcgaagaccacaggcattccttagggtccagggtcagcaggctccgggctcacatgtgtaaggacaggacattttctgcagtgcctgccaatagtgagcttggagcctggaggccggcttagttcttccatttcacccttgcagccagctgttggccacggcccctgccctctggtctgccgtgcatctccctgtgccctcttgctgcctgcctgtctgctgaggtaaggtgggaggagggctacagcccacatcccaccccctcgtccaatcccataatccatgatgaaaggtgaggtcacgtggcctcccaggcctgacttcccaacctacagcattgacgccaacttggctgtgaaggaagaggaaaggatctggccttgtggtcactggcatctgagccctgctgatggctggggctctcgggcatgcttgggagtgcagggggctcgggctgcctggcctggctgcacagaaggcaagtgctggggctcatggtgctctgagctggcctggaccctgtcaggatgggccccacctcagaaccaaactcactgtccccactgtggcatgagggcagtggagcaccatgtttgagggcgaagggcagagcgtttgtgtgttctggggagggaaggaaaaggtgttggaggccttaattatggactgttgggaaaagggttttgtccagaaggacaagccggacaaatgagcgacttctgtgcttccagaggaagacgagggagcaggagcttggctgactgctcagagtctgttctgacgccctgggggttcctgtccaaccccagcaggggcgcagcgggaccagccccacattccacttgtgtcactgcttggaacctatttattttgtatttatttgaacagagttatgtcctaactatttttatagatttgtttaattaatagcttgtcattttcaagttcattttttattcatatttatgttcatggttgattgtaccttcccaagcccgcccagtgggatgggaggaggaggagaaggggggccttgggccgctgcagtcacatctgtccagagaaattccttttgggactggaggcagaaaagcggccagaaggcagcagccctggctcctttcctttggcaggttggggaagggcttgcccccagccttaggatttcagggtttgactgggggcgtggagagagagggaggaacctcaataaccttgaaggtggaatccagttatttcctgcgctgcgagggtttctttatttcactcttttctgaatgtcaaggcagtgaggtgcctctcactgtgaatttgtggtgggcgggggctggaggagagggtggggggctggctccgtccctcccagccttctgctgcccttgcttaacaatgccggccaactggcgacctcacggttgcacttccattccaccagaatgacctgatgaggaaatcttcaataggatgcaaagatcaatgcaaaaattgttatatatgaacatataactggagtcgtcaaaaagcaaattaagaaagaattggacgttagaagttgtcatttaaagcagccttctaataaagttgtttcaaagct

SEQ ID NO: 66304 - DNA, 1885 bp, Homo sapiens
  misc_feature (17)..(17): n is a, c, g, or t
  misc_feature (21)..(21): n is a, c, g, or t
  misc_feature (23)..(23): n is a, c, g, or t
tggctaggtacgaggcnggtntnatcggccgaggctacgtggtctacgagaacctgaagatcaccctgggcgtgcagtcgcggtgacggggggagggccgcccggcagtggactcgctgatcctgggccgcagcctggggtgtgcagccatctcattctgtgaatgtgccaacactaagctgtctcgagccaagctgtgaaaaccctagacgcacccgcagggagggtggggagagctggcaggcccagggcttgtcctgctgaccccagcagaccctcctgttggttccagcgaagaccacaggcattccttagggtccagggtcagcaggctccgggctcacatgtgtaaggacaggacattttctgcagtgcctgccaatagtgagcttggagcctggaggccggcttagttcttccatttcacccttgcagccagctgttggccacggcccctgccctctggtctgccgtgcatctccctgtgccctcttgctgcctgcctgtctgctgaggtaaggtgggaggagggctacagcccacatcccaccccctcgtccaatcccataatccatgatgaaaggtgaggtcacgtggcctcccaggcctgacttcccaacctacagcattgacgccaacttggctgtgaaggaagaggaaaggatctggccttgtggtcactggcatctgagccctgctgatggctggggctctcgggcatgcttgggagtgcagggggctcgggctgcctggcctggctgcacagaaggcaagtgctggggctcatggtgctctgagctggcctggaccctgtcaggatgggccccacctcagaaccaaactcactgtccccactgtggcatgagggcagtggagcaccatgtttgagggcgaagggcagagcgtttgtgtgttctggggagggaaggaaaaggtgttggaggccttaattatggactgttgggaaaagggttttgtccagaaggacaagccggacaaatgagcgacttctgtgcttccagaggaagacgagggagcaggagcttggctgactgctcagagtctgttctgacgccctgggggttcctgtccaaccccagcaggggcgcagcgggaccagccccacattccacttgtgtcactgcttggaacctatttattttgtatttatttgaacagagttatgtcctaactatttttatagatttgtttaattaatagcttgtcattttcaagttcattttttattcatatttatgttcatggttgattgtaccttcccaagcccgcccagtgggatgggaggaggaggagaaggggggccttgggccgctgcagtcacatctgtccagagaaattccttttgggactggaggcagaaaagcggccagaaggcagcagccctggctcctttcctttggcaggttggggaagggcttgcccccagccttaggatttcagggtttgactgggggcgtggagagagagggaggaacctcaataaccttgaaggtggaatccagttatttcctgcgctgcgagggtttctttatttcactcttttctgaatgtcaaggcagtgaggtgcctctcactgtgaatttgtggtgggcgggggctggaggagagggtggggggctggctccgtccctcccagccttctgctgcccttgcttaacaatgccggccaactggcgacctcacggttgcacttccattccaccagaatgacctgatgaggaaatcttcaataggatgcaaagatcaatgcaaaaattgttatatatgaacatataactggagtcgtcaaaaagcaaattaagaaagaattggacgttagaagttgtcatttaaagcagccttctaataaagttgtttcaaagct

SEQ ID NO: 66305 - DNA, 4073 bp, Homo sapiens
tgccggcgtctccgagcccgcgctcccagctgcagagcgcctggcttgcctcccgcgcggtcaccgccggcccgccgcccccgctcccgcccgcgcccggagcccctgcctcgcgcccgatggtgagcagtgtgttgtgccgctgtgtggcctccccgccgccggacgccgccgccaccgccgcctcttcgtctgcctcatcgccggcgtccgtgggggacccctgcggcggcgctatctgcgggggcccggaccaccggctgcgcctgtggagactctttcagacgctcgacgtcaaccgggacggcggcctgtgtgtcaacgacctggcggtggggctgcggcgcctgggactgcaccgcaccgagggcgagctccagaaaattgtacaagctggagataaggaccttgatgggcagctagactttgaagaatttgtccattatctccaagatcatgagaagaagctgaggctggtgtttaagagtttggacaaaaagaatgatggacgcattgacgcgcaggagatcatgcagtccctgcgggacttgggagtcaagatatctgaacagcaggcagaaaaaattctcaagagcatggataaaaacggcacgatgaccatcgactggaacgagtggagagactaccacctcctccaccccgtggaaaacatccccgagatcatcctctactggaagcattccacgatctttgatgtgggtgagaatctaacggtcccggatgagttcacagtggaggagaggcagacggggatgtggtggagacacctggtggcaggaggtggggcaggggccgtatccagaacctgcacggcccccctggacaggctcaaggtgctcatgcaggtccatgcctcccgcagcaacaacatgggcatcgttggtggcttcactcagatgattcgagaaggaggggccaggtcactctggcggggcaatggcatcaacgtcctcaaaattgcccccgaatcagccatcaaattcatggcctatgagcagatcaagcgccttgttggtagtgaccaggagactctgaggattcacgagaggcttgtggcagggtccttggcaggggccatcgcccagagcagcatctacccaatggaggtcctgaagacccggatggcgctgcggaagacaggccagtactcaggaatgctggactgcgccaggaggatcctggccagagagggggtggccgccttctacaaaggctatgtccccaacatgctgggcatcatcccctatgccggcatcgaccttgcagtctacgagacgctcaagaatgcctggctgcagcactatgcagtgaacagcgcggaccccggcgtgtttgtgctcctggcctgtggcaccatgtccagtacctgtggccagctggccagctaccccctggccctagtcaggacccggatgcaggcgcaagcctctattgagggcgctccggaggtgaccatgagcagcctcttcaaacatatcctgcggaccgagggggccttcgggctgtacagggggctggcccccaacttcatgaaggtcatcccagctgtgagcatcagctacgtggtctacgagaacctgaagatcaccctgggcgtgcagtcgcggtgacggggggagggccgcccggcagtggactcgctgatcctgggccgcagcctggggtgtgcagccatctcattctgtgaatgtgccaacactaagctgtctcgagccaagctgtgaaaaccctagacgcacccgcagggagggtggggagagctggcaggcccagggcttgtcctgctgaccccagcagaccctcctgttggttccagcgaagaccacaggcattccttagggtccagggtcagcaggctccgggctcacatgtgtaaggacaggacattttctgcagtgcctgccaatagtgagcttggagcctggaggccggcttagttcttccatttcacccttgcagccagctgttggccacggcccctgccctctggtctgccgtgcatctccctgtgccctcttgctgcctgcctgtctgctgaggtaaggtgggaggagggctacagcccacatcccaccccctcgtccaatcccataatccatgatgaaaggtgaggtcacgtggcctcccaggcctgacttcccaacctacagcattgacgccaacttggctgtgaaggaagaggaaaggatctggccttgtggtcactggcatctgagccctgctgatggctggggctctcgggcatgcttgggagtgcagggggctcgggctgcctggcctggctgcacagaaggcaagtgctggggctcatggtgctctgagctggcctggaccctgtcaggatgggccccacctcagaaccaaactcactgtccccactgtggcatgagggcagtggagcaccatgtttgagggcgaagggcagagcgtttgtgtgttctggggagggaaggaaaaggtgttggaggccttaattatggactgttgggaaaagggttttgtccagaaggacaagccggacaaatgagcgacttctgtgcttccagaggaagacgagggagcaggagcttggctgactgctcagagtctgttctgacgccctgggggttcctgtccaaccccagcaggggcgcagcgggaccagccccacattccacttgtgtcactgcttggaacctatttattttgtatttatttgaacagagttatgtcctaactatttttatagatttgtttaattaatagcttgtcattttcaagttcattttttattcatatttatgttcatggttgattgtaccttcccaagcccgcccagtgggatgggaggaggaggagaaggggggccttgggccgctgcagtcacatctgtccagagaaattccttttgggactggaggcagaaaagcggccagaaggcagcagccctggctcctttcctttggcaggttggggaagggcttgcccccagccttaggatttcagggtttgactgggggcgtggagagagagggaggaacctcaataaccttgaaggtggaatccagttatttcctgcgctgcgagggtttctttatttcactcttttctgaatgtcaaggcagtgaggtgcctctcactgtgaatttgtggtgggcgggggctggaggagagggtggggggctggctccgtccctcccagccttctgctgcccttgcttaacaatgccggccaactggcgacctcacggttgcacttccattccaccagaatgacctgatgaggaaatcttcaataggatgcaaagatcaatgcaaaaattgttatatatgaacatataactggagtcgtcaaaaagcaaattaagaaagaattggacgttagaagttgtcatttaaagcagccttctaataaagttgtttcaaagctaagcaattaaaccagttaagtctcccaaaaaaaaaaaaaaaaaaaaaaaaaaaaaaaaaaaaaaaaaaaaaaaaaaaaaaaaaacggcgacgccacacgacgacgacacacaaaaaagaagacactatataaacaacaacaaatcaagacgagagttgagcgagcgcgcgggcgccccccacaagagagagaaacaaagaaacgcgaggcaaaaaacggcggcgtctccccggcgagagcaacacgcggcgtgcgcaatcaataacaagaggggcgaggaggatctctcccccacccgccataaaataaaaaaaaaagagcgcgcggcgcgcggagcgctaacacaagcaccggagcgcgctctttatcaagagacaacatctcctccctaaaagagagcgagagtatctccttaccgagagaggcaagctctaatatagatgggagggagtctatctcttatcacaacgcagagagagcgcgtatcccacacagaattagatgcgaccgcctcgcagtagtatctctctgataactagataatctcagctcagcgccccccaccgtacgcggcagatgtaggtgggaggacacactagtcctaccgacgtcatcgcgtcgggtgaggtccggaggtgtgggg

SEQ ID NO: 66306 - DNA, 2427 bp, Homo sapiens
  misc_feature (2304)..(2306): n is a, c, g, or t
  misc_feature (2308)..(2308): n is a, c, g, or t
  misc_feature (2313)..(2314): n is a, c, g, or t
  misc_feature (2321)..(2321): n is a, c, g, or t
  misc_feature (2328)..(2328): n is a, c, g, or t
  misc_feature (2331)..(2331): n is a, c, g, or t
  misc_feature (2344)..(2344): n is a, c, g, or t
  misc_feature (2357)..(2357): n is a, c, g, or t
  misc_feature (2361)..(2361): n is a, c, g, or t
  misc_feature (2366)..(2367): n is a, c, g, or t
  misc_feature (2370)..(2370): n is a, c, g, or t
  misc_feature (2374)..(2374): n is a, c, g, or t
  misc_feature (2376)..(2376): n is a, c, g, or t
tgccggcgtctccgagcccgcgctcccagctgcagagcgcctggcttgcctcccgcgcggtcaccgccggcccgccgcccccgctcccgcccgcgcccggagcccctgcctcgcgcccgatggtgagcagtgtgttgtgccgctgtgtggcctccccgccgccggacgccgccgccaccgccgcctcttcgtctgcctcatcgccggcgtccgtgggggacccctgcggcggcgctatctgcgggggcccggaccaccggctgcgcctgtggagactctttcagacgctcgacgtcaaccgggacggcggcctgtgtgtcaacgacctggcggtggggctgcggcgcctgggactgcaccgcaccgagggcgagctccagaaaattgtacaagctggagataaggaccttgatgggcagctagactttgaagaatttgtccattatctccaagatcatgagaagaagctgaggctggtgtttaagagtttggacaaaaagaatgatggacgcattgacgcgcaggagatcatgcagtccctgcgggacttgggagtcaagatatctgaacagcaggcagaaaaaattctcaagagcatggataaaaacggcacgatgaccatcgactggaacgagtggagagactaccacctcctccaccccgtggaaaacatccccgagatcatcctctactggaagcattccacgatctttgatgtgggtgagaatctaacggtcccggatgagttcacagtggaggagaggcagacggggatgtggtggagacacctggtggcaggaggtggggcaggggccgtatccagaacctgcacggcccccctggacaggctcaaggtgctcatgcaggtccatgcctcccgcagcaacaacatgggcatcgttggtggcttcactcagatgattcgagaaggaggggccaggtcactctggcggggcaatggcatcaacgtcctcaaaattgcccccgaatcagccatcaaattcatggcctatgagcagatcaagcgccttgttggtagtgaccaggagactctgaggattcacgagaggcttgtggcagggtccttggcaggggccatcgcccagagcagcatctacccaatggaggtcctgaagacccggatggcgctgcggaagacaggccagtactcaggaatgctggactgcgccaggaggatcctggccagagagggggtggccgccttctacaaaggctatgtccccaacatgctgggcatcatcccctatgccggcatcgaccttgcagtctacgagacgctcaagaatgcctggctgcagcactatgcagtgaacagcgcggaccccggcgtgtttgtgctcctggcctgtggcaccatgtccagtacctgtggccagctggccagctaccccctggccctagtcaggacccggatgcaggcgcaagcctctattgagggcgctccggaggtgaccatgagcagcctcttcaaacatatcctgcggaccgagggggccttcgggctgtacagggggctggcccccaacttcatgaaggtcatcccagctgtgagcatcagctacgtggtctacgagaacctgaagatcaccctgggcgtgcagtcgcggtgacggggggagggccgcccggcagtggactcgctgatcctgggccgcagcctggggtgtgcagccatctcattctgtgaatgtgccaacactaagctgtctcgagccaagctgtgaaaaccctagacgcacccgcagggagggtggggagagctggcaggcccagggcttgtcctgctgaccccagcagaccctcctgttggttccagcgaagaccacaggcattccttagggtccagggtcagcaggctccgggctcacatgtgtaaggacaggacattttctgcagtgcctgccaatagtgagcttggagcctggaggccggcttagttcttccatttcacccttgcagccagctgttggccacggcccctgccctctggtctgccgtgcatctccctgtgccctcttgctgcctgcctgtctgctgaggtaaggtgggaggagggctacagcccacatcccaccccctcgtccaatcccataatccatgatgaaaggtgaggtcacgtggcctcccaggcctgacttcccaacctacagcattgacgccaacttggctgtgaaggaagaggaaaggatctggccttgtggtcactggcatctgagccctgctgatggctggggctctcgggcatgcttgggagtgcagggggctcgggctgcctggctggtnnncnaaggnngctgggncctgggncgngtggctggcctgnggtggcccttacnatcngtccnnggngggngnggcccttttgggggcggggtttttgggggggggggggctgggggggggccg

SEQ ID NO: 66307 - DNA, 1451 bp, Homo sapiens
tgccggcgtctccgagcccgcgctcccagctgcagagcgcctggcttgcctcccgcgcggtcaccgccggcccgccgcccccgctcccgcccgcgcccggagcccctgcctcgcgcccgatggtgagcagtgtgttgtgccgctgtgtggcctccccgccgccggacgccgccgccaccgccgcctcttcgtctgcctcatcgccggcgtccgtgggggacccctgcggcggcgctatctgcgggggcccggaccaccggctgcgcctgtggagactctttcagacgctcgacgtcaaccgggacggcggcctgtgtgtcaacgacctggcggtggggctgcggcgcctgggactgcaccgcaccgagggcgagctccagaaaattgtacaagctggagataaggaccttgatgggcagctagactttgaagaatttgtccattatctccaagatcatgagaagaagctgaggctggtgtttaagagtttggacaaaaagaatgatggacgcattgacgcgcaggagatcatgcagtccctgcgggacttgggagtcaagatatctgaacagcaggcagaaaaaattctcaagagcatggataaaaacggcacgatgaccatcgactggaacgagtggagagactaccacctcctccaccccgtggaaaacatccccgagatcatcctctactggaagcattccacgatctttgatgtgggtgagaatctaacggtcccggatgagttcacagtggaggagaggcagacggggatgtggtggagacacctggtggcaggaggtggggcaggggccgtatccagaacctgcacggcccccctggacaggctcaaggtgctcatgcaggtccatgcctcccgcagcaacaacatgggcatcgttggtggcttcactcagatgattcgagaaggaggggccaggtcactctggcggggcaatggcatcaacgtcctcaaaattgcccccgaatcagccatcaaattcatggcctatgagcagatcaagcgccttgttggtagtgaccaggagactctgaggattcacgagaggcttgtggcagggtccttggcaggggccatcgcccagagcagcatctacccaatggagtttctgaatgtcaaggcagtgaggtgcctctcactgtgaatttgtggtgggcgggggctggaggagagggtggggggctggctccgtccctcccagccttctgctgcccttgcttaacaatgccggccaactggcgacctcacggttgcacttccattccaccagaatgacctgatgaggaaatcttcaataggatgcaaagatcaatgcaaaaattgttatatatgaacatataactggagtcgtcaaaaagcaaattaagaaagaattggacgttagaagttgtcatttaaagcagccttctaataaagttgtttcaaagct

SEQ ID NO: 66308 - DNA, 404 bp, Homo sapiens
agagacggggtttcaccatgttggctgggctggtctcgaactcctgaactcaagtgatccacctgcctcagcctcccaaagtgctgggattacaggcatgagccaccgcgcccagccttgattttttttttaagtcatctttatggagatgttcaggacaaggctggcaaccagcagatacccagtacgatggagctgagcctcacttagccgtgttgggttactttgggctcatgattccaagcttgtcttcaaaatgcacggaagaaagggccttccctttggccgcagccggttggccagcagaggctcttggccgggtgaggcagcctgtggccccccgggtccgtctgactgttcggtcctccctcccaggtccatgcctcccgcagcaacaacatggg

SEQ ID NO: 66309 - DNA, 2748 bp, Homo sapiens
ttgtgccatctggcacgaggcacagatctttgatgtgggtgagaatctaacggtcccggatgagttcacagtggaggagaggcagacggggatgtggtggagacacctggtggcaggaggtggggcaggggccgtatccagaacctgcacggcccccctggacaggctcaaggtgctcatgcaggtccatgcctcccgcagcaacaacatgggcatcgttggtggcttcactcagatgattcgagaaggaggggccaggtcactctggcggggcaatggcatcaacgtcctcaaaattgcccccgaatcagccatcaaattcatggcctatgagcagatcaagcgccttgttggtagtgaccaggagactctgaggattcacgagaggcttgtggcagggtccttggcaggggccatcgcccagagcagcatctacccaatggaggtcctgaagacccggatggcgctgcggaagacaggccagtactcaggaatgctggactgcgccaggaggatcctggccagagagggggtggccgccttctacaaaggctatgtccccaacatgctgggcatcatcccctatgccggcatcgaccttgcagtctacgagacgctcaagaatgcctggctgcagcactatgcagtgaacagcgcggaccccggcgtgtttgtgctcctggcctgtggcaccatgtccagtacctgtggccagctggccagctaccccctggccctagtcaggacccggatgcaggcgcaagcctctattgagggcgctccggaggtgaccatgagcagcctcttcaaacatatcctgcggaccgagggggccttcgggctgtacagggggctggcccccaacttcatgaaggtcatcccagctgtgagcatcagctacgtggtctacgagaacctgaagatcaccctgggcgtgcagtcgcggtgacggggggagggccgcccggcagtggactcgctgatcctgggccgcagcctggggtgtgcagccatctcattctgtgaatgtgccaacactaagctgtctcgagccaagctgtgaaaaccctagacgcacccgcagggagggtggggagagctggcaggcccagggcttgtcctgctgaccccagcagaccctcctgttggttccagcgaagaccacaggcattccttagggtccagggtcagcaggctccgggctcacatgtgtaaggacaggacattttctgcagtgcctgccaatagtgagcttggagcctggaggccggcttagttcttccatttcacccttgcagccagctgttggccacggcccctgccctctggtctgccgtgcatctccctgtgccctcttgctgcctgcctgtctgctgaggtaaggtgggaggagggctacagcccacatcccaccccctcgtccaatcccataatccatgatgaaaggtgaggtcacgtggcctcccaggcctgacttcccaacctacagcattgacgccaacttggctgtgaaggaagaggaaaggatctggccttgtggtcactggcatctgagccctgctgatggctggggctctcgggcatgcttgggagtgcagggggctcgggctgcctggcctggctgcacagaaggcaagtgctggggctcatggtgctctgagctggcctggaccctgtcaggatgggccccacctcagaaccaaactcactgtccccactgtggcatgagggcagtggagcaccatgtttgagggcgaagggcagagcgtttgtgtgttctggggagggaaggaaaaggtgttggaggccttaattatggactgttgggaaaagggttttgtccagaaggacaagccggacaaatgagcgacttctgtgcttccagaggaagacgagggagcaggagcttggctgactgctcagagtctgttctgacgccctgggggttcctgtccaaccccagcaggggcgcagcgggaccagccccacattccacttgtgtcactgcttggaacctatttattttgtatttatttgaacagagttatgtcctaactatttttatagatttgtttaattaatagcttgtcattttcaagttcattttttattcatatttatgttcatggttgattgtaccttcccaagcccgcccagtgggatgggaggaggaggagaaggggggccttgggccgctgcagtcacatctgtccagagaaattccttttgggactggaggcagaaaagcggccagaaggcagcagccctggctcctttcctttggcaggttggggaagggcttgcccccagccttaggatttcagggtttgactgggggcgtggagagagagggaggaacctcaataaccttgaaggtggaatccagttatttcctgcgctgcgagggtttctttatttcactcttttctgaatgtcaaggcagtgaggtgcctctcactgtgaatttgtggtgggcgggggctggaggagagggtggggggctggctccgtccctcccagccttctgctgcccttgcttaacaatgccggccaactggcgacctcacggttgcacttccattccaccagaatgacctgatgaggaaatcttcaataggatgcaaagatcaatgcaaaaattgttatatatgaacatataactggagtcgtcaaaaagcaaattaagaaagaattggacgttagaagttgtcatttaaagcagccttctaataaagttgtttcaaagct

SEQ ID NO: 66310 - DNA, 3430 bp, Homo sapiens
tgccggcgtctccgagcccgcgctcccagctgcagagcgcctggcttgcctcccgcgcggtcaccgccggcccgccgcccccgctcccgcccgcgcccggagcccctgcctcgcgcccgatggtgagcagtgtgttgtgccgctgtgtggcctccccgccgccggacgccgccgccaccgccgcctcttcgtctgcctcatcgccggcgtccgtgggggacccctgcggcggcgctatctgcgggggcccggaccaccggctgcgcctgtggagactctttcagacgctcgacgtcaaccgggacggcggcctgtgtgtcaacgacctggcggtggggctgcggcgcctgggactgcaccgcaccgagggcgagctccagaaaattgtacaagctggagataaggaccttgatgggcagctagactttgaagaatttgtccattatctccaagatcatgagaagaagctgaggctggtgtttaagagtttggacaaaaagaatgatggacgcattgacgcgcaggagatcatgcagtccctgcgggacttgggagtcaagatatctgaacagcaggcagaaaaaattctcaagagcatggataaaaacggcacgatgaccatcgactggaacgagtggagagactaccacctcctccaccccgtggaaaacatccccgagatcatcctctactggaagcattccacgatctttgatgtgggtgagaatctaacggtcccggatgagttcacagtggaggagaggcagacggggatgtggtggagacacctggtggcaggaggtggggcaggggccgtatccagaacctgcacggcccccctggacaggctcaaggtgctcatgcaggtccatgcctcccgcagcaacaacatgggcatcgttggtggcttcactcagatgattcgagaaggaggggccaggtcactctggcggggcaatggcatcaacgtcctcaaaattgcccccgaatcagccatcaaattcatggcctatgagcagatcaagcgccttgttggtagtgaccaggagactctgaggattcacgagaggcttgtggcagggtccttggcaggggccatcgcccagagcagcatctacccaatggaggtcctgaagacccggatggcgctgcggaagacaggccagtactcaggaatgctggactgcgccaggaggatcctggccagagagggggtggccgccttctacaaaggctatgtccccaacatgctgggcatcatcccctatgccggcatcgaccttgcagtctacgagacgctcaagaatgcctggctgcagcactatgcagtgaacagcgcggaccccggcgtgtttgtgctcctggcctgtggcaccatgtccagtacctgtggccagctggccagctaccccctggccctagtcaggacccggatgcaggcgcaagcctctattgagggcgctccggaggtgaccatgagcagcctcttcaaacatatcctgcggaccgagggggccttcgggctgtacagggggctggcccccaacttcatgaaggtcatcccagctgtgagcatcagctacgtggtctacgagaacctgaagatcaccctgggcgtgcagtcgcggtgacggggggagggccgcccggcagtggactcgctgatcctgggccgcagcctggggtgtgcagccatctcattctgtgaatgtgccaacactaagctgtctcgagccaagctgtgaaaaccctagacgcacccgcagggagggtggggagagctggcaggcccagggcttgtcctgctgaccccagcagaccctcctgttggttccagcgaagaccacaggcattccttagggtccagggtcagcaggctccgggctcacatgtgtaaggacaggacattttctgcagtgcctgccaatagtgagcttggagcctggaggccggcttagttcttccatttcacccttgcagccagctgttggccacggcccctgccctctggtctgccgtgcatctccctgtgccctcttgctgcctgcctgtctgctgaggtaaggtgggaggagggctacagcccacatcccaccccctcgtccaatcccataatccatgatgaaaggtgaggtcacgtggcctcccaggcctgacttcccaacctacagcattgacgccaacttggctgtgaaggaagaggaaaggatctggccttgtggtcactggcatctgagccctgctgatggctggggctctcgggcatgcttgggagtgcagggggctcgggctgcctggcctggctgcacagaaggcaagtgctggggctcatggtgctctgagctggcctggaccctgtcaggatgggccccacctcagaaccaaactcactgtccccactgtggcatgagggcagtggagcaccatgtttgagggcgaagggcagagcgtttgtgtgttctggggagggaaggaaaaggtgttggaggccttaattatggactgttgggaaaagggttttgtccagaaggacaagccggacaaatgagcgacttctgtgcttccagaggaagacgagggagcaggagcttggctgactgctcagagtctgttctgacgccctgggggttcctgtccaaccccagcaggggcgcagcgggaccagccccacattccacttgtgtcactgcttggaacctatttattttgtatttatttgaacagagttatgtcctaactatttttatagatttgtttaattaatagcttgtcattttcaagttcattttttattcatatttatgttcatggttgattgtaccttcccaagcccgcccagtgggatgggaggaggaggagaaggggggccttgggccgctgcagtcacatctgtccagagaaattccttttgggactggaggcagaaaagcggccagaaggcagcagccctggctcctttcctttggcaggttggggaagggcttgcccccagccttaggatttcagggtttgactgggggcgtggagagagagggaggaacctcaataaccttgaaggtggaatccagttatttcctgcgctgcgagggtttctttatttcactcttttctgaatgtcaaggcagtgaggtgcctctcactgtgaatttgtggtgggcgggggctggaggagagggtggggggctggctccgtccctcccagccttctgctgcccttgcttaacaatgccggccaactggcgacctcacggttgcacttccattccaccagaatgacctgatgaggaaatcttcaataggatgcaaagatcaatgcaaaaattgttatatatgaacatataactggagtcgtcaaaaagcaaattaagaaagaattggacgttagaagttgtcatttaaagcagccttctaataaagttgtttcaaagct

SEQ ID NO: 66311 - DNA, 1995 bp, Homo sapiens
  misc_feature (17)..(17): n is a, c, g, or t
  misc_feature (21)..(21): n is a, c, g, or t
  misc_feature (23)..(23): n is a, c, g, or t
tggctaggtacgaggcnggtntnatcggccgagggtgaccatgagcagcctcttcaaacatatcctgcggaccgagggggccttcgggctgtacagggggctggcccccaacttcatgaaggtcatcccagctgtgagcatcagctacgtggtctacgagaacctgaagatcaccctgggcgtgcagtcgcggtgacggggggagggccgcccggcagtggactcgctgatcctgggccgcagcctggggtgtgcagccatctcattctgtgaatgtgccaacactaagctgtctcgagccaagctgtgaaaaccctagacgcacccgcagggagggtggggagagctggcaggcccagggcttgtcctgctgaccccagcagaccctcctgttggttccagcgaagaccacaggcattccttagggtccagggtcagcaggctccgggctcacatgtgtaaggacaggacattttctgcagtgcctgccaatagtgagcttggagcctggaggccggcttagttcttccatttcacccttgcagccagctgttggccacggcccctgccctctggtctgccgtgcatctccctgtgccctcttgctgcctgcctgtctgctgaggtaaggtgggaggagggctacagcccacatcccaccccctcgtccaatcccataatccatgatgaaaggtgaggtcacgtggcctcccaggcctgacttcccaacctacagcattgacgccaacttggctgtgaaggaagaggaaaggatctggccttgtggtcactggcatctgagccctgctgatggctggggctctcgggcatgcttgggagtgcagggggctcgggctgcctggcctggctgcacagaaggcaagtgctggggctcatggtgctctgagctggcctggaccctgtcaggatgggccccacctcagaaccaaactcactgtccccactgtggcatgagggcagtggagcaccatgtttgagggcgaagggcagagcgtttgtgtgttctggggagggaaggaaaaggtgttggaggccttaattatggactgttgggaaaagggttttgtccagaaggacaagccggacaaatgagcgacttctgtgcttccagaggaagacgagggagcaggagcttggctgactgctcagagtctgttctgacgccctgggggttcctgtccaaccccagcaggggcgcagcgggaccagccccacattccacttgtgtcactgcttggaacctatttattttgtatttatttgaacagagttatgtcctaactatttttatagatttgtttaattaatagcttgtcattttcaagttcattttttattcatatttatgttcatggttgattgtaccttcccaagcccgcccagtgggatgggaggaggaggagaaggggggccttgggccgctgcagtcacatctgtccagagaaattccttttgggactggaggcagaaaagcggccagaaggcagcagccctggctcctttcctttggcaggttggggaagggcttgcccccagccttaggatttcagggtttgactgggggcgtggagagagagggaggaacctcaataaccttgaaggtggaatccagttatttcctgcgctgcgagggtttctttatttcactcttttctgaatgtcaaggcagtgaggtgcctctcactgtgaatttgtggtgggcgggggctggaggagagggtggggggctggctccgtccctcccagccttctgctgcccttgcttaacaatgccggccaactggcgacctcacggttgcacttccattccaccagaatgacctgatgaggaaatcttcaataggatgcaaagatcaatgcaaaaattgttatatatgaacatataactggagtcgtcaaaaagcaaattaagaaagaattggacgttagaagttgtcatttaaagcagccttctaataaagttgtttcaaagct

SEQ ID NO: 66312 - DNA, 2938 bp, Homo sapiens
  misc_feature (2854)..(2854): n is a, c, g, or t
  misc_feature (2905)..(2905): n is a, c, g, or t
  misc_feature (2927)..(2927): n is a, c, g, or t
tgccggcgtctccgagcccgcgctcccagctgcagagcgcctggcttgcctcccgcgcggtcaccgccggcccgccgcccccgctcccgcccgcgcccggagcccctgcctcgcgcccgatggtgagcagtgtgttgtgccgctgtgtggcctccccgccgccggacgccgccgccaccgccgcctcttcgtctgcctcatcgccggcgtccgtgggggacccctgcggcggcgctatctgcgggggcccggaccaccggctgcgcctgtggagactctttcagacgctcgacgtcaaccgggacggcggcctgtgtgtcaacgacctggcggtggggctgcggcgcctgggactgcaccgcaccgagggcgagctccagaaaattgtacaagctggagataaggaccttgatgggcagctagactttgaagaatttgtccattatctccaagatcatgagaagaagctgaggctggtgtttaagagtttggacaaaaagaatgatggacgcattgacgcgcaggagatcatgcagtccctgcgggacttgggagtcaagatatctgaacagcaggcagaaaaaattctcaagagcatggataaaaacggcacgatgaccatcgactggaacgagtggagagactaccacctcctccaccccgtggaaaacatccccgagatcatcctctactggaagcattccacgatctttgatgtgggtgagaatctaacggtcccggatgagttcacagtggaggagaggcagacggggatgtggtggagacacctggtggcaggaggtggggcaggggccgtatccagaacctgcacggcccccctggacaggctcaaggtgctcatgcaggtccatgcctcccgcagcaacaacatgggcatcgttggtggcttcactcagatgattcgagaaggaggggccaggtcactctggcggggcaatggcatcaacgtcctcaaaattgcccccgaatcagccatcaaattcatggcctatgagcagatcaagcgccttgttggtagtgaccaggagactctgaggattcacgagaggcttgtggcagggtccttggcaggggccatcgcccagagcagcatctacccaatggaggtcctgaagacccggatggcgctgcggaagacaggccagtactcaggaatgctggactgcgccaggaggatcctggccagagagggggtggccgccttctacaaaggctatgtccccaacatgctgggcatcatcccctatgccggcatcgaccttgcagtctacgagacgctcaagaatgcctggctgcagcactatgcagtgaacagcgcggaccccggcgtgtttgtgctcctggcctgtggcaccatgtccagtacctgtggccagctggccagctaccccctggccctagtcaggacccggatgcaggcgcaagcctctattgagggcgctccggaggtgaccatgagcagcctcttcaaacatatcctgcggaccgagggggccttcgggctgtacagggggctggcccccaacttcatgaaggtcatcccagctgtgagcatcagctacgtggtctacgagaacctgaagatcaccctgggcgtgcagtcgcggtgacggggggagggccgcccggcagtggactcgctgatcctgggccgcagcctggggtgtgcagccatctcattctgtgaatgtgccaacactaagctgtctcgagccaagctgtgaaaaccctagacgcacccgcagggagggtggggagagctggcaggcccagggcttgtcctgctgaccccagcagaccctcctgttggttccagcgaagaccacaggcattccttagggtccagggtcagcaggctccgggctcacatgtgtaaggacaggacattttctgcagtgcctgccaatagtgagcttggagcctggaggccggcttagttcttccatttcacccttgcagccagctgttggccacggcccctgccctctggtctgccgtgcatctccctgtgccctcttgctgcctgcctgtctgctgaggtaaggtgggaggagggctacagcccacatcccaccccctcgtccaatcccataatccatgatgaaaggtgaggtcacgtggcctcccaggcctgacttcccaacctacagcattgacgccaacttggctgtgaaggaagaggaaaggatctggccttgtggtcactggcatctgagccctgctgatggctggggctctcgggcatgcttgggagtgcagggggctcgggctgcctggcctggctgcacagaaggcaagtgctggggctcatggtgctctgagctggcctggaccctgtcaggatgggccccacctcagaaccaaactcactgtccccactgtggcatgagggcagtggagcaccatgtttgagggcgaagggcagagcgtttgtgtgttctggggagggaaggaaaaggtgttggaggccttaattatggactgttgggaaaagggttttgtccagaaggacaagccggacaaatgagcgacttctgtgcttccagaggaagacgagggagcaggagcttggctgactgctcagagtctgttctgacgccctgggggttcctgtccaaccccagcaggggcgcagcgggaccagccccacattccacttgtgtcactgcttggaacctatttattttgtatttatttgaacagagttatgtcctaactatttttatagatttgtttaattaatagcttgtcattttcaagttcattttttattcatatttatgttcatggttgattgtaccttcccaagcccgcccagtgggatgggagacgnaaatcaacatgaacataaatatgaataaaaaatgaacttgaaaatgacaantattaattaaacaaatctatanaaaatagttac

SEQ ID NO: 66313 - DNA, 2622 bp, Homo sapiens
tgccggcgtctccgagcccgcgctcccagctgcagagcgcctggcttgcctcccgcgcggtcaccgccggcccgccgcccccgctcccgcccgcgcccggagcccctgcctcgcgcccgatggtgagcagtgtgttgtgccgctgtgtggcctccccgccgccggacgccgccgccaccgccgcctcttcgtctgcctcatcgccggcgtccgtgggggacccctgcggcggcgctatctgcgggggcccggaccaccggctgcgcctgtggagactctttcagacgctcgacgtcaaccgggacggcggcctgtgtgtcaacgacctggcggtggggctgcggcgcctgggactgcaccgcaccgagggcgagctccagaaaattgtacaagctggagataaggaccttgatgggcagctagactttgaagaatttgtccattatctccaagatcatgagaagaagctgaggctggtgtttaagagtttggacaaaaagaatgatggacgcattgacgcgcaggagatcatgcagtccctgcgggacttgggagtcaagatatctgaacagcaggcagaaaaaattctcaagagcatggataaaaacggcacgatgaccatcgactggaacgagtggagagactaccacctcctccaccccgtggaaaacatccccgagatcatcctctactggaagcattccacgatctttgatgtgggtgagaatctaacggtcccggatgagttcacagtggaggagaggcagacggggatgtggtggagacacctggtggcaggaggtggggcaggggccgtatccagaacctgcacggcccccctggacaggctcaaggtgctcatgcaggtccatgcctcccgcagcaacaacatgggcatcgttggtggcttcactcagatgattcgagaaggaggggccaggtcactctggcggggcaatggcatcaacgtcctcaaaattgcccccgaatcagccatcaaattcatggcctatgagcagatcaagcgccttgttggtagtgaccaggagactctgaggattcacgagaggcttgtggcagggtccttggcaggggccatcgcccagagcagcatctacccaatggaggtcctgaagacccggatggcgctgcggaagacaggccagtactcaggaatgctggactgcgccaggaggatcctggccagagagggggtggccgccttctacaaaggctatgtccccaacatgctgggcatcatcccctatgccggcatcgaccttgcagtctacgagacgctcaagaatgcctggctgcagcactatgcagtgaacagcgcggaccccggcgtgtttgtgctcctggcctgtggcaccatgtccagtacctgtggccagctggccagctaccccctggccctagtcaggacccggatgcaggcgcaagcctctattgagggcgctccggaggtgaccatgagcagcctcttcaaacatatcctgcggaccgagggggccttcgggctgtacagggggctggcccccaacttcatgaaggtcatcccagctgtgagcatcagctacgtggtctacgagaacctgaagatcaccctgggcgtgcagtcgcggtgacggggggagggccgcccggcagtggactcgctgatcctgggccgcagcctggggtgtgcagccatctcattctgtgaatgtgccaacactaagctgtctcgagccaagctgtgaaaaccctagacgcacccgcagggagggtggggagagctggcaggcccagggcttgtcctgctgaccccagcagaccctcctgttggttccagcgaagaccacaggcattccttagggtccagggtcagcaggctccgggctcacatgtgtaaggacaggacattttctgcagtgcctgccaatagtgagcttggagcctggaggccggcttagttcttccatttcacccttgcagccagctgttggccacggcccctgccctctggtctgccgtgcatctccctgtgccctcttgctgcctgcctgtctgctgaggtaaggtgggaggagggctacagcccacatcccaccccctcgtccaatcccataatccatgatgaaaggtgaggtcacgtggcctcccaggcctgacttcccaacctacagcattgacgccaacttggctgtgaaggaagaggaaaggatctggccttgtggtcactggcatctgagccctgctgatggctggggctctcgggcatgcttgggagtgcagggggctcgggctgcctggcctggctgcacagaaggcaagtgctggggctcatggtgctctgagctggcctggaccctgtcaggatgggccccacctcagaaccaaactcactgtccccactgtggcatgagggcagtggagcaccatgtttgagggcgaagggcagagcgtttgtgtgttctggggagctcatgatgctgatttgggcgacccaaacgtgaactctaatggggaggttttcctctatgcatttaaagtggcctctggatccccggccgagcttaaggcgcgcctataactcactgagcgagcagcactgtgacaagctcctggctgatcctg

SEQ ID NO: 66314 - DNA, 1418 bp, Homo sapiens
  misc_feature (94)..(94): n is a, c, g, or t
  misc_feature (99)..(99): n is a, c, g, or t
  misc_feature (108)..(108): n is a, c, g, or t
  misc_feature (117)..(117): n is a, c, g, or t
  misc_feature (708)..(708): n is a, c, g, or t
agcgggggcggggtcgggcgccgggcgggacccacgtcctctcgcgagactggggctggccgcgctggggaccccgctggagaaatttgcgccnagagngtgcggggncgccctggncgtcccgcccgtggccggcgccttctcggagcccagccattccgctagacccgaactaggactggtaggaggggtgatcggcccaacctcaggccccagccgcgggccgggaaggcttccccacggacgaggggcaagcccctcgacgtcagggtgtcgtctatgtagaggggaatctgcctcctctcaaaggggaattctttcagcgagtcaagcccgtctgattcggggctgactcagggcagaggcccagagaggacctggataggttgcgagaagtcgagatcagagggggcggaaggcagtgagaaaagggagacgagcatcggggggtgagagacaaactcaggtctggctcttggcccttgacgccactgaattcgcttcccacggtgggaagaggagaaaagggccctgacaccgcggctcgccaggggcccgctgcgtagctgcatcccgatcccgctgaggggacagcaaatagtgaagtgctgatagcttgtggttgtcgttacactggaaggaaatagaaaaccggacagtggtgtgtgtgtgtgcgtcttggccaaaggaacttcttgggtgggattncaggcgtgagccaacgtgcccagcctaaaccttttagacttcattaggattctggttggtaaagaacattaaaaatgacaagctcattatataggtgctaattttaattactttgactactgaacacacgccaggtactaacaaagaagggagtattcaccctggggatttaaatctgtgaaaaggtattaaaacatatataaaacataataaaatgaaatcccaaaggtctctttccatctgagcttactttccctaatttgggtttgtctcttaggtccaccgggcatacttagtatctttggacaaataggaattcaatgaaaacgtattcttaaaggcgaaaaaggtggatttgctaggtaagttgctgtttctcaaggaggtagcctgggtgctataaatccaatccaatctaatctaatctaataccatacaatataatacaatcgatacaataaaatcaatatcccaaggaaaacgcttagaaaattatttcatggcaaaataatttttcaaagttttcactgtgcatcttcctggttttagagtaggcacttatttttattttcactattgctctatttttagccataaccaccagtactgcagcaaatacttcttgagaattatcctatgtactttaaaatgaaaagtatctgcttttagagagcaaacctctaattgacgaaatatataattgctacatt

SEQ ID NO: 66315 - DNA, 788 bp, Homo sapiens
agcgggggcggggtcgggcgccgggcgggacccacgtcctctcgcgagactggggctggccgcgctggggaccccgctggagaaatttgcgcccttctcggagcccagccattccgctagacccgaactaggactggtaggaggggtgatcggcccaacctcaggccccagccgcgggccgggaaggcttccccacggacgaggggcaagcccctcgacgtcagggtgtcgtctatgtagaggggaatctgcctcctctcaaaggggaattctttcagcgagtcaagcccgtctgattcggggctgactcagggcagaggcccagagaggacctggataggttgcgagaagtcgagatcagagggggcggaaggcagtgagaaaagggagacgagcatcggggggtgagagacaaactcaggtctggctcttggcccttgacgccactgaattcgcttcccacggtgggaagaggagaaaagggccctgacaccgcggctcgccaggggcccgctgcgtagctgcatcccgatcccgctgaggggacagcaaatagtgaagtgctgatagcttgtggttgtcgttacactggaaggaaatagaaaaccggacagtggtgtgtgtgtgtgcgtcttggccaaaggaacttcttgggctgggttaatgtgagcaggtactcccttgggcgaagtactggcactggccaacggcctttccctctggccgtctccgaggaagcagagctgctgtgaagacagttcctctcgccaccgtgtgttcagttctga

SEQ ID NO: 66316 - DNA, 780 bp, Homo sapiens
  misc_feature (780)..(780): n is a, c, g, or t
cccagaggcggtcctgtagctgggccggcttggggcttggttctatgtccctgtgggttggtgcaagggccaggaggaacccgtgagcctcaggggatcccagggggccggaccagtgttccctagttgtgggaacagacgcgtgggcgcatcgcgggagggcagggcctgaagagcagctatgtttccagtgtcctctgggtgtttccaagagcaacaagaaacgaataaatctctgccataggagttttagccaattcagaggccttgctccctacaattggaacattcctttggatttgaccaagtcaggaagagatgggagaaaagtgaaacaacaacaataaaaccccaagcataaacaaacaaagagttaagcaaaacaacaaatgcacaattcatatgattactgagtgttctaatggtaaggagaaattaaaagcagaaattaaaaaaaaaaaaagaaaaaaaaaaaaaaaaaaagtttgtggggggggggggcgaaaaagttgtctgaaaccccctctctcgtggggcgcggggcccccattggtgaatggcacctggcccaaacagtggcccaagagaaacctggtccgcaattgtggcgggtgtcccccccattaaaaaaacgccggcggaacgggtgtgtttgacaaaatcccaaggttccgacggcctcgggtcctaccacggaggccagggagccgaataataccgcccactgggatggcaacaaggcagacgaacacagacaggaagaagacaaacgagcaggcn

SEQ ID NO: 66317 - DNA, 422 bp, Homo sapiens
cccagaggcggtcctgtagctgggccggcttggggcttggttctatgtccctgtggctatgtttccagtgtcctctgggtgtttccaagagcaacaagaaacgaataaatctctgacccttctcaggtgcagccagagagacactagcccactgatggacggacagacgtgggcagggtccgtgtcactaaaccacccaccactgccacagctgcctacaacagacacatcagatgacactccgggcatataaatgattttcactgaggacttactggttttaataataggtcctggtgtagagaagtccctcaacctattgtgcaatgagttttgagaagcgggtaagctgtatgttttgtggttttgtttcataaatgcatctacaggaagaccaatattgactgaatgaagctttcatt

SEQ ID NO: 66318 - DNA, 821 bp, Homo sapiens
ttgaattgtaaatagaatagaaattataaatgaacttttcaatagtaattattttttaatacgggtacttaaaattgtgtcaacttcttaacaaaagaaatggaggcaaaattagtataaacagtttatttgggccaaatttgagaactgcaatgtgggagacacgtcttcaagttgctatgaatataaactccaattagcagcagttacaagcggttttttttttttaaagaaggggcagttctttagttgcatataaactattgattggctatacatttttttttaaccataaattccaggagcatgaacataatgggtgagggtcacatcccctgggcatggatttggggcaggatgtgacaaaaatctcatactcatgtctctctgggcctgataaattttgcatactttatatagttcagactcttctgagctacgtttctttctcttccttttggttgagttttttttttcttctgaaagtattgatgatcaacattttagatgtaagtttgtcccatgtcactggaagacttagttttagttagtctcatcccacattggaggaagagaggagagataaaatggcttaagaatgcagtgaagtctcaaggccaagttgattggcaacacaaagggacagggcaatggtatttcaggtcatctgcttacaaaggagctatggcatgttggatcatttctaagcatctagctatcattattttagtgtttttgttgattttggacatctagaagtgcaaagtataatcaatttgagaataaaagacatgatgcaaataaagacaattactaacaaa

SEQ ID NO: 66319 - DNA, 448 bp, Homo sapiens
ccaaggtgggtggatcacttgagctcaggagttcaagaccagactggccaacatagcaaaactctgtgtctaccagcaacacaaaaactaggtgggcatcttgatgcatgcctgtggtccaggtacttgggaggctgagttgggaggctcacctgagcctgggaggctggggttgcagtgaggtgaaatagctgagattgtgctactgtactccagcctcagtgacaaagtgacacccttatctcaattaaaaaaaaaaaaagaaagaaaaaaaaagagagagagggagagagagaatttaaatgacatgattgaaaattatcactgttatggctgggtgcggtggctcacgcctgtaatcccagcactttgggaggctgaggcgggtggatcacgaggtcaggagatcgagaccatcctggctaacacggtgaaaccccgtctctac

SEQ ID NO: 66320 - DNA, 170 bp, Homo sapiens
gaaccaagtaagtaacatatgcaacacagtttaatagtatgattatatattgaggagtctgttcaaatgctttccaagtaagaggtagaaggctggaaacagcatcaccctcaagcttaccacaacaacaaaaaggcagcttatgtaaaaaatcccacattttctttaac

SEQ ID NO: 66321 - DNA, 432 bp, Homo sapiens
cttagtctgaactcccttttcaaagggaaaatgttttgcttcccagaatctttctcaacctaggtgtgcaggctagaaattctctaggaacttatgttttggctcagagaattcacatattttagaaaagcccattctatgctaggaaaactatttgaagtctcaaaattcgatgaagactgatactgtcagatgcttggaaataggcggaaaattttctgggtcctgagacacctaattctctaccctttagaaacctcatctagtcaataaaaatttaattgaaactgaaaaagtagaacatgaaattttgaataaatctaactcagggcctttcagatgttgactgggccaaaagcaaacattttctaatgaggaaaaccacatccttcatataacaaaggctgttttcaaaaaccagaggaccagcat

SEQ ID NO: 66322 - DNA, 859 bp, Homo sapiens
gtaccaactgaatttccatgtatttaaaattttttgtgtgtgaaaacatatagcaattggaaatctgtcaaggcaagtaaaaaacttttcccaatgttaatgaaatttgactcatgatatttatctacaagacataaaaatatagatggatcccagatactcaggaggctgaggcagcaggatcactggagcccaggagttcgtactggtggagaaaaacattactcacgtggtgacaaagtaccaggcagttgtaatgcacagccagagttaagattccctgctccttaaaaggggttcccagactcgcagcatatcggcgtcactggcagacccactgcgtcagcatgtgcagctgaaccatgtcccaggtgatcagtgattcatggtgactcgtcatccaagagcgtgttcctcttggctttccccacctccctgctttatgctctaatctctgcctgaaccatcatttctcatgactcctgcgcttcctccttcccatggggtaaagtccacacttttaatgtggcctccagccctttgcagtctgtccagtctccccttcagtctcttttaacatcacgtgaaccctccactccagtcaaaactccctgtagtttttggcctctcagatcctgtgtcattcctgctttttttccccctttgaaacctgagattaaaccctgctggctctgggaagccacttctaactgccatgacacagcacaatatccctttcctccggcacttactgtttcacaatttggtgagcatggcatgctgccttatactgtgatttaatcctttttaaaggttgaggtataaaataacataaactgtgtaaacagtcctgatctta

SEQ ID NO: 66323 - DNA, 342 bp, Homo sapiens
aatttggtgggtcttaaataactgacttagaaattatgtaatctcattaaaaatacctacactttttttttaatgaaaattagaaacatcctaaactgtatttagtaaagtcttgacaagttctttctgtgtgagttttaatggtgaactcttgctcaagaacaaagaacacgttcagacacgttagctaagggaaagtctaagctaaactcagagagaagaggtgttgcgggaagtcagggaccctgaacgaagggaccggctgaagccatggtagaagaacgtggattgtgaagattttatggacatttattggttccccaaattaatacttttgtaatt

SEQ ID NO: 66324 - DNA, 561 bp, Homo sapiens
tctcagaccattggattctcaaaactgaataatatacagagcttttttaaaagaaagtgttaaattatgtcttgttactcagatgtattcaagtataaaacttgattaccccttatactagtggttcttaaatgactgtaaaacctaaacagacatacattgaaatcaaactaattctaaaactcagaacttcagattgactctgtgaatgtagggtgatgcctcatgttactttgctgaaatcaaattgcccctcactcatcaccgttggggcaagttctttgtagcatgtatgtgctattgtatgctatgcagtgactccattctcttaccacttttctctaccgctatctgaactggtgtgaagccttcattcattaggatatgttctccttggtagtaatgtttggctttcacttatgaagtccgcctctattttttctcattagtcttcaacaattaaagttggttaattggcaccagcgcagtaggagacaaatgggagctctgaaatcctgccacttggtcataaggttaatattcggatgacccataacttta

SEQ ID NO: 66325 - DNA, 368 bp, Homo sapiens
tttaaacagctctcttggtgctacaggtagggctttttggcaagcagatgaaggtagcctaaataggtgattggtatgtatgtttgtcattgccctgaccttccttagttgttaagatagatcagtgagtaatgtagtcatcttttctagtgggaaatacacttttgtatgggaatgattgaactgataatgcaaggtgaaagtgttgttttgtgtcaaaatattcatttctcccataactgttgagtaaacgtagccattagtgtatgcatacaatttcccttaatcctcagagcattcaagcagcaggtagacactccctgctgagaaacatatttgagtgagatgagcatttttaaaaggcgcat

SEQ ID NO: 66326 - DNA, 1779 bp, Homo sapiens
cttttcccctgcctgcccttcgggcacctcaggaaggcaccttcctctgtcagaatggccaccatggtaccatccgtgttgtggcccagggcctgctggactctgctggtctgctgtctgctgaccccaggtgtccaggggcaggagttccttttgcgggtggagccccagaaccctgtgctctctgctggagggtccctgtttgtgaactgcagtactgattgtcccagctctgagaaaatcgccttggagacgtccctatcaaaggagctggtggccagtggcatgggctgggcagccttcaatctcagcaacgtgactggcaacagtcggatcctctgctcagtgtactgcaatggctcccagataacaggctcctctaacatcaccgtgtacaggctcccggagcgtgtggagctggcacccctgcctccttggcagccggtgggccagaacttcaccctgcgctgccaagtggaggatgggtcgccccggaccagcctcacggtggtgctgcttcgctgggaggaggagctgagccggcagcccgcagtggaggagccagcggaggtcactgccactgtgctggccagcagagacgaccacggagcccctttctcatgccgcacagaactggacatgcagccccaggggctgggactgttcgtgaacacctcagccccccgccagctccgaacctttgtcctgcccgtgacccccccgcgcctcgtggccccccggttcttggaggtggaaacgtcgtggccggtggactgcaccctagacgggctttttccagcctcagaggcccaggtctacctggcgctgggggaccagatgctgaatgcgacagtcatgaaccacggggacacgctaacggccacagccacagccacggcgcgcgcggatcaggagggtgcccgggagatcgtctgcaacgtgaccctagggggcgagagacgggaggcccgggagaacttgacggtctttagcttcctaggacccattgtgaacctcagcgagcccaccgcccatgaggggtccacagtgaccgtgagttgcatggctggggctcgagtccaggtcacgctggacggagttccggccgcggccccggggcagccagctcaacttcagctaaatgctaccgagagtgacgacggacgcagcttcttctgcagtgccactctcgaggtggacggcgagttcttgcacaggaacagtagcgtccagctgcgagtcctgtatggtcccaaaattgaccgagccacatgcccccagcacttgaaatggaaagataaaacgagacacgtcctgcagtgccaagccaggggcaacccgtaccccgagctgcggtgtttgaaggaaggctccagccgggaggtgccggtggggatcccgttcttcgtcaacgtaacacataatggtacttatcagtgccaagcgtccagctcacgaggcaaatacaccctggtcgtggtgatggacattgaggctgggagctcccactttgtccccgtcttcgtggcggtgttactgaccctgggcgtggtgactatcgtactggccttaatgtacgtcttcagggagcaccaacggagcggcagttaccatgttagggaggagagcacctatctgcccctcacgtctatgcagccgacagaagcaatgggggaagaaccgtccagagctgagtgacgctgggatccgggatcaaagttggcgggggcttggctgtgccctcagattccgcaccaataaagccttcaaactccctaa

SEQ ID NO: 66327 - DNA, 449 bp, Homo sapiens
tttctcctctcctacccccccgggcccttctccctgcgtgagaaccgttcattaggtgcaatccaggttggagagtctgtgggagtcggacattgtgcccatctcccggagcctctgctgtcactcgcttgttgaagatgaattcttgaattctgcctgcccacccccggccagatccctggagctggcctccttccagcccagtgccagaaaccagcactccatgaagataaactctgggcccgcccaccagcaggacctgtcgacctgaggtgaccctgggccttgcccccagccaactgggccaccagcttccctcccttgactctgggggtccacatccactccaaggggactattcccccgaccccaccccagtctccccacacggacctttgctgaattaaagtttgtaagtaaatggttttaaagaaaaaacaaaaagttgg

SEQ ID NO: 66328 - DNA, 5523 bp, Homo sapiens
cttttcccctgcctgcccttcgggcacctcaggaaggcaccttcctctgtcagaatggccaccatggtaccatccgtgttgtggcccagggcctgctggactctgctggtctgctgtctgctgaccccaggtgtccaggggcaggagttccttttgcgggtggagccccagaaccctgtgctctctgctggagggtccctgtttgtgaactgcagtactgattgtcccagctctgagaaaatcgccttggagacgtccctatcaaaggagctggtggccagtggcatgggctgggcagccttcaatctcagcaacgtgactggcaacagtcggatcctctgctcagtgtactgcaatggctcccagataacaggctcctctaacatcaccgtgtacaggctcccggagcgtgtggagctggcacccctgcctccttggcagccggtgggccagaacttcaccctgcgctgccaagtggaggatgggtcgccccggaccagcctcacggtggtgctgcttcgctgggaggaggagctgagccggcagcccgcagtggaggagccagcggaggtcactgccactgtgctggccagcagagacgaccacggagcccctttctcatgccgcacagaactggacatgcagccccaggggctgggactgttcgtgaacacctcagccccccgccagctccgaacctttgtcctgcccgtgacccccccgcgcctcgtggccccccggttcttggaggtggaaacgtcgtggccggtggactgcaccctagacgggctttttccagcctcagaggcccaggtctacctggcgctgggggaccagatgctgaatgcgacagtcatgaaccacggggacacgctaacggccacagccacagccacggcgcgcgcggatcaggagggtgcccgggagatcgtctgcaacgtgaccctagggggcgagagacgggaggcccgggagaacttgacggtctttagcttcctaggacccattgtgaacctcagcgagcccaccgcccatgaggggtccacagtgaccgtgagttgcatggctggggctcgagtccaggtcacgctggacggagttccggccgcggccccggggcagccagctcaacttcagctaaatgctaccgagagtgacgacggacgcagcttcttctgcagtgccactctcgaggtggacggcgagttcttgcacaggaacagtagcgtccagctgcgagtcctgtatggtcccaaaattgaccgagccacatgcccccagcacttgaaatggaaagataaaacgagacacgtcctgcagtgccaagccaggggcaacccgtaccccgagctgcggtgtttgaaggaaggctccagccgggaggtgccggtggggatcccgttcttcgtcaacgtaacacataatggtacttatcagtgccaagcgtccagctcacgaggcaaatacaccctggtcgtggtgatggacattgaggctgggagctcccactttgtccccgtcttcgtggcggtgttactgaccctgggcgtggtgactatcgtactggccttaatgtacgtcttcagggagcaccaacggagcggcagttaccatgttagggaggagagcacctatctgcccctcacgtctatgcagccgacagaagcaatgggggaagaaccgtccagagctgagtgacgctgggatccgggatcaaagttggcgggggcttggctgtgccctcagattccgcaccaataaagccttcaaactccctaatctgtggtttgattccacccgcgctgcaagtctctcccacccaggtgcacatccactgagtagcgtcgctgcgacggaagggggcggggcctgtggcgcgcagacgcagcttgaactcttgagaggtgggctggggcttagccaacggggcaaggggggcgggaaggaggtggggtttctcccagccaatcgacgggcgcgccctcgttgccgctctatgccgctccgccccggctcgctggtcccagaaggcgccgggtttcccaagatggcggcggacgtgtccgttactcaccggcccccgctgagccctaagtctggggccgaagtcgaagccggcgatgccgcggagcgccgggcgccggaagaagagctgccgcctctagatccagaagagatccggaaacgcctggaacacaccgagcgccagttccgtaaccgccgcaagatactgatccggggcctcccgggggacgtgaccaaccaggaagtacatgacctgctcagtgactatgagctcaaatactgttttgtggacaaatacaaagggacagccttcgtgaccctgctgaatggggagcaggccgaggccgcaatcaatgctttccaccagagccgcctgcgggagcgtgaactgtcggtgcagctgcagcccacggatgccctgctgtgtgtggccaacctgccccccagcctcacacagcagcagttcgaggagctggtgcggcccttcggcagcctggagcgctgcttcctggtctacagtgagcgcactggccaatccaagggctatggctttgctgagtacatgaagaaggactcggctgcccgtgccaagtcggacctgctgggcaagccgctgggaccacgcaccctctacgtgcactggacggatgccgggcaactgacgcctgcccttctccactcccgctgcctctgtgtggaccgcctgccacctggcttcaacgatgtggacgctctgtgccgggcgctgtcagctgtccacagccccaccttctgccagctggcgtgcggccaggatgggcagctgaagggcttcgcggtgctggagtatgagacggctgagatggcggaggaggcacagcagcaggcggacggcctgtccctggggggcagccacctgcgagtctccttctgcgcccctgggccccccggccgcagtatgctggccgctctcatcgctgcccaggccacggccctcaatcgggggaagggactcctccccgagcccaacatcctgcagctgctcaacaacctgggcccatccgcgtccctccagctgctgctcaaccccctgctccatggcagtgcgggggggaagcagggcctcctgggtgcccccccagccatgccgctgctcaatgggccagccctgtccacggcgctgttgcagctcgccctgcagacccagggccagaagaagcccggcatcctgggagactcacccctgggcgccctccagcctggggcccagccagccaaccccctcctcggggagctgcctgcaggagggggcctgcccccggagctgccgccccggcgagggaagccaccacccctgctgccatccgtgcttggccctgctgggggtgaccgggaggccctgggcttgggtcccccagcggcccagctcactcctccccccgcccctgtggggctccgaggctctggcctcagaggcctccagaaagacagtgggcctctgccgacgccccctggggtctcactgctgggggagccccccaaggactaccggattcccctgaatccctacctgaacctacacagcctgctcccggccagcaacctggcgggtaaggaggcccggggctggggaggcgccgggagaagccgccgcccagctgagggccccccaactaaccccccagcccctggaggtggcagcagcagcagcaaagccttccagctcaagtcccgcctgctcagccccctcagcagcgcccgcctgccccccgaaccaggactgtctgacagctacagcttcgactacccctcggacatgggacctcggcggctcttctcccacccacgggaaccagcccttgggcctcacggacccagccgacacaagatgtcccccccgcccagtggcttcggcgaacggagcagcggtgggagtggcgggggccccctgtctcacttctattcaggctcgcccacttcctacttcaccagcggcctgcaggctggcctcaagcagagccacctcagtaaggcaatcggctcttccccgctggggtccggagaagggctcctgggcctcagccccgggcctaatggtcacagccacctgctgaagaccccactgggcggccagaaacgcagctttgcccacctgctgccctcgcccgagcccagcccagaaggcagctatgtgggccagcactcccagggcctcggcggccactacgcggactcctacctgaagcggaagaggattttctaagtggctggcaccagagataactcaagggcctgcaccaaatcgcttttgggttttctgatgttttgttttgtgttttttttaaaccattttctctctttcggtaatagaaaaatctctgaaagactttactgaccaatcagccggagccccaggagcccaaggggtgtgggggagtctggaggcctcattatgtctctggcttgctccccacgctgaaaccctgcagccttaagagagaggggccccggcctgctctccctccctccccccatctcctcctccgctgtgcccgtctctccggagccctcctgcctcattgctcctgtaattttggcctttcgagtgccttggaggtttccctgacctcccgtgaagatacagagactgtctcctttttttttaactttgacaactgacttctgtttccttttctaagttttatttttcaaaccaccccggacagcccccagctctgattccttcaaggcccggcctgtccgggccaccattccacaccttgcggtttgaaacagctgtttttcccacatttgctgcaggcatggctgtctcctgcccctgcctgcccatctggcctataccccagccgtggggcccggggtccctgccgcagccccctccccttctgatgccttaaaagctgggccccaggccctgctggccagagccacagatgccaagctctgggagcttgactatggaccaaacagctctggcctagggattgggccaccctacccaggatctccaccctggggacagtagaaggggaaagccttcatcttggcgaaccggccccaccaccccctcctacccgggcctccgtgcagagatgggctttctctgccagtcccctgctgtctgtctgtgggagtcggacattgtgcccatctcccggagcctctgctgtcactcgcttgttgaagatgaattcttgaattctgcctgcccacccccggccagatccctggagctggcctccttccagcccagtgccagaaaccagcactccatgaagataaactctgggcccgcccaccagcaggacctgtcgacctgaggtgaccctgggccttgcccccagccaactgggccaccagcttccctcccttgactctgggggtccacatccactccaaggggactattcccccgaccccaccccagtctccccacacggacctttgctgaattaaagtttgtaagtaaatggttttaaagaaaaaacaaaaagttgg

SEQ ID NO: 66329 - DNA, 5806 bp, Homo sapiens
cttttcccctgcctgcccttcgggcacctcaggaaggcaccttcctctgtcagaatggccaccatggtaccatccgtgttgtggcccagggcctgctggactctgctggtctgctgtctgctgaccccaggtgtccaggggcaggagttccttttgcgggtggagccccagaaccctgtgctctctgctggagggtccctgtttgtgaactgcagtactgattgtcccagctctgagaaaatcgccttggagacgtccctatcaaaggagctggtggccagtggcatgggctgggcagccttcaatctcagcaacgtgactggcaacagtcggatcctctgctcagtgtactgcaatggctcccagataacaggctcctctaacatcaccgtgtacaggctcccggagcgtgtggagctggcacccctgcctccttggcagccggtgggccagaacttcaccctgcgctgccaagtggaggatgggtcgccccggaccagcctcacggtggtgctgcttcgctgggaggaggagctgagccggcagcccgcagtggaggagccagcggaggtcactgccactgtgctggccagcagagacgaccacggagcccctttctcatgccgcacagaactggacatgcagccccaggggctgggactgttcgtgaacacctcagccccccgccagctccgaacctttgtcctgcccgtgacccccccgcgcctcgtggccccccggttcttggaggtggaaacgtcgtggccggtggactgcaccctagacgggctttttccagcctcagaggcccaggtctacctggcgctgggggaccagatgctgaatgcgacagtcatgaaccacggggacacgctaacggccacagccacagccacggcgcgcgcggatcaggagggtgcccgggagatcgtctgcaacgtgaccctagggggcgagagacgggaggcccgggagaacttgacggtctttagtaagaggaggcgtgggaagggggcgcggcctcagcagtctgggggcgtggcagagggggcggagactagccgaaaaggtggggcctggcttgccccaatagcagttgcaacgtgggttgggcctgagtgcccgaagctggacacagcgcggaaagagggcgaggcttgaacggccgaaagcgtggcccggatatcccgagaggaaaggggagggcggagggagcggcttgacccacaggaaggtcctgttcattaagctcctgggcaatgccccgcctttaggcttcctaggacccattgtgaacctcagcgagcccaccgcccatgaggggtccacagtgaccgtgagttgcatggctggggctcgagtccaggtcacgctggacggagttccggccgcggccccggggcagccagctcaacttcagctaaatgctaccgagagtgacgacggacgcagcttcttctgcagtgccactctcgaggtggacggcgagttcttgcacaggaacagtagcgtccagctgcgagtcctgtatggtcccaaaattgaccgagccacatgcccccagcacttgaaatggaaagataaaacgagacacgtcctgcagtgccaagccaggggcaacccgtaccccgagctgcggtgtttgaaggaaggctccagccgggaggtgccggtggggatcccgttcttcgtcaacgtaacacataatggtacttatcagtgccaagcgtccagctcacgaggcaaatacaccctggtcgtggtgatggacattgaggctgggagctcccactttgtccccgtcttcgtggcggtgttactgaccctgggcgtggtgactatcgtactggccttaatgtacgtcttcagggagcaccaacggagcggcagttaccatgttagggaggagagcacctatctgcccctcacgtctatgcagccgacagaagcaatgggggaagaaccgtccagagctgagtgacgctgggatccgggatcaaagttggcgggggcttggctgtgccctcagattccgcaccaataaagccttcaaactccctaatctgtggtttgattccacccgcgctgcaagtctctcccacccaggtgcacatccactgagtagcgtcgctgcgacggaagggggcggggcctgtggcgcgcagacgcagcttgaactcttgagaggtgggctggggcttagccaacggggcaaggggggcgggaaggaggtggggtttctcccagccaatcgacgggcgcgccctcgttgccgctctatgccgctccgccccggctcgctggtcccagaaggcgccgggtttcccaagatggcggcggacgtgtccgttactcaccggcccccgctgagccctaagtctggggccgaagtcgaagccggcgatgccgcggagcgccgggcgccggaagaagagctgccgcctctagatccagaagagatccggaaacgcctggaacacaccgagcgccagttccgtaaccgccgcaagatactgatccggggcctcccgggggacgtgaccaaccaggaagtacatgacctgctcagtgactatgagctcaaatactgttttgtggacaaatacaaagggacagccttcgtgaccctgctgaatggggagcaggccgaggccgcaatcaatgctttccaccagagccgcctgcgggagcgtgaactgtcggtgcagctgcagcccacggatgccctgctgtgtgtggccaacctgccccccagcctcacacagcagcagttcgaggagctggtgcggcccttcggcagcctggagcgctgcttcctggtctacagtgagcgcactggccaatccaagggctatggctttgctgagtacatgaagaaggactcggctgcccgtgccaagtcggacctgctgggcaagccgctgggaccacgcaccctctacgtgcactggacggatgccgggcaactgacgcctgcccttctccactcccgctgcctctgtgtggaccgcctgccacctggcttcaacgatgtggacgctctgtgccgggcgctgtcagctgtccacagccccaccttctgccagctggcgtgcggccaggatgggcagctgaagggcttcgcggtgctggagtatgagacggctgagatggcggaggaggcacagcagcaggcggacggcctgtccctggggggcagccacctgcgagtctccttctgcgcccctgggccccccggccgcagtatgctggccgctctcatcgctgcccaggccacggccctcaatcgggggaagggactcctccccgagcccaacatcctgcagctgctcaacaacctgggcccatccgcgtccctccagctgctgctcaaccccctgctccatggcagtgcgggggggaagcagggcctcctgggtgcccccccagccatgccgctgctcaatgggccagccctgtccacggcgctgttgcagctcgccctgcagacccagggccagaagaagcccggcatcctgggagactcacccctgggcgccctccagcctggggcccagccagccaaccccctcctcggggagctgcctgcaggagggggcctgcccccggagctgccgccccggcgagggaagccaccacccctgctgccatccgtgcttggccctgctgggggtgaccgggaggccctgggcttgggtcccccagcggcccagctcactcctccccccgcccctgtggggctccgaggctctggcctcagaggcctccagaaagacagtgggcctctgccgacgccccctggggtctcactgctgggggagccccccaaggactaccggattcccctgaatccctacctgaacctacacagcctgctcccggccagcaacctggcgggtaaggaggcccggggctggggaggcgccgggagaagccgccgcccagctgagggccccccaactaaccccccagcccctggaggtggcagcagcagcagcaaagccttccagctcaagtcccgcctgctcagccccctcagcagcgcccgcctgccccccgaaccaggactgtctgacagctacagcttcgactacccctcggacatgggacctcggcggctcttctcccacccacgggaaccagcccttgggcctcacggacccagccgacacaagatgtcccccccgcccagtggcttcggcgaacggagcagcggtgggagtggcgggggccccctgtctcacttctattcaggctcgcccacttcctacttcaccagcggcctgcaggctggcctcaagcagagccacctcagtaaggcaatcggctcttccccgctggggtccggagaagggctcctgggcctcagccccgggcctaatggtcacagccacctgctgaagaccccactgggcggccagaaacgcagctttgcccacctgctgccctcgcccgagcccagcccagaaggcagctatgtgggccagcactcccagggcctcggcggccactacgcggactcctacctgaagcggaagaggattttctaagtggctggcaccagagataactcaagggcctgcaccaaatcgcttttgggttttctgatgttttgttttgtgttttttttaaaccattttctctctttcggtaatagaaaaatctctgaaagactttactgaccaatcagccggagccccaggagcccaaggggtgtgggggagtctggaggcctcattatgtctctggcttgctccccacgctgaaaccctgcagccttaagagagaggggccccggcctgctctccctccctccccccatctcctcctccgctgtgcccgtctctccggagccctcctgcctcattgctcctgtaattttggcctttcgagtgccttggaggtttccctgacctcccgtgaagatacagagactgtctcctttttttttaactttgacaactgacttctgtttccttttctaagttttatttttcaaaccaccccggacagcccccagctctgattccttcaaggcccggcctgtccgggccaccattccacaccttgcggtttgaaacagctgtttttcccacatttgctgcaggcatggctgtctcctgcccctgcctgcccatctggcctataccccagccgtggggcccggggtccctgccgcagccccctccccttctgatgccttaaaagctgggccccaggccctgctggccagagccacagatgccaagctctgggagcttgactatggaccaaacagctctggcctagggattgggccaccctacccaggatctccaccctggggacagtagaaggggaaagccttcatcttggcgaaccggccccaccaccccctcctacccgggcctccgtgcagagatgggctttctctgccagtcccctgctgtctgtctgtgggagtcggacattgtgcccatctcccggagcctctgctgtcactcgcttgttgaagatgaattcttgaattctgcctgcccacccccggccagatccctggagctggcctccttccagcccagtgccagaaaccagcactccatgaagataaactctgggcccgcccaccagcaggacctgtcgacctgaggtgaccctgggccttgcccccagccaactgggccaccagcttccctcccttgactctgggggtccacatccactccaaggggactattcccccgaccccaccccagtctccccacacggacctttgctgaattaaagtttgtaagtaaatggttttaaagaaaaaacaaaaagttgg

SEQ ID NO: 66330 - DNA, 6123 bp, Homo sapiens
cttttcccctgcctgcccttcgggcacctcaggaaggcaccttcctctgtcagaatggccaccatggtaccatccgtgttgtggcccagggcctgctggactctgctggtctgctgtctgctgaccccaggtgtccaggggcaggagttccttttgcgggtggagccccagaaccctgtgctctctgctggagggtccctgtttgtgaactgcagtactgattgtcccagctctgagaaaatcgccttggagacgtccctatcaaaggagctggtggccagtggcatgggctgggcagccttcaatctcagcaacgtgactggcaacagtcggatcctctgctcagtgtactgcaatggctcccagataacaggctcctctaacatcaccgtgtacaggctcccggagcgtgtggagctggcacccctgcctccttggcagccggtgggccagaacttcaccctgcgctgccaagtggaggatgggtcgccccggaccagcctcacggtggtgctgcttcgctgggaggaggagctgagccggcagcccgcagtggaggagccagcggaggtcactgccactgtgctggccagcagagacgaccacggagcccctttctcatgccgcacagaactggacatgcagccccaggggctgggactgttcgtgaacacctcagccccccgccagctccgaacctttggtgagagaaggggcttcagacggtgggtgacgagctgagccagggtagacggtgccctgaccttggggttcctgagagtggggtaccccggacctcacaggcttctgggaaggaaagcccccggccactgggcaaggtggccccggaagggaggcccgagccgtgggatctttgaagaaggccgttttcatggccctgtgtgtgtgtcctgtgaagaagggtgacccagtcagcaagatatcctgactgggggggatgagggtgtcctggggaaggcacagtcctgggggttgtactatgcccacctttctccccagtcctgcccgtgacccccccgcgcctcgtggccccccggttcttggaggtggaaacgtcgtggccggtggactgcaccctagacgggctttttccagcctcagaggcccaggtctacctggcgctgggggaccagatgctgaatgcgacagtcatgaaccacggggacacgctaacggccacagccacagccacggcgcgcgcggatcaggagggtgcccgggagatcgtctgcaacgtgaccctagggggcgagagacgggaggcccgggagaacttgacggtctttagtaagaggaggcgtgggaagggggcgcggcctcagcagtctgggggcgtggcagagggggcggagactagccgaaaaggtggggcctggcttgccccaatagcagttgcaacgtgggttgggcctgagtgcccgaagctggacacagcgcggaaagagggcgaggcttgaacggccgaaagcgtggcccggatatcccgagaggaaaggggagggcggagggagcggcttgacccacaggaaggtcctgttcattaagctcctgggcaatgccccgcctttaggcttcctaggacccattgtgaacctcagcgagcccaccgcccatgaggggtccacagtgaccgtgagttgcatggctggggctcgagtccaggtcacgctggacggagttccggccgcggccccggggcagccagctcaacttcagctaaatgctaccgagagtgacgacggacgcagcttcttctgcagtgccactctcgaggtggacggcgagttcttgcacaggaacagtagcgtccagctgcgagtcctgtatggtcccaaaattgaccgagccacatgcccccagcacttgaaatggaaagataaaacgagacacgtcctgcagtgccaagccaggggcaacccgtaccccgagctgcggtgtttgaaggaaggctccagccgggaggtgccggtggggatcccgttcttcgtcaacgtaacacataatggtacttatcagtgccaagcgtccagctcacgaggcaaatacaccctggtcgtggtgatggacattgaggctgggagctcccactttgtccccgtcttcgtggcggtgttactgaccctgggcgtggtgactatcgtactggccttaatgtacgtcttcagggagcaccaacggagcggcagttaccatgttagggaggagagcacctatctgcccctcacgtctatgcagccgacagaagcaatgggggaagaaccgtccagagctgagtgacgctgggatccgggatcaaagttggcgggggcttggctgtgccctcagattccgcaccaataaagccttcaaactccctaatctgtggtttgattccacccgcgctgcaagtctctcccacccaggtgcacatccactgagtagcgtcgctgcgacggaagggggcggggcctgtggcgcgcagacgcagcttgaactcttgagaggtgggctggggcttagccaacggggcaaggggggcgggaaggaggtggggtttctcccagccaatcgacgggcgcgccctcgttgccgctctatgccgctccgccccggctcgctggtcccagaaggcgccgggtttcccaagatggcggcggacgtgtccgttactcaccggcccccgctgagccctaagtctggggccgaagtcgaagccggcgatgccgcggagcgccgggcgccggaagaagagctgccgcctctagatccagaagagatccggaaacgcctggaacacaccgagcgccagttccgtaaccgccgcaagatactgatccggggcctcccgggggacgtgaccaaccaggaagtacatgacctgctcagtgactatgagctcaaatactgttttgtggacaaatacaaagggacagccttcgtgaccctgctgaatggggagcaggccgaggccgcaatcaatgctttccaccagagccgcctgcgggagcgtgaactgtcggtgcagctgcagcccacggatgccctgctgtgtgtggccaacctgccccccagcctcacacagcagcagttcgaggagctggtgcggcccttcggcagcctggagcgctgcttcctggtctacagtgagcgcactggccaatccaagggctatggctttgctgagtacatgaagaaggactcggctgcccgtgccaagtcggacctgctgggcaagccgctgggaccacgcaccctctacgtgcactggacggatgccgggcaactgacgcctgcccttctccactcccgctgcctctgtgtggaccgcctgccacctggcttcaacgatgtggacgctctgtgccgggcgctgtcagctgtccacagccccaccttctgccagctggcgtgcggccaggatgggcagctgaagggcttcgcggtgctggagtatgagacggctgagatggcggaggaggcacagcagcaggcggacggcctgtccctggggggcagccacctgcgagtctccttctgcgcccctgggccccccggccgcagtatgctggccgctctcatcgctgcccaggccacggccctcaatcgggggaagggactcctccccgagcccaacatcctgcagctgctcaacaacctgggcccatccgcgtccctccagctgctgctcaaccccctgctccatggcagtgcgggggggaagcagggcctcctgggtgcccccccagccatgccgctgctcaatgggccagccctgtccacggcgctgttgcagctcgccctgcagacccagggccagaagaagcccggcatcctgggagactcacccctgggcgccctccagcctggggcccagccagccaaccccctcctcggggagctgcctgcaggagggggcctgcccccggagctgccgccccggcgagggaagccaccacccctgctgccatccgtgcttggccctgctgggggtgaccgggaggccctgggcttgggtcccccagcggcccagctcactcctccccccgcccctgtggggctccgaggctctggcctcagaggcctccagaaagacagtgggcctctgccgacgccccctggggtctcactgctgggggagccccccaaggactaccggattcccctgaatccctacctgaacctacacagcctgctcccggccagcaacctggcgggtaaggaggcccggggctggggaggcgccgggagaagccgccgcccagctgagggccccccaactaaccccccagcccctggaggtggcagcagcagcagcaaagccttccagctcaagtcccgcctgctcagccccctcagcagcgcccgcctgccccccgaaccaggactgtctgacagctacagcttcgactacccctcggacatgggacctcggcggctcttctcccacccacgggaaccagcccttgggcctcacggacccagccgacacaagatgtcccccccgcccagtggcttcggcgaacggagcagcggtgggagtggcgggggccccctgtctcacttctattcaggctcgcccacttcctacttcaccagcggcctgcaggctggcctcaagcagagccacctcagtaaggcaatcggctcttccccgctggggtccggagaagggctcctgggcctcagccccgggcctaatggtcacagccacctgctgaagaccccactgggcggccagaaacgcagctttgcccacctgctgccctcgcccgagcccagcccagaaggcagctatgtgggccagcactcccagggcctcggcggccactacgcggactcctacctgaagcggaagaggattttctaagtggctggcaccagagataactcaagggcctgcaccaaatcgcttttgggttttctgatgttttgttttgtgttttttttaaaccattttctctctttcggtaatagaaaaatctctgaaagactttactgaccaatcagccggagccccaggagcccaaggggtgtgggggagtctggaggcctcattatgtctctggcttgctccccacgctgaaaccctgcagccttaagagagaggggccccggcctgctctccctccctccccccatctcctcctccgctgtgcccgtctctccggagccctcctgcctcattgctcctgtaattttggcctttcgagtgccttggaggtttccctgacctcccgtgaagatacagagactgtctcctttttttttaactttgacaactgacttctgtttccttttctaagttttatttttcaaaccaccccggacagcccccagctctgattccttcaaggcccggcctgtccgggccaccattccacaccttgcggtttgaaacagctgtttttcccacatttgctgcaggcatggctgtctcctgcccctgcctgcccatctggcctataccccagccgtggggcccggggtccctgccgcagccccctccccttctgatgccttaaaagctgggccccaggccctgctggccagagccacagatgccaagctctgggagcttgactatggaccaaacagctctggcctagggattgggccaccctacccaggatctccaccctggggacagtagaaggggaaagccttcatcttggcgaaccggccccaccaccccctcctacccgggcctccgtgcagagatgggctttctctgccagtcccctgctgtctgtctgtgggagtcggacattgtgcccatctcccggagcctctgctgtcactcgcttgttgaagatgaattcttgaattctgcctgcccacccccggccagatccctggagctggcctccttccagcccagtgccagaaaccagcactccatgaagataaactctgggcccgcccaccagcaggacctgtcgacctgaggtgaccctgggccttgcccccagccaactgggccaccagcttccctcccttgactctgggggtccacatccactccaaggggactattcccccgaccccaccccagtctccccacacggacctttgctgaattaaagtttgtaagtaaatggttttaaagaaaaaacaaaaagttgg

SEQ ID NO: 66331 - DNA, 6355 bp, Homo sapiens
gggttcaagcgattcttgtgcctcagcctcctgagtagctgggattacaggcacgtgctaccatgcctggctaatttttgtatttttagtagagatggggtttcaccatgttggcaaggctggtcttgaactcctggtctcaggtgatccgtccaccttggcctcccaaagtgctgggattacaggcatgagccacagtgcccggcctgaggcccagcgttttgtaggtgtactggggagggcacccagcctgggagtgtcaagtctcctgtgactgtgccggagtatcttgagaggctgccacagggctggtgaaccaggaaagccctgagtgtctgaacctgattggagagaactgaataatcctgaccttttgatccacccaccccggcctcccaaagctctgggattacaggcgtgagccaccacgtctggccataaacaggaatttttaatattcatatcatagtcataaacgttcatcccttccatcctcatttttttttattgtgccatctttgagaacagaaagttttgtttagcgccttgcaaggtatctgacaacacaggaaatgataatcactgcgctaatgataatagcaaacgcttcgactggcccagctctaagccctctaagtttattaactcaaagctcacagttctcggcaggactaccctgtctcctccccagtccctggggtgagtgggtgggtttgcaggacccgctaagtgccatcctcccctcctctctcagggctcccggagcgtgtggagctggcacccctgcctccttggcagccggtgggccagaacttcaccctgcgctgccaagtggaggatgggtcgccccggaccagcctcacggtggtgctgcttcgctgggaggaggagctgagccggcagcccgcagtggaggagccagcggaggtcactgccactgtgctggccagcagagacgaccacggagcccctttctcatgccgcacagaactggacatgcagccccaggggctgggactgttcgtgaacacctcagccccccgccagctccgaacctttggtgagagaaggggcttcagacggtgggtgacgagctgagccagggtagacggtgccctgaccttggggttcctgagagtggggtaccccggacctcacaggcttctgggaaggaaagcccccggccactgggcaaggtggccccggaagggaggcccgagccgtgggatctttgaagaaggccgttttcatggccctgtgtgtgtgtcctgtgaagaagggtgacccagtcagcaagatatcctgactgggggggatgagggtgtcctggggaaggcacagtcctgggggttgtactatgcccacctttctccccagtcctgcccgtgacccccccgcgcctcgtggccccccggttcttggaggtggaaacgtcgtggccggtggactgcaccctagacgggctttttccagcctcagaggcccaggtctacctggcgctgggggaccagatgctgaatgcgacagtcatgaaccacggggacacgctaacggccacagccacagccacggcgcgcgcggatcaggagggtgcccgggagatcgtctgcaacgtgaccctagggggcgagagacgggaggcccgggagaacttgacggtctttagtaagaggaggcgtgggaagggggcgcggcctcagcagtctgggggcgtggcagagggggcggagactagccgaaaaggtggggcctggcttgccccaatagcagttgcaacgtgggttgggcctgagtgcccgaagctggacacagcgcggaaagagggcgaggcttgaacggccgaaagcgtggcccggatatcccgagaggaaaggggagggcggagggagcggcttgacccacaggaaggtcctgttcattaagctcctgggcaatgccccgcctttaggcttcctaggacccattgtgaacctcagcgagcccaccgcccatgaggggtccacagtgaccgtgagttgcatggctggggctcgagtccaggtcacgctggacggagttccggccgcggccccggggcagccagctcaacttcagctaaatgctaccgagagtgacgacggacgcagcttcttctgcagtgccactctcgaggtggacggcgagttcttgcacaggaacagtagcgtccagctgcgagtcctgtgtgagtcggtcaccctgacctttaatccctccacccctgccctggaaagattagacgctcctctgcaccactgtgcctcgggtgtgttgggtgtctgatcacacatggtggttccacagatggtcccaaaattgaccgagccacatgcccccagcacttgaaatggaaagataaaacgagacacgtcctgcagtgccaagccaggggcaacccgtaccccgagctgcggtgtttgaaggaaggctccagccgggaggtgccggtggggatcccgttcttcgtcaacgtaacacataatggtacttatcagtgccaagcgtccagctcacgaggcaaatacaccctggtcgtggtgatggacattgagggtgagctaacacggggctgcgggtctggaccggtaagccggggggcgggggggttggagacagaagggacgcatattgacttagcgctttctctgcacagctgggagctcccactttgtccccgtcttcgtggcggtgttactgaccctgggcgtggtgactatcgtactggccttaatgtacgtcttcagggagcaccaacggagcggcagttaccatgttagggaggagagcacctatctgcccctcacgtctatgcagccgacagaagcaatgggggaagaaccgtccagagctgagtgacgctgggatccgggatcaaagttggcgggggcttggctgtgccctcagattccgcaccaataaagccttcaaactccctaatctgtggtttgattccacccgcgctgcaagtctctcccacccaggtgcacatccactgagtagcgtcgctgcgacggaagggggcggggcctgtggcgcgcagacgcagcttgaactcttgagaggtgggctggggcttagccaacggggcaaggggggcgggaaggaggtggggtttctcccagccaatcgacgggcgcgccctcgttgccgctctatgccgctccgccccggctcgctggtcccagaaggcgccgggtttcccaagatggcggcggacgtgtccgttactcaccggcccccgctgagccctaagtctggggccgaagtcgaagccggcgatgccgcggagcgccgggcgccggaagaagagctgccgcctctagatccagaagagatccggaaacgcctggaacacaccgagcgccagttccgtaaccgccgcaagatactgatccggggcctcccgggggacgtgaccaaccaggaagtacatgacctgctcagtgactatgagctcaaatactgttttgtggacaaatacaaagggacagccttcgtgaccctgctgaatggggagcaggccgaggccgcaatcaatgctttccaccagagccgcctgcgggagcgtgaactgtcggtgcagctgcagcccacggatgccctgctgtgtgtggccaacctgccccccagcctcacacagcagcagttcgaggagctggtgcggcccttcggcagcctggagcgctgcttcctggtctacagtgagcgcactggccaatccaagggctatggctttgctgagtacatgaagaaggactcggctgcccgtgccaagtcggacctgctgggcaagccgctgggaccacgcaccctctacgtgcactggacggatgccgggcaactgacgcctgcccttctccactcccgctgcctctgtgtggaccgcctgccacctggcttcaacgatgtggacgctctgtgccgggcgctgtcagctgtccacagccccaccttctgccagctggcgtgcggccaggatgggcagctgaagggcttcgcggtgctggagtatgagacggctgagatggcggaggaggcacagcagcaggcggacggcctgtccctggggggcagccacctgcgagtctccttctgcgcccctgggccccccggccgcagtatgctggccgctctcatcgctgcccaggccacggccctcaatcgggggaagggactcctccccgagcccaacatcctgcagctgctcaacaacctgggcccatccgcgtccctccagctgctgctcaaccccctgctccatggcagtgcgggggggaagcagggcctcctgggtgcccccccagccatgccgctgctcaatgggccagccctgtccacggcgctgttgcagctcgccctgcagacccagggccagaagaagcccggcatcctgggagactcacccctgggcgccctccagcctggggcccagccagccaaccccctcctcggggagctgcctgcaggagggggcctgcccccggagctgccgccccggcgagggaagccaccacccctgctgccatccgtgcttggccctgctgggggtgaccgggaggccctgggcttgggtcccccagcggcccagctcactcctccccccgcccctgtggggctccgaggctctggcctcagaggcctccagaaagacagtgggcctctgccgacgccccctggggtctcactgctgggggagccccccaaggactaccggattcccctgaatccctacctgaacctacacagcctgctcccggccagcaacctggcgggtaaggaggcccggggctggggaggcgccgggagaagccgccgcccagctgagggccccccaactaaccccccagcccctggaggtggcagcagcagcagcaaagccttccagctcaagtcccgcctgctcagccccctcagcagcgcccgcctgccccccgaaccaggactgtctgacagctacagcttcgactacccctcggacatgggacctcggcggctcttctcccacccacgggaaccagcccttgggcctcacggacccagccgacacaagatgtcccccccgcccagtggcttcggcgaacggagcagcggtgggagtggcgggggccccctgtctcacttctattcaggctcgcccacttcctacttcaccagcggcctgcaggctggcctcaagcagagccacctcagtaaggcaatcggctcttccccgctggggtccggagaagggctcctgggcctcagccccgggcctaatggtcacagccacctgctgaagaccccactgggcggccagaaacgcagctttgcccacctgctgccctcgcccgagcccagcccagaaggcagctatgtgggccagcactcccagggcctcggcggccactacgcggactcctacctgaagcggaagaggattttctaagtggctggcaccagagataactcaagggcctgcaccaaatcgcttttgggttttctgatgttttgttttgtgttttttttaaaccattttctctctttcggtaatagaaaaatctctgaaagactttactgaccaatcagccggagccccaggagcccaaggggtgtgggggagtctggaggcctcattatgtctctggcttgctccccacgctgaaaccctgcagccttaagagagaggggccccggcctgctctccctccctccccccatctcctcctccgctgtgcccgtctctccggagccctcctgcctcattgctcctgtaattttggcctttcgagtgccttggaggtttccctgacctcccgtgaagatacagagactgtctcctttttttttaactttgacaactgacttctgtttccttttctaagttttatttttcaaaccaccccggacagcccccagctctgattccttcaaggcccggcctgtccgggccaccattccacaccttgcggtttgaaacagctgtttttcccacatttgctgcaggcatggctgtctcctgcccctgcctgcccatctggcctataccccagccgtggggcccggggtccctgccgcagccccctccccttctgatgccttaaaagctgggccccaggccctgctggccagagccacagatgccaagctctgggagcttgactatggaccaaacagctctggcctagggattgggccaccctacccaggatctccaccctggggacagtagaaggggaaagccttcatcttggcgaaccggccccaccacccttctaacgggccgggagaaggtcacgcagccgggtgagggggagggaaggcgcaacgggcctgggcccgtggagaatgatgggcccga

SEQ ID NO: 66332 - DNA, 3333 bp, Homo sapiens
  misc_feature (7)..(7): n is a, c, g, or t
cgagtanggatatcgtcgaccacgcctcgcctcaagatacgtgagtccggggcctcccgggggacgtgagggacaggaagtacatgacctgctcagtgactatgagctcaaatactgttttgtggacaaatacaaagggacagccttcgtgaccctgctgaatggggagcaggccgaggccgcaatcaatgctttccaccagagccgcctgcgggagcgtgaactgtcggtgcagctgcagcccacggatgccctgctgtgtgtggccaacctgccccccagcctcacacagcagcagttcgaggagctggtgcggcccttcggcagcctggagcgctgcttcctggtctacagtgagcgcactggccaatccaagggctatggctttgctgagtacatgaagaaggactcggctgcccgtgccaagtcggacctgctgggcaagccgctgggaccacgcaccctctacgtgcactggacggatgccgggcaactgacgcctgcccttctccactcccgctgcctctgtgtggaccgcctgccacctggcttcaacgatgtggacgctctgtgccgggcgctgtcagctgtccacagccccaccttctgccagctggcgtgcggccaggatgggcagctgaagggcttcgcggtgctggagtatgagacggctgagatggcggaggaggcacagcagcaggcggacggcctgtccctggggggcagccacctgcgagtctccttctgcgcccctgggccccccggccgcagtatgctggccgctctcatcgctgcccaggccacggccctcaatcgggggaagggactcctccccgagcccaacatcctgcagctgctcaacaacctgggcccatccgcgtccctccagctgctgctcaaccccctgctccatggcagtgcgggggggaagcagggcctcctgggtgcccccccagccatgccgctgctcaatgggccagccctgtccacggcgctgttgcagctcgccctgcagacccagggccagaagaagcccggcatcctgggagactcacccctgggcgccctccagcctggggcccagccagccaaccccctcctcggggagctgcctgcaggagggggcctgcccccggagctgccgccccggcgagggaagccaccacccctgctgccatccgtgcttggccctgctgggggtgaccgggaggccctgggcttgggtcccccagcggcccagctcactcctccccccgcccctgtggggctccgaggctctggcctcagaggcctccagaaagacagtgggcctctgccgacgccccctggggtctcactgctgggggagccccccaaggactaccggattcccctgaatccctacctgaacctacacagcctgctcccggccagcaacctggcgggtaaggaggcccggggctggggaggcgccgggagaagccgccgcccagctgagggccccccaactaaccccccagcccctggaggtggcagcagcagcagcaaagccttccagctcaagtcccgcctgctcagccccctcagcagcgcccgcctgccccccgaaccaggactgtctgacagctacagcttcgactacccctcggacatgggacctcggcggctcttctcccacccacgggaaccagcccttgggcctcacggacccagccgacacaagatgtcccccccgcccagtggcttcggcgaacggagcagcggtgggagtggcgggggccccctgtctcacttctattcaggctcgcccacttcctacttcaccagcggcctgcaggctggcctcaagcagagccacctcagtaaggcaatcggctcttccccgctggggtccggagaagggctcctgggcctcagccccgggcctaatggtcacagccacctgctgaagaccccactgggcggccagaaacgcagctttgcccacctgctgccctcgcccgagcccagcccagaaggcagctatgtgggccagcactcccagggcctcggcggccactacgcggactcctacctgaagcggaagaggattttctaagtggctggcaccagagataactcaagggcctgcaccaaatcgcttttgggttttctgatgttttgttttgtgttttttttaaaccattttctctctttcggtaatagaaaaatctctgaaagactttactgaccaatcagccggagccccaggagcccaaggggtgtgggggagtctggaggcctcattatgtctctggcttgctccccacgctgaaaccctgcagccttaagagagaggggccccggcctgctctccctccctccccccatctcctcctccgctgtgcccgtctctccggagccctcctgcctcattgctcctgtaattttggcctttcgagtgccttggaggtttccctgacctcccgtgaagatacagagactgtctcctttttttttaactttgacaactgacttctgtttccttttctaagttttatttttcaaaccaccccggacagcccccagctctgattccttcaaggcccggcctgtccgggccaccattccacaccttgcggtttgaaacagctgtttttcccacatttgctgcaggcatggctgtctcctgcccctgcctgcccatctggcctataccccagccgtggggcccggggtccctgccgcagccccctccccttctgatgccttaaaagctgggccccaggccctgctggccagagccacagatgccaagctctgggagcttgactatggaccaaacagctctggcctagggattgggccaccctacccaggatctccaccctggggacagtagaaggggaaagccttcatcttggcgaaccggccccaccaccccctcctacccgggcctccgtgcagagatgggctttctctgccagtcccctgctgtctgtctgtgggagtcggacattgtgcccatctcccggagcctctgctgtcactcgcttgttgaagatgaattcttgaattctgcctgcccacccccggccagatccctggagctggcctccttccagcccagtgccagaaaccagcactccatgaagataaactctgggcccgcccaccagcaggacctgtcgacctgaggtgaccctgggccttgcccccagccaactgggccaccagcttccctcccttgactctgggggtccacatccactccaaggggactattcccccgaccccaccccagtctccccacacggacctttgctgaattaaagtttgtaagtaaatggttttaaagaaaaaacaaaaagttgg

SEQ ID NO: 66333 - DNA, 1871 bp, Homo sapiens
tagttctagatcgcgatctagaactataaccccccagcccctggaggtggcagcagcagcagcaaagccttccagctcaagtcccgcctgctcagccccctcagcagcgcccgcctgccccccgaaccaggactgtctgacagctacagcttcgactacccctcggacatgggacctcggcggctcttctcccacccacgggaaccagcccttgggcctcacggacccagccgacacaagatgtcccccccgcccagtggcttcggcgaacggagcagcggtgggagtggcgggggccccctgtctcacttctattcaggctcgcccacttcctacttcaccagcggcctgcaggctggcctcaagcagagccacctcagtaaggcaatcggctcttccccgctggggtccggagaagggctcctgggcctcagccccgggcctaatggtcacagccacctgctgaagaccccactgggcggccagaaacgcagctttgcccacctgctgccctcgcccgagcccagcccagaaggcagctatgtgggccagcactcccagggcctcggcggccactacgcggactcctacctgaagcggaagaggattttctaagtggctggcaccagagataactcaagggcctgcaccaaatcgcttttgggttttctgatgttttgttttgtgttttttttaaaccattttctctctttcggtaatagaaaaatctctgaaagactttactgaccaatcagccggagccccaggagcccaaggggtgtgggggagtctggaggcctcattatgtctctggcttgctccccacgctgaaaccctgcagccttaagagagaggggccccggcctgctctccctccctccccccatctcctcctccgctgtgcccgtctctccggagccctcctgcctcattgctcctgtaattttggcctttcgagtgccttggaggtttccctgacctcccgtgaagatacagagactgtctcctttttttttaactttgacaactgacttctgtttccttttctaagttttatttttcaaaccaccccggacagcccccagctctgattccttcaaggcccggcctgtccgggccaccattccacaccttgcggtttgaaacagctgtttttcccacatttgctgcaggcatggctgtctcctgcccctgcctgcccatctggcctataccccagccgtggggcccggggtccctgccgcagccccctccccttctgatgccttaaaagctgggccccaggccctgctggccagagccacagatgccaagctctgggagcttgactatggaccaaacagctctggcctagggattgggccaccctacccaggatctccaccctggggacagtagaaggggaaagccttcatcttggcgaaccggccccaccaccccctcctacccgggcctccgtgcagagatgggctttctctgccagtcccctgctgtctgtctgtgggagtcggacattgtgcccatctcccggagcctctgctgtcactcgcttgttgaagatgaattcttgaattctgcctgcccacccccggccagatccctggagctggcctccttccagcccagtgccagaaaccagcactccatgaagataaactctgggcccgcccaccagcaggacctgtcgacctgaggtgaccctgggccttgcccccagccaactgggccaccagcttccctcccttgactctgggggtccacatccactccaaggggactattcccccgaccccaccccagtctccccacacggacctttgctgaattaaagtttgtaagtaaatggttttaaagaaaaaacaaaaagttgg

SEQ ID NO: 66334 - DNA, 4883 bp, Homo sapiens
gggttcaagcgattcttgtgcctcagcctcctgagtagctgggattacaggcacgtgctaccatgcctggctaatttttgtatttttagtagagatggggtttcaccatgttggcaaggctggtcttgaactcctggtctcaggtgatccgtccaccttggcctcccaaagtgctgggattacaggcatgagccacagtgcccggcctgaggcccagcgttttgtaggtgtactggggagggcacccagcctgggagtgtcaagtctcctgtgactgtgccggagtatcttgagaggctgccacagggctggtgaaccaggaaagccctgagtgtctgaacctgattggagagaactgaataatcctgaccttttgatccacccaccccggcctcccaaagctctgggattacaggcgtgagccaccacgtctggccataaacaggaatttttaatattcatatcatagtcataaacgttcatcccttccatcctcatttttttttattgtgccatctttgagaacagaaagttttgtttagcgccttgcaaggtatctgacaacacaggaaatgataatcactgcgctaatgataatagcaaacgcttcgactggcccagctctaagccctctaagtttattaactcaaagctcacagttctcggcaggactaccctgtctcctccccagtccctggggtgagtgggtgggtttgcaggacccgctaagtgccatcctcccctcctctctcagggctcccggagcgtgtggagctggcacccctgcctccttggcagccggtgggccagaacttcaccctgcgctgccaagtggaggatgggtcgccccggaccagcctcacggtggtgctgcttcgctgggaggaggagctgagccggcagcccgcagtggaggagccagcggaggtcactgccactgtgctggccagcagagacgaccacggagcccctttctcatgccgcacagaactggacatgcagccccaggggctgggactgttcgtgaacacctcagccccccgccagctccgaacctttggtgagagaaggggcttcagacggtgggtgacgagctgagccagggtagacggtgccctgaccttggggttcctgagagtggggtaccccggacctcacaggcttctgggaaggaaagcccccggccactgggcaaggtggccccggaagggaggcccgagccgtgggatctttgaagaaggccgttttcatggccctgtgtgtgtgtcctgtgaagaagggtgacccagtcagcaagatatcctgactgggggggatgagggtgtcctggggaaggcacagtcctgggggttgtactatgcccacctttctccccagtcctgcccgtgacccccccgcgcctcgtggccccccggttcttggaggtggaaacgtcgtggccggtggactgcaccctagacgggctttttccagcctcagaggcccaggtctacctggcgctgggggaccagatgctgaatgcgacagtcatgaaccacggggacacgctaacggccacagccacagccacggcgcgcgcggatcaggagggtgcccgggagatcgtctgcaacgtgaccctagggggcgagagacgggaggcccgggagaacttgacggtctttagtaagaggaggcgtgggaagggggcgcggcctcagcagtctgggggcgtggcagagggggcggagactagccgaaaaggtggggcctggcttgccccaatagcagttgcaacgtgggttgggcctgagtgcccgaagctggacacagcgcggaaagagggcgaggcttgaacggccgaaagcgtggcccggatatcccgagaggaaaggggagggcggagggagcggcttgacccacaggaaggtcctgttcattaagctcctgggcaatgccccgcctttaggcttcctaggacccattgtgaacctcagcgagcccaccgcccatgaggggtccacagtgaccgtgagttgcatggctggggctcgagtccaggtcacgctggacggagttccggccgcggccccggggcagccagctcaacttcagctaaatgctaccgagagtgacgacggacgcagcttcttctgcagtgccactctcgaggtggacggcgagttcttgcacaggaacagtagcgtccagctgcgagtcctgtgtgagtcggtcaccctgacctttaatccctccacccctgccctggaaagattagacgctcctctgcaccactgtgcctcgggtgtgttgggtgtctgatcacacatggtggttccacagatggtcccaaaattgaccgagccacatgcccccagcacttgaaatggaaagataaaacgagacacgtcctgcagtgccaagccaggggcaacccgtaccccgagctgcggtgtttgaaggaaggctccagccgggaggtgccggtggggatcccgttcttcgtcaacgtaacacataatggtacttatcagtgccaagcgtccagctcacgaggcaaatacaccctggtcgtggtgatggacattgagggtgagctaacacggggctgcgggtctggaccggtaagccggggggcgggggggttggagacagaagggacgcatattgacttagcgctttctctgcacagctgggagctcccactttgtccccgtcttcgtggcggtgttactgaccctgggcgtggtgactatcgtactggccttaatgtacgtcttcagggagcaccaacggagcggcagttaccatgttagggaggagagcacctatctgcccctcacgtctatgcagccgacagaagcaatgggggaagaaccgtccagagctgagtgacgctgggatccgggatcaaagttggcgggggcttggctgtgccctcagattccgcaccaataaagccttcaaactccctaatctgtggtttgattccacccgcgctgcaagtctctcccacccaggtgcacatccactgagtagcgtcgctgcgacggaagggggcggggcctgtggcgcgcagacgcagcttgaactcttgagaggtgggctggggcttagccaacggggcaaggggggcgggaaggaggtggggtttctcccagccaatcgacgggcgcgccctcgttgccgctctatgccgctccgccccggctcgctggtcccagaaggcgccgggtttcccaagatggcggcggacgtgtccgttactcaccggcccccgctgagccctaagtctggggccgaagtcgaagccggcgatgccgcggagcgccgggcgccggaagaagagctgccgcctctagatccagaagagatccggaaacgcctggaacacaccgagcgccagttccgtaaccgccgcaagatactgatccggggcctcccgggggacgtgaccaaccaggaagtacatgacctgctcagtgactatgagctcaaatactgttttgtggacaaatacaaagggacagccttcgtgaccctgctgaatggggagcaggccgaggccgcaatcaatgctttccaccagagccgcctgcgggagcgtgaactgtcggtgcagctgcagcccacggatgccctgctgtgtgtggccaacctgccccccagcctcacacagcagcagttcgaggagctggtgcggcccttcggcagcctggagcgctgcttcctggtctacagtgagcgcactggccaatccaagggctatggctttgctgagtacatgaagaaggactcggctgcccgtgccaagtcggacctgctgggcaagccgctgggaccacgcaccctctacgtgcactggacggatgccgggcaactgacgcctgcccttctccactcccgctgcctctgtgtggaccgcctgccacctggcttcaacgatgtggacgctctgtgccgggcgctgtcagctgtccacagccccaccttctgccagctggcgtgcggccaggatgggcagctgaagggcttcgcggtgctggagtatgagacggctgagatggcggaggaggcacagcagcaggcggacggcctgtccctggggggcagccacctgcgagtctccttctgcgcccctgggccccccggccgcagtatgctggccgctctcatcgctgcccaggccacggccctcaatcgggggaagggactcctccccgagcccaacatcctgcagctgctcaacaacctgggcccatccgcgtccctccagctgctgctcaaccccctgctccatggcagtgcgggggggaagcagggcctcctgggtgcccccccagccatgccgctgctcaatgggccagccctgtccacggcgctgttgcagctcgccctgcagacccagggccagaagaagcccggcatcctgggagactcacccctgggcgccctccagcctggggcccagccagccaaccccctcctcggggagctgcctgcaggagggggcctgcccccggagctgccgccccggcgagggaagccaccacccctgctgccatccgtgcttggccctgctgggggtgaccgggaggccctgggcttgggtcccccagcggcccagctcactcctccccccgcccctgtggggctccgaggctctggcctcagaggcctccagaaagacagtgggcctctgccgacgccccctggggtctcactgctgggggagccccccaaggactaccggattcccctgaatccctacctgaacctacacagcctgctcccggccagcaacctggcgggtaaggaggcccggggctggggaggcgccgggagaagccgcgccagtgattggcccaataacccagccttgagtgtagcagagccctcatcca

SEQ ID NO: 66335 - DNA, 1710 bp, Homo sapiens
cttttcccctgcctgcccttcgggcacctcaggaaggcaccttcctctgtcagaatggccaccatggtaccatccgtgttgtggcccagggcctgctggactctgctggtctgctgtctgctgaccccaggtgtccaggggcaggagttccttttgcgggtggagccccagaaccctgtgctctctgctggagggtccctgtttgtgaactgcagtactgattgtcccagctctgagaaaatcgccttggagacgtccctatcaaaggagctggtggccagtggcatgggctgggcagccttcaatctcagcaacgtgactggcaacagtcggatcctctgctcagtgtactgcaatggctcccagataacaggctcctctaacatcaccgtgtacaggctcccggagcgtgtggagctggcacccctgcctccttggcagccggtgggccagaacttcaccctgcgctgccaagtggaggatgggtcgccccggaccagcctcacggtggtgctgcttcgctgggaggaggagctgagccggcagcccgcagtggaggagccagcggaggtcactgccactgtgctggccagcagagacgaccacggagcccctttctcatgccgcacagaactggacatgcagccccaggggctgggactgttcgtgaacacctcagccccccgccagctccgaacctttgtcctgcccgtgacccccccgcgcctcgtggccccccggttcttggaggtggaaacgtcgtggccggtggactgcaccctagacgggctttttccagcctcagaggcccaggtctacctggcgctgggggaccagatgctgaatgcgacagtcatgaaccacggggacacgctaacggccacagccacagccacggcgcgcgcggatcaggagggtgcccgggagatcgtctgcaacgtgaccctagggggcgagagacgggaggcccgggagaacttgacggtctttagcttcctaggacccattgtgaacctcagcgagcccaccgcccatgaggggtccacagtgaccgtgagttgcatggctggggctcgagtccaggtcacgctggacggagttccggccgcggccccggggcagccagctcaacttcagctaaatgctaccgagagtgacgacggacgcagcttcttctgcagtgccactctcgaggtggacggcgagttcttgcacaggaacagtagcgtccagctgcgagtcctgtatggtcccaaaattgaccgagccacatgcccccagcacttgaaatggaaagataaaacgagacacgtcctgcagtgccaagccaggggcaacccgtaccccgagctgcggtgtttgaaggaaggctccagccgggaggtgccggtggggatcccgttcttcgtcaacgtaacacataatgctgggagctcccactttgtccccgtcttcgtggcggtgttactgaccctgggcgtggtgactatcgtactggccttaatgtacgtcttcagggagcaccaacggagcggcagttaccatgttagggaggagagcacctatctgcccctcacgtctatgcagccgacagaagcaatgggggaagaaccgtccagagctgagtgacgctgggatccgggatcaaagttggcgggggcttggctgtgccctcagattccgcaccaataaagccttcaaactccctaa

SEQ ID NO: 66336 - DNA, 641 bp, Homo sapiens
catggtgccccaagctttcctgcgggaaattggggttttggggtattcctggggcctgatggtttctatgtctacacggatacagtagcgtccagctgcgagtcctgtatggtcccaaaattgaccgagccacatgcccccagcacttgaaatggaaagataaaacgagacacgtcctgcagtgccaagccaggggcaacccgtaccccgagctgcggtgtttgaaggaaggctccagccgggaggtgccggtggggatcccgttcttcgtcaacgtaacacataatggtacttatcagtgccaagcgtccagctcacgaggcaaatacaccctggtcgtggtgatggacattgaggctgggagctcccactttgtccccgtcttcgtggcggtgttactgaccctgggcgtggtgactatcgtactggccttaatgtacgtcttcagggagcaccaacggagcggcagttaccatgttagggaggagagcacctatctgcccctcacgtctatgcagccgacagaagcaatgggggaagaaccgtccagagctgagtgacgctgggatccgggatcaaagttggcgggggcttggctgtgccctcagattccgcaccaataaagccttcaaactccctaa

SEQ ID NO: 66337 - DNA, 6699 bp, Homo sapiens
gggttcaagcgattcttgtgcctcagcctcctgagtagctgggattacaggcacgtgctaccatgcctggctaatttttgtatttttagtagagatggggtttcaccatgttggcaaggctggtcttgaactcctggtctcaggtgatccgtccaccttggcctcccaaagtgctgggattacaggcatgagccacagtgcccggcctgaggcccagcgttttgtaggtgtactggggagggcacccagcctgggagtgtcaagtctcctgtgactgtgccggagtatcttgagaggctgccacagggctggtgaaccaggaaagccctgagtgtctgaacctgattggagagaactgaataatcctgaccttttgatccacccaccccggcctcccaaagctctgggattacaggcgtgagccaccacgtctggccataaacaggaatttttaatattcatatcatagtcataaacgttcatcccttccatcctcatttttttttattgtgccatctttgagaacagaaagttttgtttagcgccttgcaaggtatctgacaacacaggaaatgataatcactgcgctaatgataatagcaaacgcttcgactggcccagctctaagccctctaagtttattaactcaaagctcacagttctcggcaggactaccctgtctcctccccagtccctggggtgagtgggtgggtttgcaggacccgctaagtgccatcctcccctcctctctcagggctcccggagcgtgtggagctggcacccctgcctccttggcagccggtgggccagaacttcaccctgcgctgccaagtggaggatgggtcgccccggaccagcctcacggtggtgctgcttcgctgggaggaggagctgagccggcagcccgcagtggaggagccagcggaggtcactgccactgtgctggccagcagagacgaccacggagcccctttctcatgccgcacagaactggacatgcagccccaggggctgggactgttcgtgaacacctcagccccccgccagctccgaacctttggtgagagaaggggcttcagacggtgggtgacgagctgagccagggtagacggtgccctgaccttggggttcctgagagtggggtaccccggacctcacaggcttctgggaaggaaagcccccggccactgggcaaggtggccccggaagggaggcccgagccgtgggatctttgaagaaggccgttttcatggccctgtgtgtgtgtcctgtgaagaagggtgacccagtcagcaagatatcctgactgggggggatgagggtgtcctggggaaggcacagtcctgggggttgtactatgcccacctttctccccagtcctgcccgtgacccccccgcgcctcgtggccccccggttcttggaggtggaaacgtcgtggccggtggactgcaccctagacgggctttttccagcctcagaggcccaggtctacctggcgctgggggaccagatgctgaatgcgacagtcatgaaccacggggacacgctaacggccacagccacagccacggcgcgcgcggatcaggagggtgcccgggagatcgtctgcaacgtgaccctagggggcgagagacgggaggcccgggagaacttgacggtctttagtaagaggaggcgtgggaagggggcgcggcctcagcagtctgggggcgtggcagagggggcggagactagccgaaaaggtggggcctggcttgccccaatagcagttgcaacgtgggttgggcctgagtgcccgaagctggacacagcgcggaaagagggcgaggcttgaacggccgaaagcgtggcccggatatcccgagaggaaaggggagggcggagggagcggcttgacccacaggaaggtcctgttcattaagctcctgggcaatgccccgcctttaggcttcctaggacccattgtgaacctcagcgagcccaccgcccatgaggggtccacagtgaccgtgagttgcatggctggggctcgagtccaggtcacgctggacggagttccggccgcggccccggggcagccagctcaacttcagctaaatgctaccgagagtgacgacggacgcagcttcttctgcagtgccactctcgaggtggacggcgagttcttgcacaggaacagtagcgtccagctgcgagtcctgtgtgagtcggtcaccctgacctttaatccctccacccctgccctggaaagattagacgctcctctgcaccactgtgcctcgggtgtgttgggtgtctgatcacacatggtggttccacagatggtcccaaaattgaccgagccacatgcccccagcacttgaaatggaaagataaaacgagacacgtcctgcagtgccaagccaggggcaacccgtaccccgagctgcggtgtttgaaggaaggctccagccgggaggtgccggtggggatcccgttcttcgtcaacgtaacacataatggtacttatcagtgccaagcgtccagctcacgaggcaaatacaccctggtcgtggtgatggacattgagggtgagctaacacggggctgcgggtctggaccggtaagccggggggcgggggggttggagacagaagggacgcatattgacttagcgctttctctgcacagctgggagctcccactttgtccccgtcttcgtggcggtgttactgaccctgggcgtggtgactatcgtactggccttaatgtacgtcttcagggagcaccaacggagcggcagttaccatgttagggaggagagcacctatctgcccctcacgtctatgcagccgacagaagcaatgggggaagaaccgtccagagctgagtgacgctgggatccgggatcaaagttggcgggggcttggctgtgccctcagattccgcaccaataaagccttcaaactccctaatctgtggtttgattccacccgcgctgcaagtctctcccacccaggtgcacatccactgagtagcgtcgctgcgacggaagggggcggggcctgtggcgcgcagacgcagcttgaactcttgagaggtgggctggggcttagccaacggggcaaggggggcgggaaggaggtggggtttctcccagccaatcgacgggcgcgccctcgttgccgctctatgccgctccgccccggctcgctggtcccagaaggcgccgggtttcccaagatggcggcggacgtgtccgttactcaccggcccccgctgagccctaagtctggggccgaagtcgaagccggcgatgccgcggagcgccgggcgccggaagaagagctgccgcctctagatccagaagagatccggaaacgcctggaacacaccgagcgccagttccgtaaccgccgcaagatactgatccggggcctcccgggggacgtgaccaaccaggaagtacatgacctgctcagtgactatgagctcaaatactgttttgtggacaaatacaaagggacagccttcgtgaccctgctgaatggggagcaggccgaggccgcaatcaatgctttccaccagagccgcctgcgggagcgtgaactgtcggtgcagctgcagcccacggatgccctgctgtgtgtggccaacctgccccccagcctcacacagcagcagttcgaggagctggtgcggcccttcggcagcctggagcgctgcttcctggtctacagtgagcgcactggccaatccaagggctatggctttgctgagtacatgaagaaggactcggctgcccgtgccaagtcggacctgctgggcaagccgctgggaccacgcaccctctacgtgcactggacggatgccgggcaactgacgcctgcccttctccactcccgctgcctctgtgtggaccgcctgccacctggcttcaacgatgtggacgctctgtgccgggcgctgtcagctgtccacagccccaccttctgccagctggcgtgcggccaggatgggcagctgaagggcttcgcggtgctggagtatgagacggctgagatggcggaggaggcacagcagcaggcggacggcctgtccctggggggcagccacctgcgagtctccttctgcgcccctgggccccccggccgcagtatgctggccgctctcatcgctgcccaggccacggccctcaatcgggggaagggactcctccccgagcccaacatcctgcagctgctcaacaacctgggcccatccgcgtccctccagctgctgctcaaccccctgctccatggcagtgcgggggggaagcagggcctcctgggtgcccccccagccatgccgctgctcaatgggccagccctgtccacggcgctgttgcagctcgccctgcagacccagggccagaagaagcccggcatcctgggagactcacccctgggcgccctccagcctggggcccagccagccaaccccctcctcggggagctgcctgcaggagggggcctgcccccggagctgccgccccggcgagggaagccaccacccctgctgccatccgtgcttggccctgctgggggtgaccgggaggccctgggcttgggtcccccagcggcccagctcactcctccccccgcccctgtggggctccgaggctctggcctcagaggcctccagaaagacagtgggcctctgccgacgccccctggggtctcactgctgggggagccccccaaggactaccggattcccctgaatccctacctgaacctacacagcctgctcccggccagcaacctggcgggtaaggaggcccggggctggggaggcgccgggagaagccgccgcccagctgagggccccccaactaaccccccagcccctggaggtggcagcagcagcagcaaagccttccagctcaagtcccgcctgctcagccccctcagcagcgcccgcctgccccccgaaccaggactgtctgacagctacagcttcgactacccctcggacatgggacctcggcggctcttctcccacccacgggaaccagcccttgggcctcacggacccagccgacacaagatgtcccccccgcccagtggcttcggcgaacggagcagcggtgggagtggcgggggccccctgtctcacttctattcaggctcgcccacttcctacttcaccagcggcctgcaggctggcctcaagcagagccacctcagtaaggcaatcggctcttccccgctggggtccggagaagggctcctgggcctcagccccgggcctaatggtcacagccacctgctgaagaccccactgggcggccagaaacgcagctttgcccacctgctgccctcgcccgagcccagcccagaaggcagctatgtgggccagcactcccagggcctcggcggccactacgcggactcctacctgaagcggaagaggattttctaagtggctggcaccagagataactcaagggcctgcaccaaatcgcttttgggttttctgatgttttgttttgtgttttttttaaaccattttctctctttcggtaatagaaaaatctctgaaagactttactgaccaatcagccggagccccaggagcccaaggggtgtgggggagtctggaggcctcattatgtctctggcttgctccccacgctgaaaccctgcagccttaagagagaggggccccggcctgctctccctccctccccccatctcctcctccgctgtgcccgtctctccggagccctcctgcctcattgctcctgtaattttggcctttcgagtgccttggaggtttccctgacctcccgtgaagatacagagactgtctcctttttttttaactttgacaactgacttctgtttccttttctaagttttatttttcaaaccaccccggacagcccccagctctgattccttcaaggcccggcctgtccgggccaccattccacaccttgcggtttgaaacagctgtttttcccacatttgctgcaggcatggctgtctcctgcccctgcctgcccatctggcctataccccagccgtggggcccggggtccctgccgcagccccctccccttctgatgccttaaaagctgggccccaggccctgctggccagagccacagatgccaagctctgggagcttgactatggaccaaacagctctggcctagggattgggccaccctacccaggatctccaccctggggacagtagaaggggaaagccttcatcttggcgaaccggccccaccaccccctcctacccgggcctccgtgcagagatgggctttctctgccagtcccctgctgtctgtctgtgggagtcggacattgtgcccatctcccggagcctctgctgtcactcgcttgttgaagatgaattcttgaattctgcctgcccacccccggccagatccctggagctggcctccttccagcccagtgccagaaaccagcactccatgaagataaactctgggcccgcccaccagcaggacctgtcgacctgaggtgaccctgggccttgcccccagccaactgggccaccagcttccctcccttgactctgggggtccacatccactccaaggggactattcccccgaccccaccccagtctccccacacggacctttgctgaattaaagtttgtaagtaaatggttttaaagaaaaaacaaaaagttgg

SEQ ID NO: 66338 - DNA, 5925 bp, Homo sapiens
cttttcccctgcctgcccttcgggcacctcaggaaggcaccttcctctgtcagaatggccaccatggtaccatccgtgttgtggcccagggcctgctggactctgctggtctgctgtctgctgaccccaggtgtccaggggcaggagttccttttgcgggtggagccccagaaccctgtgctctctgctggagggtccctgtttgtgaactgcagtactgattgtcccagctctgagaaaatcgccttggagacgtccctatcaaaggagctggtggccagtggcatgggctgggcagccttcaatctcagcaacgtgactggcaacagtcggatcctctgctcagtgtactgcaatggctcccagataacaggctcctctaacatcaccgtgtacaggctcccggagcgtgtggagctggcacccctgcctccttggcagccggtgggccagaacttcaccctgcgctgccaagtggaggatgggtcgccccggaccagcctcacggtggtgctgcttcgctgggaggaggagctgagccggcagcccgcagtggaggagccagcggaggtcactgccactgtgctggccagcagagacgaccacggagcccctttctcatgccgcacagaactggacatgcagccccaggggctgggactgttcgtgaacacctcagccccccgccagctccgaacctttgtcctgcccgtgacccccccgcgcctcgtggccccccggttcttggaggtggaaacgtcgtggccggtggactgcaccctagacgggctttttccagcctcagaggcccaggtctacctggcgctgggggaccagatgctgaatgcgacagtcatgaaccacggggacacgctaacggccacagccacagccacggcgcgcgcggatcaggagggtgcccgggagatcgtctgcaacgtgaccctagggggcgagagacgggaggcccgggagaacttgacggtctttagtaagaggaggcgtgggaagggggcgcggcctcagcagtctgggggcgtggcagagggggcggagactagccgaaaaggtggggcctggcttgccccaatagcagttgcaacgtgggttgggcctgagtgcccgaagctggacacagcgcggaaagagggcgaggcttgaacggccgaaagcgtggcccggatatcccgagaggaaaggggagggcggagggagcggcttgacccacaggaaggtcctgttcattaagctcctgggcaatgccccgcctttaggcttcctaggacccattgtgaacctcagcgagcccaccgcccatgaggggtccacagtgaccgtgagttgcatggctggggctcgagtccaggtcacgctggacggagttccggccgcggccccggggcagccagctcaacttcagctaaatgctaccgagagtgacgacggacgcagcttcttctgcagtgccactctcgaggtggacggcgagttcttgcacaggaacagtagcgtccagctgcgagtcctgtgtgagtcggtcaccctgacctttaatccctccacccctgccctggaaagattagacgctcctctgcaccactgtgcctcgggtgtgttgggtgtctgatcacacatggtggttccacagatggtcccaaaattgaccgagccacatgcccccagcacttgaaatggaaagataaaacgagacacgtcctgcagtgccaagccaggggcaacccgtaccccgagctgcggtgtttgaaggaaggctccagccgggaggtgccggtggggatcccgttcttcgtcaacgtaacacataatggtacttatcagtgccaagcgtccagctcacgaggcaaatacaccctggtcgtggtgatggacattgaggctgggagctcccactttgtccccgtcttcgtggcggtgttactgaccctgggcgtggtgactatcgtactggccttaatgtacgtcttcagggagcaccaacggagcggcagttaccatgttagggaggagagcacctatctgcccctcacgtctatgcagccgacagaagcaatgggggaagaaccgtccagagctgagtgacgctgggatccgggatcaaagttggcgggggcttggctgtgccctcagattccgcaccaataaagccttcaaactccctaatctgtggtttgattccacccgcgctgcaagtctctcccacccaggtgcacatccactgagtagcgtcgctgcgacggaagggggcggggcctgtggcgcgcagacgcagcttgaactcttgagaggtgggctggggcttagccaacggggcaaggggggcgggaaggaggtggggtttctcccagccaatcgacgggcgcgccctcgttgccgctctatgccgctccgccccggctcgctggtcccagaaggcgccgggtttcccaagatggcggcggacgtgtccgttactcaccggcccccgctgagccctaagtctggggccgaagtcgaagccggcgatgccgcggagcgccgggcgccggaagaagagctgccgcctctagatccagaagagatccggaaacgcctggaacacaccgagcgccagttccgtaaccgccgcaagatactgatccggggcctcccgggggacgtgaccaaccaggaagtacatgacctgctcagtgactatgagctcaaatactgttttgtggacaaatacaaagggacagccttcgtgaccctgctgaatggggagcaggccgaggccgcaatcaatgctttccaccagagccgcctgcgggagcgtgaactgtcggtgcagctgcagcccacggatgccctgctgtgtgtggccaacctgccccccagcctcacacagcagcagttcgaggagctggtgcggcccttcggcagcctggagcgctgcttcctggtctacagtgagcgcactggccaatccaagggctatggctttgctgagtacatgaagaaggactcggctgcccgtgccaagtcggacctgctgggcaagccgctgggaccacgcaccctctacgtgcactggacggatgccgggcaactgacgcctgcccttctccactcccgctgcctctgtgtggaccgcctgccacctggcttcaacgatgtggacgctctgtgccgggcgctgtcagctgtccacagccccaccttctgccagctggcgtgcggccaggatgggcagctgaagggcttcgcggtgctggagtatgagacggctgagatggcggaggaggcacagcagcaggcggacggcctgtccctggggggcagccacctgcgagtctccttctgcgcccctgggccccccggccgcagtatgctggccgctctcatcgctgcccaggccacggccctcaatcgggggaagggactcctccccgagcccaacatcctgcagctgctcaacaacctgggcccatccgcgtccctccagctgctgctcaaccccctgctccatggcagtgcgggggggaagcagggcctcctgggtgcccccccagccatgccgctgctcaatgggccagccctgtccacggcgctgttgcagctcgccctgcagacccagggccagaagaagcccggcatcctgggagactcacccctgggcgccctccagcctggggcccagccagccaaccccctcctcggggagctgcctgcaggagggggcctgcccccggagctgccgccccggcgagggaagccaccacccctgctgccatccgtgcttggccctgctgggggtgaccgggaggccctgggcttgggtcccccagcggcccagctcactcctccccccgcccctgtggggctccgaggctctggcctcagaggcctccagaaagacagtgggcctctgccgacgccccctggggtctcactgctgggggagccccccaaggactaccggattcccctgaatccctacctgaacctacacagcctgctcccggccagcaacctggcgggtaaggaggcccggggctggggaggcgccgggagaagccgccgcccagctgagggccccccaactaaccccccagcccctggaggtggcagcagcagcagcaaagccttccagctcaagtcccgcctgctcagccccctcagcagcgcccgcctgccccccgaaccaggactgtctgacagctacagcttcgactacccctcggacatgggacctcggcggctcttctcccacccacgggaaccagcccttgggcctcacggacccagccgacacaagatgtcccccccgcccagtggcttcggcgaacggagcagcggtgggagtggcgggggccccctgtctcacttctattcaggctcgcccacttcctacttcaccagcggcctgcaggctggcctcaagcagagccacctcagtaaggcaatcggctcttccccgctggggtccggagaagggctcctgggcctcagccccgggcctaatggtcacagccacctgctgaagaccccactgggcggccagaaacgcagctttgcccacctgctgccctcgcccgagcccagcccagaaggcagctatgtgggccagcactcccagggcctcggcggccactacgcggactcctacctgaagcggaagaggattttctaagtggctggcaccagagataactcaagggcctgcaccaaatcgcttttgggttttctgatgttttgttttgtgttttttttaaaccattttctctctttcggtaatagaaaaatctctgaaagactttactgaccaatcagccggagccccaggagcccaaggggtgtgggggagtctggaggcctcattatgtctctggcttgctccccacgctgaaaccctgcagccttaagagagaggggccccggcctgctctccctccctccccccatctcctcctccgctgtgcccgtctctccggagccctcctgcctcattgctcctgtaattttggcctttcgagtgccttggaggtttccctgacctcccgtgaagatacagagactgtctcctttttttttaactttgacaactgacttctgtttccttttctaagttttatttttcaaaccaccccggacagcccccagctctgattccttcaaggcccggcctgtccgggccaccattccacaccttgcggtttgaaacagctgtttttcccacatttgctgcaggcatggctgtctcctgcccctgcctgcccatctggcctataccccagccgtggggcccggggtccctgccgcagccccctccccttctgatgccttaaaagctgggccccaggccctgctggccagagccacagatgccaagctctgggagcttgactatggaccaaacagctctggcctagggattgggccaccctacccaggatctccaccctggggacagtagaaggggaaagccttcatcttggcgaaccggccccaccaccccctcctacccgggcctccgtgcagagatgggctttctctgccagtcccctgctgtctgtctgtgggagtcggacattgtgcccatctcccggagcctctgctgtcactcgcttgttgaagatgaattcttgaattctgcctgcccacccccggccagatccctggagctggcctccttccagcccagtgccagaaaccagcactccatgaagataaactctgggcccgcccaccagcaggacctgtcgacctgaggtgaccctgggccttgcccccagccaactgggccaccagcttccctcccttgactctgggggtccacatccactccaaggggactattcccccgaccccaccccagtctccccacacggacctttgctgaattaaagtttgtaagtaaatggttttaaagaaaaaacaaaaagttgg

SEQ ID NO: 66339 - DNA, 5472 bp, Homo sapiens
  misc_feature (1)..(1): n is a, c, g, or t
nccgttacggcccggaatttttgggcattgtggcccagggcctgctggactctgctggtctgctgtctgctgaccccaggtgtccaggggcaggagttccttttgcgggtggagccccagaaccctgtgctctctgctggagggtccctgtttgtgaactgcagtactgattgtcccagctctgagaaaatcgccttggagacgtccctatcaaaggagctggtggccagtggcatgggctgggcagccttcaatctcagcaacgtgactggcaacagtcggatcctctgctcagtgtactgcaatggctcccagataacaggctcctctaacatcaccgtgtacaggctcccggagcgtgtggagctggcacccctgcctccttggcagccggtgggccagaacttcaccctgcgctgccaagtggaggatgggtcgccccggaccagcctcacggtggtgctgcttcgctgggaggaggagctgagccggcagcccgcagtggaggagccagcggaggtcactgccactgtgctggccagcagagacgaccacggagcccctttctcatgccgcacagaactggacatgcagccccaggggctgggactgttcgtgaacacctcagccccccgccagctccgaacctttgtcctgcccgtgacccccccgcgcctcgtggccccccggttcttggaggtggaaacgtcgtggccggtggactgcaccctagacgggctttttccagcctcagaggcccaggtctacctggcgctgggggaccagatgctgaatgcgacagtcatgaaccacggggacacgctaacggccacagccacagccacggcgcgcgcggatcaggagggtgcccgggagatcgtctgcaacgtgaccctagggggcgagagacgggaggcccgggagaacttgacggtctttagcttcctaggacccattgtgaacctcagcgagcccaccgcccatgaggggtccacagtgaccgtgagttgcatggctggggctcgagtccaggtcacgctggacggagttccggccgcggccccggggcagccagctcaacttcagctaaatgctaccgagagtgacgacggacgcagcttcttctgcagtgccactctcgaggtggacggcgagttcttgcacaggaacagtagcgtccagctgcgagtcctgtatggtcccaaaattgaccgagccacatgcccccagcacttgaaatggaaagataaaacgagacacgtcctgcagtgccaagccaggggcaacccgtaccccgagctgcggtgtttgaaggaaggctccagccgggaggtgccggtggggatcccgttcttcgtcaacgtaacacataatggtacttatcagtgccaagcgtccagctcacgaggcaaatacaccctggtcgtggtgatggacattgaggctgggagctcccactttgtccccgtcttcgtggcggtgttactgaccctgggcgtggtgactatcgtactggccttaatgtacgtcttcagggagcaccaacggagcggcagttaccatgttagggaggagagcacctatctgcccctcacgtctatgcagccgacagaagcaatgggggaagaaccgtccagagctgagtgacgctgggatccgggatcaaagttggcgggggcttggctgtgccctcagattccgcaccaataaagccttcaaactccctaatctgtggtttgattccacccgcgctgcaagtctctcccacccaggtgcacatccactgagtagcgtcgctgcgacggaagggggcggggcctgtggcgcgcagacgcagcttgaactcttgagaggtgggctggggcttagccaacggggcaaggggggcgggaaggaggtggggtttctcccagccaatcgacgggcgcgccctcgttgccgctctatgccgctccgccccggctcgctggtcccagaaggcgccgggtttcccaagatggcggcggacgtgtccgttactcaccggcccccgctgagccctaagtctggggccgaagtcgaagccggcgatgccgcggagcgccgggcgccggaagaagagctgccgcctctagatccagaagagatccggaaacgcctggaacacaccgagcgccagttccgtaaccgccgcaagatactgatccggggcctcccgggggacgtgaccaaccaggaagtacatgacctgctcagtgactatgagctcaaatactgttttgtggacaaatacaaagggacagccttcgtgaccctgctgaatggggagcaggccgaggccgcaatcaatgctttccaccagagccgcctgcgggagcgtgaactgtcggtgcagctgcagcccacggatgccctgctgtgtgtggccaacctgccccccagcctcacacagcagcagttcgaggagctggtgcggcccttcggcagcctggagcgctgcttcctggtctacagtgagcgcactggccaatccaagggctatggctttgctgagtacatgaagaaggactcggctgcccgtgccaagtcggacctgctgggcaagccgctgggaccacgcaccctctacgtgcactggacggatgccgggcaactgacgcctgcccttctccactcccgctgcctctgtgtggaccgcctgccacctggcttcaacgatgtggacgctctgtgccgggcgctgtcagctgtccacagccccaccttctgccagctggcgtgcggccaggatgggcagctgaagggcttcgcggtgctggagtatgagacggctgagatggcggaggaggcacagcagcaggcggacggcctgtccctggggggcagccacctgcgagtctccttctgcgcccctgggccccccggccgcagtatgctggccgctctcatcgctgcccaggccacggccctcaatcgggggaagggactcctccccgagcccaacatcctgcagctgctcaacaacctgggcccatccgcgtccctccagctgctgctcaaccccctgctccatggcagtgcgggggggaagcagggcctcctgggtgcccccccagccatgccgctgctcaatgggccagccctgtccacggcgctgttgcagctcgccctgcagacccagggccagaagaagcccggcatcctgggagactcacccctgggcgccctccagcctggggcccagccagccaaccccctcctcggggagctgcctgcaggagggggcctgcccccggagctgccgccccggcgagggaagccaccacccctgctgccatccgtgcttggccctgctgggggtgaccgggaggccctgggcttgggtcccccagcggcccagctcactcctccccccgcccctgtggggctccgaggctctggcctcagaggcctccagaaagacagtgggcctctgccgacgccccctggggtctcactgctgggggagccccccaaggactaccggattcccctgaatccctacctgaacctacacagcctgctcccggccagcaacctggcgggtaaggaggcccggggctggggaggcgccgggagaagccgccgcccagctgagggccccccaactaaccccccagcccctggaggtggcagcagcagcagcaaagccttccagctcaagtcccgcctgctcagccccctcagcagcgcccgcctgccccccgaaccaggactgtctgacagctacagcttcgactacccctcggacatgggacctcggcggctcttctcccacccacgggaaccagcccttgggcctcacggacccagccgacacaagatgtcccccccgcccagtggcttcggcgaacggagcagcggtgggagtggcgggggccccctgtctcacttctattcaggctcgcccacttcctacttcaccagcggcctgcaggctggcctcaagcagagccacctcagtaaggcaatcggctcttccccgctggggtccggagaagggctcctgggcctcagccccgggcctaatggtcacagccacctgctgaagaccccactgggcggccagaaacgcagctttgcccacctgctgccctcgcccgagcccagcccagaaggcagctatgtgggccagcactcccagggcctcggcggccactacgcggactcctacctgaagcggaagaggattttctaagtggctggcaccagagataactcaagggcctgcaccaaatcgcttttgggttttctgatgttttgttttgtgttttttttaaaccattttctctctttcggtaatagaaaaatctctgaaagactttactgaccaatcagccggagccccaggagcccaaggggtgtgggggagtctggaggcctcattatgtctctggcttgctccccacgctgaaaccctgcagccttaagagagaggggccccggcctgctctccctccctccccccatctcctcctccgctgtgcccgtctctccggagccctcctgcctcattgctcctgtaattttggcctttcgagtgccttggaggtttccctgacctcccgtgaagatacagagactgtctcctttttttttaactttgacaactgacttctgtttccttttctaagttttatttttcaaaccaccccggacagcccccagctctgattccttcaaggcccggcctgtccgggccaccattccacaccttgcggtttgaaacagctgtttttcccacatttgctgcaggcatggctgtctcctgcccctgcctgcccatctggcctataccccagccgtggggcccggggtccctgccgcagccccctccccttctgatgccttaaaagctgggccccaggccctgctggccagagccacagatgccaagctctgggagcttgactatggaccaaacagctctggcctagggattgggccaccctacccaggatctccaccctggggacagtagaaggggaaagccttcatcttggcgaaccggccccaccaccccctcctacccgggcctccgtgcagagatgggctttctctgccagtcccctgctgtctgtctgtgggagtcggacattgtgcccatctcccggagcctctgctgtcactcgcttgttgaagatgaattcttgaattctgcctgcccacccccggccagatccctggagctggcctccttccagcccagtgccagaaaccagcactccatgaagataaactctgggcccgcccaccagcaggacctgtcgacctgaggtgaccctgggccttgcccccagccaactgggccaccagcttccctcccttgactctgggggtccacatccactccaaggggactattcccccgaccccaccccagtctccccacacggacctttgctgaattaaagtttgtaagtaaatggttttaaagaaaaaacaaaaagttgg

SEQ ID NO: 66340 - DNA, 6763 bp, Homo sapiens
gggttcaagcgattcttgtgcctcagcctcctgagtagctgggattacaggcacgtgctaccatgcctggctaatttttgtatttttagtagagatggggtttcaccatgttggcaaggctggtcttgaactcctggtctcaggtgatccgtccaccttggcctcccaaagtgctgggattacaggcatgagccacagtgcccggcctgaggcccagcgttttgtaggtgtactggggagggcacccagcctgggagtgtcaagtctcctgtgactgtgccggagtatcttgagaggctgccacagggctggtgaaccaggaaagccctgagtgtctgaacctgattggagagaactgaataatcctgaccttttgatccacccaccccggcctcccaaagctctgggattacaggcgtgagccaccacgtctggccataaacaggaatttttaatattcatatcatagtcataaacgttcatcccttccatcctcatttttttttattgtgccatctttgagaacagaaagttttgtttagcgccttgcaaggtatctgacaacacaggaaatgataatcactgcgctaatgataatagcaaacgcttcgactggcccagctctaagccctctaagtttattaactcaaagctcacagttctcggcaggactaccctgtctcctccccagtccctggggtgagtgggtgggtttgcaggacccgctaagtgccatcctcccctcctctctcagggctcccggagcgtgtggagctggcacccctgcctccttggcagccggtgggccagaacttcaccctgcgctgccaagtggaggatgggtcgccccggaccagcctcacggtggtgctgcttcgctgggaggaggagctgagccggcagcccgcagtggaggagccagcggaggtcactgccactgtgctggccagcagagacgaccacggagcccctttctcatgccgcacagaactggacatgcagccccaggggctgggactgttcgtgaacacctcagccccccgccagctccgaacctttggtgagagaaggggcttcagacggtgggtgacgagctgagccagggtagacggtgccctgaccttggggttcctgagagtggggtaccccggacctcacaggcttctgggaaggaaagcccccggccactgggcaaggtggccccggaagggaggcccgagccgtgggatctttgaagaaggccgttttcatggccctgtgtgtgtgtcctgtgaagaagggtgacccagtcagcaagatatcctgactgggggggatgagggtgtcctggggaaggcacagtcctgggggttgtactatgcccacctttctccccagtcctgcccgtgacccccccgcgcctcgtggccccccggttcttggaggtggaaacgtcgtggccggtggactgcaccctagacgggctttttccagcctcagaggcccaggtctacctggcgctgggggaccagatgctgaatgcgacagtcatgaaccacggggacacgctaacggccacagccacagccacggcgcgcgcggatcaggagggtgcccgggagatcgtctgcaacgtgaccctagggggcgagagacgggaggcccgggagaacttgacggtctttagtaagaggaggcgtgggaagggggcgcggcctcagcagtctgggggcgtggcagagggggcggagactagccgaaaaggtggggcctggcttgccccaatagcagttgcaacgtgggttgggcctgagtgcccgaagctggacacagcgcggaaagagggcgaggcttgaacggccgaaagcgtggcccggatatcccgagaggaaaggggagggcggagggagcggcttgacccacaggaaggtcctgttcattaagctcctgggcaatgccccgcctttaggcttcctaggacccattgtgaacctcagcgagcccaccgcccatgaggggtccacagtgaccgtgagttgcatggctggggctcgagtccaggtcacgctggacggagttccggccgcggccccggggcagccagctcaacttcagctaaatgctaccgagagtgacgacggacgcagcttcttctgcagtgccactctcgaggtggacggcgagttcttgcacaggaacagtagcgtccagctgcgagtcctgtgtgagtcggtcaccctgacctttaatccctccacccctgccctggaaagattagacgctcctctgcaccactgtgcctcgggtgtgttgggtgtctgatcacacatggtggttccacagatggtcccaaaattgaccgagccacatgcccccagcacttgaaatggaaagataaaacgagacacgtcctgcagtgccaagccaggggcaacccgtaccccgagctgcggtgtttgaaggaaggctccagccgggaggtgccggtggggatcccgttcttcgtcaacgtaacacataatggtacttatcagtgccaagcgtccagctcacgaggcaaatacaccctggtcgtggtgatggacattgagggtgagctaacacggggctgcgggtctggaccggtaagccggggggcgggggggttggagacagaagggacgcatattgacttagcgctttctctgcacagctgggagctcccactttgtccccgtcttcgtggcggtgttactgaccctgggcgtggtgactatcgtactggccttaatgtacgtcttcagggagcaccaacggagcggcagttaccatgttagggaggagagcacctatctgcccctcacgtctatgcagccgacagaagcaatgggggaagaaccgtccagagctgagtgacgctgggatccgggatcaaagttggcgggggcttggctgtgccctcagattccgcaccaataaagccttcaaactccctaatctgtggtttgattccacccgcgctgcaagtctctcccacccaggtgcacatccactgagtagcgtcgctgcgacggaagggggcggggcctgtggcgcgcagacgcagcttgaactcttgagaggtgggctggggcttagccaacggggcaaggggggcgggaaggaggtggggtttctcccagccaatcgacgggcgcgccctcgttgccgctctatgccgctccgccccggctcgctggtcccagaaggcgccgggtttcccaagatggcggcggacgtgtccgttactcaccggcccccgctgagccctaagtctggggccgaagtcgaagccggcgatgccgcggagcgccgggcgccggaagaagagctgccgcctctagatccagaagagatccggaaacgcctggaacacaccgagcgccagttccgtaaccgccgcaagatactgatccggggcctcccgggggacgtgaccaaccaggaagtacatgacctgctcagtgactatgagctcaaatactgttttgtggacaaatacaaagggacagccttcgtgaccctgctgaatggggagcaggccgaggccgcaatcaatgctttccaccagagccgcctgcgggagcgtgaactgtcggtgcagctgcagcccacggatgccctgctgtgtgtggccaacctgccccccagcctcacacagcagcagttcgaggagctggtgcggcccttcggcagcctggagcgctgcttcctggtctacagtgagcgcactggccaatccaagggctatggctttgctgagtacatgaagaaggactcggctgcccgtgccaagtcggacctgctgggcaagccgctgggaccacgcaccctctacgtgcactggacggatgccgggcaactgacgcctgcccttctccactcccgctgcctctgtgtggaccgcctgccacctggcttcaacgatgtggacgctctgtgccgggcgctgtcagctgtccacagccccaccttctgccagctggcgtgcggccaggatgggcagctgaagggcttcgcggtgctggagtatgagacggctgagatggcggaggaggcacagcagcaggcggacggcctgtccctggggggcagccacctgcgagtctccttctgcgcccctgggccccccggccgcagtatgctggccgctctcatcgctgcccaggccacggccctcaatcgggggaagggactcctccccgagcccaacatcctgcagctgctcaacaacctgggcccatccgcgtccctccagctgctgctcaaccccctgctccatggcagtgcgggggggaagcagggcctcctgggtgcccccccagccatgccgctgctcaatgggccagccctgtccacggcgctgttgcagctcgccctgcagacccagggccagaagaagcccggcatcctgggagactcacccctgggcgccctccagcctggggcccagccagccaaccccctcctcggggagctgcctgcaggagggggcctgcccccggagctgccgccccggcgagggaagccaccacccctgctgccatccgtgcttggccctgctgggggtgaccgggaggccctgggcttgggtcccccagcggcccagctcactcctccccccgcccctgtggggctccgaggctctggcctcagaggcctccagaaagacagtgggcctctgccgacgccccctggggtctcactgctgggggagccccccaaggactaccggattcccctgaatccctacctgaacctacacagcctgctcccggccagcaacctggcgggtaaggaggcccggggctggggaggcgccgggagaagccgccgcccagctgagggccccccaactaaccccccagcccctggaggtggcagcagcagcagcaaagccttccagctcaagtcccgcctgctcagccccctcagcagcgcccgcctgccccccgaaccaggactgtctgacagctacagcttcgactacccctcggacatgggacctcggcggctcttctcccacccacgggaaccagcccttgggcctcacggacccagccgacacaagatgtcccccccgcccagtggcttcggcgaacggagcagcggtgggagtggcgggggccccctgtctcacttctattcaggctcgcccacttcctacttcaccagcggcctgcaggctggcctcaagcagagccacctcagtaaggcaatcggctcttccccgctggggtccggagaagggctcctgggcctcagccccgggcctaatggtcacagccacctgctgaagaccccactgggcggccagaaacgcagctttgcccacctgctgccctcgcccgagcccagcccagaaggcagctatgtgggccagcactcccagggcctcggcggccactacgcggactcctacctgaagcggaagaggattttctaagtggctggcaccagagataactcaagggcctgcaccaaatcgcttttgggttttctgatgttttgttttgtgttttttttaaaccattttctctctttcggtaatagaaaaatctctgaaagactttactgaccaatcagccggagccccaggagcccaaggggttgtctgagggagaagtacttgtgaagagctcttcatatattgttcttctagtggcttttgtcatacaccctcagcgctcgttgataaatcgcccttggcattggctctgaaagacgatgatggggtgtccctcgggtctttgttcttcactctaccacttattcctatactacggacttagttgatacccgtctctccggagccctcctgcctcattgctcctgtaattttggcctttcgagtgccttggaggtttccctgacctcccgtgaagatacagagactgtctcctttttttttaactttgacaactgacttctgtttccttttctaagttttatttttcaaaccaccccggacagcccccagctctgattccttcaaggcccggcctgtccgggccaccattccacaccttgcggtttgaaacagctgtttttcccacatttgctgcaggcatggctgtctcctgcccctgcctgcccatctggcctataccccagccgtggggcccggggtccctgccgcagccccctccccttctgatgccttaaaagctgggccccaggccctgctggccagagccacagatgccaagctctgggagcttgactatggaccaaacagctctggcctagggattgggccaccctacccaggatctccaccctggggacagtagaaggggaaagccttcatcttggcgaaccggccccaccaccccctcctacccgggcctccgtgcagagatgggctttctctgccagtcccctgctgtctgtctgtgggagtcggacattgtgcccatctcccggagcctctgctgtcactcgcttgttgaagatgaattcttgaattctgcctgcccacccccggccagatccctggagctggcctccttccagcccagtgccagaaaccagcactccatgaagataaactctgggcccgcccaccagcaggacctgtcgacctgaggtgaccctgggccttgcccccagccaactgggccaccagcttccctcccttgactctgggggtccacatccactccaaggggactattcccccgaccccaccccagtctccccacacggacctttgctgaattaaagtttgtaagtaaatggttttaaagaaaaaacaaaaagttgg

SEQ ID NO: 66341 - DNA, 4522 bp, Homo sapiens
gggttcaagcgattcttgtgcctcagcctcctgagtagctgggattacaggcacgtgctaccatgcctggctaatttttgtatttttagtagagatggggtttcaccatgttggcaaggctggtcttgaactcctggtctcaggtgatccgtccaccttggcctcccaaagtgctgggattacaggcatgagccacagtgcccggcctgaggcccagcgttttgtaggtgtactggggagggcacccagcctgggagtgtcaagtctcctgtgactgtgccggagtatcttgagaggctgccacagggctggtgaaccaggaaagccctgagtgtctgaacctgattggagagaactgaataatcctgaccttttgatccacccaccccggcctcccaaagctctgggattacaggcgtgagccaccacgtctggccataaacaggaatttttaatattcatatcatagtcataaacgttcatcccttccatcctcatttttttttattgtgccatctttgagaacagaaagttttgtttagcgccttgcaaggtatctgacaacacaggaaatgataatcactgcgctaatgataatagcaaacgcttcgactggcccagctctaagccctctaagtttattaactcaaagctcacagttctcggcaggactaccctgtctcctccccagtccctggggtgagtgggtgggtttgcaggacccgctaagtgccatcctcccctcctctctcagggctcccggagcgtgtggagctggcacccctgcctccttggcagccggtgggccagaacttcaccctgcgctgccaagtggaggatgggtcgccccggaccagcctcacggtggtgctgcttcgctgggaggaggagctgagccggcagcccgcagtggaggagccagcggaggtcactgccactgtgctggccagcagagacgaccacggagcccctttctcatgccgcacagaactggacatgcagccccaggggctgggactgttcgtgaacacctcagccccccgccagctccgaacctttggtgagagaaggggcttcagacggtgggtgacgagctgagccagggtagacggtgccctgaccttggggttcctgagagtggggtaccccggacctcacaggcttctgggaaggaaagcccccggccactgggcaaggtggccccggaagggaggcccgagccgtgggatctttgaagaaggccgttttcatggccctgtgtgtgtgtcctgtgaagaagggtgacccagtcagcaagatatcctgactgggggggatgagggtgtcctggggaaggcacagtcctgggggttgtactatgcccacctttctccccagtcctgcccgtgacccccccgcgcctcgtggccccccggttcttggaggtggaaacgtcgtggccggtggactgcaccctagacgggctttttccagcctcagaggcccaggtctacctggcgctgggggaccagatgctgaatgcgacagtcatgaaccacggggacacgctaacggccacagccacagccacggcgcgcgcggatcaggagggtgcccgggagatcgtctgcaacgtgaccctagggggcgagagacgggaggcccgggagaacttgacggtctttagtaagaggaggcgtgggaagggggcgcggcctcagcagtctgggggcgtggcagagggggcggagactagccgaaaaggtggggcctggcttgccccaatagcagttgcaacgtgggttgggcctgagtgcccgaagctggacacagcgcggaaagagggcgaggcttgaacggccgaaagcgtggcccggatatcccgagaggaaaggggagggcggagggagcggcttgacccacaggaaggtcctgttcattaagctcctgggcaatgccccgcctttaggcttcctaggacccattgtgaacctcagcgagcccaccgcccatgaggggtccacagtgaccgtgagttgcatggctggggctcgagtccaggtcacgctggacggagttccggccgcggccccggggcagccagctcaacttcagctaaatgctaccgagagtgacgacggacgcagcttcttctgcagtgccactctcgaggtggacggcgagttcttgcacaggaacagtagcgtccagctgcgagtcctgtgtgagtcggtcaccctgacctttaatccctccacccctgccctggaaagattagacgctcctctgcaccactgtgcctcgggtgtgttgggtgtctgatcacacatggtggttccacagatggtcccaaaattgaccgagccacatgcccccagcacttgaaatggaaagataaaacgagacacgtcctgcagtgccaagccaggggcaacccgtaccccgagctgcggtgtttgaaggaaggctccagccgggaggtgccggtggggatcccgttcttcgtcaacgtaacacataatggtacttatcagtgccaagcgtccagctcacgaggcaaatacaccctggtcgtggtgatggacattgagggtgagctaacacggggctgcgggtctggaccggtaagccggggggcgggggggttggagacagaagggacgcatattgacttagcgctttctctgcacagctgggagctcccactttgtccccgtcttcgtggcggtgttactgaccctgggcgtggtgactatcgtactggccttaatgtacgtcttcagggagcaccaacggagcggcagttaccatgttagggaggagagcacctatctgcccctcacgtctatgcagccgacagaagcaatgggggaagaaccgtccagagctgagtgacgctgggatccgggatcaaagttggcgggggcttggctgtgccctcagattccgcaccaataaagccttcaaactccctaatctgtggtttgattccacccgcgctgcaagtctctcccacccaggtgcacatccactgagtagcgtcgctgcgacggaagggggcggggcctgtggcgcgcagacgcagcttgaactcttgagaggtgggctggggcttagccaacggggcaaggggggcgggaaggaggtggggtttctcccagccaatcgacgggcgcgccctcgttgccgctctatgccgctccgccccggctcgctggtcccagaaggcgccgggtttcccaagatggcggcggacgtgtccgttactcaccggcccccgctgagccctaagtctggggccgaagtcgaagccggcgatgccgcggagcgccgggcgccggaagaagagctgccgcctctagatccagaagagatccggaaacgcctggaacacaccgagcgccagttccgtaaccgccgcaagatactgatccggggcctcccgggggacgtgaccaaccaggaagtacatgacctgctcagtgactatgagctcaaatactgttttgtggacaaatacaaagggacagcccggcctgctctccctccctccccccatctcctcctccgctgtgcccgtctctccggagccctcctgcctcattgctcctgtaattttggcctttcgagtgccttggaggtttccctgacctcccgtgaagatacagagactgtctcctttttttttaactttgacaactgacttctgtttccttttctaagttttatttttcaaaccaccccggacagcccccagctctgattccttcaaggcccggcctgtccgggccaccattccacaccttgcggtttgaaacagctgtttttcccacatttgctgcaggcatggctgtctcctgcccctgcctgcccatctggcctataccccagccgtggggcccggggtccctgccgcagccccctccccttctgatgccttaaaagctgggccccaggccctgctggccagagccacagatgccaagctctgggagcttgactatggaccaaacagctctggcctagggattgggccaccctacccaggatctccaccctggggacagtagaaggggaaagccttcatcttggcgaaccggccccaccaccccctcctacccgggcctccgtgcagagatgggctttctctgccagtcccctgctgtctgtctgtgggagtcggacattgtgcccatctcccggagcctctgctgtcactcgcttgttgaagatgaattcttgaattctgcctgcccacccccggccagatccctggagctggcctccttccagcccagtgccagaaaccagcactccatgaagataaactctgggcccgcccaccagcaggacctgtcgacctgaggtgaccctgggccttgcccccagccaactgggccaccagcttccctcccttgactctgggggtccacatccactccaaggggactattcccccgaccccaccccagtctccccacacggacctttgctgaattaaagtttgtaagtaaatggttttaaagaaaaaacaaaaagttgg

SEQ ID NO: 66342 - DNA, 1847 bp, Homo sapiens
gaattcccgggtcaaaccacgcgtccgtagagcagcagcaaagccttccagctcaagtcccgcctgctcagccccctcagcagcgcccgcctgccccccgaaccaggactgtctgacagctacagcttcgactacccctcggacatgggacctcggcggctcttctcccacccacgggaaccagcccttgggcctcacggacccagccgacacaagatgtcccccccgcccagtggcttcggcgaacggagcagcggtgggagtggcgggggccccctgtctcacttctattcaggctcgcccacttcctacttcaccagcggcctgcaggctggcctcaagcagagccacctcagtaaggcaatcggctcttccccgctggggtccggagaagggctcctgggcctcagccccgggcctaatggtcacagccacctgctgaagaccccactgggcggccagaaacgcagctttgcccacctgctgccctcgcccgagcccagcccagaaggcagctatgtgggccagcactcccagggcctcggcggccactacgcggactcctacctgaagcggaagaggattttctaagtggctggcaccagagataactcaagggcctgcaccaaatcgcttttgggttttctgatgttttgttttgtgttttttttaaaccattttctctctttcggtaatagaaaaatctctgaaagactttactgaccaatcagccggagccccaggagcccaaggggtgtgggggagtctggaggcctcattatgtctctggcttgctccccacgctgaaaccctgcagccttaagagagaggggccccggcctgctctccctccctccccccatctcctcctccgctgtgcccgtctctccggagccctcctgcctcattgctcctgtaattttggcctttcgagtgccttggaggtttccctgacctcccgtgaagatacagagactgtctcctttttttttaactttgacaactgacttctgtttccttttctaagttttatttttcaaaccaccccggacagcccccagctctgattccttcaaggcccggcctgtccgggccaccattccacaccttgcggtttgaaacagctgtttttcccacatttgctgcaggcatggctgtctcctgcccctgcctgcccatctggcctataccccagccgtggggcccggggtccctgccgcagccccctccccttctgatgccttaaaagctgggccccaggccctgctggccagagccacagatgccaagctctgggagcttgactatggaccaaacagctctggcctagggattgggccaccctacccaggatctccaccctggggacagtagaaggggaaagccttcatcttggcgaaccggccccaccaccccctcctacccgggcctccgtgcagagatgggctttctctgccagtcccctgctgtctgtctgtgggagtcggacattgtgcccatctcccggagcctctgctgtcactcgcttgttgaagatgaattcttgaattctgcctgcccacccccggccagatccctggagctggcctccttccagcccagtgccagaaaccagcactccatgaagataaactctgggcccgcccaccagcaggacctgtcgacctgaggtgaccctgggccttgcccccagccaactgggccaccagcttccctcccttgactctgggggtccacatccactccaaggggactattcccccgaccccaccccagtctccccacacggacctttgctgaattaaagtttgtaagtaaatggttttaaagaaaaaacaaaaagttgg

SEQ ID NO: 66343 - DNA, 1956 bp, Homo sapiens
  misc_feature (1907)..(1907): n is a, c, g, or t
cttttcccctgcctgcccttcgggcacctcaggaaggcaccttcctctgtcagaatggccaccatggtaccatccgtgttgtggcccagggcctgctggactctgctggtctgctgtctgctgaccccaggtgtccaggggcaggagttccttttgcgggtggagccccagaaccctgtgctctctgctggagggtccctgtttgtgaactgcagtactgattgtcccagctctgagaaaatcgccttggagacgtccctatcaaaggagctggtggccagtggcatgggctgggcagccttcaatctcagcaacgtgactggcaacagtcggatcctctgctcagtgtactgcaatggctcccagataacaggctcctctaacatcaccgtgtacaggctcccggagcgtgtggagctggcacccctgcctccttggcagccggtgggccagaacttcaccctgcgctgccaagtggaggatgggtcgccccggaccagcctcacggtggtgctgcttcgctgggaggaggagctgagccggcagcccgcagtggaggagccagcggaggtcactgccactgtgctggccagcagagacgaccacggagcccctttctcatgccgcacagaactggacatgcagccccaggggctgggactgttcgtgaacacctcagccccccgccagctccgaacctttgtcctgcccgtgacccccccgcgcctcgtggccccccggttcttggaggtggaaacgtcgtggccggtggactgcaccctagacgggctttttccagcctcagaggcccaggtctacctggcgctgggggaccagatgctgaatgcgacagtcatgaaccacggggacacgctaacggccacagccacagccacggcgcgcgcggatcaggagggtgcccgggagatcgtctgcaacgtgaccctagggggcgagagacgggaggcccgggagaacttgacggtctttagcttcctaggacccattgtgaacctcagcgagcccaccgcccatgaggggtccacagtgaccgtgagttgcatggctggggctcgagtccaggtcacgctggacggagttccggccgcggccccggggcagccagctcaacttcagctaaatgctaccgagagtgacgacggacgcagcttcttctgcagtgccactctcgaggtggacggcgagttcttgcacaggaacagtagcgtccagctgcgagtcctgtatggtcccaaaattgaccgagccacatgcccccagcacttgaaatggaaagataaaacgagacacgtcctgcagtgccaagccaggggcaacccgtaccccgagctgcggtgtttgaaggaaggctccagccgggaggtgccggtggggatcccgttcttcgtcaacgtaacacataatggtacttatcagtgccaagcgtccagctcacgaggcaaatacaccctggtcgtggtgatggacattgaggctgggagctcccactttgtccccgtcttcgtggcggtgttactgaccctgggcgtggtgactatcgtactggccttaatgtacgtcttcagggagcaccaacggagcggcagttaccatgttagggaggagagcacctatctgcccctcacgtctatgcagccgacagaagcaatgggggaagaaccgtccagagctgagtgacgctgggatccgggatcaaagttggcgggggcttggctgtgccctcagattccgcaccaataaagccttcaaactccctaaaaaaaaaaaaaacaccacaacaacccccggctcttgggggggaaaaggaaaagggccggccactgttccccgccctttgaaaaggagaccggccaaagggcgtaataacaccgcgctccgcccaagcnagccaacgcaacaaaacggaaacccaccccagccacacccgcccgccac

SEQ ID NO: 66344 - DNA, 388 bp, Homo sapiens
catttcatcacttagagtataatgttattaatttgtagtaatttggaaaatttcaattagtaaaaaagtctaaattagagtattttgaaataaagtattatttttgaagttcagagagtggctcagatagctatgtgcttctatttgtagaaccttaaaatgttgttaatgaacaactttttagtcagtttttgttcgtatacattatacatatatttgagtctacaaaatatttgatataataaaactcctatatttataagtataccttctaaaatcttgttatagtttattaaacataaaaaatgctaataatttatgttaaatgttaaagtcatattacctattaaatttgactttgaatgctgtctagggacagcattaacta

SEQ ID NO: 66345 - DNA, 461 bp, Homo sapiens
  misc_feature (51)..(51): n is a, c, g, or t
  misc_feature (78)..(78): n is a, c, g, or t
  misc_feature (147)..(147): n is a, c, g, or t
agctgggaacagacactgccaccacacctagctaaggtatttgtagtgacngggtcacctgtttgccaggctggtctnaaactcctgacctcagcatccttctgcccttcccttctgtcgtcttctcgcagcccggtttaggccccncgaattcgcggccgcgtcgactcacagcagataattctgagatcatgggtgaggggtggtgcatgttgagatttaaattggcataaagctgcatactttttgtctagctgtttgatttcattttttaatatagtatgccaattttgtgactgttaccatgtgaaagtcctgttgaaatgaacaattgtctgccccacaatcaagaatgtatgtgtaaagtgtgaataaatctcatatcaaatgtcaaacttttacatgtgaatgattttctcaaagaacatagaaaagtcaataaaatcctcttaatttccaca

SEQ ID NO: 66346 - DNA, 507 bp, Homo sapiens
gaggggtcgcgcggcggcggcgtcagcggcggcgcccggggggtgggagccgaggcgccgagcaagatggcggcgcgagtgctgcgcgcccgcggagcggcctgggccggcggcctcctgcagcgggcggccccctgcagcctcctgcccaggctccggtgagcagcgccgcccttgcccggtaggtgccgggaagggtccgccgcgaggcggagggcgcgggtttcccggcgccggtctccgccccggccctgtccccagcgcgggtggctgcccggcctcggggcagtggggccggagctggggtggggccggagctggggcggggtcggggcgtcctcgggctcaaggtcacggaggggacgggccgctctgcggctccaccctcgcccgggaaggcccccgaggcttggcccggaggccacatcctccccgcggcgctggcccggcctgcagggccctgaccggcgcgacccgtggccagggacagggacagcgcgcgcctga

SEQ ID NO: 66347 - DNA, 1966 bp, Homo sapiens
gaggggtcgcgcggcggcggcgtcagcggcggcgcccggggggtgggagccgaggcgccgagcaagatggcggcgcgagtgctgcgcgcccgcggagcggcctgggccggcggcctcctgcagcgggcggccccctgcagcctcctgcccaggctccggacatggacatcttccagcaacagatctcgagaagacagctggctaaaatccttatttgtccggaaagttgatccaagaaaagatgcccactccaatctcctagccaaaaaggaaacaagcaatctatacaaattacagtttcacaatgttaaaccggaatgcctagaagcatacaacaaaatttgtcaagaggtgttgccaaagattcacgaagataaacactacccttgtactttggtggggacttggaacacgtggtatggcgagcaggaccaagctgtccacctctggaggtatgaaggaggctatccagccctcacagaagtcatgaataaactcagagaaaataaggaatttttggaatttcgtaaggcaagaagtgacatgcttctctccaggaagaatcagctcctgttggagttcagtttctggaatgagcctgtgccaagatccggacctaatatatatgaactcaggtcttaccaactccgaccaggaaccatgattgaatggggcaattactgggctcgtgcaatccgcttcagacaggatggtaacgaagccgtcggaggattcttctctcagattgggcagctgtacatggtgcaccatctttgggcttacagggatcttcagaccagggaagacatacggaatgcagcatggcacaaacatggctgggaggaattggtatattacacagttccacttattcaggaaatggaatccagaatcatgatcccactgaagacctcgcccctccagtaaagctgtagagtttctatgtgcctacatacatttctgtgacaagtatttgtcgtaaattaattttaattgtgtatcaagtgaaaaagaaacactgaggttttaagctgctgtatatagcttgtgagaaacctcttttctttaaaatttacataatcacaagaaaggaaagaattacagttggactgattgtgacagtgccttgtcgtcctctttgaaacaccccgtgttgtccagtataccttataacacttagccacttctccccaccctccagaaggggtccacgttgaattctgaatcatcttgaaaataagattccaaccacaaaaaaaatttagccatttctttactaaaaaaaaccaaaaaacaaatctgttttataatcacagatttttagacaaatttcttgtatcaggaagaaatacaaattttgtcatgtttctcaagcagtttttctgagtagtttctgaggaggaacaaattacaagtgtacccaataactgaaaatgttttaactcactctcatttgtaagcagtccacatagtagacaatgggttttccaagctgggcaaggtacatttaatcagtaaatcagtttcacatcatgtattgtgatgtttcaatgtgagacacaaaaacaatggcttgaaacttgtgtatcatatgtgattttgaaatgaacaccttgaatagcactaatttttatttgtggtatttttctataacaaaacaagtagctctaggaaaagaggttttattttgtaaacgatcatttgtgacctcagacactctctggctaatattttaataagctcacagcagataattctgagatcatgggtgaggggtggtgcatgttgagatttaaattggcataaagctgcatactttttgtctagctgtttgatttcattttttaatatagtatgccaattttgtgactgttaccatgtgaaagtcctgttgaaatgaacaattgtctgccccacaatcaagaatgtatgtgtaaagtgtgaataaatctcatatcaaatgtca

SEQ ID NO: 66348 - DNA, 2004 bp, Homo sapiens
taggaggggggctggggcccccgagccgggcgacggctgcagcggcgcgaggggggacgccgcggagcggcctgggccggcggcctcctgcagcgggcggccccctgcagcctcctgcccaggctccggacatggacatcttccagcaacagatctcgagaagacagctggctaaaatccttatttgtccggaaagttgatccaagaaaagatgcccactccaatctcctagccaaaaaggaaacaagcaatctatacaaattacagtttcacaatgttaaaccggaatgcctagaagcatacaacaaaatttgtcaagaggtgttgccaaagattcacgaagataaacactacccttgtactttggtggggacttggaacacgtggtatggcgagcaggaccaagctgtccacctctggaggtatgaaggaggctatccagccctcacagaagtcatgaataaactcagagaaaataaggaatttttggaatttcgtaaggcaagaagtgacatgcttctctccaggaagaatcagctcctgttggagttcagtttctggaatgagcctgtgccaagatccggacctaatatatatgaactcaggtcttaccaactccgaccaggaaccatgattgaatggggcaattactgggctcgtgcaatccgcttcagacaggatggtaacgaagccgtcggaggattcttctctcagattgggcagctgtacatggtgcaccatctttgggcttacagggatcttcagaccagggaagacatacggaatgcagcatggcacaaacatggctgggaggaattggtatattacacagttccacttattcaggaaatggaatccagaatcatgatcccactgaagacctcgcccctccagtaaagctgtagagtttctatgtgcctacatacatttctgtgacaagtatttgtcgtaaattaattttaattgtgtatcaagtgaaaaagaaacactgaggttttaagctgctgtatatagcttgtgagaaacctcttttctttaaaatttacataatcacaagaaaggaaagaattacagttggactgattgtgacagtgccttgtcgtcctctttgaaacaccccgtgttgtccagtataccttataacacttagccacttctccccaccctccagaaggggtccacgttgaattctgaatcatcttgaaaataagattccaaccacaaaaaaaatttagccatttctttactaaaaaaaaccaaaaaacaaatctgttttataatcacagatttttagacaaatttcttgtatcaggaagaaatacaaattttgtcatgtttctcaagcagtttttctgagtagtttctgaggaggaacaaattacaagtgtacccaataactgaaaatgttttaactcactctcatttgtaagcagtccacatagtagacaatgggttttccaagctgggcaaggtacatttaatcagtaaatcagtttcacatcatgtattgtgatgtttcaatgtgagacacaaaaacaatggcttgaaacttgtgtatcatatgtgattttgaaatgaacaccttgaatagcactaatttttatttgtggtatttttctataacaaaacaagtagctctaggaaaagaggttttattttgtaaacgatcatttgtgacctcagacactctctggctaatattttaataagctcacagcagataattctgagatcatgggtgaggggtggtgcatgttgagatttaaattggcataaagctgcatactttttgtctagctgtttgatttcattttttaatatagtatgccaattttgtgactgttaccatgtgaaagtcctgttgaaatgaacaattgtctgccccacaatcaagaatgtatgtgtaaagtgtgaataaatctcatatcaaatgtcaaacttttacatgtgaatgattttctcaaagaacatagaaaagtcaataaaatcctcttaatttccaca

SEQ ID NO: 66349 - DNA, 1890 bp, Homo sapiens
  misc_feature (33)..(33): n is a, c, g, or t
agagaaaaaatgacttagtcaggccgcggttanttcggcgagggagaagacagctggctaaaatccttatttgtccggaaagttgatccaagaaaagatgcccactccaatctcctagccaaaaaggaaacaagcaatctatacaaattacagtttcacaatgttaaaccggaatgcctagaagcatacaacaaaatttgtcaagaggtgttgccaaagattcacgaagataaacactacccttgtactttggtggggacttggaacacgtggtatggcgagcaggaccaagctgtccacctctggaggtatgaaggaggctatccagccctcacagaagtcatgaataaactcagagaaaataaggaatttttggaatttcgtaaggcaagaagtgacatgcttctctccaggaagaatcagctcctgttggagttcagtttctggaatgagcctgtgccaagatccggacctaatatatatgaactcaggtcttaccaactccgaccaggaaccatgattgaatggggcaattactgggctcgtgcaatccgcttcagacaggatggtaacgaagccgtcggaggattcttctctcagattgggcagctgtacatggtgcaccatctttgggcttacagggatcttcagaccagggaagacatacggaatgcagcatggcacaaacatggctgggaggaattggtatattacacagttccacttattcaggaaatggaatccagaatcatgatcccactgaagacctcgcccctccagtaaagctgtagagtttctatgtgcctacatacatttctgtgacaagtatttgtcgtaaattaattttaattgtgtatcaagtgaaaaagaaacactgaggttttaagctgctgtatatagcttgtgagaaacctcttttctttaaaatttacataatcacaagaaaggaaagaattacagttggactgattgtgacagtgccttgtcgtcctctttgaaacaccccgtgttgtccagtataccttataacacttagccacttctccccaccctccagaaggggtccacgttgaattctgaatcatcttgaaaataagattccaaccacaaaaaaaatttagccatttctttactaaaaaaaaccaaaaaacaaatctgttttataatcacagatttttagacaaatttcttgtatcaggaagaaatacaaattttgtcatgtttctcaagcagtttttctgagtagtttctgaggaggaacaaattacaagtgtacccaataactgaaaatgttttaactcactctcatttgtaagcagtccacatagtagacaatgggttttccaagctgggcaaggtacatttaatcagtaaatcagtttcacatcatgtattgtgatgtttcaatgtgagacacaaaaacaatggcttgaaacttgtgtatcatatgtgattttgaaatgaacaccttgaatagcactaatttttatttgtggtatttttctataacaaaacaagtagctctaggaaaagaggttttattttgtaaacgatcatttgtgacctcagacactctctggctaatattttaataagctcacagcagataattctgagatcatgggtgaggggtggtgcatgttgagatttaaattggcataaagctgcatactttttgtctagctgtttgatttcattttttaatatagtatgccaattttgtgactgttaccatgtgaaagtcctgttgaaatgaacaattgtctgccccacaatcaagaatgtatgtgtaaagtgtgaataaatctcatatcaaatgtcaaacttttacatgtgaatgattttctcaaagaacatagaaaagtcaataaaatcctcttaatttccaca

SEQ ID NO: 66350 - DNA, 1743 bp, Homo sapiens
  misc_feature (7)..(7): n is a, c, g, or t
  misc_feature (10)..(11): n is a, c, g, or t
  misc_feature (15)..(15): n is a, c, g, or t
ttgctgnggnnactntagaggatcccctgccgagatgcatacaacaaaatttgtcaagaggtgttgccaaagattcacgaagataaacactacccttgtactttggtggggacttggaacacgtggtatggcgagcaggaccaagctgtccacctctggaggtatgaaggaggctatccagccctcacagaagtcatgaataaactcagagaaaataaggaatttttggaatttcgtaaggcaagaagtgacatgcttctctccaggaagaatcagctcctgttggagttcagtttctggaatgagcctgtgccaagatccggacctaatatatatgaactcaggtcttaccaactccgaccaggaaccatgattgaatggggcaattactgggctcgtgcaatccgcttcagacaggatggtaacgaagccgtcggaggattcttctctcagattgggcagctgtacatggtgcaccatctttgggcttacagggatcttcagaccagggaagacatacggaatgcagcatggcacaaacatggctgggaggaattggtatattacacagttccacttattcaggaaatggaatccagaatcatgatcccactgaagacctcgcccctccagtaaagctgtagagtttctatgtgcctacatacatttctgtgacaagtatttgtcgtaaattaattttaattgtgtatcaagtgaaaaagaaacactgaggttttaagctgctgtatatagcttgtgagaaacctcttttctttaaaatttacataatcacaagaaaggaaagaattacagttggactgattgtgacagtgccttgtcgtcctctttgaaacaccccgtgttgtccagtataccttataacacttagccacttctccccaccctccagaaggggtccacgttgaattctgaatcatcttgaaaataagattccaaccacaaaaaaaatttagccatttctttactaaaaaaaaccaaaaaacaaatctgttttataatcacagatttttagacaaatttcttgtatcaggaagaaatacaaattttgtcatgtttctcaagcagtttttctgagtagtttctgaggaggaacaaattacaagtgtacccaataactgaaaatgttttaactcactctcatttgtaagcagtccacatagtagacaatgggttttccaagctgggcaaggtacatttaatcagtaaatcagtttcacatcatgtattgtgatgtttcaatgtgagacacaaaaacaatggcttgaaacttgtgtatcatatgtgattttgaaatgaacaccttgaatagcactaatttttatttgtggtatttttctataacaaaacaagtagctctaggaaaagaggttttattttgtaaacgatcatttgtgacctcagacactctctggctaatattttaataagctcacagcagataattctgagatcatgggtgaggggtggtgcatgttgagatttaaattggcataaagctgcatactttttgtctagctgtttgatttcattttttaatatagtatgccaattttgtgactgttaccatgtgaaagtcctgttgaaatgaacaattgtctgccccacaatcaagaatgtatgtgtaaagtgtgaataaatctcatatcaaatgtcaaacttttacatgtgaatgattttctcaaagaacatagaaaagtcaataaaatcctcttaatttccaca

SEQ ID NO: 66351 - DNA, 1586 bp, Homo sapiens
tcggcacgaggtgtcaagaggtgttgccaaagattcacgaagataaactcagagaaaataaggaatttttggaatttcgtaaggcaagaagtgacatgcttctctccaggaagaatcagctcctgttggagttcagtttctggaatgagcctgtgccaagatccggacctaatatatatgaactcaggtcttaccaactccgaccaggaaccatgattgaatggggcaattactgggctcgtgcaatccgcttcagacaggatggtaacgaagccgtcggaggattcttctctcagattgggcagctgtacatggtgcaccatctttgggcttacagggatcttcagaccagggaagacatacggaatgcagcatggcacaaacatggctgggaggaattggtatattacacagttccacttattcaggaaatggaatccagaatcatgatcccactgaagacctcgcccctccagtaaagctgtagagtttctatgtgcctacatacatttctgtgacaagtatttgtcgtaaattaattttaattgtgtatcaagtgaaaaagaaacactgaggttttaagctgctgtatatagcttgtgagaaacctcttttctttaaaatttacataatcacaagaaaggaaagaattacagttggactgattgtgacagtgccttgtcgtcctctttgaaacaccccgtgttgtccagtataccttataacacttagccacttctccccaccctccagaaggggtccacgttgaattctgaatcatcttgaaaataagattccaaccacaaaaaaaatttagccatttctttactaaaaaaaaccaaaaaacaaatctgttttataatcacagatttttagacaaatttcttgtatcaggaagaaatacaaattttgtcatgtttctcaagcagtttttctgagtagtttctgaggaggaacaaattacaagtgtacccaataactgaaaatgttttaactcactctcatttgtaagcagtccacatagtagacaatgggttttccaagctgggcaaggtacatttaatcagtaaatcagtttcacatcatgtattgtgatgtttcaatgtgagacacaaaaacaatggcttgaaacttgtgtatcatatgtgattttgaaatgaacaccttgaatagcactaatttttatttgtggtatttttctataacaaaacaagtagctctaggaaaagaggttttattttgtaaacgatcatttgtgacctcagacactctctggctaatattttaataagctcacagcagataattctgagatcatgggtgaggggtggtgcatgttgagatttaaattggcataaagctgcatactttttgtctagctgtttgatttcattttttaatatagtatgccaattttgtgactgttaccatgtgaaagtcctgttgaaatgaacaattgtctgccccacaatcaagaatgtatgtgtaaagtgtgaataaatctcatatcaaatgtcaaacttttacatgtgaatgattttctcaaagaacatagaaaagtcaataaaatcctcttaatttccaca

SEQ ID NO: 66352 - DNA, 1278 bp, Homo sapiens
ttcaagcagcacatctgtgaacattctcggcaatctgtctgttagtgtcatttaccataatgtgtttagaaagtaacaagtgcagtaaccctgatcttgttttcagttccacttattcaggaaatggaatccagaatcatgatcccactgaagacctcgcccctccagtaaagctgtagagtttctatgtgcctacatacatttctgtgacaagtatttgtcgtaaattaattttaattgtgtatcaagtgaaaaagaaacactgaggttttaagctgctgtatatagcttgtgagaaacctcttttctttaaaatttacataatcacaagaaaggaaagaattacagttggactgattgtgacagtgccttgtcgtcctctttgaaacaccccgtgttgtccagtataccttataacacttagccacttctccccaccctccagaaggggtccacgttgaattctgaatcatcttgaaaataagattccaaccacaaaaaaaatttagccatttctttactaaaaaaaaccaaaaaacaaatctgttttataatcacagatttttagacaaatttcttgtatcaggaagaaatacaaattttgtcatgtttctcaagcagtttttctgagtagtttctgaggaggaacaaattacaagtgtacccaataactgaaaatgttttaactcactctcatttgtaagcagtccacatagtagacaatgggttttccaagctgggcaaggtacatttaatcagtaaatcagtttcacatcatgtattgtgatgtttcaatgtgagacacaaaaacaatggcttgaaacttgtgtatcatatgtgattttgaaatgaacaccttgaatagcactaatttttatttgtggtatttttctataacaaaacaagtagctctaggaaaagaggttttattttgtaaacgatcatttgtgacctcagacactctctggctaatattttaataagctcacagcagataattctgagatcatgggtgaggggtggtgcatgttgagatttaaattggcataaagctgcatactttttgtctagctgtttgatttcattttttaatatagtatgccaattttgtgactgttaccatgtgaaagtcctgttgaaatgaacaattgtctgccccacaatcaagaatgtatgtgtaaagtgtgaataaatctcatatcaaatgtcaaacttttacatgtgaatgattttctcaaagaacatagaaaagtcaataaaatcctcttaatttccaca

SEQ ID NO: 66353 - DNA, 1205 bp, Homo sapiens
caggtggtcgggatgaattggggtatagaacagttccacttattcaggaaatggaatccagaatcatgatcccactgaagacctcgcccctccagtaaagctgtagagtttctatgtgcctacatacatttctgtgacaagtatttgtcgtaaattaattttaattgtgtatcaagtgaaaaagaaacactgaggttttaagctgctgtatatagcttgtgagaaacctcttttctttaaaatttacataatcacaagaaaggaaagaattacagttggactgattgtgacagtgccttgtcgtcctctttgaaacaccccgtgttgtccagtataccttataacacttagccacttctccccaccctccagaaggggtccacgttgaattctgaatcatcttgaaaataagattccaaccacaaaaaaaatttagccatttctttactaaaaaaaaccaaaaaacaaatctgttttataatcacagatttttagacaaatttcttgtatcaggaagaaatacaaattttgtcatgtttctcaagcagtttttctgagtagtttctgaggaggaacaaattacaagtgtacccaataactgaaaatgttttaactcactctcatttgtaagcagtccacatagtagacaatgggttttccaagctgggcaaggtacatttaatcagtaaatcagtttcacatcatgtattgtgatgtttcaatgtgagacacaaaaacaatggcttgaaacttgtgtatcatatgtgattttgaaatgaacaccttgaatagcactaatttttatttgtggtatttttctataacaaaacaagtagctctaggaaaagaggttttattttgtaaacgatcatttgtgacctcagacactctctggctaatattttaataagctcacagcagataattctgagatcatgggtgaggggtggtgcatgttgagatttaaattggcataaagctgcatactttttgtctagctgtttgatttcattttttaatatagtatgccaattttgtgactgttaccatgtgaaagtcctgttgaaatgaacaattgtctgccccacaatcaagaatgtatgtgtaaagtgtgaataaatctcatatcaaatgtcaaacttttacatgtgaatgattttctcaaagaacatagaaaagtcaataaaatcctcttaatttccaca

SEQ ID NO: 66354 - DNA, 1039 bp, Homo sapiens
aagactggtatcaacgcagagtgcccattacggccgctgctgtatatagcttgtgagaaacctcttttctttaaaatttacataatcacaagaaaggaaagaattacagttggactgattgtgacagtgccttgtcgtcctctttgaaacaccccgtgttgtccagtataccttataacacttagccacttctccccaccctccagaaggggtccacgttgaattctgaatcatcttgaaaataagattccaaccacaaaaaaaatttagccatttctttactaaaaaaaaccaaaaaacaaatctgttttataatcacagatttttagacaaatttcttgtatcaggaagaaatacaaattttgtcatgtttctcaagcagtttttctgagtagtttctgaggaggaacaaattacaagtgtacccaataactgaaaatgttttaactcactctcatttgtaagcagtccacatagtagacaatgggttttccaagctgggcaaggtacatttaatcagtaaatcagtttcacatcatgtattgtgatgtttcaatgtgagacacaaaaacaatggcttgaaacttgtgtatcatatgtgattttgaaatgaacaccttgaatagcactaatttttatttgtggtatttttctataacaaaacaagtagctctaggaaaagaggttttattttgtaaacgatcatttgtgacctcagacactctctggctaatattttaataagctcacagcagataattctgagatcatgggtgaggggtggtgcatgttgagatttaaattggcataaagctgcatactttttgtctagctgtttgatttcattttttaatatagtatgccaattttgtgactgttaccatgtgaaagtcctgttgaaatgaacaattgtctgccccacaatcaagaatgtatgtgtaaagtgtgaataaatctcatatcaaatgtcaaacttttacatgtgaatgattttctcaaagaacatagaaaagtcaataaaatcctcttaatttccaca

SEQ ID NO: 66355 - DNA, 534 bp, Homo sapiens
agctctggatgacctaaaactgtctaattcaggaactgtttgtcacacacatagagtttatcttgggctgactttgctttccaccctcccttcactagcaggtgtttgtcaatagggagaaatttaaaagccacacatcattaagaaagaaattcttttgtatagattcccagacaaatataaataggttttgaattatctgctcttttgtagtctgcatgctacttctattgatgtgccatcaaacactgttagaagaatctaaaaatatagcaaattaaatttgtttgcattgccacctaaataattaggatgaccaagtaatttgtcatctaaacctggacacttttgagaatgaaaaggaatgctgttaatgattatgcaagctcaacagatgtaaactgggactgtctcaggccaactgggacctgttgattaccctattatagtattctgtaggaacatcaatgttactgaaatgggcttatatgtaagtatcagaagatttcatgagcacatttttttcactcaaag

SEQ ID NO: 66356 - DNA, 203 bp, Homo sapiens
ttcacaatgttaaaccggaatgcctagaagcatacaacaaaatttggtgtgtataccaaactatcctttacttggggaaaaataatgactttatttgttagttaattccactaacacttgatagcatagagagagatctttcatccctctcttttgaagctgaacattcagaggctcttaaactgagcttcatgtgggattgc

SEQ ID NO: 66357 - DNA, 2034 bp, Homo sapiens
gaggggtcgcgcggcggcggcgtcagcggcggcgcccggggggtgggagccgaggcgccgagcaagatggcggcgcgagtgctgcgcgcccgcggagcggcctgggccggcggcctcctgcagcgggcggccccctgcagcctcctgcccaggctccggacatggacatcttccagcaacagatctcgagaagacagctggctaaaatccttatttgtccggaaagttgatccaagaaaagatgcccactccaatctcctagccaaaaaggaaacaagcaatctatacaaattacagtttcacaatgttaaaccggaatgcctagaagcatacaacaaaatttgtcaagaggtgttgccaaagattcacgaagataaacactacccttgtactttggtggggacttggaacacgtggtatggcgagcaggaccaagctgtccacctctggaggtatgaaggaggctatccagccctcacagaagtcatgaataaactcagagaaaataaggaatttttggaatttcgtaaggcaagaagtgacatgcttctctccaggaagaatcagctcctgttggagttcagtttctggaatgagcctgtgccaagatccggacctaatatatatgaactcaggtcttaccaactccgaccaggaaccatgattgaatggggcaattactgggctcgtgcaatccgcttcagacaggatggtaacgaagccgtcggaggattcttctctcagattgggcagctgtacatggtgcaccatctttgggcttacagggatcttcagaccagggaagacatacggaatgcagcatggcacaaacatggctgggaggaattggtatattacacagttccacttattcaggaaatggaatccagaatcatgatcccactgaagacctcgcccctccagtaaagctgtagagtttctatgtgcctacatacatttctgtgacaagtatttgtcgtaaattaattttaattgtgtatcaagtgaaaaagaaacactgaggttttaagctgctgtatatagcttgtgagaaacctcttttctttaaaatttacataatcacaagaaaggaaagaattacagttggactgattgtgacagtgccttgtcgtcctctttgaaacaccccgtgttgtccagtataccttataacacttagccacttctccccaccctccagaaggggtccacgttgaattctgaatcatcttgaaaataagattccaaccacaaaaaaaatttagccatttctttactaaaaaaaaccaaaaaacaaatctgttttataatcacagatttttagacaaatttcttgtatcaggaagaaatacaaattttgtcatgtttctcaagcagtttttctgagtagtttctgaggaggaacaaattacaagtgtacccaataactgaaaatgttttaactcactctcatttgtaagcagtccacatagtagacaatgggttttccaagctgggcaaggtacatttaatcagtaaatcagtttcacatcatgtattgtgatgtttcaatgtgagacacaaaaacaatggcttgaaacttgtgtatcatatgtgattttgaaatgaacaccttgaatagcactaatttttatttgtggtatttttctataacaaaacaagtagctctaggaaaagaggttttattttgtaaacgatcatttgtgacctcagacactctctggctaatattttaataagctcacagcagataattctgagatcatgggtgaggggtggtgcatgttgagatttaaattggcataaagctgcatactttttgtctagctgtttgatttcattttttaatatagtatgccaattttgtgactgttaccatgtgaaagtcctgttgaaatgaacaattgtctgccccacaatcaagaatgtatgtgtaaagtgtgaataaatctcatatcaaatgtcaaacttttacatgtgaatgattttctcaaagaacatagaaaagtcaataaaatcctcttaatttccaca

SEQ ID NO: 66358 - DNA, 2068 bp, Homo sapiens
gaggggtcgcgcggcggcggcgtcagcggcggcgcccggggggtgggagccgaggcgccgagcaagatggcggcgcgagtgctgcgcgcccgcggagcggcctgggccggcggcctcctgcagcgggcggccccctgcagcctcctgcccaggctccggacatggacatcttccagcaacagatctcgagaagacagctggctaaaatccttatttgtccggaaagttgatccaagaaaagatgcccactccaatctcctagccaaaaaggaaacaagcaatctatacaaattacagtttcacaatgttaaaccggaatgcctagaagcatacaacaaaatttgtcaagaggtgttgccaaagattcacgaagataaacactacccttgtactttggtggggacttggaacacgtggtatggcgagcaggaccaagctgtccacctctggaggtatgaaggaggctatccagccctcacagaagtcatgaataaactcagagaaaataaggaatttttggaatttcgtaaggcaagaagtgacatgcttctctccaggaagaatcagctcctgttggagttcagtttctggaatgagcctgtgccaagatccggacctaatatatatgaactcaggtcttaccaactccgaccaggaaccatgattgaatggggcaattactgggctcgtgcaatccgcttcagacaggatggtaacgaagccgtcggaggattcttctctcagattgggcagctgtacatggtgcaccatctttgggcttacagggatcttcagaccagggaagacatacggaatgcagcatggcacaaacatggctgggaggaattggtatattacacagttccacttattcaggaaatggaatccagaatcatgatcccactgaagacctcgcccctccagtaaagctgtagagtttctatgtgcctacatacatttctgtgacaagtatttgtcgtaaattaattttaattgtgtatcaagtgaaaaagaaacactgaggttttaagctgctgtatatagcttgtgagaaacctcttttctttaaaatttacataatcacaagaaaggaaagaattacagttggactgattgtgacagtgccttgtcgtcctctttgaaacaccccgtgttgtccagtataccttataacacttagccacttctccccaccctccagaaggggtccacgttgaattctgaatcatcttgaaaataagattccaaccacaaaaaaaatttagccatttctttactaaaaaaaaccaaaaaacaaatctgttttataatcacagatttttagacaaatttcttgtatcaggaagaaatacaaattttgtcatgtttctcaagcagtttttctgagtagtttctgaggaggaacaaattacaagtgtacccaataactgaaaatgttttaactcactctcatttgtaagcagtccacatagtagacaatgggttttccaagctgggcaaggtacatttaatcagtaaatcagtttcacatcatgtattgtgatgtttcaatgtgagacacaaaaacaatggcttgaaacttgtgtatcatatgtgattttgaaatgaacaccttgaatagcactaatttttatttgtggtatttttctataacaaaacaagtagctctaggaaaagaggttttattttgtaaacgatcatttgtgacctcagacactctctggctaatattttaataagctcacagcagataattctgagatcatgggtgaggggtggtgcatgttgagatttaaattggcataaagctgcatactttttgtctagctgtttgatttcattttttaatatagtatgccaattttgtgactgttaccatgtgaaagtcctgttgaaatgaacaattgtctgccccacaatcaagaatgtatgtgtaaagtgtgaataaatctcatatcaaatgtcaaacttttacatgtgaatgattttctcaaagaacatagaaaagtcaataaaatcctcttaatttccacaaaaaaaaaaaaaagaatactcgagcctagttctc

SEQ ID NO: 66359 - DNA, 1915 bp, Homo sapiens
gtgcgtctgccgaggacgttggtgaccctggtctctgaggacatggacatcttccagcaacagatctcgagaagacagctggctaaaatccttatttgtccggaaagttgatccaagaaaagatgcccactccaatctcctagccaaaaaggaaacaagcaatctatacaaattacagtttcacaatgttaaaccggaatgcctagaagcatacaacaaaatttgtcaagaggtgttgccaaagattcacgaagataaacactacccttgtactttggtggggacttggaacacgtggtatggcgagcaggaccaagctgtccacctctggaggtatgaaggaggctatccagccctcacagaagtcatgaataaactcagagaaaataaggaatttttggaatttcgtaaggcaagaagtgacatgcttctctccaggaagaatcagctcctgttggagttcagtttctggaatgagcctgtgccaagatccggacctaatatatatgaactcaggtcttaccaactccgaccaggaaccatgattgaatggggcaattactgggctcgtgcaatccgcttcagacaggatggtaacgaagccgtcggaggattcttctctcagattgggcagctgtacatggtgcaccatctttgggcttacagggatcttcagaccagggaagacatacggaatgcagcatggcacaaacatggctgggaggaattggtatattacacagttccacttattcaggaaatggaatccagaatcatgatcccactgaagacctcgcccctccagtaaagctgtagagtttctatgtgcctacatacatttctgtgacaagtatttgtcgtaaattaattttaattgtgtatcaagtgaaaaagaaacactgaggttttaagctgctgtatatagcttgtgagaaacctcttttctttaaaatttacataatcacaagaaaggaaagaattacagttggactgattgtgacagtgccttgtcgtcctctttgaaacaccccgtgttgtccagtataccttataacacttagccacttctccccaccctccagaaggggtccacgttgaattctgaatcatcttgaaaataagattccaaccacaaaaaaaatttagccatttctttactaaaaaaaaccaaaaaacaaatctgttttataatcacagatttttagacaaatttcttgtatcaggaagaaatacaaattttgtcatgtttctcaagcagtttttctgagtagtttctgaggaggaacaaattacaagtgtacccaataactgaaaatgttttaactcactctcatttgtaagcagtccacatagtagacaatgggttttccaagctgggcaaggtacatttaatcagtaaatcagtttcacatcatgtattgtgatgtttcaatgtgagacacaaaaacaatggcttgaaacttgtgtatcatatgtgattttgaaatgaacaccttgaatagcactaatttttatttgtggtatttttctataacaaaacaagtagctctaggaaaagaggttttattttgtaaacgatcatttgtgacctcagacactctctggctaatattttaataagctcacagcagataattctgagatcatgggtgaggggtggtgcatgttgagatttaaattggcataaagctgcatactttttgtctagctgtttgatttcattttttaatatagtatgccaattttgtgactgttaccatgtgaaagtcctgttgaaatgaacaattgtctgccccacaatcaagaatgtatgtgtaaagtgtgaataaatctcatatcaaatgtcaaacttttacatgtgaatgattttctcaaagaacatagaaaagtcaataaaatcctcttaatttccaca

SEQ ID NO: 66360 - DNA, 1987 bp, Homo sapiens
gaggggtcgcgcggcggcggcgtcagcggcggcgcccggggggtgggagccgaggcgccgagcaagatggcggcgcgagtgctgcgcgcccgcggagcggcctgggccggcggcctcctgcagcgggcggccccctgcagcctcctgcccaggctccggacatggacatcttccagcaacagatctcgagaagacagctggctaaaatccttatttgtccggaaagttgatccaagaaaagatgcccactccaatctcctagccaaaaaggaaacaagcaatctatacaaattacagtttcacaatgttaaaccggaatgcctagaagcatacaacaaaatttgtcaagaggtgttgccaaagattcacgaagataaacactacccttgtactttggtggggacttggaacacgtggtatggcgagcaggaccaagctgtccacctctggaggtatgaaggaggctatccagccctcacagaagtcatgaataaactcagagaaaataaggaagaatcagctcctgttggagttcagtttctggaatgagcctgtgccaagatccggacctaatatatatgaactcaggtcttaccaactccgaccaggaaccatgattgaatggggcaattactgggctcgtgcaatccgcttcagacaggatggtaacgaagccgtcggaggattcttctctcagattgggcagctgtacatggtgcaccatctttgggcttacagggatcttcagaccagggaagacatacggaatgcagcatggcacaaacatggctgggaggaattggtatattacacagttccacttattcaggaaatggaatccagaatcatgatcccactgaagacctcgcccctccagtaaagctgtagagtttctatgtgcctacatacatttctgtgacaagtatttgtcgtaaattaattttaattgtgtatcaagtgaaaaagaaacactgaggttttaagctgctgtatatagcttgtgagaaacctcttttctttaaaatttacataatcacaagaaaggaaagaattacagttggactgattgtgacagtgccttgtcgtcctctttgaaacaccccgtgttgtccagtataccttataacacttagccacttctccccaccctccagaaggggtccacgttgaattctgaatcatcttgaaaataagattccaaccacaaaaaaaatttagccatttctttactaaaaaaaaccaaaaaacaaatctgttttataatcacagatttttagacaaatttcttgtatcaggaagaaatacaaattttgtcatgtttctcaagcagtttttctgagtagtttctgaggaggaacaaattacaagtgtacccaataactgaaaatgttttaactcactctcatttgtaagcagtccacatagtagacaatgggttttccaagctgggcaaggtacatttaatcagtaaatcagtttcacatcatgtattgtgatgtttcaatgtgagacacaaaaacaatggcttgaaacttgtgtatcatatgtgattttgaaatgaacaccttgaatagcactaatttttatttgtggtatttttctataacaaaacaagtagctctaggaaaagaggttttattttgtaaacgatcatttgtgacctcagacactctctggctaatattttaataagctcacagcagataattctgagatcatgggtgaggggtggtgcatgttgagatttaaattggcataaagctgcatactttttgtctagctgtttgatttcattttttaatatagtatgccaattttgtgactgttaccatgtgaaagtcctgttgaaatgaacaattgtctgccccacaatcaagaatgtatgtgtaaagtgtgaataaatctcatatcaaatgtcaaacttttacatgtgaatgattttctcaaagaacatagaaaagtcaataaaatcctcttaatttccaca

SEQ ID NO: 66361 - DNA, 473 bp, Homo sapiens
gaggggtcgcgcggcggcggcgtcagcggcggcgcccggggggtgggagccgaggcgccgagcaagatggcggcgcgagtgctgcgcgcccgcggagcggcctgggccggcggcctcctgcagcgggcggccccctgcagcctcctgcccaggctccggacatggacatcttccagcaacagatctcgagaagacagctggctaaaatccttatttgtccggaaagttgatccaagaaaagatgcccactccaatctcctagccaaaaaggaaacaagcaatctatacaaattacagtttcacaatgttaaaccggaatgcctagaagcatacaacaaaatttgtcaagaggtgttgccaaagattcacgaagataaacactacccttgtactttggtggggacttggaacacgtggtatggcgagcaggaccaagctgttcacctctggatatgctcgggcgccgaatcctc

SEQ ID NO: 66362 - DNA, 367 bp, Homo sapiens
caataagatagatagatgatagatagatagatagatagatagatagctatagatggatagatagatagacagatatgtactatctggcccttagaaaaagttcgttgatccctacatactttagagtttatagtatatatctttaacttatcatggtctaccatcaagtgatattataacacttcacatatagtagaagaaccttaaaacagtatatttttatttttcccttcctggcctttatgttattgttgttaaacattttacttgtacatatggtataaaccctacaaaacagttgttatttttgctttacataaatttttttttttttgagatggagccattgcactccagcctgggcgca

SEQ ID NO: 66363 - DNA, 361 bp, Homo sapiens
ttttaagaaagagtggtttggctgggcatggtggctcacacctgtaatcccagcactttgggaggccaaggaaggtggatcacttttacccaggagtttgagaccagcctgggcaacatggtgaaaccccatctctacaaacaaagtataaaaattagccagccatggtggtgcatgcctgcagtcccagctacttgggaggctgaggcgggaggattgcttgatcctcgaaggtcaaggctgcagtgactggagactgtgccattgtactccagcttgggtgacagagaaaaaaacaaaagtaagaaaagaaatagtgatttgtctcccaaatttgataaaaataaataaaaacaaaata

SEQ ID NO: 66364 - DNA, 404 bp, Homo sapiens
ggattaaatagaattggcaaatgaagtcagaaagaggtttaatgatagaatactttgaagaaggatgttgggtctttgggatttaacatttatgctgggaggttatattttccattatttaaaaaattagaatcattttcccagagcatacttttgccaaaagtttttgcagaaaacttggggacatgggcttataccagactgaatggttgccgtagggtatgggtagttcagagattttaactgaagcacctctcatattctagacactattctgggggcttgggatacatgagagaacaaaaccaagatcctgaggtgaatgggttgagacagctaattagaaaatgaacataactgtacattatctagtatgttgggaggtgataccagaaaaagaaaag

SEQ ID NO: 66365 - DNA, 519 bp, Homo sapiens
taaacatattagaatagatttgttgaagtaacattgttggtggggggaatgttcatataaaattgtgatagatattaccaatttgccattcataaggtatctatgagttcacccttccacctgtactgtatcagacagcttgtctctctttagtgtggctgatatgattcttaacaatctttgaaagacaaaaaaaggtatctcatggttttgaacacctattatttttactgggtttgagcaacttttcgcatatttaaaaataattattttctttatgtgaactggcatttcatgtattttgcttttatttctactgatttgctaacctttttattgattggtaggagatctgtataaggaaattcatccatttggggtcacattaatgtcaaaaaatttatccaagtttacacctatttgtttgattttattgtgctaaaattgctaaaatattttatatttgggtgatgaaatttatccacctttgctttaagatttctaggttttgatatttgc

SEQ ID NO: 66366 - DNA, 737 bp, Homo sapiens
agcggccgcggcatgaaaggcggcgaggagaggcagcactgctgctcttgacttctgagcagggcttagagagcctgccccggcttaagccgagctgctggtgctgaccctgagcgccgagtccgcgagctctgagtccggagcctcccagccgtggagccgtgggatgaggggggcgttgggggacagggcaaagtcgatcttggttgtacagccgcccgatcctagcgcggagctgcgagcctgaccggccgcgtctggcatggtcagagaaagaattttcttttcccaactccggcttttggttttgtgtgtccaccttgcgcaactccggagccagccgaccccacatggattctcaacaggtggccggcacatcttctgagcctcgctctctcatctgaaagtggagtgtaagtccaagaagattcatttagacaaagaaggtggaaaaaaaggactttctgggccagcaagtcggatgaccaccctccaaggggcagaggagggcccattttgtgaagaagaaatcaactacccggaaaacgccacaggaggacatgtttctgcagatgtagttgccctagaaacagaagagtatgggggtgtgaatgtcttctcttttgggggcaaacactatgtccttttctttttctagatacagttaattcctggaaattttagcgagtttgttcttgtggatattttgaacaataaagagtgaaaatcactttgga

SEQ ID NO: 66367 - DNA, 974 bp, Homo sapiens
agcggccgcggcatgaaaggcggcgaggagaggcagcactgctgctcttgacttctgagcagggcttagagagcctgccccggcttaagccgagctgctggtgctgaccctgagcgccgagtccgcgagctctgagtccggagcctcccagccgtggagccgtgggatgaggggggcgttgggggacagggcaaagtcgatcttggttgtacagccgcccgatcctagcgcggagctgcgagcctgaccggccgcgtctggcatggtcagagaaagaattttcttttcccaactccggcttttggttttgtgtgtccaccttgcgcaactccggagccagccgaccccacatggattctcaacaggtggccggtgtcaacgcgctagagaggccgtctcacctccaaaggtatcttcactcccggagggcccgggctcccagccgcagtcccacactgggcccgcgcgccggatacgaggtgctccgacggcaaaaatcccatacatttttaactacagtgattactaaattaatagcaggcactaagacagatgtcaaaacgtcttgaaaatgtttatctgtgaataattgagaaggtggtgggacgcattatctgattgtgtaatgaaatatgtatgaggaacagctgtttgcaacagtcccctcccgccgcctcctcagccaaggcccttctctaggaagcaggagtcgcggcgaagttggtcgcctacttccgtccacttgggagccctcgcggcccctccccggctgctggcagaatggtggctccagcgcgccccagagtagtccggtttcccgacggacaacagcatggagtcctcctcagcctcgctctgtgggctccgtgcctgagtgaggctccaccgccggccgcgctgtccctcgcgccttcggggccggccgcgggctcggcctgcggggaccgaggggagcactggcccgggcggccgcg

SEQ ID NO: 66368 - DNA, 911 bp, Homo sapiens
aggacatggaactaacctgaaggagctcatgatggccagagccgggctgctcaagcaacaaaataaataaactgtagcagcagcttgttacctacagaaaaaaataaatatccatgctaatataagtaagtaactgaatgaattaacaagtgggaaaaataagggagacggggcagctctctttacagaattccaattaataaatgtaaacagaaagacagaaatagaaagtcagcatcagacgccacagcagcctccactggcagcgtccttgcgaatgcccacgcaggggccaaaggcctgataagaaatggtatcagcagcctccaagtgtctccttgagatacctactaattacacagagaaaaagagtaactcgacaatggagtaaccagccaaccccaccttaaccaagcttcaaagtcagcagcagcagcagcaacagccaggcgacaccacctgcctcccaatccagtgctctgaggacacgccagccggcccgcggcattctaactgagattctacagcctggacgtcatcacgaggagacaccagacaaacgcaaactaaggaaacgtccaccagacaaggaccagagctctccagcacgtcaaggccatcaaagaccaggaaagactgagcagctaccaccaagcagaggagaccaaggagccgaggagccgcgagggtcccggggcaggaaaggacgtcgaggacactggtaagaatcgaataaggagaaaatatttgcaaaagacacatctgataatggactattatccaaaatataccaagaactcctgaaactcaacaatatcaacaataagctgctccgcatcctccgtcaccagggagatgcaaattaaaacaagatgcacacacctactagagcggccaaaacccagaacacg

SEQ ID NO: 66369 - DNA, 5822 bp, Homo sapiens
  misc_feature (4285)..(4285): n is a, c, g, or t
gagggcggggaagaggcgtgacggagattcctgaggtgtagtagcctgaggttcccttatgtggccctatagctgttactgaaggaagtagcctacgtccacgcctacaactgaagtctcttgacaaacacctcacccctgcctccgggatgaaagggggtaacctagacctgaatgggcttgaccatctcacaactgctcgcgtgacgaccgcattcgtggcaggtaagaagattgctgtatcaactcaagaaagcagtaacttcactgtctttgtattttgaattgcaacaacaactttgatatcaacaatgaagcaatgatatctaagaacaaaagagtatttgccaacagtcatcataatatcaagtgattgtataagcagaaacaagctgtcacagacctgtgcgtcagctaatatatggagaatgctttcttctgatactatttacttagaggcagttttaatataaatcatttcaattatatctacatcaaataaaataaaaatgagtgaagcccccagattcttcgttggaccagaagatacagaaataaatcctggaaattatcgacatttcttccaccatgcagatgaagacgatgaggaggaagatgattctccaccagaaaggcagattgtggttggaatatgttccatggcaaagaaatccaaatccaaaccaatgaaggaaattcttgaacggatctccttatttaaatatatcacagtagtagtatttgaagaggaggttattttgaatgaaccagtggaaaactggcctttatgtgattgtcttatttctttccattctaaaggatttccactggacaaagcggttgcctatgcaaaactcaggaatccatttgtaatcaatgacttgaatatgcagtatctcatacaagataggagagaagtatatagtattcttcaagctgaaggtattttacttcctcgttatgctattttgaaccgtgacccaaataatcccaaagaatgtaatctgattgaaggggaagatcatgtagaagtaaatggggaagtttttcaaaagccatttgtagaaaagccagtcagtgcagaagatcacaatgtttacatttattacccaacttctgctggtggtggaagtcaaagactctttagaaagattggcagtagaagtagtgtttattctccagaaagcaatgtacgaaaaacaggctcatatatatatgaagagtttatgcccacagatggtactgatgttaaggtttatacagtgggtccagattatgcccatgctgaagctcgaaaatctccagcacttgatggcaaggtggaacgagacagtgaaggaaaagaagtaagataccctgttattctcaatgcacgagagaaattaattgcttggaaagtctgccttgcttttaagcaaacagtttgtggctttgatttgttacgggccaatggacagtcctatgtctgtgatgtcaatggcttcagttttgtgaaaaattccatgaagtattatgatgactgtgcaaaaatacttggaaatattgtaatgcgagaacttgctccacaatttcatattccatggtcaatacccttagaagctgaagatatcccaattgtaccaactacatctggaactatgatggaacttagatgtgtcatagctgttatacgtcatggggatcgaacaccaaaacaaaaaatgaaaatggaagtgagacatcagaaattttttgatctttttgaaaagtgtgatggatataaatcagggaaattaaaactcaaaaaaccaaaacagttacaggaagtgctagatattgcacgacagcttcttatggagctagggcaaaataatgattctgaaattgaagaaaacaagccaaaacttgaacaacttaagactgtattagagatgtatggtcatttttctggaataaatcgtaaggttcagttgacctatctccctcatggttgtcctaaaacatctagtgaagaggaggacagccgaagagaagaaccatctttacttttggttctaaaatggggaggtgaattaactcctgcaggcagggtccaggctgaagaacttggaagagccttcaggtgtatgtatcctggaggtcaaggagattatgcaggatttcctggttgtggtttacttagattacatagcacctacagacatgacctcaaaatatatgcctctgatgaaggacgagtccagatgactgcagctgcttttgcaaaggggcttttagctttggaaggagagcttacacccattcttgttcaaatggtgaaaagtgcaaatatgaacggtcttttggatagtgatagtgactctctgagcagttgtcagcaacgtgtgaaggcaaggcttcatgaaatacttcagaaagacagagattttactgctgaagattatgaaaagcttactccatctggaagcatttctcttatcaaatcaatgcatttaattaaaaaccctgtgaagacctgtgataaagtttattccttaattcagagtttgacttctcaaatcagacatcgaatggaagatcctaaatcatcagatattcagctttaccatagtgaaacattggagcttatgctacgtagatggtccaagttagagaaagactttaaaacaaagaatggaagatatgatattagtaaaatccctgacatatatgactgtataaaatatgatgtccagcataatggttccttgaaattagaaaacacaatggaattatataggctttcgaaggcattagcagatattgttatccctcaggaatatggtataactaaagctgaaaaactggagattgccaaaggctactgtactcctctggttagaaaaattcgctcagaccttcagaggacacaagatgatgacactgtaaataaacttcatcctgtgtattctagaggtgttctgtctcctgaacgtcatgttcgtactagattatattttaccagtgaaagtcatgtacattctttgctgtctattcttcgctatggtgccttatgcaatgaatcaaaggatgaacagtggaaacgagctatggattatttaaacgttgtcaatgagctcaactacatgactcagattgttatcatgctttatgaggatcctaataaggatctttcctcagaagaacgctttcatgttgaattacactttagtccgggagccaaaggttgtgaagaagacaaaaatttgccatctggctatggatatagaccagcttccagagagaatgaaggcaggagaccttttaaaattgataatgatgatgaaccacatacttctaaaagagatgaagttgatcgagctgtgatattgtttaaaccaatggtatcagagccaattcatatacacaggaagtctccacttccaagatctaggaagacggctacaaatgatgaagagagccccctgagtgtgtctagcccagagggtactggtacctggctgcattataccagtggtgtgggtactgggcgtcgaagacgcagatcaggggaacaaatcacttcttcccctgtctcccccaaatcattggctttcacatccagtatttttggctcatggcaacaggttgtatctgaaaatgctaattacctgagaacaccaagaactcttgtggaacagaagcagaatcctactgtagggtctcactgtgcgggcctgtttagcacctcggtgctcgggggttcttcaagcgcacctaacctacaggattatgctcgtactcatcgtaaaaagctgacctcttctggctgcatagatgacgccacacgcggttctgctgttaaaaggttttctatctcatttgctcgacacccaaccaatggctttgaattgtattccatggtgccatctatttgtcctctagaaactcttcataatgccctatctttaaagcaagtggatgaatttcttgcttccattgcttctccatcatctgacgttccacggaagaccgctgaaatttcctctacagctttacgttccagtccaataatgagaaaaaaagtatctttaaatacgtatacacctgcaaagatcctcccaacaccaccagctaccttaaagagcactaaagcaagcagcaaaccagctacaagtggaccttctagtgcagttgttcctaatacctcatctcggaaaaagaatataactagcaaaacagaaacgcatgaacacaaaaaaaacactgggaaaaagaaatgaaatcttagcagaagctggaactttttatacttataaaaatagtntgttcttatgtttctccttatgcatttatgtgttcacttaaaaatgtttttaaatctaaggttttctttgtttatgttcaggtaaggaactgttgtcatgatctggaaatgtttaaaacaatgtttgttagcattctgtgagcagcaaaacttatagtgataaaaatcgattgttgttaatatgatgtttaccatgtgcacatagtaatgaaaaggaacataaaagcccagcaggctcgtaccaaagtcacagcagtaatgctatgtactgcagagtctgatgagctggcctttgtgcacacttttattttcatgggattgcatcttagctgttaaaacttctagattgaaatttgacagccagggttacatattggggacttttaaagtgtctttccaaagagatttcattaaccgtttagattagaatatctttcccaattgttacagtgacatatatgctgcaatatttaacaactggagtattagccacatgggttattttttcaatctgtgttttgaatttttttattgtgtgttatttaaaatattacatatgcagctgggagaactacacctttgtgcacatagatttatatattaatttgtagaaaatattttctttatatatttccttaccatacaaggtgccttgttcatcaggaaaacttttgttttgtattttgacaagaaaggcaccttcagagtttctttttaagtatagttgacaagtgtataaatgttacacttactttcagagttctttttagatctaaagaagtcagttcaaaaatggaaatcaacaatgttaggagaaatctgaattctgttaagttagtaagtattatgtatagcatctgtttttaaccatttccattcttatccctagtgtatcagttgatcacactaagaaagcttaaagattgagcatttgaaataaatgctctttataaatgattagatttttgaagggatattgaaatcattgcgctgtgatttcatctgtgatgtgaaaaatcaatttattatccttggtgctttcccccccaccaatgcacaaataattgtgaacagcttgaaatgacttaaactgtaatccaaatgggacaatctgataagaatttcatgcattggtagttaaataacttaaattgctaaagctttagcttgaaatttatgtttagaaaaactattgatttcccatggtatgaatataactattgtaattcttcaaatgagactcttctcaccttaaatagtcatatattaattaacttataggaaataagcatactatatgttagctgttttaaaaggtaccagatgtaagagtcataaatatatgcaattaaagaagttcatagatttcacatgaatgtaaatgtgttatatggagacatgtcttgtaaacagttgaatgtatgtaagttttctgtttgtgaaaatgtagttaatgtactcactgtggaggtcataaggaagctactttttttttaaagtggaacctaattaaaatatttccagaatcaaaaaaaat

SEQ ID NO: 66370 - DNA, 198 bp, Homo sapiens
gcggccgcctactactactactactgctcgagttcaagcttctaacgatgtacggggacatgtcttgtaaacagttgaatgtatgtaagttttctgtttgtgaaaatgtagttaatgtactcactgtggaggtcataaggaagctactttttttttaaagtggaacctaattaaaatatttccagaatcaaaaaaaat

SEQ ID NO: 66371 - DNA, 5465 bp, Homo sapiens
  misc_feature (3928)..(3928): n is a, c, g, or t
gagggcggggaagaggcgtgacggagattcctgaggtgtagtagcctgaggttcccttatgtggccctatagctgttactgaaggaagtagcctacgtccacgcctacaactgaagtctcttgacaaacacctcacccctgcctccgggatgaaagggggtaacctagacctgaatgggcttgaccatctcacaactgctcgcgtgacgaccgcattcgtggcaggtaagaagattgctgtatcaactcaagaaagcagtaacttcactgtctttgtattttgaattgcaacaacaactttgatatcaacaatgaagcaatgatatctaagaacaaaagagtatttgccaacagtcatcataatatcaagtgattgtataagcagaaacaagctgtcacagacctgtgcgtcagctaatatatggagaatgctttcttctgatactatttacttagaggcagttttaatataaatcatttcaattatatctacatcaaataaaataaaaatgagtgaagcccccagattcttcgttggaccagaagatacagaaataaatcctggaaattatcgacatttcttccaccatgcagatgaagacgatgaggaggaagatgattctccaccagaaaggcagattgtggttggaatatgttccatggcaaagaaatccaaatccaaaccaatgaaggaaattcttgaacggatctccttatttaaatatatcacagtagtagtatttgaagaggaggttattttgaatgaaccagtggaaaactggcctttatgtgattgtcttatttctttccattctaaaggatttccactggacaaagcggttgcctatgcaaaactcaggaatccatttgtaatcaatgacttgaatatgcagtatctcatacaagataggagagaagtatatagtattcttcaagctgaaggtattttacttcctcgttatgctattttgaaccgtgacccaaataatcccaaagaatgtaatctgattgaaggggaagatcatgtagaagtaaatggggaagtttttcaaaagccatttgtagaaaagccagtcagtgcagaagatcacaatgtttacatttattacccaacttctgctggtggtggaagtcaaagactctttagaaagattggcagtagaagtagtgtttattctccagaaagcaatgtacgaaaaacaggctcatatatatatgaagagtttatgcccacagatggtactgatgttaaggtttatacagtgggtccagattatgcccatgctgaagctcgaaaatctccagcacttgatggcaaggtggaacgagacagtgaaggaaaagaagtaagataccctgttattctcaatgcacgagagaaattaattgcttggaaagtctgccttgcttttaagcaaacagtttgtggctttgatttgttacgggccaatggacagtcctatgtctgtgatgtcaatggcttcagttttgtgaaaaattccatgaagtattatgatgactgtgcaaaaatacttggaaatattgtaatgcgagaacttgctccacaatttcatattccatggtcaatacccttagaagctgaagatatcccaattgtaccaactacatctggaactatgatggaacttagatgtgtcatagctgttatacgtcatggggatcgaacaccaaaacaaaaaatgaaaatggaagtgagacatcagaaattttttgatctttttgaaaagtgtgatggatataaatcagggaaattaaaactcaaaaaaccaaaacagttacaggaagtgctagatattgcacgacagcttcttatggagctagggcaaaataatgattctgaaattgaagaaaacaagccaaaacttgaacaacttaagactgtattagagatgtatggtcatttttctggaataaatcgtaaggttcagttgacctatctccctcatggttgtcctaaaacatctagtgaagaggaggacagccgaagagaagaaccatctttacttttggttctaaaatggggaggtgaattaactcctgcaggcagggtccaggctgaagaacttggaagagccttcaggtgtatgtatcctggaggtcaaggagattatgcaggatttcctggttgtggtttacttagattacatagcacctacagacatgacctcaaaatatatgcctctgatgaaggacgagtccagatgactgcagctgcttttgcaaaggggcttttagctttggaaggagagcttacacccattcttgttcaaatggtgaaaagtgcaaatatgaacggtcttttggatagtgatagtgactctctgagcagttgtcagcaacgtgtgaaggcaaggcttcatgaaatacttcagaaagacagagattttactgctgaagattatgaaaagcttactccatctggaagcatttctcttatcaaatcaatgcatttaattaaaaaccctgtgaagacctgtgataaagtttattccttaattcagagtttgacttctcaaatcagacatcgaatggaagatcctaaatcatcagatattcagctttaccatagtgaaacattggagcttatgctacgtagatggtccaagttagagaaagactttaaaacaaagaatggaagatatgatattagtaaaatccctgacatatatgactgtataaaatatgatgtccagcataatggttccttgaaattagaaaacacaatggaattatataggctttcgaaggcattagcagatattgttatccctcaggaatatggtataactaaagctgaaaaactggagattgccaaaggctactgtactcctctggttagaaaaattcgctcagaccttcagaggacacaagatgatgacactgtaaataaacttcatcctgtgtattctagaggtgttctgtctcctgaacgtcatgttcgtactagattatattttaccagtgaaagtcatgtacattctttgctgtctattcttcgctatggtgccttatgcaatgaatcaaaggatgaacagtggaaacgagctatggattatttaaacgttgtcaatgagctcaactacatgactcagattgttatcatgctttatgaggatcctaataaggatctttcctcagaagaacgctttcatgttgaattacactttagtccgggagccaaaggttgtgaagaagacaaaaatttgccatctggctatggatatagaccagcttccagagagaatgaaggcaggagaccttttaaaattgataatgatgatgaaccacatacttctaaaagagatgaagttgatcgagctgtgatattgtttaaaccaatggtatcagagccaattcatatacacaggaagtctccacttccaagatctaggaagacggctacaaatgatgttgtatctgaaaatgctaattacctgagaacaccaagaactcttgtggaacagaagcagaatcctactgtaggctttgaattgtattccatggtgccatctatttgtcctctagaaactcttcataatgccctatctttaaagcaagtggatgaatttcttgcttccattgcttctccatcatctgacgttccacggaagaccgctgaaatttcctctacagctttacgttccagtccaataatgagaaaaaaagtatctttaaatacgtatacacctgcaaagatcctcccaacaccaccagctaccttaaagagcactaaagcaagcagcaaaccagctacaagtggaccttctagtgcagttgttcctaatacctcatctcggaaaaagaatataactagcaaaacagaaacgcatgaacacaaaaaaaacactgggaaaaagaaatgaaatcttagcagaagctggaactttttatacttataaaaatagtntgttcttatgtttctccttatgcatttatgtgttcacttaaaaatgtttttaaatctaaggttttctttgtttatgttcaggtaaggaactgttgtcatgatctggaaatgtttaaaacaatgtttgttagcattctgtgagcagcaaaacttatagtgataaaaatcgattgttgttaatatgatgtttaccatgtgcacatagtaatgaaaaggaacataaaagcccagcaggctcgtaccaaagtcacagcagtaatgctatgtactgcagagtctgatgagctggcctttgtgcacacttttattttcatgggattgcatcttagctgttaaaacttctagattgaaatttgacagccagggttacatattggggacttttaaagtgtctttccaaagagatttcattaaccgtttagattagaatatctttcccaattgttacagtgacatatatgctgcaatatttaacaactggagtattagccacatgggttattttttcaatctgtgttttgaatttttttattgtgtgttatttaaaatattacatatgcagctgggagaactacacctttgtgcacatagatttatatattaatttgtagaaaatattttctttatatatttccttaccatacaaggtgccttgttcatcaggaaaacttttgttttgtattttgacaagaaaggcaccttcagagtttctttttaagtatagttgacaagtgtataaatgttacacttactttcagagttctttttagatctaaagaagtcagttcaaaaatggaaatcaacaatgttaggagaaatctgaattctgttaagttagtaagtattatgtatagcatctgtttttaaccatttccattcttatccctagtgtatcagttgatcacactaagaaagcttaaagattgagcatttgaaataaatgctctttataaatgattagatttttgaagggatattgaaatcattgcgctgtgatttcatctgtgatgtgaaaaatcaatttattatccttggtgctttcccccccaccaatgcacaaataattgtgaacagcttgaaatgacttaaactgtaatccaaatgggacaatctgataagaatttcatgcattggtagttaaataacttaaattgctaaagctttagcttgaaatttatgtttagaaaaactattgatttcccatggtatgaatataactattgtaattcttcaaatgagactcttctcaccttaaatagtcatatattaattaacttataggaaataagcatactatatgttagctgttttaaaaggtaccagatgtaagagtcataaatatatgcaattaaagaagttcatagatttcacatgaatgtaaatgtgttatatggagacatgtcttgtaaacagttgaatgtatgtaagttttctgtttgtgaaaatgtagttaatgtactcactgtggaggtcataaggaagctactttttttttaaagtggaacctaattaaaatatttccagaatcaaaaaaaat

SEQ ID NO: 66372 - DNA, 5648 bp, Homo sapiens
  misc_feature (4111)..(4111): n is a, c, g, or t
gagggcggggaagaggcgtgacggagattcctgaggtgtagtagcctgaggttcccttatgtggccctatagctgttactgaaggaagtagcctacgtccacgcctacaactgaagtctcttgacaaacacctcacccctgcctccgggatgaaagggggtaacctagacctgaatgggcttgaccatctcacaactgctcgcgtgacgaccgcattcgtggcaggtaagaagattgctgtatcaactcaagaaagcagtaacttcactgtctttgtattttgaattgcaacaacaactttgatatcaacaatgaagcaatgatatctaagaacaaaagagtatttgccaacagtcatcataatatcaagtgattgtataagcagaaacaagctgtcacagacctgtgcgtcagctaatatatggagaatgctttcttctgatactatttacttagaggcagttttaatataaatcatttcaattatatctacatcaaataaaataaaaatgagtgaagcccccagattcttcgttggaccagaagatacagaaataaatcctggaaattatcgacatttcttccaccatgcagatgaagacgatgaggaggaagatgattctccaccagaaaggcagattgtggttggaatatgttccatggcaaagaaatccaaatccaaaccaatgaaggaaattcttgaacggatctccttatttaaatatatcacagtagtagtatttgaagaggaggttattttgaatgaaccagtggaaaactggcctttatgtgattgtcttatttctttccattctaaaggatttccactggacaaagcggttgcctatgcaaaactcaggaatccatttgtaatcaatgacttgaatatgcagtatctcatacaagataggagagaagtatatagtattcttcaagctgaaggtattttacttcctcgttatgctattttgaaccgtgacccaaataatcccaaagaatgtaatctgattgaaggggaagatcatgtagaagtaaatggggaagtttttcaaaagccatttgtagaaaagccagtcagtgcagaagatcacaatgtttacatttattacccaacttctgctggtggtggaagtcaaagactctttagaaagattggcagtagaagtagtgtttattctccagaaagcaatgtacgaaaaacaggctcatatatatatgaagagtttatgcccacagatggtactgatgttaaggtttatacagtgggtccagattatgcccatgctgaagctcgaaaatctccagcacttgatggcaaggtggaacgagacagtgaaggaaaagaagtaagataccctgttattctcaatgcacgagagaaattaattgcttggaaagtctgccttgcttttaagcaaacagtttgtggctttgatttgttacgggccaatggacagtcctatgtctgtgatgtcaatggcttcagttttgtgaaaaattccatgaagtattatgatgactgtgcaaaaatacttggaaatattgtaatgcgagaacttgctccacaatttcatattccatggtcaatacccttagaagctgaagatatcccaattgtaccaactacatctggaactatgatggaacttagatgtgtcatagctgttatacgtcatggggatcgaacaccaaaacaaaaaatgaaaatggaagtgagacatcagaaattttttgatctttttgaaaagtgtgatggatataaatcagggaaattaaaactcaaaaaaccaaaacagttacaggaagtgctagatattgcacgacagcttcttatggagctagggcaaaataatgattctgaaattgaagaaaacaagccaaaacttgaacaacttaagactgtattagagatgtatggtcatttttctggaataaatcgtaaggttcagttgacctatctccctcatggttgtcctaaaacatctagtgaagaggaggacagccgaagagaagaaccatctttacttttggttctaaaatggggaggtgaattaactcctgcaggcagggtccaggctgaagaacttggaagagccttcaggtgtatgtatcctggaggtcaaggagattatgcaggatttcctggttgtggtttacttagattacatagcacctacagacatgacctcaaaatatatgcctctgatgaaggacgagtccagatgactgcagctgcttttgcaaaggggcttttagctttggaaggagagcttacacccattcttgttcaaatggtgaaaagtgcaaatatgaacggtcttttggatagtgatagtgactctctgagcagttgtcagcaacgtgtgaaggcaaggcttcatgaaatacttcagaaagacagagattttactgctgaagattatgaaaagcttactccatctggaagcatttctcttatcaaatcaatgcatttaattaaaaaccctgtgaagacctgtgataaagtttattccttaattcagagtttgacttctcaaatcagacatcgaatggaagatcctaaatcatcagatattcagctttaccatagtgaaacattggagcttatgctacgtagatggtccaagttagagaaagactttaaaacaaagaatggaagatatgatattagtaaaatccctgacatatatgactgtataaaatatgatgtccagcataatggttccttgaaattagaaaacacaatggaattatataggctttcgaaggcattagcagatattgttatccctcaggaatatggtataactaaagctgaaaaactggagattgccaaaggctactgtactcctctggttagaaaaattcgctcagaccttcagaggacacaagatgatgacactgtaaataaacttcatcctgtgtattctagaggtgttctgtctcctgaacgtcatgttcgtactagattatattttaccagtgaaagtcatgtacattctttgctgtctattcttcgctatggtgccttatgcaatgaatcaaaggatgaacagtggaaacgagctatggattatttaaacgttgtcaatgagctcaactacatgactcagattgttatcatgctttatgaggatcctaataaggatctttcctcagaagaacgctttcatgttgaattacactttagtccgggagccaaaggttgtgaagaagacaaaaatttgccatctggctatggatatagaccagcttccagagagaatgaaggcaggagaccttttaaaattgataatgatgatgaaccacatacttctaaaagagatgaagttgatcgagctgtgatattgtttaaaccaatggtatcagagccaattcatatacacaggaagtctccacttccaagatctaggaagacggctacaaatgatgttgtatctgaaaatgctaattacctgagaacaccaagaactcttgtggaacagaagcagaatcctactgtagggtctcactgtgcgggcctgtttagcacctcggtgctcgggggttcttcaagcgcacctaacctacaggattatgctcgtactcatcgtaaaaagctgacctcttctggctgcatagatgacgccacacgcggttctgctgttaaaaggttttctatctcatttgctcgacacccaaccaatggctttgaattgtattccatggtgccatctatttgtcctctagaaactcttcataatgccctatctttaaagcaagtggatgaatttcttgcttccattgcttctccatcatctgacgttccacggaagaccgctgaaatttcctctacagctttacgttccagtccaataatgagaaaaaaagtatctttaaatacgtatacacctgcaaagatcctcccaacaccaccagctaccttaaagagcactaaagcaagcagcaaaccagctacaagtggaccttctagtgcagttgttcctaatacctcatctcggaaaaagaatataactagcaaaacagaaacgcatgaacacaaaaaaaacactgggaaaaagaaatgaaatcttagcagaagctggaactttttatacttataaaaatagtntgttcttatgtttctccttatgcatttatgtgttcacttaaaaatgtttttaaatctaaggttttctttgtttatgttcaggtaaggaactgttgtcatgatctggaaatgtttaaaacaatgtttgttagcattctgtgagcagcaaaacttatagtgataaaaatcgattgttgttaatatgatgtttaccatgtgcacatagtaatgaaaaggaacataaaagcccagcaggctcgtaccaaagtcacagcagtaatgctatgtactgcagagtctgatgagctggcctttgtgcacacttttattttcatgggattgcatcttagctgttaaaacttctagattgaaatttgacagccagggttacatattggggacttttaaagtgtctttccaaagagatttcattaaccgtttagattagaatatctttcccaattgttacagtgacatatatgctgcaatatttaacaactggagtattagccacatgggttattttttcaatctgtgttttgaatttttttattgtgtgttatttaaaatattacatatgcagctgggagaactacacctttgtgcacatagatttatatattaatttgtagaaaatattttctttatatatttccttaccatacaaggtgccttgttcatcaggaaaacttttgttttgtattttgacaagaaaggcaccttcagagtttctttttaagtatagttgacaagtgtataaatgttacacttactttcagagttctttttagatctaaagaagtcagttcaaaaatggaaatcaacaatgttaggagaaatctgaattctgttaagttagtaagtattatgtatagcatctgtttttaaccatttccattcttatccctagtgtatcagttgatcacactaagaaagcttaaagattgagcatttgaaataaatgctctttataaatgattagatttttgaagggatattgaaatcattgcgctgtgatttcatctgtgatgtgaaaaatcaatttattatccttggtgctttcccccccaccaatgcacaaataattgtgaacagcttgaaatgacttaaactgtaatccaaatgggacaatctgataagaatttcatgcattggtagttaaataacttaaattgctaaagctttagcttgaaatttatgtttagaaaaactattgatttcccatggtatgaatataactattgtaattcttcaaatgagactcttctcaccttaaatagtcatatattaattaacttataggaaataagcatactatatgttagctgttttaaaaggtaccagatgtaagagtcataaatatatgcaattaaagaagttcatagatttcacatgaatgtaaatgtgttatatggagacatgtcttgtaaacagttgaatgtatgtaagttttctgtttgtgaaaatgtagttaatgtactcactgtggaggtcataaggaagctactttttttttaaagtggaacctaattaaaatatttccagaatcaaaaaaaat

SEQ ID NO: 66373 - DNA, 5693 bp, Homo sapiens
  misc_feature (4156)..(4156): n is a, c, g, or t
gagggcggggaagaggcgtgacggagattcctgaggtgtagtagcctgaggttcccttatgtggccctatagctgttactgaaggaagtagcctacgtccacgcctacaactgaagtctcttgacaaacacctcacccctgcctccgggatgaaagggggtaacctagacctgaatgggcttgaccatctcacaactgctcgcgtgacgaccgcattcgtggcaggtaagaagattgctgtatcaactcaagaaagcagtaacttcactgtctttgtattttgaattgcaacaacaactttgatatcaacaatgaagcaatgatatctaagaacaaaagagtatttgccaacagtcatcataatatcaagtgattgtataagcagaaacaagctgtcacagacctgtgcgtcagctaatatatggagaatgctttcttctgatactatttacttagaggcagttttaatataaatcatttcaattatatctacatcaaataaaataaaaatgagtgaagcccccagattcttcgttggaccagaagatacagaaataaatcctggaaattatcgacatttcttccaccatgcagatgaagacgatgaggaggaagatgattctccaccagaaaggcagattgtggttggaatatgttccatggcaaagaaatccaaatccaaaccaatgaaggaaattcttgaacggatctccttatttaaatatatcacagtagtagtatttgaagaggaggttattttgaatgaaccagtggaaaactggcctttatgtgattgtcttatttctttccattctaaaggatttccactggacaaagcggttgcctatgcaaaactcaggaatccatttgtaatcaatgacttgaatatgcagtatctcatacaagataggagagaagtatatagtattcttcaagctgaaggtattttacttcctcgttatgctattttgaaccgtgacccaaataatcccaaagaatgtaatctgattgaaggggaagatcatgtagaagtaaatggggaagtttttcaaaagccatttgtagaaaagccagtcagtgcagaagatcacaatgtttacatttattacccaacttctgctggtggtggaagtcaaagactctttagaaagattggcagtagaagtagtgtttattctccagaaagcaatgtacgaaaaacaggctcatatatatatgaagagtttatgcccacagatggtactgatgttaaggtttatacagtgggtccagattatgcccatgctgaagctcgaaaatctccagcacttgatggcaaggtggaacgagacagtgaaggaaaagaagtaagataccctgttattctcaatgcacgagagaaattaattgcttggaaagtctgccttgcttttaagcaaacagtttgtggctttgatttgttacgggccaatggacagtcctatgtctgtgatgtcaatggcttcagttttgtgaaaaattccatgaagtattatgatgactgtgcaaaaatacttggaaatattgtaatgcgagaacttgctccacaatttcatattccatggtcaatacccttagaagctgaagatatcccaattgtaccaactacatctggaactatgatggaacttagatgtgtcatagctgttatacgtcatggggatcgaacaccaaaacaaaaaatgaaaatggaagtgagacatcagaaattttttgatctttttgaaaagtgtgatggatataaatcagggaaattaaaactcaaaaaaccaaaacagttacaggaagtgctagatattgcacgacagcttcttatggagctagggcaaaataatgattctgaaattgaagaaaacaagccaaaacttgaacaacttaagactgtattagagatgtatggtcatttttctggaataaatcgtaaggttcagttgacctatctccctcatggttgtcctaaaacatctagtgaagaggaggacagccgaagagaagaaccatctttacttttggttctaaaatggggaggtgaattaactcctgcaggcagggtccaggctgaagaacttggaagagccttcaggtgtatgtatcctggaggtcaaggagattatgcaggatttcctggttgtggtttacttagattacatagcacctacagacatgacctcaaaatatatgcctctgatgaaggacgagtccagatgactgcagctgcttttgcaaaggggcttttagctttggaaggagagcttacacccattcttgttcaaatggtgaaaagtgcaaatatgaacggtcttttggatagtgatagtgactctctgagcagttgtcagcaacgtgtgaaggcaaggcttcatgaaatacttcagaaagacagagattttactgctgaagattatgaaaagcttactccatctggaagcatttctcttatcaaatcaatgcatttaattaaaaaccctgtgaagacctgtgataaagtttattccttaattcagagtttgacttctcaaatcagacatcgaatggaagatcctaaatcatcagatattcagctttaccatagtgaaacattggagcttatgctacgtagatggtccaagttagagaaagactttaaaacaaagaatggaagatatgatattagtaaaatccctgacatatatgactgtataaaatatgatgtccagcataatggttccttgaaattagaaaacacaatggaattatataggctttcgaaggcattagcagatattgttatccctcaggaatatggtataactaaagctgaaaaactggagattgccaaaggctactgtactcctctggttagaaaaattcgctcagaccttcagaggacacaagatgatgacactgtaaataaacttcatcctgtgtattctagaggtgttctgtctcctgaacgtcatgttcgtactagattatattttaccagtgaaagtcatgtacattctttgctgtctattcttcgctatggtgccttatgcaataccaatgattctcagaatgaagatggaggaatggtgaaggagatggaatcaaaggatgaacagtggaaacgagctatggattatttaaacgttgtcaatgagctcaactacatgactcagattgttatcatgctttatgaggatcctaataaggatctttcctcagaagaacgctttcatgttgaattacactttagtccgggagccaaaggttgtgaagaagacaaaaatttgccatctggctatggatatagaccagcttccagagagaatgaaggcaggagaccttttaaaattgataatgatgatgaaccacatacttctaaaagagatgaagttgatcgagctgtgatattgtttaaaccaatggtatcagagccaattcatatacacaggaagtctccacttccaagatctaggaagacggctacaaatgatgttgtatctgaaaatgctaattacctgagaacaccaagaactcttgtggaacagaagcagaatcctactgtagggtctcactgtgcgggcctgtttagcacctcggtgctcgggggttcttcaagcgcacctaacctacaggattatgctcgtactcatcgtaaaaagctgacctcttctggctgcatagatgacgccacacgcggttctgctgttaaaaggttttctatctcatttgctcgacacccaaccaatggctttgaattgtattccatggtgccatctatttgtcctctagaaactcttcataatgccctatctttaaagcaagtggatgaatttcttgcttccattgcttctccatcatctgacgttccacggaagaccgctgaaatttcctctacagctttacgttccagtccaataatgagaaaaaaagtatctttaaatacgtatacacctgcaaagatcctcccaacaccaccagctaccttaaagagcactaaagcaagcagcaaaccagctacaagtggaccttctagtgcagttgttcctaatacctcatctcggaaaaagaatataactagcaaaacagaaacgcatgaacacaaaaaaaacactgggaaaaagaaatgaaatcttagcagaagctggaactttttatacttataaaaatagtntgttcttatgtttctccttatgcatttatgtgttcacttaaaaatgtttttaaatctaaggttttctttgtttatgttcaggtaaggaactgttgtcatgatctggaaatgtttaaaacaatgtttgttagcattctgtgagcagcaaaacttatagtgataaaaatcgattgttgttaatatgatgtttaccatgtgcacatagtaatgaaaaggaacataaaagcccagcaggctcgtaccaaagtcacagcagtaatgctatgtactgcagagtctgatgagctggcctttgtgcacacttttattttcatgggattgcatcttagctgttaaaacttctagattgaaatttgacagccagggttacatattggggacttttaaagtgtctttccaaagagatttcattaaccgtttagattagaatatctttcccaattgttacagtgacatatatgctgcaatatttaacaactggagtattagccacatgggttattttttcaatctgtgttttgaatttttttattgtgtgttatttaaaatattacatatgcagctgggagaactacacctttgtgcacatagatttatatattaatttgtagaaaatattttctttatatatttccttaccatacaaggtgccttgttcatcaggaaaacttttgttttgtattttgacaagaaaggcaccttcagagtttctttttaagtatagttgacaagtgtataaatgttacacttactttcagagttctttttagatctaaagaagtcagttcaaaaatggaaatcaacaatgttaggagaaatctgaattctgttaagttagtaagtattatgtatagcatctgtttttaaccatttccattcttatccctagtgtatcagttgatcacactaagaaagcttaaagattgagcatttgaaataaatgctctttataaatgattagatttttgaagggatattgaaatcattgcgctgtgatttcatctgtgatgtgaaaaatcaatttattatccttggtgctttcccccccaccaatgcacaaataattgtgaacagcttgaaatgacttaaactgtaatccaaatgggacaatctgataagaatttcatgcattggtagttaaataacttaaattgctaaagctttagcttgaaatttatgtttagaaaaactattgatttcccatggtatgaatataactattgtaattcttcaaatgagactcttctcaccttaaatagtcatatattaattaacttataggaaataagcatactatatgttagctgttttaaaaggtaccagatgtaagagtcataaatatatgcaattaaagaagttcatagatttcacatgaatgtaaatgtgttatatggagacatgtcttgtaaacagttgaatgtatgtaagttttctgtttgtgaaaatgtagttaatgtactcactgtggaggtcataaggaagctactttttttttaaagtggaacctaattaaaatatttccagaatcaaaaaaaat

SEQ ID NO: 66374 - DNA, 1939 bp, Homo sapiens
  misc_feature (402)..(402): n is a, c, g, or t
attttcttctgttattatgaatattcgtagggtcactaaattataagaaactttctatgatgttaagagataattggcaggaaattattaaattaacatgtttgtttattttttttcagcctctacagctttacgttccagtccaataatgagaaaaaaagtatctttaaatacgtatacacctgcaaagatcctcccaacaccaccagctaccttaaagagcactaaagcaagcagcaaaccagctacaagtggaccttctagtgcagttgttcctaatacctcatctcggaaaaagaatataactagcaaaacagaaacgcatgaacacaaaaaaaacactgggaaaaagaaatgaaatcttagcagaagctggaactttttatacttataaaaatagtntgttcttatgtttctccttatgcatttatgtgttcacttaaaaatgtttttaaatctaaggttttctttgtttatgttcaggtaaggaactgttgtcatgatctggaaatgtttaaaacaatgtttgttagcattctgtgagcagcaaaacttatagtgataaaaatcgattgttgttaatatgatgtttaccatgtgcacatagtaatgaaaaggaacataaaagcccagcaggctcgtaccaaagtcacagcagtaatgctatgtactgcagagtctgatgagctggcctttgtgcacacttttattttcatgggattgcatcttagctgttaaaacttctagattgaaatttgacagccagggttacatattggggacttttaaagtgtctttccaaagagatttcattaaccgtttagattagaatatctttcccaattgttacagtgacatatatgctgcaatatttaacaactggagtattagccacatgggttattttttcaatctgtgttttgaatttttttattgtgtgttatttaaaatattacatatgcagctgggagaactacacctttgtgcacatagatttatatattaatttgtagaaaatattttctttatatatttccttaccatacaaggtgccttgttcatcaggaaaacttttgttttgtattttgacaagaaaggcaccttcagagtttctttttaagtatagttgacaagtgtataaatgttacacttactttcagagttctttttagatctaaagaagtcagttcaaaaatggaaatcaacaatgttaggagaaatctgaattctgttaagttagtaagtattatgtatagcatctgtttttaaccatttccattcttatccctagtgtatcagttgatcacactaagaaagcttaaagattgagcatttgaaataaatgctctttataaatgattagatttttgaagggatattgaaatcattgcgctgtgatttcatctgtgatgtgaaaaatcaatttattatccttggtgctttcccccccaccaatgcacaaataattgtgaacagcttgaaatgacttaaactgtaatccaaatgggacaatctgataagaatttcatgcattggtagttaaataacttaaattgctaaagctttagcttgaaatttatgtttagaaaaactattgatttcccatggtatgaatataactattgtaattcttcaaatgagactcttctcaccttaaatagtcatatattaattaacttataggaaataagcatactatatgttagctgttttaaaaggtaccagatgtaagagtcataaatatatgcaattaaagaagttcatagatttcacatgaatgtaaatgtgttatatggagacatgtcttgtaaacagttgaatgtatgtaagttttctgtttgtgaaaatgtagttaatgtactcactgtggaggtcataaggaagctactttttttttaaagtggaacctaattaaaatatttccagaatcaaaaaaaat

SEQ ID NO: 66375 - DNA, 479 bp, Homo sapiens
gagggcggggaagaggcgtgacggagattcctgaggtgtagtagcctgaggttcccttatgtggccctatagctgttactgaaggaagtagcctacgtccacgcctacaactgaagtctcttgacaaacacctcacccctgcctccgggatgaaagggggtaacctagacctgaatgggcttgaccatctcacaactgctcgcgtgacgaccgcattcgtggcaggtgagggcccaaaaccggaggagaaccggagatgcggaacctgatcatgccagggttgaggcggctgctgggcttctgctttgtctcctgtgctctgcagaccctaaacacatgctccaccgaggggcttgtgctggagagaatgacagcctgggcgtggagtgacagtacagctttgagggtcctttcgcgccttgatttctcctcctgctcccccatggcttccctttttcatttcttgggttcgagacgcc

SEQ ID NO: 66376 - DNA, 238 bp, Homo sapiens
ttaatgaaatgaatcttttatgggaggtggcatcaattcaagttaataaagtatagatgcttatcttgagataatacagaatatgttaataatatgtgttcttaggatttccactggacaaagcggttgcctatgcaaaactcaggaatccatttgtaatcaatgacttgaatatgcagtatctcatacaagataggtgagtggtgaagttggctgaattaagggaaggaaaaataac

SEQ ID NO: 66377 - DNA, 501 bp, Homo sapiens
actttgatatcaacaatgaagcaatgatatctaagaacaaaagagtatttgccaacagtcatcataatatcaagtgattgtataagcagaaacaagctgtcacagacctgtgcgtcagctaatatatggagaatgctttcttctgatactatttacttagaggcagttttaatataaatcatttcaattatatctacatcaaataaaataaaaatgagtgaagcccccagattcttcgttggaccagaagatacagaaataaatcctggaaattatcgacatttcttccaccatgcagatgaagacgatgaggaggaagatgattctgtaagttgtttgtttttcctttggcgagagaagaccaatacagtataggctttttactaatcactgttagtctttttttgttggaaaatttttgaactgaaaaagtatattttgtttcatgactgatgttgttgaatctatgatgaatcaataaatacagttatgggtcaaacc

SEQ ID NO: 66378 - DNA, 258 bp, Homo sapiens
cctacagacatgacctcaaaatatatgcctctgatgaaggacgagtccagatgactgcagctgcttttgcaaaggtataaataatttttttttagaattattagagtttttaatctaatattgtatcttaaaacatttttggctgggcgcagtggcttacacctgtaatcctagcactttgggaggctgaggtggtcagatcactagagcccaggagtttgagacaagcctgggcaacatgacgaaacctgtctctgc

SEQ ID NO: 66379 - DNA, 523 bp, Homo sapiens
ggttgccttatatgtggtaagagccatgttaattgcatgctgcatgaattcccaatgtgaatggaagaacacccgttgtgtatgtattttctctaactcccatcagggtctcactgtgcgggcctgtttagcacctcggtgctcgggggttcttcaagcgcacctaacctacaggattatgctcgtactcatcgtaaaaagctgacctcttctggctgcatagatggtatgtgcacacatgcacacacagattcatacctacacccatgcacacacccatgagcagtatttctcaaaggcaaatctaaggccactgactgattcgagtgaaatcctgtcatcttttgcctaaatgactatcagtgctctctgttatctacaacttggatccatgtttcatcagacagttaattgtagttagatttacagtacttgtacaataagtttgttgaaatggaaaacttagaagagtattatgtgtattcttcttttagataattgattatattataaagagcaagcg

SEQ ID NO: 66380 - DNA, 951 bp, Homo sapiens
gagggcggggaagaggcgtgacggagattcctgaggtgtagtagcctgaggttcccttatgtggccctatagctgttactgaaggaagtagcctacgtccacgcctacaactgaagtctcttgacaaacacctcacccctgcctccgggatgaaagggggtaacctagacctgaatgggcttgaccatctcacaactgctcgcgtgacgaccgcattcgtggcaggtaagaagattgctgtatcaactcaagaaagcagtaacttcactgtctttgtattttgaattgcaacaacaactttgatatcaacaatgaagcaatgatatctaagaacaaaagagtatttgccaacagtcatcataatatcaagtgattgtataagcagaaacaagctgtcacagacctgtgcgtcagctaatatatggagaatgctttcttctgatactatttacttagaggcagttttaatataaatcatttcaattatatctacatcaaataaaataaaaatgagtgaagcccccagattcttcgttggaccagaagatacagaaataaatcctggaaattatcgacatttcttccaccatgcagatgaagacgatgaggaggaagatgattctccaccagaaaggcagattgtggttggaatatgttccatggcaaagaaatccaaatccaaaccaatgaaggaaattcttgaacggatctccttatttaaatatatcacagtagtagtatttgaagaggaggttattttgaatgaaccagtggaaaactggcctttatgtgattgtcttatttctttccattctaaaggtattaaggggagtgggggagaaactcctttatcctctctgtttataaaactaatacatattaattgtagactatgagataaaacagaaaaataaacattaactcactttcatggacaggtaaaaaaaaaac

SEQ ID NO: 66381 - DNA, 5759 bp, Homo sapiens
  misc_feature (4222)..(4222): n is a, c, g, or t
gagggcggggaagaggcgtgacggagattcctgaggtgtagtagcctgaggttcccttatgtggccctatagctgttactgaaggaagtagcctacgtccacgcctacaactgaagtctcttgacaaacacctcacccctgcctccgggatgaaagggggtaacctagacctgaatgggcttgaccatctcacaactgctcgcgtgacgaccgcattcgtggcaggtaagaagattgctgtatcaactcaagaaagcagtaacttcactgtctttgtattttgaattgcaacaacaactttgatatcaacaatgaagcaatgatatctaagaacaaaagagtatttgccaacagtcatcataatatcaagtgattgtataagcagaaacaagctgtcacagacctgtgcgtcagctaatatatggagaatgctttcttctgatactatttacttagaggcagttttaatataaatcatttcaattatatctacatcaaataaaataaaaatgagtgaagcccccagattcttcgttggaccagaagatacagaaataaatcctggaaattatcgacatttcttccaccatgcagatgaagacgatgaggaggaagatgattctccaccagaaaggcagattgtggttggaatatgttccatggcaaagaaatccaaatccaaaccaatgaaggaaattcttgaacggatctccttatttaaatatatcacagtagtagtatttgaagaggaggttattttgaatgaaccagtggaaaactggcctttatgtgattgtcttatttctttccattctaaaggatttccactggacaaagcggttgcctatgcaaaactcaggaatccatttgtaatcaatgacttgaatatgcagtatctcatacaagataggagagaagtatatagtattcttcaagctgaaggtattttacttcctcgttatgctattttgaaccgtgacccaaataatcccaaagaatgtaatctgattgaaggggaagatcatgtagaagtaaatggggaagtttttcaaaagccatttgtagaaaagccagtcagtgcagaagatcacaatgtttacatttattacccaacttctgctggtggtggaagtcaaagactctttagaaagattggcagtagaagtagtgtttattctccagaaagcaatgtacgaaaaacaggctcatatatatatgaagagtttatgcccacagatggtactgatgttaaggtttatacagtgggtccagattatgcccatgctgaagctcgaaaatctccagcacttgatggcaaggtggaacgagacagtgaaggaaaagaagtaagataccctgttattctcaatgcacgagagaaattaattgcttggaaagtctgccttgcttttaagcaaacagtttgtggctttgatttgttacgggccaatggacagtcctatgtctgtgatgtcaatggcttcagttttgtgaaaaattccatgaagtattatgatgactgtgcaaaaatacttggaaatattgtaatgcgagaacttgctccacaatttcatattccatggtcaatacccttagaagctgaagatatcccaattgtaccaactacatctggaactatgatggaacttagatgtgtcatagctgttatacgtcatggggatcgaacaccaaaacaaaaaatgaaaatggaagtgagacatcagaaattttttgatctttttgaaaagtgtgatggatataaatcagggaaattaaaactcaaaaaaccaaaacagttacaggaagtgctagatattgcacgacagcttcttatggagctagggcaaaataatgattctgaaattgaagaaaacaagccaaaacttgaacaacttaagactgtattagagatgtatggtcatttttctggaataaatcgtaaggttcagttgacctatctccctcatggttgtcctaaaacatctagtgaagaggaggacagccgaagagaagaaccatctttacttttggttctaaaatggggaggtgaattaactcctgcaggcagggtccaggctgaagaacttggaagagccttcaggtgtatgtatcctggaggtcaaggagattatgcaggatttcctggttgtggtttacttagattacatagcacctacagacatgacctcaaaatatatgcctctgatgaaggacgagtccagatgactgcagctgcttttgcaaaggggcttttagctttggaaggagagcttacacccattcttgttcaaatggtgaaaagtgcaaatatgaacggtcttttggatagtgatagtgactctctgagcagttgtcagcaacgtgtgaaggcaaggcttcatgaaatacttcagaaagacagagattttactgctgaagattatgaaaagcttactccatctggaagcatttctcttatcaaatcaatgcatttaattaaaaaccctgtgaagacctgtgataaagtttattccttaattcagagtttgacttctcaaatcagacatcgaatggaagatcctaaatcatcagatattcagctttaccatagtgaaacattggagcttatgctacgtagatggtccaagttagagaaagactttaaaacaaagaatggaagatatgatattagtaaaatccctgacatatatgactgtataaaatatgatgtccagcataatggttccttgaaattagaaaacacaatggaattatataggctttcgaaggcattagcagatattgttatccctcaggaatatggtataactaaagctgaaaaactggagattgccaaaggctactgtactcctctggttagaaaaattcgctcagaccttcagaggacacaagatgatgacactgtaaataaacttcatcctgtgtattctagaggtgttctgtctcctgaacgtcatgttcgtactagattatattttaccagtgaaagtcatgtacattctttgctgtctattcttcgctatggtgccttatgcaatgaatcaaaggatgaacagtggaaacgagctatggattatttaaacgttgtcaatgagctcaactacatgactcagattgttatcatgctttatgaggatcctaataaggatctttcctcagaagaacgctttcatgttgaattacactttagtccgggagccaaaggttgtgaagaagacaaaaatttgccatctggctatggatatagaccagcttccagagagaatgaaggcaggagaccttttaaaattgataatgatgatgaaccacatacttctaaaagagatgaagttgatcgagctgtgatattgtttaaaccaatggtatcagagccaattcatatacacaggaagtctccacttccaagatctaggaagacggctacaaatgatgaagagagccccctgagtgtgtctagcccagagggtactggtacctggctgcattataccagtggtgtgggtactgggcgtcgaagacgcagatcaggggaacaaatcacttcttcccctgtctcccccaaatcattggctttcacatccagtatttttggctcatggcaacaggttgtatctgaaaatgctaattacctgagaacaccaagaactcttgtggaacagaagcagaatcctactgtagggtctcactgtgcgggcctgtttagcacctcggtgctcgggggttcttcaagcgcacctaacctacaggattatgctcgtactcatcgtaaaaagctgacctcttctggctgcatagatggctttgaattgtattccatggtgccatctatttgtcctctagaaactcttcataatgccctatctttaaagcaagtggatgaatttcttgcttccattgcttctccatcatctgacgttccacggaagaccgctgaaatttcctctacagctttacgttccagtccaataatgagaaaaaaagtatctttaaatacgtatacacctgcaaagatcctcccaacaccaccagctaccttaaagagcactaaagcaagcagcaaaccagctacaagtggaccttctagtgcagttgttcctaatacctcatctcggaaaaagaatataactagcaaaacagaaacgcatgaacacaaaaaaaacactgggaaaaagaaatgaaatcttagcagaagctggaactttttatacttataaaaatagtntgttcttatgtttctccttatgcatttatgtgttcacttaaaaatgtttttaaatctaaggttttctttgtttatgttcaggtaaggaactgttgtcatgatctggaaatgtttaaaacaatgtttgttagcattctgtgagcagcaaaacttatagtgataaaaatcgattgttgttaatatgatgtttaccatgtgcacatagtaatgaaaaggaacataaaagcccagcaggctcgtaccaaagtcacagcagtaatgctatgtactgcagagtctgatgagctggcctttgtgcacacttttattttcatgggattgcatcttagctgttaaaacttctagattgaaatttgacagccagggttacatattggggacttttaaagtgtctttccaaagagatttcattaaccgtttagattagaatatctttcccaattgttacagtgacatatatgctgcaatatttaacaactggagtattagccacatgggttattttttcaatctgtgttttgaatttttttattgtgtgttatttaaaatattacatatgcagctgggagaactacacctttgtgcacatagatttatatattaatttgtagaaaatattttctttatatatttccttaccatacaaggtgccttgttcatcaggaaaacttttgttttgtattttgacaagaaaggcaccttcagagtttctttttaagtatagttgacaagtgtataaatgttacacttactttcagagttctttttagatctaaagaagtcagttcaaaaatggaaatcaacaatgttaggagaaatctgaattctgttaagttagtaagtattatgtatagcatctgtttttaaccatttccattcttatccctagtgtatcagttgatcacactaagaaagcttaaagattgagcatttgaaataaatgctctttataaatgattagatttttgaagggatattgaaatcattgcgctgtgatttcatctgtgatgtgaaaaatcaatttattatccttggtgctttcccccccaccaatgcacaaataattgtgaacagcttgaaatgacttaaactgtaatccaaatgggacaatctgataagaatttcatgcattggtagttaaataacttaaattgctaaagctttagcttgaaatttatgtttagaaaaactattgatttcccatggtatgaatataactattgtaattcttcaaatgagactcttctcaccttaaatagtcatatattaattaacttataggaaataagcatactatatgttagctgttttaaaaggtaccagatgtaagagtcataaatatatgcaattaaagaagttcatagatttcacatgaatgtaaatgtgttatatggagacatgtcttgtaaacagttgaatgtatgtaagttttctgtttgtgaaaatgtagttaatgtactcactgtggaggtcataaggaagctactttttttttaaagtggaacctaattaaaatatttccagaatcaaaaaaaat

SEQ ID NO: 66382 - DNA, 2350 bp, Homo sapiens
  misc_feature (813)..(813): n is a, c, g, or t
ttgccccctttctcacttccaggaagagagccccctgagtgtgtctagcccagagggtactggtacctggctgcattataccagtggtgtgggtactgggcgtcgaagacgcagatcaggggaacaaatcacttcttcccctgtctcccccaaatcattggctttcacatccagtatttttggctcatggcaacaggttgtatctgaaaatgctaattacctgagaacaccaagaactcttgtggaacagaagcagaatcctactgtagggtctcactgtgcgggcctgtttagcacctcggtgctcgggggttcttcaagcgcacctaacctacaggattatgctcgtactcatcgtaaaaagctgacctcttctggctgcatagatggctttgaattgtattccatggtgccatctatttgtcctctagaaactcttcataatgccctatctttaaagcaagtggatgaatttcttgcttccattgcttctccatcatctgacgttccacggaagaccgctgaaatttcctctacagctttacgttccagtccaataatgagaaaaaaagtatctttaaatacgtatacacctgcaaagatcctcccaacaccaccagctaccttaaagagcactaaagcaagcagcaaaccagctacaagtggaccttctagtgcagttgttcctaatacctcatctcggaaaaagaatataactagcaaaacagaaacgcatgaacacaaaaaaaacactgggaaaaagaaatgaaatcttagcagaagctggaactttttatacttataaaaatagtntgttcttatgtttctccttatgcatttatgtgttcacttaaaaatgtttttaaatctaaggttttctttgtttatgttcaggtaaggaactgttgtcatgatctggaaatgtttaaaacaatgtttgttagcattctgtgagcagcaaaacttatagtgataaaaatcgattgttgttaatatgatgtttaccatgtgcacatagtaatgaaaaggaacataaaagcccagcaggctcgtaccaaagtcacagcagtaatgctatgtactgcagagtctgatgagctggcctttgtgcacacttttattttcatgggattgcatcttagctgttaaaacttctagattgaaatttgacagccagggttacatattggggacttttaaagtgtctttccaaagagatttcattaaccgtttagattagaatatctttcccaattgttacagtgacatatatgctgcaatatttaacaactggagtattagccacatgggttattttttcaatctgtgttttgaatttttttattgtgtgttatttaaaatattacatatgcagctgggagaactacacctttgtgcacatagatttatatattaatttgtagaaaatattttctttatatatttccttaccatacaaggtgccttgttcatcaggaaaacttttgttttgtattttgacaagaaaggcaccttcagagtttctttttaagtatagttgacaagtgtataaatgttacacttactttcagagttctttttagatctaaagaagtcagttcaaaaatggaaatcaacaatgttaggagaaatctgaattctgttaagttagtaagtattatgtatagcatctgtttttaaccatttccattcttatccctagtgtatcagttgatcacactaagaaagcttaaagattgagcatttgaaataaatgctctttataaatgattagatttttgaagggatattgaaatcattgcgctgtgatttcatctgtgatgtgaaaaatcaatttattatccttggtgctttcccccccaccaatgcacaaataattgtgaacagcttgaaatgacttaaactgtaatccaaatgggacaatctgataagaatttcatgcattggtagttaaataacttaaattgctaaagctttagcttgaaatttatgtttagaaaaactattgatttcccatggtatgaatataactattgtaattcttcaaatgagactcttctcaccttaaatagtcatatattaattaacttataggaaataagcatactatatgttagctgttttaaaaggtaccagatgtaagagtcataaatatatgcaattaaagaagttcatagatttcacatgaatgtaaatgtgttatatggagacatgtcttgtaaacagttgaatgtatgtaagttttctgtttgtgaaaatgtagttaatgtactcactgtggaggtcataaggaagctactttttttttaaagtggaacctaattaaaatatttccagaatcaaaaaaaat

SEQ ID NO: 66383 - DNA, 853 bp, Homo sapiens
atctatataagtgccaataggcagctctgctaccaccactctccatatcccttcctctcaggctcttgactacttggaactaggctcttatgtgtgcctttgtttcccatcagactgtcaagaagaggaaagggaggaaacctagcagaggaaagtgtaattttggtttatgactcttaaccccctagaaagacagaagcttaaaatctgtgaagaaagaggttaggagtagatattgattactatcataattcagcacttaactatgagccaggcatcatactaaacttcacctacattatctcacttagtcctttatcatccttaaaacaattctgtgacatacatattatctcattttacacaaagggaagtcgggcatggtggctcatgcctgtaatctcagcactttgggaggctgaggcagaaggattacctgaggcaaggagtttgagaccagcttagccaacatagtaagacccccatctctttaaaaaaaaaaaaaaaaaaaaacttttaaaacggggtgcggggcacaggccggtaattcccaccaattttggggggcttgaaattaggacgatcctttgggcgccgaaatttaaagttaggctttgggaatttgtacgtacttgttttcggggaaacaaaaaaaaggggggggggttaaatattcctcgagggccatgttccttaccctcttttgcaaagggcctagggggctgtattaaagaaggcggcgtgttaaagttgtgtcggaatcggttggttttggaggccttctgggtgtatggacacccgattaggcggtaaaatgttttggactttgtgatgtgtagtatttgatatcgga

SEQ ID NO: 66384 - DNA, 1697 bp, Homo sapiens
tgatcagaggatccccactgtgttatacctgcactgttgtaaatacctgcactgttgttcatacctgcactgttgttcatacctgcactgttgttcataccagggcctggacatcaggccccccatgtccattatgcccgcctaaaaactctacgtagcttagaggctacagactctgcctttgataaccctgattactggcatagcaggcttttccccaaggctaatgcccagagaacgtaactcctgctccctgtggcactcagggagcatttaatggcagctagtgcctttagagggtaccgtcttctccctattccctctctctcccaggtcccagccccttttccccagtcccagacaattccattcaatctttggaggcttttaaacattttgacacaaaattcttatggtatgtagccagctgtgcactttcttctctttcccaaccccaggaaaggttttccttattttgtgtgctttcccagtcccattcctcagcttcttcacaggcactcctggagatatgaaggattactctccatatcccttcctctcaggctcttgactacttggaactaggctcttatgtgtgcctttgtttcccatcagactgtcaagaagaggaaagggaggaaacctagcagaggaaagtgtaattttggtttatgactcttaaccccctagaaagacagaagcttaaaatctgtgaagaaagaggttaggagtagatattgattactatcataattcagcacttaactatgagccaggcatcatactaaacttcacctacattatctcacttagtcctttatcatccttaaaacaattctgtgacatacatattatctcattttacacaaagggaagtcgggcatggtggctcatgcctgtaatctcagcactttgggaggctgaggcagaaggattacctgaggcaaggagtttgagaccagcttagccaacatagtaagacccccatctctttaaaaaaaaaaaaaaaaaaaaaaaaaaaaaactttagaactgggtgcagtggctcatgcctgtaatcccagccagcactttgggaggctgagatgggaagatcacttgagcccagaattagagataagcctatggaaacatagcaagacactgtctctacaggggaaaaaaaaaaaagaaactgagccttaaagagatgaaataaattaagcagtagatccaggatgcaaaatcctcccaattcctgtgcatgtgctcttattgtaaggtgccaagaaaaactgatttaagttacagcccttgtttaaggggcactgtttcttgtttttgcactgaatcaagtctaaccccaacagccacatcctcctatacctagacatctcatctcaggaagtggtggtgggggtagtcagaaggaaaaataactggacatctttgtgtaaaccataatccacatgtgccgtaaatgatcttcactccttatccgagggcaaattcacaaggatccccaagatccacttttagaagccattctcatccagcagtgagaagcttccaggtaggacagaaaaaagatccagcttcagctgcacacctctgtccccttggatggggaactaagggaaaacgtctgttgtatcactgaagttttttgttttgtttttatacgtgtctgaataaaaatgccaaagttttttttcagc

SEQ ID NO: 66385 - DNA, 2628 bp, Homo sapiens
  misc_feature (2460)..(2460): n is a, c, g, or t
acgcggagatagcgcctaccattcccagcgccacagtctgctgactcctgttaccccactctccccacccgggttagaggaagaggatgtcaacggttatgtcatgccagatacacacctcaaaggtactccctcctcccgggaaggcaccctttcttcagtgggtctcagttctgtcctgggtactgaagaagaagatgaagatgaggagtatgaatacatgaaccggaggagaaggcacagtccacctcatccccctaggccaagttcccttgaggagctgggttatgagtacatggatgtggggtcagacctcagtgcctctctgggcagcacacagagttgcccactccaccctgtacccatcatgcccactgcaggcacaactccagatgaagactatgaatatatgaatcggcaacgagatggaggtggtcctgggggtgattatgcagccatgggggcctgcccagcatctgagcaagggtatgaagagatgagagcttttcaggggcctggacatcaggccccccatgtccattatgcccgcctaaaaactctacgtagcttagaggctacagactctgcctttgataaccctgattactggcatagcaggcttttccccaaggctaatgcccagagaacgtaactcctgctccctgtggcactcagggagcatttaatggcagctagtgcctttagagggtaccgtcttctccctattccctctctctcccaggtcccagccccttttccccagtcccagacaattccattcaatctttggaggcttttaaacattttgacacaaaattcttatggtatgtagccagctgtgcactttcttctctttcccaaccccaggaaaggttttccttattttgtgtgctttcccagtcccattcctcagcttcttcacaggcactcctggagatatgaaggattactctccatatcccttcctctcaggctcttgactacttggaactaggctcttatgtgtgcctttgtttcccatcagactgtcaagaagaggaaagggaggaaacctagcagaggaaagtgtaattttggtttatgactcttaaccccctagaaagacagaagcttaaaatctgtgaagaaagaggttaggagtagatattgattactatcataattcagcacttaactatgagccaggcatcatactaaacttcacctacattatctcacttagtcctttatcatccttaaaacaattctgtgacatacatattatctcattttacacaaagggaagtcgggcatggtggctcatgcctgtaatctcagcactttgggaggctgaggcagaaggattacctgaggcaaggagtttgagaccagcttagccaacatagtaagacccccatctctttaaaaaaaaaaaaaaaaaaaaaaaaaaaaaactttagaactgggtgcagtggctcatgcctgtaatcccagccagcactttgggaggctgagatgggaagatcacttgagcccagaattagagataagcctatggaaacatagcaagacactgtctctacaggggaaaaaaaaaaaagaaactgagccttaaagagatgaaataaattaagcagtagatccaggatgcaaaatcctcccaattcctgtgcatgtgctcttattgtaaggtgccaagaaaaactgatttaagttacagcccttgtttaaggggcactgtttcttgtttttgcactgaatcaagtctaaccccaacagccacatcctcctatacctagacatctcatctcaggaagtggtggtgggggtagtcagaaggaaaaataactggacatctttgtgtaaaccataatccacatgtgccgtaaatgatcttcactccttatccgagggcaaattcacaaggatccccaagatccacttttagaagccattctcatccagcagtgagaagcttccaggtaggacagaaaaaagatccagcttcagctgcacacctctgtccccttggatggggaactaagggaaaacgtctgttgtatcactgaagttttttgttttgtttttatacgtgtctgaataaaaatgccaaagttttttttcagcaaaaaaaaaaaaaaaaaaaaaaaaaaaaaaaaaaaaggggggggggggtaaagagagatgatatccccggaggggggcgcccaaggttaagcgcgggatccccagaggttttctgggcaccaagggcgggccccatatagaggggagcgccagaatattataagagcgcaaggcgacagggcgcgcgggggtatacaaaacggcgtgggagaggggggagaaaccgggctaaacggtgggagagcatctttggggagagaggagacccttataacatctgggggggggggacaacaatatattgtgtgggggaaacaacatttaacccctatatagagagaagattttaaaagnggctctaagagcggagaactttatcacaaattttttcaacggggtcgtaaatccgtggtgtgggtgaaaaacaatcgcgtccggaaataattggttgcggggtatcgagaaaaggtttttgggtcaacacggaagatatgttattttggacgacatttttttccgagg

SEQ ID NO: 66386 - DNA, 2051 bp, Homo sapiens
acgcggagatagcgcctaccattcccagcgccacagtctgctgactcctgttaccccactctccccacccgggttagaggaagaggatgtcaacggttatgtcatgccagatacacacctcaaaggtactccctcctcccgggaaggcaccctttcttcagtgggtctcagttctgtcctgggtactgaagaagaagatgaagatgaggagtatgaatacatgaaccggaggagaaggcacagtccacctcatccccctaggccaagttcccttgaggagctgggttatgagtacatggatgtggggtcagacctcagtgcctctctgggcagcacacagagttgcccactccaccctgtacccatcatgcccactgcaggcacaactccagatgaagactatgaatatatgaatcggcaacgagatggaggtggtcctgggggtgattatgcagccatgggggcctgcccagcatctgagcaagggtatgaagagatgagagcttttcaggggcctggacatcaggccccccatgtccattatgcccgcctaaaaactctacgtagcttagaggctacagactctgcctttgataaccctgattactggcatagcaggcttttccccaaggctaatgcccagagaacgtaactcctgctccctgtggcactcagggagcatttaatggcagctagtgcctttagagggtaccgtcttctccctattccctctctctcccaggtcccagccccttttccccagtcccagacaattccattcaatctttggaggcttttaaacattttgacacgaaaggttttccttattttgtgtgctttcccagtcccattcctcagcttcttcacaggcactcctggagatatgaaggattactctccatatcccttcctctcaggctcttgactacttggaactaggctcttatgtgtgcctttgtttcccatcagactgtcaagaagaggaaagggaggaaacctagcagaggaaagtgtaattttggtttatgactcttaaccccctagaaagacagaagcttaaaatctgtgaagaaagaggttaggagtagatattgattactatcataattcagcacttaactatgagccaggcatcatactaaacttcacctacattatctcacttagtcctttatcatccttaaaacaattctgtgacatacatattatctcattttacacaaagggaagtcgggcatggtggctcatgcctgtaatctcagcactttgggaggctgaggcagaaggattacctgaggcaaggagtttgagaccagcttagccaacatagtaagacccccatctctttaaaaaaaaaaaaaaaaaaaaaaaaaaaaaactttagaactgggtgcagtggctcatgcctgtaatcccagccagcactttgggaggctgagatgggaagatcacttgagcccagaattagagataagcctatggaaacatagcaagacactgtctctacaggggaaaaaaaaaaaagaaactgagccttaaagagatgaaataaattaagcagtagatccaggatgcaaaatcctcccaattcctgtgcatgtgctcttattgtaaggtgccaagaaaaactgatttaagttacagcccttgtttaaggggcactgtttcttgtttttgcactgaatcaagtctaaccccaacagccacatcctcctatacctagacatctcatctcaggaagtggtggtgggggtagtcagaaggaaaaataactggacatctttgtgtaaaccataatccacatgtgccgtaaatgatcttcactccttatccgagggcaaattcacaaggatccccaagatccacttttagaagccattctcatccagcagtgagaagcttccaggtaggacagaaaaaagatccagcttcagctgcacacctctgtccccttggatggggaactaagggaaaacgtctgttgtatcactgaagttttttgttttgtttttatacgtgtctgaataaaaatgccaaagttttttttcagc

SEQ ID NO: 66387 - DNA, 1176 bp, Homo sapiens
gcgtcgacgtcaagaagaggaaagggaggaaacctagcagaggaaagtgtaattttggaactaggctcttatgtgtgcctttgtttcccatcagactgtcaagaagaggaaagggaggaaacctagcagaggaaagtgtaattttggtttatgactcttaaccccctagaaagacagaagcttaaaatctgtgaagaaagaggttaggagtagatattgattactatcataattcagcacttaactatgagccaggcatcatactaaacttcacctacattatctcacttagtcctttatcatccttaaaacaattctgtgacatacatattatctcattttacacaaagggaagtcgggcatggtggctcatgcctgtaatctcagcactttgggaggctgaggcagaaggattacctgaggcaaggagtttgagaccagcttagccaacatagtaagacccccatctctttaaaaaaaaaaaaaaaaaaaaaaaaaaaaaactttagaactgggtgcagtggctcatgcctgtaatcccagccagcactttgggaggctgagatgggaagatcacttgagcccagaattagagataagcctatggaaacatagcaagacactgtctctacaggggaaaaaaaaaaaagaaactgagccttaaagagatgaaataaattaagcagtagatccaggatgcaaaatcctcccaattcctgtgcatgtgctcttattgtaaggtgccaagaaaaactgatttaagttacagcccttgtttaaggggcactgtttcttgtttttgcactgaatcaagtctaaccccaacagccacatcctcctatacctagacatctcatctcaggaagtggtggtgggggtagtcagaaggaaaaataactggacatctttgtgtaaaccataatccacatgtgccgtaaatgatcttcactccttatccgagggcaaattcacaaggatccccaagatccacttttagaagccattctcatccagcagtgagaagcttccaggtaggacagaaaaaagatccagcttcagctgcacacctctgtccccttggatggggaactaagggaaaacgtctgttgtatcactgaagttttttgttttgtttttatacgtgtctgaataaaaatgccaaagttttttttcagc

SEQ ID NO: 66388 - DNA, 1402 bp, Homo sapiens
acgcggagatagcgcctaccattcccagcgccacagtctgctgactcctgttaccccactctccccacccgggttagaggaagaggatgtcaacggttatgtcatgccagatacacacctcaaaggtactccctcctcccgggaaggcaccctttcttcagtgggtctcagttctgtcctgggtactgaagaagaagatgaagatgaggagtatgaatacatgaaccggaggagaaggcacagtccacctcatccccctaggccaagttcccttgaggagctgggttatgagtacatggatgtggggtcagacctcagtgcctctctgggcagcacacagagttgcccactccaccctgtacccatcatgcccactgcaggcacaactccagatgaagactatgaatatatgaatcggcaacgagatggaggtggtcctgggggtgattatgcagccatgggggcctgcccagcatctgagcaagggtatgaagagatgagagcttttcaggggcctggacatcaggccccccatgtccattatgcccgcctaaaaactctacgtagcttagaggctacagactctgcctttgataaccctgattactggcatagcaggcttttccccaaggctaatgcccagagaacgtaactcctgctccctgtggcactcagggagcatttaatggcagctagtgcctttagagggtaccgtcttctccctattccctctctctcccaggtcccagccccttttccccagtcccagacaattccattcaatctttggaggcttttaaacattttgacacaaaattcttatggtatgtagccagctgtgcactttcttctctttcccaaccccaggaaaggttttccttattttgtgtgctttcccagtcccattcctcagcttcttcacaggcactcctggagatatgaaggattactctccatatcccttcctctcaggctcttgactacttggaactaggctcttatgtgtgcctttgtttcccatcagactgtcaagaagaggaaagggaggaaacctagcagaggaaagtgtaattttggtttatgactcttaaccccctagaaagacagaagcttaaaatctgtgaagaaagaggttaggagtagatattgattactatcataattcagcacttaactatgagccaggcatcatactaaacttcacctacattatctcacttagtcctttatcatccttaaaacaattctgtgacatacatattatctcattttacacaaagggaagtcttactatgttggctaagctggtctcaaactccttgcctcaggtaatccttctgcctcagcctcccaaagtgctgagattacaggcatgagccaccatgcccgacttcccgtcgac

SEQ ID NO: 66389 - DNA, 1011 bp, Homo sapiens
attctgtgacatacatattgttttaaggatgataaaggactaagtgagataatgtaggtgaagtttagtatgatgcctggctcatagttaagtgctgaattatgatagtaatcattatctcacttagtcctttatcatccttaaaacaattctgtgacatacatattatctcattttacacaaagggaagtcgggcatggtggctcatgcctgtaatctcagcactttgggaggctgaggcagaaggattacctgaggcaaggagtttgagaccagcttagccaacatagtaagacccccatctctttaaaaaaaaaaaaaaaaaaaaaaaaaaaaaactttagaactgggtgcagtggctcatgcctgtaatcccagccagcactttgggaggctgagatgggaagatcacttgagcccagaattagagataagcctatggaaacatagcaagacactgtctctacaggggaaaaaaaaaaaagaaactgagccttaaagagatgaaataaattaagcagtagatccaggatgcaaaatcctcccaattcctgtgcatgtgctcttattgtaaggtgccaagaaaaactgatttaagttacagcccttgtttaaggggcactgtttcttgtttttgcactgaatcaagtctaaccccaacagccacatcctcctatacctagacatctcatctcaggaagtggtggtgggggtagtcagaaggaaaaataactggacatctttgtgtaaaccataatccacatgtgccgtaaatgatcttcactccttatccgagggcaaattcacaaggatccccaagatccacttttagaagccattctcatccagcagtgagaagcttccaggtaggacagaaaaaagatccagcttcagctgcacacctctgtccccttggatggggaactaagggaaaacgtctgttgtatcactgaagttttttgttttgtttttatacgtgtctgaataaaaatgccaaagttttttttcagc

SEQ ID NO: 66390 - DNA, 696 bp, Homo sapiens
agtatagagaaaggcagcacacttaatatttggcattgatctggctcatgcctgtaatcccagccagcactttgggaggctgagatgggaagatcacttgagcccagaattagagataagcctatggaaacatagcaagacactgtctctacaggggaaaaaaaaaaaagaaactgagccttaaagagatgaaataaattaagcagtagatccaggatgcaaaatcctcccaattcctgtgcatgtgctcttattgtaaggtgccaagaaaaactgatttaagttacagcccttgtttaaggggcactgtttcttgtttttgcactgaatcaagtctaaccccaacagccacatcctcctatacctagacatctcatctcaggaagtggtggtgggggtagtcagaaggaaaaataactggacatctttgtgtaaaccataatccacatgtgccgtaaatgatcttcactccttatccgagggcaaattcacaaggatccccaagatccacttttagaagccattctcatccagcagtgagaagcttccaggtaggacagaaaaaagatccagcttcagctgcacacctctgtccccttggatggggaactaagggaaaacgtctgttgtatcactgaagttttttgttttgtttttatacgtgtctgaataaaaatgccaaagttttttttcagc

SEQ ID NO: 66391 - DNA, 803 bp, Homo sapiens
acgcggagatagcgcctaccattcccagcgccacagtctgctgactcctgttaccccactctccccacccgggttagaggaagaggatgtcaacggttatgtcatgccagatacacacctcaaaggtactccctcctcccgggaaggcaccctttcttcagtgggtctcagttctgtcctgggtactgaagaagaagatgaagatgaggagtatgaatacatgaaccggaggagaaggcacagtccacctcatccccctaggccaagttcccttgaggagctgggttatgagtacatggatgtggggtcagacctcagtgcctctctgggcagcacacagagttgcccactccaccctgtacccatcatgcccactgcaggcacaactccagatgaagactatgaatatatgaatcggcaacgagatggaggtggtcctgggggtgattatgcagccatgggggcctgcccagcatctgagcaagggtatgaagagatgagagcttttcaggggcctggacatcaggccccccatgtccattatgcccgcctaaaaactctacgtagcttagaggctacagactctgcctttgataaccctgattactggcatagcaggcttttccccaaggctaatgcccagagaacgtaactcctgctccctgtggcactcagggagcatttaatggcagctagtgcctttagagggtaccgtcttctccctattccctctctctcccaggtcccagccccttttccccagcctgggcgacaagaacaagactccacctcaaaaaaaaaaa

SEQ ID NO: 66392 - DNA, 2106 bp, Homo sapiens
acgcggagatagcgcctaccattcccagcgccacagtctgctgactcctgttaccccactctccccacccgggttagaggaagaggatgtcaacggttatgtcatgccagatacacacctcaaaggtactccctcctcccgggaaggcaccctttcttcagtgggtctcagttctgtcctgggtactgaagaagaagatgaagatgaggagtatgaatacatgaaccggaggagaaggcacagtccacctcatccccctaggccaagttcccttgaggagctgggttatgagtacatggatgtggggtcagacctcagtgcctctctgggcagcacacagagttgcccactccaccctgtacccatcatgcccactgcaggcacaactccagatgaagactatgaatatatgaatcggcaacgagatggaggtggtcctgggggtgattatgcagccatgggggcctgcccagcatctgagcaagggtatgaagagatgagagcttttcaggggcctggacatcaggccccccatgtccattatgcccgcctaaaaactctacgtagcttagaggctacagactctgcctttgataaccctgattactggcatagcaggcttttccccaaggctaatgcccagagaacgtaactcctgctccctgtggcactcagggagcatttaatggcagctagtgcctttagagggtaccgtcttctccctattccctctctctcccaggtcccagccccttttccccagtcccagacaattccattcaatctttggaggcttttaaacattttgacacaaaattcttatggtatgtagccagctgtgcactttcttctctttcccaaccccaggaaaggttttccttattttgtgtgctttcccagtcccattcctcagcttcttcacaggcactcctggagatatgaaggattactctccatatcccttcctctcaggctcttgactacttggaactaggctcttatgtgtgcctttgtttcccatcagactgtcaagaagaggaaagggaggaaacctagcagaggaaagtgtaattttggtttatgactcttaaccccctagaaagacagaagcttaaaatctgtgaagaaagaggttaggagtagatattgattactatcataattcagcacttaactatgagccaggcatcatactaaacttcacctacattatctcacttagtcctttatcatccttaaaacaattctgtgacatacatattatctcattttacacaaagggaagtcgggcatggtggctcatgcctgtaatctcagcactttgggaggctgaggcagaaggattacctgaggcaaggagtttgagaccagcttagccaacatagtaagacccccatctctttaaaaaaaaaaaaaaaaaaaaaaaaaaaaaactttagaactgggtgcagtggctcatgcctgtaatcccagccagcactttgggaggctgagatgggaagatcacttgagcccagaattagagataagcctatggaaacatagcaagacactgtctctacaggggaaaaaaaaaaaagaaactgagccttaaagagatgaaataaattaagcagtagatccaggatgcaaaatcctcccaattcctgtgcatgtgctcttattgtaaggtgccaagaaaaactgatttaagttacagcccttgtttaaggggcactgtttcttgtttttgcactgaatcaagtctaaccccaacagccacatcctcctatacctagacatctcatctcaggaagtggtggtgggggtagtcagaaggaaaaataactggacatctttgtgtaaaccataatccacatgtgccgtaaatgatcttcactccttatccgagggcaaattcacaaggatccccaagatccacttttagaagccattctcatccagcagtgagaagcttccaggtaggacagaaaaaagatccagcttcagctgcacacctctgtccccttggatggggaactaagggaaaacgtctgttgtatcactgaagttttttgttttgtttttatacgtgtctgaataaaaatgccaaagttttttttcagc

SEQ ID NO: 66393 - DNA, 1444 bp, Homo sapiens
acgcggagatagcgcctaccattcccagcgccacagtctgctgactcctgttaccccactctccccacccgggttagaggaagaggatgtcaacggttatgtcatgccagatacacacctcaaaggtactccctcctcccgggaaggcaccctttcttcagtgggtctcagttctgtcctgggtactgaagaagaagatgaagatgaggagtatgaatacatgaaccggaggagaaggcacagtccacctcatccccctaggccaagttcccttgaggagctgggttatgagtacatggatgtggggtcagacctcagtgcctctctgggcagcacacagagttgcccactccaccctgtacccatcatgcccactgcaggcacaactccagatgaagactatgaatatatgaatcggcaacgagatggaggtggtcctgggggtgattatgcagccatgggggcctgcccagcatctgagcaagggtatgaagagatgagagcttttcaggggcctggacatcaggccccccatgtccattatgcccgcctaaaaactctacgtagcttagaggctacagactctgcctttgataaccctgattactggcatagcaggcttttccccaaggctaatgcccagagaacgtaactcctgctccctgtggcactcagggagcatttaatggcagctagtgcctttagagggtaccgtcttctccctattccctctctctcccaggtcccagccccttttccccagtcccagacaattccattcaatctttggaggcttttaaacattttgacacaaaattcttatggtatgtagccagctgtgcactttcttctctttcccaaccccaggaaaggttttccttattttgtgtgctttcccagtcccattcctcagcttcttcacaggcactcctggagatatgaaggattactctccatatcccttcctctcaggctcttgactacttggaactaggctcttatgtgtgcctttgtttcccatcagactgtcaagaagaggaaagggaggaaacctagcagaggaaagtgtaattttggtttatgactcttaaccccctagaaagacagaagcttaaaatctgtgaagaaagaggttaggagtagatattgattactatcataattcagcacttaactatgagccaggcatcatactaaacttcacctacattatctcacttagtcctttatcatccttaaaacaattctgtgacatacatattatctcattttacacaaagggaagtcgggcatggtggctcatgcctgtaatctcagcactttgggaggctgaggcagaaggattacctgaggcaaggagtttgagaccagcttagccaacatagtaagacccccatctctttaaaaaaaaaaaaaaaaaaaaagttttgccctatagtgagtc

SEQ ID NO: 66394 - DNA, 1280 bp, Homo sapiens
acgcggagatagcgcctaccattcccagcgccacagtctgctgactcctgttaccccactctccccacccgggttagaggaagaggatgtcaacggttatgtcatgccagatacacacctcaaaggtactccctcctcccgggaaggcaccctttcttcagtgggtctcagttctgtcctgggtactgaagaagaagatgaagatgaggagtatgaatacatgaaccggaggagaaggcacagtccacctcatccccctaggccaagttcccttgaggagctgggttatgagtacatggatgtggggtcagacctcagtgcctctctgggcagcacacagagttgcccactccaccctgtacccatcatgcccactgcaggcacaactccagatgaagactatgaatatatgaatcggcaacgagatggaggtggtcctgggggtgattatgcagccatgggggcctgcccagcatctgagcaagggtatgaagagatgagagcttttcaggggcctggacatcaggccccccatgtccattatgcccgcctaaaaactctacgtagcttagaggctacagactctgcctttgataaccctgattactggcatagcaggcttttccccaaggctaatgcccagagaacgtaactcctgctccctgtggcactcagggagcatttaatggcagctagtgcctttagagggtaccgtcttctccctattccctctctctcccaggtcccagccccttttccccagtcccagacaattccattcaatctttggaggcttttaaacattttgacacaaaattcttatggtatgtagccagctgtgcactttcttctctttcccaaccccaggaaaggttttccttattttgtgtgctttcccagtcccattcctcagcttcttcacaggcactcctggagatatgaaggattactctccatatcccttcctctcaggctcttgactacttggaactaggctcttatgtgtgcctttgtttcccatcagactgtcaagaagaggaaagggaggaaacctagcagaggaaagtgtaattttggtttatgactcttaaccccctagaaagacagaagcttaaaatctgtgaagaaagaggttaggagtagatattgattactatcataattcagcacaaaacaaaaaacttcagtgatacaacagacgttttcccttagttccccataacaaggggacagaggtgtgcagctgaagctggatcttttttctgtcctaccatacgctt

SEQ ID NO: 66395 - DNA, 1073 bp, Homo sapiens
cttaccttagacaacatgaaagaactcacaatggagagaaaccatatgaatgtcatctatgtggaaaagccttctctcattgttctcaccttagacaacatgagcgaagtcacaatggagagaaaccacatggatgtcatctatgtgggaaagcattcactgaatcttctgtgcttaaacgacatgagagaattcacactggagagaaaccatatgagtgccatgtatgtgggaaagccttcactgaatcttctgacctcagacgacatgagagaactcacactggagaaaaaccatatgaatgccatctatgcggaaagccttcaatcactcttctgtccttagacgacatgagagaactcacactggagagaaaccatatgaatgcaatatatgtggtaaagccttcaatagaagttacaactttagacttcatagaagagttcacactggagagaaaccatatgtatgtcctctatgtgggaaagcctttagtaaattttttaaccttagacaacatgagagaactcacactaaaaaagcaatgaatatgtaagaatcatcagctgtagcgttaacactaaatacaccaaggacaaacatactacaggaatattatgtctgtaatcagtgtggaaaagcctttatttatatttaccactttgctcaacctaaatgaattcaaggtagagagaatccagatgtatttaatgtttatggcacaaacttcagactctaggctgaccatatacaacgtgagagaatgaaactatagatcaaaggaatgtggaggagtcttcatccacagctctgttaaataaatgggagaaatcacatcacgaaaattctgtgcctgtcgtcagtgtgaaaatgcctttgctgataatttatcctctaaacaaatgagtaaaatccacaggcaagcaaccatatgtctgtaattgctgtgcactctcattcagctaagcaccaattttggtgtgtgcaagaaaattcattataaggtaactgataaaaacaggaaatatgtgaaaatattttttattaggtggatgaggcctcttgaacaattc

SEQ ID NO: 66396 - DNA, 517 bp, Homo sapiens
cttaccttagacaacatgaaagaactcacaatggagagaaaccatatgaatgtcatctatgtggaaaagccttctctcattgttctcaccttagacaacatgagcgaagtcacaatggagagaaaccacatggatgtcatctatgtgggaaagcattcactgaatcttctgtgcttaaacgacatgagagaattcacactggagagaaaccatatgagtgccatgtatgtgggaaagccttcactgaatcttctgacctcagacgacatgagagaactcacactggagaaaaaccatatgaatgccatctatgcggaaagccttcaatcactcttctgtccttagacgacatgagagaactcacactggagagaaaccatatgaatgcaatatatgtggtaaagccttcaatagaagttacaactttagacttcatagaagagttcacactggagagaaaccaacacaggcaacatagtctgaaggtgtagaaatgacgggatcctctagatgcgac

SEQ ID NO: 66397 - DNA, 2421 bp, Homo sapiens
  misc_feature (263)..(263): n is a, c, g, or t
  misc_feature (507)..(507): n is a, c, g, or t
  misc_feature (856)..(856): n is a, c, g, or t
  misc_feature (997)..(997): n is a, c, g, or t
  misc_feature (1243)..(1243): n is a, c, g, or t
  misc_feature (1245)..(1245): n is a, c, g, or t
  misc_feature (1322)..(1323): n is a, c, g, or t
  misc_feature (1345)..(1345): n is a, c, g, or t
  misc_feature (1380)..(1380): n is a, c, g, or t
  misc_feature (1433)..(1433): n is a, c, g, or t
gttgttctgaattttaataaatttcttttcaatataatttacaatattatttccatggcaacccataatttggtctattaaagtttgactgcacacaggaacttcacaaagatctcatcctgtgaccagaatctttccactaggaggccttattccttcatcaaataggtctctcctctgtatctcgaagccagtctaatgtagtccacagaaaaatgctttgtgtccttatatagagtgggaaaacccactgccactcttcngtagacaaaacagaggagtgtatgccattattttctctggagcaagataagaaatttgcctttttttcccagaaccccaaattcagtttgtaaatgtcttaattcacataaggaaattggcagataaatgttactcaataaaaaactgtgttgagtagtaaattaattcagtgatgtctccagattaatcccagtgccactgattaaaattagtgactcacaaagtttacaaaatatatatacnttttttttaatccctgaactatatatagccttactgacttcatttcaagataaacttaattctttgattatatctaatgttggactaaaagaagcatgaggggaaactatggcagaggttactagaagtgttaaggattttttaccatgaaagaatatataccttcatttgagcaaatatgatgctgtcagtttcactgatgtgttacagttattttggtgtcttttgccaactatattagattagtgcctttgtagacttatctttcatccatgatcttttcataaagaagtgtttccatggaagagacatttttgttgttgttgttgttgtttttgttttgttttgntttttacaaaatctgctgagagaaactgttctttgccctttatgtggaatatggccagctagggtaatacttcagtgcaacagagacacttaacatttgattgatgaacaacagaacctttgttcaagtggatgaagtggngtctgggtagaagtaatcaaatcttgaaagatcaaactaacctttatggtaatagcccttctttgtcctactttggtgatggttactattcaattattgtactaattagaaaaaaaataggaatatttattatgcaaattattctttcctatacttattgctatcattaagtatacaatataatagcacaattttaacattcaataaatttttatggccaggtgtggtggcagtggctcatgcctntnaccccagcatttatggaggccaaggctggctgatagcttgagctcatgagtttgggaccagcctgggcaacatggcnnaatcctgtccctacgagaaatncaaaaattagccaggtgtcatggtgtgctcctgtngtctcagctactcgggaggctgagttgggaggatggctggagcctgggaggcngatgttgcagtgagccaagattatgccactgcaccccagcctgggtgatagagccagactttgtctcaaaaataaataagtaaataaataattttaatttgttttctttttaaattgattactctttgggtgatttagttcattactgtatttacttaggaagtgcttgaaattaggatccaaagtttgttttggttttgctttttttaacctttcccaggggtaattatctctagtagctgagaaagtaaaaagttaacaagaaagttaatgcaaacaagaccagaactctgtcaccatgctgtaagaaactcaagctatgtgtagcagctacgtggaggagtcctggccaacaggctcagctgggctcccagggataattagtgtccactatcagcccagttgggttttctgaagccccagtcaacacctgactgtatgagagatcccaagggagaattaagcctttccccaaattcctgacaccccaaatcatgagcaaaataaaaatttattatattaagccagtgagtttgggagtgcaacaatagataagcagaacaaaatttggtacctggaagtgggatcctggcttaacaaaacctacaatacaggcattggttttgagaccaggtggtgttcagaaaccccgtgagttttgaggaggctgtcggtgagtttgaaagaaaatgagaaagatgtgattggaagcaggggggcagggcacctcgctatgtagtggtgaaaagtctggcgtcactgttgctgtggtaatgagggatgcaggaaatgtacctaatgaattcaatgatctagctaaaaaaaattgtcctcaggaaagtagctaaccctgctgagccttgtccacacttggacctgacttaggtgatgagatctagaccttaagccagagcctgatgaggtaattggatgaagcttctggggatcttgagagaagataagtgtatttacatttggagggaatatt

SEQ ID NO: 66398 - DNA, 434 bp, Homo sapiens
gcaggacccagtgctgaacacacacagggtaaatggtggtgtgtgaaagaccgagaaagaagctgttaattctgggcttccaatggtcagaaatgcagagatgaagggaatttgagctgagtcttgaagggtttagtaaaagggtcactgtcaaggtgaagaaaagccagtattgagggtgctgtatttgggtgagccatgcagagttagaggtgggctgaggcagagtggcctccaggagaaggtgagaggcgtgcccaggtgccaggcttgatcggcaggctgtgctcaggcccatttttctgattcattttttcttttccgcccaccctactgctgctgctttgcaaacaacacataaatctccttaggttagctgggatcccctgaaggcagtgcccactgcggcatagagaatgaagcggtgggcctta

SEQ ID NO: 66399 - DNA, 167 bp, Homo sapiens
tttggaaaaagaaatatgtgtatgcacatacagaaaaaagtctgggaggaaacagacccaactctttattgtgttactataagagagtttcagattggggaagaggggtgaagggatcatggagacattcagattttatgagcaggtatgtcttgctttataacagg

SEQ ID NO: 66400 - DNA, 233 bp, Homo sapiens
tattagaatttcctccactactgctaacactgattggaaaagcatttattaagaacccaattgatcaggcacttatgagcagactcttgacgcaaccctttagtgtcagtgaatatattttggggagcttactttattatggcatttgggttttttggtttttttttaatatgagagtcaaattgttctgattgaagctaactcagagacattattaaagcataaaacttatt

SEQ ID NO: 66401 - DNA, 441 bp, Homo sapiens
ctctttatagtcaggataactctgcagagtggatgaaattctaatgagtggaatttgttttctagtgctttactgataaggttaaccagatggtgaaatgtaatagcttggacgatgtagttttgatatacagtacatcatttctggaatgatcatgaaaaagcaaaatcaacagagctttttagattctcttttttggtcatgaaattgaaaatatacctttttagagagaaatatctcatcatagttctcctgacatttaaactgcttggctatatatttttaaaagaagacaaactgttttgaaaatgttgctataaatttttatatattgtagatttaaaaaatctcatttaaaaaatgaaagattatgaaattttttatgtcacctgaaggaatgtctatgatgtgaatttcaaataaaatagattttcttcaata

SEQ ID NO: 66402 - DNA, 370 bp, Homo sapiens
gctcttgtggttctgtggccatgagggagggacacagctagagaggacagtggggactgctgactttcaaaccctgactttcaaaactgttttaagtttttcatgcaaggtaggtgtttattgtcagaaatgttggggagggaatttctgagtctggtagaaaattggactagaaatacctccattctgtacctcatatctgcagagtagtttacaggtgtaactccacaatgaaggtgtatgaaatgtataggcattttcttatttcctctacaatttgtattattcttctatgtagcttttccctgtaaaattatacatcactgtgtctgttaccaagctaaagtaaaattactctgttttgaatgga

SEQ ID NO: 66403 - DNA, 3610 bp, Homo sapiens
  misc_feature (1)..(1): n is a, c, g, or t
  misc_feature (3)..(3): n is a, c, g, or t
  misc_feature (586)..(586): n is a, c, g, or t
  misc_feature (1180)..(1180): n is a, c, g, or t
  misc_feature (1555)..(1555): n is a, c, g, or t
  misc_feature (1871)..(1871): n is a, c, g, or t
  misc_feature (1918)..(1918): n is a, c, g, or t
  misc_feature (2255)..(2255): n is a, c, g, or t
ngnggttttttattttgacctattagtatggttaaatttatggatttactatttattgaaccatttttgcatcttggaatgagccctaattgatctgttattattttaatgtcctgatggatttactttgccaatgcatatatttaggatttttatatcaatattcataagagatcagtctatagttgttgttttttaatgtgttttgtctagttttggtattcgcatctgattgctttgtaaaaacaattgagaagtttcatttctttttctgagtttcggaacagattaaatagccaagtattatttattcttcagttaccaaattcatatttactaaacactatgtgctaggaattggactggatgctgagtaatcagtagtaaacaaaacagatatggttcctgccgtgatattgcttggctcattaaggaaaatgacattaatgaagaaactacacatatgtaattataaatcatgcaagaaaaggacaggatgctttgagataatatcattgaagatctttagattgtgctttttatgcatttgagtaaatgactattgagtacatacatatacactaanagctaattatttaaattagtatgtattgatttggtgtgtaattagggctgtggtgggtgcattagtaaaatgaggtcttcataattacacaaaatataaaataatggcaatagtagctaccattgtaggaggtagctgcatcattttttaatggtagaaattaagacaggttaagtagacacttttagtctaacatgttcaattgtatacactctttggaagtctctcttaagattatagtaaaagaataaggatataaatccacaaagatcaagaggaggtgagaggaagatatagctgaaatcagtatttgggaaactagaaaggagatgggcaagtaataaatgatttcatgaattagagaatgctgaaagctgaagagaggtaacccagcaaggagcaagcagattctttccacagaatctggaaaagttttaggaattgggggtatcaagtacaggacttctgaagtcaagaattacaggatggggtgggaatagaagggttggttgatggtctttatcattttgataccctggaaccccttctccactcccacacacccagacaactactctctcctctaccttgacngaagactgaaggtttatacccaggagactaggaggctccagatggttaaggtgggggtgaagcacctaaatgaaaatgaggattgagtgaaagtcaggtcaacatgctgaacctagagcggttgtctttttttgattggcttccaaactatcaggcttacgtgcccctcaacaaaacattaacggattcttagctggggaaacttaccagcccatggcacagtatttaacagatatgaactatggaaattcacccgattgaacagttggatccatcagatcacctggagagtacagccgctggtcaggaagcattgttcacgtaccacagcttctagtcaacttttatttcattttttgagacagggcctcactntgtcacccagattgaagtgcagtagcgccatcataactcactatagcgttgaactcctgggctcaagccatcctcccacctcagcctcctgggtagccgggaatacaggcgtatgcccccacgtccagctgatatttttattttttgtagagatggggtctcactatgttgccaggctggtcttcaactcctgggcttgtgatcttcctgccttggcttcccaaagtactgggattacaggtgtgagccactggtgcctggccctagtcagcttttaaatgcctcacatttgagtataaatgtacagccaagggtngcctgccatagaatgaaagtctctaatgaaaaagagaccaagtaggnaataaaaggagctgagtataaatagatttacttcagggaacagaagaaacttcaacaaataaaactagtatctttaaagagaagatattacatctgtgaaagatgaaaaagtttatataaaaaaaactgctgcgacagaagaaatttcttaaaaatttaatacaaggtttagataataaagctgaagaattctccccaaaaaaccagaagagcacaagaattagaaaataagagtgaaatgatgagaaaattagagggccaaccaaggaggttcttcatctaatacagtggaaggaaactatctgtgtcccagaactgaagaaggtgactttctagnttgaaagggcctattaagcgccctgatcaataaaacagaaacaaacaaaaaataaacaaaacttcattgtaccgaatgtatagttccaaaaggaacaagaccagattgattttcttcctacttctgaaaagaagaatgggggcagagaacgaggtgctagctcttaaactgcattttaacaaattcagggaaaaaggaaaccttaactttaaattgtatgcaagtgctgttaggtatccccagtgggaagttccaacagttctgtgacaaagataaagttgcgcagaagaagcatatttcaggtatctccagcaacttattcatatccagaatcagccctatccaaagagagaagtctcgtatacctggctaagactgaggagccatatggtatcaaggaaggagaaagcagaatgagaaagtgcctgggtggggcatgggggaggcagagatcttagtgctaataaagtactcctagaaatgagtgcataaccttggaaagcaagggttgtgtctctaagaggcaagcagagctggcaataaaggccctcctgaaccagattacatttggagattagataaggaacaaggcaccatattataaaacagcagtcctctgatttaggaacagagggaaccctaaagaaacatgacaagtgccctacccctccctacaccctgaatcttctgataacagtccaggataattcatctcattcagacatgtataacaaaaatagtatgtacagcatccatacagtgactgtctggtagatggtattttttatgttttatgttggttttttgttcttttatattatttttattattgaagatataattcacatgccataaaattcaccattttaaagtgtacagttgactggcttttaatttattcccaaggttgtgcaatgatcaccactaccaattgcattattgaccctagtgctttacttttccttatgttcactccatgaccctatgcagttcctttcattaaagtgacagagatatttccctactccttgactttgtgtttggctatgtgacttgctaaggtaaaagtgataacatatcagtttcaagcctaagccttaagaggccttgggtatttttatttgttctctttctatctgtgccatttccatgagaaaaacatgtctctgctagctcattggttgagggaagatgagagataggagagtgagggccaccccagctgagttaagctgaattcaatgaacactgtagagatgtgagtgataaaaaaatgattgtggttgtaagccagtgaacttcaggatggtctgttaataaacattagttaaccgaacagttatatgattaaaaat

SEQ ID NO: 66404 - DNA, 378 bp, Homo sapiens
  misc_feature (199)..(199): n is a, c, g, or t
gggacagcattctatgtgccttaagttaagaaaaatgaagaaatagggaaatatgctccaaaaaaaaaaaagaacaagacaatctcaattagaagccaaccctactgaaaggaagatatgtgatttacctaacaggacatttagaaggagtcataaagatgctcactgaggtaaggagtgcgatgcatgaacaaattgngaatatcaacaaagaggtagaaaatatttaaaatatcaaacagaaatcattgacctgaagaacacaatagccaaactaaaaaaattcagtagaggggtccaacagcagactagatcaagcagaagaaaggattagcaaacttgaagacagttcaatggaaatcatccaatctgaggaac

SEQ ID NO: 66405 - DNA, 324 bp, Homo sapiens
ggcttctagtggacagggaccggggatgataaacatcttgcactgctcttgatagactcacacaagatttgtcttgctcatattgtcctggaaaaaatgtctgtattgagaaatcctaaagagcctttaaagccaggctaagaagtttgatttttatcctaagtacagtgggaagctattggagagttgcaagctttaaaagacaatctctcaaagatcactttggctactgagtggagagtaaattgtaagggacaaaggtgaaagaggaacattcaataggaagctttttcagtgtccacaacagagatgacggtggcctag

SEQ ID NO: 66406 - DNA, 4734 bp, Homo sapiens
taagcaggagaatggcgtgaacccgggaagcggagcttgcagtgagccgagattgcgccactgcagtccgcagtccagcctgggcgacagagcgagactccgtctcaaaaaaaaaaaaaaaagattgcacagactgtttcctctccggtgcaatcccctgtcctttccacgcaaagataaccactagactgggtattctgctataacccccctccttttccttatggcttgcctcatatatgtgtattgctacacagtatattagttttgcatgtctttgaacttcctatgaatggagtcatggaggaaaaatgtcctgcaccttgctgttttcattcccctttatcccgagaggcagctctgcatcctgtggtacttcacagccttgtatgaatagagcgtcttttccttctcttttctgctgttgatggacatttcagttggttccagtgttttgctgttgcatacagttctgctgtaaactttcttgcacacatcaactggcacacatgcacacgaattctttagggtatagttaagacaatttttgagttacaggtatgcgtatctgctattttaccaagaaaagcagattgttgtttttccagctgtatgtaagaattccagtaacttcacatcctagccaacacttgatagaatcagaccttaaaatgcttaccaacattataaacttgaaatgtctgagtgattttaatttgtatttccctggtttccagtcatattgagcatcctttaatgagtttattggctatttgtatttcctctttatgaagggcctatataaatcttttgcttacttttcaatttgattgtctttttctagatttgtaagagttctagatactcatcttaaataatgtgtgttgcaaataccttctggcttgtggcttatcttttcacactttttatgattggttaaagattaatatgttgttaattttaacgattttatcctctctccttaaatgtatcagcctttatactttgagcttttatttgttagaaatctctcttggtcatttaggcagtctcctatacttactgttttctaaaagttttataattttgcttttcatatttaagttcttagtccgtgggtttggtgattgtgtagcataaagaaagagaccagatttacttgtttctgtaatacatcaccaggtgtcccagtgtcatctctggagaagtccagccttttctccactgatttgtgttgccagctatgtcaaagtgaaatttccgtaagagtgtgaatctgtttctaagctgttttgttctgttggtctctctgtctattccagtgcttcactgtctagctttaggataattgttgatagttgacttagcaggtcccctacctttttcttgtttttcaagagtgtcttgattagtggcactttattcttctttaaaatttttaaaatcagcttgtcttgttccacaaactaaccagctgggattacaggtatgagccaccgcacctggcccttgggcataaattgtaacataagtgtatgttcttcgacacatttaagagtggagtgatggtgtcataaaattaaataatgggatgttctaagtcccttaagctggacctttccaatctgtgcatcaaagctaattctgcattaaagtgcaaggacggctcacaaaccccatagttgcctgatatagattggcaggtgcattctcttggtttcgtttttattcctgctgaaatgtttaatgatcttgtgtggcgtcattctgttgccgattgtgtaagagagaagctggacctgggtggagacaggcttcttaggtggcctcagtgggctgttgggcatttatggttctgctggttgcagctgagatcttcagacagaatactcttctccttgaccagcgcttatctttcagattgtgaactaggcccagacaccattaccattcaccatctctaacattctcttattctttgactacataaggcactgtcgttctaggggaaacatgatagaggaaggaagttggttgcagaaaccattctttgaaagacttttttttttttttaacttagtcaattaaaatagtcctttaaggtgaacttagttctgagtttctggtccttttcccagatggaaaaggattttcaagaaaaaatcctgtcacttactgagcatgtgtgccggctcctttttggcacttccatcctcaccacaaccctataaaggagggagctcgtggcgaggcagcccaggtttctagataaggagagtctcgaggaggttccttaaccttcctgtggtggtttttctccattttttaaaatgaagaaacagaggccaagagaggttagggaatttgctcaaggtcgtgcagccagtggcagctgttctcactcggagttctgagagaggtaagcctcagaagccgggcatccattgtgtgtaacgtagtaacgtcttgcctgtgcatctagaaaggtacctgttatgttccgttcataggagaattgagaaaatattaatagtcacttcattttaagaactccagttgaaaaaggctagacagtcaatgtttgttcattgtttttctccattcttccccagcatgcgcgctctctcatgcacacgcacgcatgcgcacgtggctgagccaaagcctaagctgcgaattgagtttcgttaattcatgtggaggcagctgagagtgccacctggtcctgaagaaattgggatacttgtgggcacaaaggtggacctgagatcactggagccaagctggtggaagtgttgaccactgccgttggcagagagctgtcattactggtgcttcaggccacagctcagcaggctgtccttgttctgttttgttaagagcctagcagcatggctagcttgcaggcataatcccagagcctcttgctatctgcctgcaggaagtctctatgtgctccagcacactgaaggaatttggtgctcactttctcctgcttttgagctttggtcctgtgttattactaatccttagaggaagattttgactgtaaccactttcctgagtgctcttaaggcaggtccagaggattctcacagcgtgaaatgagaaaacgctcagcctcagaaaaatggaagttattcttttagtgccaaagtgtcattggaccacagtgcagcttggttaattcaggttaagacttagcccctggaacagtgtcaagccaaggcctgtgtggtttcatcatagatttgtaaaacaaaaaacacgtgtgttctggtaaattccaagcgcacattagtgcatacgtgtatgtgcaggagcactccctgtaagactcttgttctcatttcacactggcgcgtccccggggctggggaaatcattttcatttttgagagtaaccttaactaattaaatggatcaagggactctttgtgttttgttttcattttgttttgttttttactttaatgtacagataaattaagggaaataataattaccttgaataattttgattctcgtaactaattttccacctatgtgtgtttagctcaattttgaaatggttcactgaaagatttccaaatttcttatcactgaaactgagttatttcacttttatgactgttagtgactcctctgttttatgtatttctggtgcagtataattcttctatgtctgtgtgtctgtgatagatctcagttcaagttagcgtttcccgagcacccatcttgtgtcaggcactctgctaatgattgcgcaggttacaaggtttagagtggccacatcccctgttcacttgcagtttagagtccagtcggaggaaagggaggaggggaatcatgttatagacataacttgatatcctgcaggactcagtgatgtatgagcctcaaaaaggtcacagctgagtgagagagttggtaatcatggaaacaggcgcatcggaaactcgcttcctatgggtcagtaaagtgtgtatgaggtggtgtggatgacagcacatagagctggaggggtgggccagcagcaaccaggagaaggcgttccaggtgtctgcacccaaggagatcctggggtcagaggcaggacatgtgggaaaaaccattggtcccttttacccagggaaggactcaagaagccgaacgtggtaggagatggaggctcccaagccctggcagacgttacagcagcgctgagcactttcaggaccaggactccaaggtccagctctggaacgcccctctctgccctgactttggttccttcatcagcagaggggctcctgggctatgggctcaagtctgaagtcaccttaaagagaaatctctacctttctgttctccttcattgctgaggattttgacttgtgttgaaaagtttctgaagctttctgcagctggaaaatcaagcttttaaaaaagctcttgatgggccaggcttggtggctcacgcctgtaatcccagcactttaggaggccaaggcaggtggatcatgagatcaggagtttgagactagcctggtcagcatggtgaaacgccatccctactaaggatacaaaaattggccgggtgcggtggcgcgtgcctgtggttccagctgctcgggaggttgagggagaagaatcacttaaacccaggaggtggaggtgcagtgagctgagaccatgccactgcactccagcctgggcaacagagcaaggctctgttttgtttcgtttaaaaaa

SEQ ID NO: 66407 - DNA, 499 bp, Homo sapiens
ctgtgcgttagagtcatcgggagaacttgaaaatgccccaatgctggcctgtaccccagcaagtcagagcagaatccctagggtgggacatgggcatccaggccctgagaactactggactggatcaggactatgcccctagtgagagacgttgagagctgtcggtgtacagcagcacttcacactattagcacgctggagtcacatgaggaacttcagacacacagagcagaaacttgggtccaatttaattcatctggggtacaagtttccagtgtcccaggatgttaggacactaatatgcagccaaagtgggtggaagattgggctagaaaattggtgggaggtcgggatgttgaggcaaggagtattttttttgttcttttttgagatggaattttgctctgtcacccaggccgcagtgcagtgagctgagaccatgccactgcactccagcctgggcaacagagcaaggctctgttttgtttcgtttaaaaaa

SEQ ID NO: 66408 - DNA, 507 bp, Homo sapiens
tactactactaaattcgcggccgcgtcgacggcgttccaggtgtctgcacccaaggagatcctggggtcagaggcaggacatgtgggaaaaaccattggtcccttttacccagggaaggactcaagaagccgaacgtggtaggagatggaggctcccaagccctggcagacgttacagcagcgctgagcactttcaggaccaggactccaaggtccagctctggaacgcccctctctgccctgactttggttccttcatcagcagaggggctcctgggctatgggctcaagtctgaagtcaccttaaagagaaatctctacctttctgttctccttcattgctgaggcaggataatggtgtgaacccaggaggtggagcttgcggtgagacatgattgctcactgcaagcttgggtccaggtgtgttttgtgcagtgagctgagaccatgccactgcactccagcctgggcaacagagcaaggctctgttttgtttcgtttaaaaaa

SEQ ID NO: 66409 - DNA, 925 bp, Homo sapiens
  misc_feature (15)..(15): n is a, c, g, or t
tgtaccggtccggantcccgggatcacgggtggagctacccgttgggcttatgagtgacctggagtgacagctgagtcaccctgggtaagttctcagagtggtcaggatggcttgacctgcagaagatacccaaggtccaaaagcacaaggtctgcggaaagttctggttgtcggctgggcaccacggctcacacctataatcgagcactttgggaggccaagacaggaggatcacttgaggccaggagtctgagacaagcctaggcaacaaaacaagactctgtctctacaaaaagtttaagaaatgagccagacatggtggtgtatgcctgtagtcccagccactcagaaggctgaggcaggaggatcgcttgagaccaagagtttgagcctgcggtgagctgtgaatgcaccacggcactcaagcctgggcaatgtagcaagatcctgtctctacaagaaattttttaaaaatgagccaagtgtggtggtgcatgcctgtagttccagctactcaggacactgacgtaggagggttgcttgagactgagagttggaggctgcgatgagccatgaatgccccactgcactccagcctgggcgacagaacgagaccccatctcaaaaaaaataagttctggttgtcattgaattgggataaacagagagcttgatgctttctgccttctgtctcaggtgatgcattgcacatttgggatatttggaaaggaaatgaggaaagaaattagggcctcctctgatctctcgctatctgcgggtcctgtccttttctcaagaccttcaccattactggtgttttcctgtcttctctttagtatgatccctcaaaacctcactaactggaaggatgattttgtctcagtttgtactcctaaataaaaagtaaacatgacacctctaaaa

SEQ ID NO: 66410 - DNA, 992 bp, Homo sapiens
  misc_feature (992)..(992): n is a, c, g, or t
agcggggtggtggccagggcgaccgcggggcgggccagcgccgggggtcgtggccaggacacgtggtacggaaccggcgccgcgcttgctgctggtaacagggccttgcctagtgggccttccttcccaggtcgcccctcagtctccactagagacaggactgaccagttgctcttccttccaagaaccttcgagatctgcggtctggggtctggttgaaagatggcggccctcactaccctgtttaagtacatagatgaaaatcaggatcgctacattaagaaactcgcaaaatgggtggctatccagagtgtgtctgcgtggccggagaagagaggcgaaatcaggaggatgatggaagttgctgctgcagatgttaagcagttggggggctctgtggaactggtggatatcggaaaacaaaagctccctgatggctcggagatcccgctccctcctattctgctcggcaggctgggctccgacccacagaagaagaccgtgtgcatttacgggcacctggatgtgcagcctgcagccctggaggacggctgggacagcgagcccttcaccctggtggagcgagacggcaagctgtatgggagaggttcgactgatgataagggcccggtggccggctggataaacgccctggaagcgtatcagaaaacaggccaggagattcctgtcaacgtccgattctgcctcgaaggcatggaggagtcaggctctgagggcctagacgagctgatttttgcccggaaagacacattctttaaggatgtgggacatccggtctggcattacgtgagcaaataaccgggtgggggaacgaacgaaggcccaggaatcagccctaagggccccaggagacattgggcaccaatgacacgacaggtggacaggcagcaccaaagacctccattcggggcggacccgcggcacaagagacataaagcacagcagagctacacacaatagcaagagcaggn

SEQ ID NO: 66411 - DNA, 393 bp, Homo sapiens
caagaaaattcttaacaccttctaatcttttttgttagactggggtctcactctggcactccagcctgggcgacagaacgagaccccatctcaaaaaaaataagttctggttgtcattgaattgggataaacagagagcttgatgctttctgccttctgtctcaggtgatgcattgcacatttgggatatttggaaaggaaatgaggaaagaaattagggcctcctctgatctctcgctatctgcgggtcctgtccttttctcaagaccttcaccattactggtgttttcctgtcttctctttagtatgatccctcaaaacctcactaactggaaggatgattttgtctcagtttgtactcctaaataaaaagtaaacatgacacctctaaaa

SEQ ID NO: 66412 - DNA, 592 bp, Homo sapiens
tacccagttacaacagctcaagggacagggactgagattctcagaactagaagactcatttgtgtttactactgacggttccaggtgccacagcaatttctcctgccctccactagtctcaacatttaaatcatgatactcccttgccaggcatggtggctcatgtgtgtaacctcggcactttgggagaccaaggcggacagatcgcttgagtccaggagttcgagaccagcctgagtaacacgagcaaaccccgtctctacaaaaaatacaaaaattagctgggtgtggtggtgcgcacctgcagtcccagctacttgggaagctgaggcaggaggatcatttgagcctgggagacagaggttgcagtgagccaaaatcacagcaatgcactcctgcctgggtgacagaatgacaacctgtctctaaataaataaataaagttactccgtatgaactttagatttttagaggggagtcaggtgtcatttaaaaggataatgcttttgcttaaatcagcatactgcttttaccttaattagtggtgttctccagagcatataaaaatggttccatttaatggctttgtaac

SEQ ID NO: 66413 - DNA, 483 bp, Homo sapiens
  misc_feature (46)..(46): n is a, c, g, or t
ttatcgagctggctaccagtttcgacggagactctcccatacagcnagcccttactggtggagcgagacggcaagctgtatgggagaggttcgactgatgataagggcccggtggccggctggataaacgccctggaagcgtatcagaaaacaggccaggagattcctgtcaacgtccgattctgcctcgaaggcatggaggagtcaggctctgagggcctagacgagctgatttttgcccggaaagacacattctttaaggatgtggactatgtctgcatttctgacaattactgaccagttgctcttccttccaagaaccttcgagatctgcggtctggggtctggtcgaaagatggcggccctcactaccctgtttaagtacatagatgaaaatcaggatcgctacattaagaaactcgcaaaatgggtggctatccagagtgtgtctgcgtggccggagaagagagtctccgtcgaact

SEQ ID NO: 66414 - DNA, 445 bp, Homo sapiens
aaacctggccctagttctagactatggaacctggcctagcctggtttgactggatgagtgattaacaggagttgctttttagcccatctctgatggtggaacaatctgatccctgtttcctctcttttagtgaaagtcgtaacttagataattacagtcatatgttgcttaaggatggggatacattccaagaaaatgcattgttaggcgattcgttgttgtgtgcacatcctgagctgcgctcacacaaacctggatggtacagcctcctacatacctaggctatatggtgtagcctattgctcctaggctacaaacccgtacatgtacctttactggatgctgtaggcagttgtaacacagtggtaggtatttgtgtatctaaacatatctagacagaaaatgaattttttagctccattataatcttttgggaccaccgctg

SEQ ID NO: 66415 - DNA, 2653 bp, Homo sapiens
aaagaaggtaggtacgaggcgggtgtgaatcggccggctggtaacagggccttgcctagtgggccttccttcccaggtcgcccctcagtctccactagagacaggactgaccagttgctcttccttccaagaaccttcgagatctgcggtctggggtctggttgaaagatggcggccctcactaccctgtttaagtacatagatgaaaatcaggatcgctacattaagaaactcgcaaaatgggtggctatccagagtgtgtctgcgtggccggagaagagaggcgaaatcaggaggatgatggaagttgctgctgcagatgttaagcagttggggggctctgtggaactggtggatatcggaaaacaaaagctccctgatggctcggagatcccgctccctcctattctgctcggcaggctgggctccgacccacagaagaagaccgtgtgcatttacgggcacctggatgtgcagcctgcagccctggaggacggctgggacagcgagcccttcaccctggtggagcgagacggcaagctgtatgggagaggttcgactgatgataagggcccggtggccggctggataaacgccctggaagcgtatcagaaaacaggccaggagattcctgtcaacgtccgattctgcctcgaaggcatggaggagtcaggctctgagggcctagacgagctgatttttgcccggaaagacacattctttaaggatgtggactatgtctgcatttctgacaattactggctgggaaagaagaagccctgcatcacctacggcctcaggggcatttgctactttttcatcgaggtggagtgcagcaacaaagacctccattctggggtgtacgggggctcggtgcatgaggccatgactgatctcattttgctgatgggctctttggtggacaagagggggaacatcctgatccccggcattaacgaggccgtggccgccgtcacggaagaggagcacaagctgtacgacgacatcgactttgacatagaggagtttgccaaggatgtgggggcgcagatcctcctgcacagccacaagaaagacatcctcatgcaccgatggcggtacccgtctctgtccctccatggcatcgaaggcgccttctctgggtctggggccaagaccgtgattcccaggaaggtggttggcaagttctccatcaggctcgtgccgaacatgactcctgaagtcgtcggcgagcaggtcacaagctacctaactaagaagtttgctgaactacgcagccccaatgagttcaaggtgtacatgggccacggtgggaagccctgggtctccgacttcagtcaccctcattacctggctgggagaagagccatgaagacagtttttggtgttgagccagacttgaccagggaaggcggcagtattcccgtgaccttgacctttcaggaggccacgggcaagaacgtcatgctgctgcctgtggggtcagcggatgacggagcccactcccagaatgaaaagctcaacaggtataactacatagagggaaccaagatgctggccgcgtacctgtatgaggtctcccagctgaaggactaggccaagccctctgtgtgccatctccaatgagaaggaatcctgccctcacctcacccttttccaacttgcccagggaagtggaggttccctctttcctttccctcttgtcaggtcatccatgactttagagaacagacacaagtgtatccagctgtccacgggtggagctacccgttgggcttatgagtgacctggagtgacagctgagtcaccctgggtaagttctcagagtggtcaggatggcttgacctgcagaagatacccaaggtccaaaagcacaaggtctgcggaaagttctggttgtcggctgggcaccacggctcacacctataatcgagcactttgggaggccaagacaggaggatcacttgaggccaggagtctgagacaagcctaggcaacaaaacaagactctgtctctacaaaaagtttaagaaatgagccagacatggtggtgtatgcctgtagtcccagccactcagaaggctgaggcaggaggatcgcttgagaccaagagtttgagcctgcggtgagctgtgaatgcaccacggcactcaagcctgggcaatgtagcaagatcctgtctctacaagaaattttttaaaaatgagccaagtgtggtggtgcatgcctgtagttccagctactcaggacactgacgtaggagggttgcttgagactgagagttggaggctgcgatgagccatgaatgccccactgcactccagcctgggcgacagaacgagaccccatctcaaaaaaaataagttctggttgtcattgaattgggataaacagagagcttgatgctttctgccttctgtctcaggtgatgcattgcacatttgggatatttggaaaggaaatgaggaaagaaattagggcctcctctgatctctcgctatctgcgggtcctgtccttttctcaagaccttcaccattactggtgttttcctgtcttctctttagtatgatccctcaaaacctcactaactggaaggatgattttgtctcagtttgtactcctaaataaaaagtaaacatgacacctctaaaa

SEQ ID NO: 66416 - DNA, 2650 bp, Homo sapiens
agcggggtggtggccagggcgaccgcggggcgggccagcgccgggggtcgtggccaggacacgtggtacggaaccggcgccgcgcttgctgctggtaacagggccttgcctagtgggccttccttcccagccttcgagatctgcggtctggggtctggttgaaagatggcggccctcactaccctgtttaagtacatagatgaaaatcaggatcgctacattaagaaactcgcaaaatgggtggctatccagagtgtgtctgcgtggccggagaagagaggcgaaatcaggaggatgatggaagttgctgctgcagatgttaagcagttggggggctctgtggaactggtggatatcggaaaacaaaagctccctgatggctcggagatcccgctccctcctattctgctcggcaggctgggctccgacccacagaagaagaccgtgtgcatttacgggcacctggatgtgcagcctgcagccctggaggacggctgggacagcgagcccttcaccctggtggagcgagacggcaagctgtatgggagaggttcgactgatgataagggcccggtggccggctggataaacgccctggaagcgtatcagaaaacaggccaggagattcctgtcaacgtccgattctgcctcgaaggcatggaggagtcaggctctgagggcctagacgagctgatttttgcccggaaagacacattctttaaggatgtggactatgtctgcatttctgacaattactggctgggaaagaagaagccctgcatcacctacggcctcaggggcatttgctactttttcatcgaggtggagtgcagcaacaaagacctccattctggggtgtacgggggctcggtgcatgaggccatgactgatctcattttgctgatgggctctttggtggacaagagggggaacatcctgatccccggcattaacgaggccgtggccgccgtcacggaagaggagcacaagctgtacgacgacatcgactttgacatagaggagtttgccaaggatgtgggggcgcagatcctcctgcacagccacaagaaagacatcctcatgcaccgatggcggtacccgtctctgtccctccatggcatcgaaggcgccttctctgggtctggggccaagaccgtgattcccaggaaggtggttggcaagttctccatcaggctcgtgccgaacatgactcctgaagtcgtcggcgagcaggtcacaagctacctaactaagaagtttgctgaactacgcagccccaatgagttcaaggtgtacatgggccacggtgggaagccctgggtctccgacttcagtcaccctcattacctggctgggagaagagccatgaagacagtttttggtgttgagccagacttgaccagggaaggcggcagtattcccgtgaccttgacctttcaggaggccacgggcaagaacgtcatgctgctgcctgtggggtcagcggatgacggagcccactcccagaatgaaaagctcaacaggtataactacatagagggaaccaagatgctggccgcgtacctgtatgaggtctcccagctgaaggactaggccaagccctctgtgtgccatctccaatgagaaggaatcctgccctcacctcacccttttccaacttgcccagggaagtggaggttccctctttcctttccctcttgtcaggtcatccatgactttagagaacagacacaagtgtatccagctgtccacgggtggagctacccgttgggcttatgagtgacctggagtgacagctgagtcaccctgggtaagttctcagagtggtcaggatggcttgacctgcagaagatacccaaggtccaaaagcacaaggtctgcggaaagttctggttgtcggctgggcaccacggctcacacctataatcgagcactttgggaggccaagacaggaggatcacttgaggccaggagtctgagacaagcctaggcaacaaaacaagactctgtctctacaaaaagtttaagaaatgagccagacatggtggtgtatgcctgtagtcccagccactcagaaggctgaggcaggaggatcgcttgagaccaagagtttgagcctgcggtgagctgtgaatgcaccacggcactcaagcctgggcaatgtagcaagatcctgtctctacaagaaattttttaaaaatgagccaagtgtggtggtgcatgcctgtagttccagctactcaggacactgacgtaggagggttgcttgagactgagagttggaggctgcgatgagccatgaatgccccactgcactccagcctgggcgacagaacgagaccccatctcaaaaaaaataagttctggttgtcattgaattgggataaacagagagcttgatgctttctgccttctgtctcaggtgatgcattgcacatttgggatatttggaaaggaaatgaggaaagaaattagggcctcctctgatctctcgctatctgcgggtcctgtccttttctcaagaccttcaccattactggtgttttcctgtcttctctttagtatgatccctcaaaacctcactaactggaaggatgattttgtctcagtttgtactcctaaataaaaagtaaacatgacacctctaaaa

SEQ ID NO: 66417 - DNA, 2558 bp, Homo sapiens
aaagaaggtaggtacgaggcgggtgtgaatcggccggcccttcgagatctgcggtctggggtctggttgaaagatggcggccctcactaccctgtttaagtacatagatgaaaatcaggatcgctacattaagaaactcgcaaaatgggtggctatccagagtgtgtctgcgtggccggagaagagaggcgaaatcaggaggatgatggaagttgctgctgcagatgttaagcagttggggggctctgtggaactggtggatatcggaaaacaaaagctccctgatggctcggagatcccgctccctcctattctgctcggcaggctgggctccgacccacagaagaagaccgtgtgcatttacgggcacctggatgtgcagcctgcagccctggaggacggctgggacagcgagcccttcaccctggtggagcgagacggcaagctgtatgggagaggttcgactgatgataagggcccggtggccggctggataaacgccctggaagcgtatcagaaaacaggccaggagattcctgtcaacgtccgattctgcctcgaaggcatggaggagtcaggctctgagggcctagacgagctgatttttgcccggaaagacacattctttaaggatgtggactatgtctgcatttctgacaattactggctgggaaagaagaagccctgcatcacctacggcctcaggggcatttgctactttttcatcgaggtggagtgcagcaacaaagacctccattctggggtgtacgggggctcggtgcatgaggccatgactgatctcattttgctgatgggctctttggtggacaagagggggaacatcctgatccccggcattaacgaggccgtggccgccgtcacggaagaggagcacaagctgtacgacgacatcgactttgacatagaggagtttgccaaggatgtgggggcgcagatcctcctgcacagccacaagaaagacatcctcatgcaccgatggcggtacccgtctctgtccctccatggcatcgaaggcgccttctctgggtctggggccaagaccgtgattcccaggaaggtggttggcaagttctccatcaggctcgtgccgaacatgactcctgaagtcgtcggcgagcaggtcacaagctacctaactaagaagtttgctgaactacgcagccccaatgagttcaaggtgtacatgggccacggtgggaagccctgggtctccgacttcagtcaccctcattacctggctgggagaagagccatgaagacagtttttggtgttgagccagacttgaccagggaaggcggcagtattcccgtgaccttgacctttcaggaggccacgggcaagaacgtcatgctgctgcctgtggggtcagcggatgacggagcccactcccagaatgaaaagctcaacaggtataactacatagagggaaccaagatgctggccgcgtacctgtatgaggtctcccagctgaaggactaggccaagccctctgtgtgccatctccaatgagaaggaatcctgccctcacctcacccttttccaacttgcccagggaagtggaggttccctctttcctttccctcttgtcaggtcatccatgactttagagaacagacacaagtgtatccagctgtccacgggtggagctacccgttgggcttatgagtgacctggagtgacagctgagtcaccctgggtaagttctcagagtggtcaggatggcttgacctgcagaagatacccaaggtccaaaagcacaaggtctgcggaaagttctggttgtcggctgggcaccacggctcacacctataatcgagcactttgggaggccaagacaggaggatcacttgaggccaggagtctgagacaagcctaggcaacaaaacaagactctgtctctacaaaaagtttaagaaatgagccagacatggtggtgtatgcctgtagtcccagccactcagaaggctgaggcaggaggatcgcttgagaccaagagtttgagcctgcggtgagctgtgaatgcaccacggcactcaagcctgggcaatgtagcaagatcctgtctctacaagaaattttttaaaaatgagccaagtgtggtggtgcatgcctgtagttccagctactcaggacactgacgtaggagggttgcttgagactgagagttggaggctgcgatgagccatgaatgccccactgcactccagcctgggcgacagaacgagaccccatctcaaaaaaaataagttctggttgtcattgaattgggataaacagagagcttgatgctttctgccttctgtctcaggtgatgcattgcacatttgggatatttggaaaggaaatgaggaaagaaattagggcctcctctgatctctcgctatctgcgggtcctgtccttttctcaagaccttcaccattactggtgttttcctgtcttctctttagtatgatccctcaaaacctcactaactggaaggatgattttgtctcagtttgtactcctaaataaaaagtaaacatgacacctctaaaa

SEQ ID NO: 66418 - DNA, 5117 bp, Homo sapiens
  misc_feature (2897)..(2897): n is a, c, g, or t
  misc_feature (3015)..(3015): n is a, c, g, or t
agcggggtggtggccagggcgaccgcggggcgggccagcgccgggggtcgtggccaggacacgtggtacggaaccggcgccgcgcttgctgctggtaacagggccttgcctagtgggccttccttcccaggtcgcccctcagtctccactagagacaggactgaccagttgctcttccttccaagaaccttcgagatctgcggtctggggtctggttgaaagatggcggccctcactaccctgtttaagtacatagatgaaaatcaggatcgctacattaagaaactcgcaaaatgggtggctatccagagtgtgtctgcgtggccggagaagagaggcgaaatcaggaggatgatggaagttgctgctgcagatgttaagcagttggggggctctgtggaactggtggatatcggaaaacaaaagctccctgatggctcggagatcccgctccctcctattctgctcggcaggctgggctccgacccacagaagaagaccgtgtgcatttacgggcacctggatgtgcagcctgcagccctggaggacggctgggacagcgagcccttcaccctggtggagcgagacggcaagctgtatgggagaggttcgactgatgataagggcccggtggccggctggataaacgccctggaagcgtatcagaaaacaggccaggagattcctgtcaacgtccgattctgcctcgaaggcatggaggagtcaggctctgagggcctagacgagctgatttttgcccggaaagacacattctttaaggatgtggactatgtctgcatttctgacaattactggctgggaaagaagaagccctgcatcacctacggcctcaggggcatttgctactttttcatcgaggtggagtgcagcaacaaagacctccattctggggtgtacgggggctcggtgcatgaggccatgactgatctcattttgctgatgggctctttggtggacaagagggggaacatcctgatccccggcattaacgaggccgtggccgccgtcacggaagaggagcacaagctgtacgacgacatcgactttgacatagaggagtttgccaaggatgtgggggcgcagatcctcctgcacagccacaagaaagacatcctcatgcaccgatggcggtacccgtctctgtccctccatggcatcgaaggcgccttctctgggtctggggccaagaccgtgattcccaggaaggtggttggcaagttctccatcaggctcgtgccgaacatgactcctgaagtcgtcggcgagcaggcatgtggggctgggacacggggtgggggccaagagctactgtgtccgggcagagacttgggtaataaaggctgttactcgacagacacccgggccatgcatgcccccgcttcctggctctggccaagtcagtaattatgacagtcacggttcagaagctaatcaaagataatgcatcacatgtaagtgacctttgttactgatgaggcaggccaaaatctggcctttgacctcacctcaaggctccaggccaaacaccaactttggaccaagcgtgttctggtcagagtcccagagccgccccttaccatggtgccttgtggaggggactctggtggctggaggtcagcccagcttctgactgtccccctcagctgggattcctggggagatggagtcttcccactgggaatgggagcctggggctcacccttcatgctgaatactgaggtcttgtcacgaggaggtgtccccgggtcagcgcctggctctatcctgggtctggatgcagtgtagcctgtggtcattgattttatgaagtacctcggtctgctcaggctgccacaataaagaccacagacgcggtagcttacgtggcagacgcggtagcttacgtggcagaaacggattcctcactgtttcggaggcggatgagtccaggaccaaggtgccggcagctgtggcatctgacgagggttcctcctggccgtggccgctggcctcgcttgtcctcacatggcagagggcaggctctcggtatcttctcacccaggcccacccttctggcctcatttaacctttgtctaaataaggtttagaaagagaaaaaaaaactactaaagaaaaaaagctaggcttttaaagaattcaagttagttttattcaggcgcctcactgaggaatgcggactgcggcccggggcccaggagcagccttggagaggtttggctgggctgctctgagagagcggctcagcccgcagctcatctgcaggtggaggagcttcggtgcgtgctgaatcacatcgcacctgctcagatgttacattccagccaagccacactgagcctcggtgtaagagcacatgtggtcaaaggtcacagaggcgcaaccactaatgcggtcaggtgctatcttatgtgtgggaaaaggtaaggacagggtcatttatctcctaaggaatgcagcgactcgggcaagaggcaggggtggtgtgtgctcccccgttttgtcttcaaagcatctttcctgagagctacaggtagtggcagggtggagcctgtgaaaggccggcaagcagaatggcgcaaacgcagcttctcacatttgtgactttgtctcacaccttagttacttctgttaagtccccaagtgtagtcataatggagtttagggcttaaatatatgaattctgggggcacgcaaacattctgtccataatataaagcaggtcagggaagattgtttttaaacttaatttaaatagtatcatcatttagaagatctttggaaagagtgaattgcttgatattaaaactttgtcttttactttgaaataactgggttttattttttgataagaagtcccctctttctggccgggcgcngtggctcacacttgtaatcccagcactttgggaggccaaggcgggcggatcacgaggtcaggagatccagaccacggtgaaaccccgtctctactgaaaagacaaaaattagccgggngtggtggcgggcgcctgtagtcccagctgctcagagaggctgaggcaggagaatggcgtgaacccgggaggcggagcttgcagtgagccgagatcacgccactgtgctccagcctggacaacagagcgagactccatctcagaaaaaataaaaaataaaaaaagaagtctcctctttccttactctagttatgtagctcagtattaagcaacagaaaatgagactcatcgtagactcagcatagacccatcacagacctgtcagaggccgattgtaagctcgctgtagacccatgatagcagacccgtaggtcactagcactggatcaaatgcaagcttataaagcattgtatacctctattctatttgtggtttaggtcacaagctacctaactaagaagtttgctgaactacgcagccccaatgagttcaaggtgtacatgggccacggtgggaagccctgggtctccgacttcagtcaccctcattacctggctgggagaagagccatgaagacaggttggacgctctccttgtggatgatgccgcgcagggcccttcgcacgtctgacaggactctgctatatcgcgtgggcgtgtagctatgtcgggggcactgctgtatcgtgggggcgtgtagttaagtcagcatgaggacagctagtgtgtgggatgagcctggacccctggcggaccttgaacacgggcttgctgtccccagggccttgcacagcatctgactgagtgctactgagtagtggtctgagacagatccccagccttagggccccaaagctcaccgtttattttatttcatttccccccagtttttggtgttgagccagacttgaccagggaaggcggcagtattcccgtgaccttgacctttcaggaggccacgggcaagaacgtcatgctgctgcctgtggggtcagcggatgacggagcccactcccagaatgaaaagctcaacaggtataactacatagagggaaccaagatgctggccgcgtacctgtatgaggtctcccagctgaaggactaggccaagccctctgtgtgccatctccaatgagaaggaatcctgccctcacctcacccttttccaacttgcccagggaagtggaggttccctctttcctttccctcttgtcaggtcatccatgactttagagaacagacacaagtgtatccagctgtccacgggtggagctacccgttgggcttatgagtgacctggagtgacagctgagtcaccctgggtaagttctcagagtggtcaggatggcttgacctgcagaagatacccaaggtccaaaagcacaaggtctgcggaaagttctggttgtcggctgggcaccacggctcacacctataatcgagcactttgggaggccaagacaggaggatcacttgaggccaggagtctgagacaagcctaggcaacaaaacaagactctgtctctacaaaaagtttaagaaatgagccagacatggtggtgtatgcctgtagtcccagccactcagaaggctgaggcaggaggatcgcttgagaccaagagtttgagcctgcggtgagctgtgaatgcaccacggcactcaagcctgggcaatgtagcaagatcctgtctctacaagaaattttttaaaaatgagccaagtgtggtggtgcatgcctgtagttccagctactcaggacactgacgtaggagggttgcttgagactgagagttggaggctgcgatgagccatgaatgccccactgcactccagcctgggcgacagaacgagaccccatctcaaaaaaaataagttctggttgtcattgaattgggataaacagagagcttgatgctttctgccttctgtctcaggtgatgcattgcacatttgggatatttggaaaggaaatgaggaaagaaattagggcctcctctgatctctcgctatctgcgggtcctgtccttttctcaagaccttcaccattactggtgttttcctgtcttctctttagtatgatccctcaaaacctcactaactggaaggatgattttgtctcagtttgtactcctaaataaaaagtaaacatgacacctctaaaa

SEQ ID NO: 66419 - DNA, 3015 bp, Homo sapiens
agcggggtggtggccagggcgaccgcggggcgggccagcgccgggggtcgtggccaggacacgtggtacggaaccggcgccgcgcttgctgctggtaacagggccttgcctagtgggccttccttcccaggtcgcccctcagtctccactagagacaggactgaccagttgctcttccttccaagaaccttcgagatctgcggtctggggtctggttgaaagatggcggccctcactaccctgtttaagtacatagatgaaaatcaggatcgctacattaagaaactcgcaaaatgggtggctatccagagtgtgtctgcgtggccggagaagagaggcgaaatcaggaggatgatggaagttgctgctgcagatgttaagcagttggggggctctgtggaactggtggatatcggaaaacaaaagctccctgatggctcggagatcccgctccctcctattctgctcggcaggctgggctccgacccacagaagaagaccgtgtgcatttacgggcacctggatgtgcagcctgcagccctggaggacggctgggacagcgagcccttcaccctggtggagcgagacggcaagctgtatgggagaggttcgactgatgataagggcccggtggccggctggataaacgccctggaagcgtatcagaaaacaggccaggagattcctgtcaacgtccgattctgcctcgaaggcatggaggagtcaggctctgagggcctagacgagctgatttttgcccggaaagacacattctttaaggatgtggactatgtctgcatttctgacaattactggctgggaaagaagaagccctgcatcacctacggcctcaggggcatttgctactttttcatcgaggtggagtgcagcaacaaagacctccattctggggtgtacgggggctcggtgcatgaggccatgactgatctcattttgctgatgggctctttggtggacaagagggggaacatcctgatccccggcattaacgaggccgtggccgccgtcacggaagaggagcacaagctgtacgacgacatcgactttgacatagaggagtttgccaaggatgtgggggcgcagatcctcctgcacagccacaagaaagacatcctcatgcaccgatggcggtacccgtctctgtccctccatggcatcgaaggcgccttctctgggtctggggccaagaccgtgattcccaggaaggtggttggcaagttctccatcaggctcgtgccgaacatgactcctgaagtcgtcggcgagcaggtcacaagctacctaactaagaagtttgctgaactacgcagccccaatgagttcaaggtgtacatgggccacggtgggaagccctgggtctccgacttcagtcaccctcattacctggctgggagaagagccatgaagacaggttggacgctctccttgtggatgatgccgcgcagggcccttcgcacgtctgacaggactctgctatatcgcgtgggcgtgtagctatgtcgggggcactgctgtatcgtgggggcgtgtagttaagtcagcatgaggacagctagtgtgtgggatgagcctggacccctggcggaccttgaacacgggcttgctgtccccagggccttgcacagcatctgactgagtgctactgagtagtggtctgagacagatccccagccttagggccccaaagctcaccgtttattttatttcatttccccccagtttttggtgttgagccagacttgaccagggaaggcggcagtattcccgtgaccttgacctttcaggaggccacgggcaagaacgtcatgctgctgcctgtggggtcagcggatgacggagcccactcccagaatgaaaagctcaacaggtataactacatagagggaaccaagatgctggccgcgtacctgtatgaggtctcccagctgaaggactaggccaagccctctgtgtgccatctccaatgagaaggaatcctgccctcacctcacccttttccaacttgcccagggaagtggaggttccctctttcctttccctcttgtcaggtcatccatgactttagagaacagacacaagtgtatccagctgtccacgggtggagctacccgttgggcttatgagtgacctggagtgacagctgagtcaccctgggtaagttctcagagtggtcaggatggcttgacctgcagaagatacccaaggtccaaaagcacaaggtctgcggaaagttctggttgtcggctgggcaccacggctcacacctataatcgagcactttgggaggccaagacaggaggatcacttgaggccaggagtctgagacaagcctaggcaacaaaacaagactctgtctctacaaaaagtttaagaaatgagccagacatggtggtgtatgcctgtagtcccagccactcagaaggctgaggcaggaggatcgcttgagaccaagagtttgagcctgcggtgagctgtgaatgcaccacggcactcaagcctgggcaatgtagcaagatcctgtctctacaagaaattttttaaaaatgagccaagtgtggtggtgcatgcctgtagttccagctactcaggacactgacgtaggagggttgcttgagactgagagttggaggctgcgatgagccatgaatgccccactgcactccagcctgggcgacagaacgagaccccatctcaaaaaaaataagttctggttgtcattgaattgggataaacagagagcttgatgctttctgccttctgtctcaggtgatgcattgcacatttgggatatttggaaaggaaatgaggaaagaaattagggcctcctctgatctctcgctatctgcgggtcctgtccttttctcaagaccttcaccattactggtgttttcctgtcttctctttagtatgatccctcaaaacctcactaactggaaggatgattttgtctcagtttgtactcctaaataaaaagtaaacatgacacctctaaaa

SEQ ID NO: 66420 - DNA, 2530 bp, Homo sapiens
gtcgcaccatctgcgctcttgatgtctggttcagagatggcggtcctcactagcctgtttgatcttcgttgatgactagtcccgatcgctacgttcagagtgtcgacatctatgcgtggcttcatccatgaagttgtgtctgcgtggccggagaagagaggcgaaatcaggaggatgatggaagttgctgctgcagatgttaagcagttggggggctctgtggaactggtggatatcggaaaacaaaagctccctgatggctcggagatcccgctccctcctattctgctcggcaggctgggctccgacccacagaagaagaccgtgtgcatttacgggcacctggatgtgcagcctgcagccctggaggacggctgggacagcgagcccttcaccctggtggagcgagacggcaagctgtatgggagaggttcgactgatgataagggcccggtggccggctggataaacgccctggaagcgtatcagaaaacaggccaggagattcctgtcaacgtccgattctgcctcgaaggcatggaggagtcaggctctgagggcctagacgagctgatttttgcccggaaagacacattctttaaggatgtggactatgtctgcatttctgacaattactggctgggaaagaagaagccctgcatcacctacggcctcaggggcatttgctactttttcatcgaggtggagtgcagcaacaaagacctccattctggggtgtacgggggctcggtgcatgaggccatgactgatctcattttgctgatgggctctttggtggacaagagggggaacatcctgatccccggcattaacgaggccgtggccgccgtcacggaagaggagcacaagctgtacgacgacatcgactttgacatagaggagtttgccaaggatgtgggggcgcagatcctcctgcacagccacaagaaagacatcctcatgcaccgatggcggtacccgtctctgtccctccatggcatcgaaggcgccttctctgggtctggggccaagaccgtgattcccaggaaggtggttggcaagttctccatcaggctcgtgccgaacatgactcctgaagtcgtcggcgagcaggtcacaagctacctaactaagaagtttgctgaactacgcagccccaatgagttcaaggtgtacatgggccacggtgggaagccctgggtctccgacttcagtcaccctcattacctggctgggagaagagccatgaagacagtttttggtgttgagccagacttgaccagggaaggcggcagtattcccgtgaccttgacctttcaggaggccacgggcaagaacgtcatgctgctgcctgtggggtcagcggatgacggagcccactcccagaatgaaaagctcaacaggtataactacatagagggaaccaagatgctggccgcgtacctgtatgaggtctcccagctgaaggactaggccaagccctctgtgtgccatctccaatgagaaggaatcctgccctcacctcacccttttccaacttgcccagggaagtggaggttccctctttcctttccctcttgtcaggtcatccatgactttagagaacagacacaagtgtatccagctgtccacgggtggagctacccgttgggcttatgagtgacctggagtgacagctgagtcaccctgggtaagttctcagagtggtcaggatggcttgacctgcagaagatacccaaggtccaaaagcacaaggtctgcggaaagttctggttgtcggctgggcaccacggctcacacctataatcgagcactttgggaggccaagacaggaggatcacttgaggccaggagtctgagacaagcctaggcaacaaaacaagactctgtctctacaaaaagtttaagaaatgagccagacatggtggtgtatgcctgtagtcccagccactcagaaggctgaggcaggaggatcgcttgagaccaagagtttgagcctgcggtgagctgtgaatgcaccacggcactcaagcctgggcaatgtagcaagatcctgtctctacaagaaattttttaaaaatgagccaagtgtggtggtgcatgcctgtagttccagctactcaggacactgacgtaggagggttgcttgagactgagagttggaggctgcgatgagccatgaatgccccactgcactccagcctgggcgacagaacgagaccccatctcaaaaaaaataagttctggttgtcattgaattgggataaacagagagcttgatgctttctgccttctgtctcaggtgatgcattgcacatttgggatatttggaaaggaaatgaggaaagaaattagggcctcctctgatctctcgctatctgcgggtcctgtccttttctcaagaccttcaccattactggtgttttcctgtcttctctttagtatgatccctcaaaacctcactaactggaaggatgattttgtctcagtttgtactcctaaataaaaagtaaacatgacacctctaaaa

SEQ ID NO: 66421 - DNA, 2519 bp, Homo sapiens
gtaaatatgctaggttgattatctcttccagtcatcacgaaaactacttcatgccttggtgaaactggcaacatgggttgtttctgaagagatacatgttttaatttatgaggtgtattttttgtgtttgtgtgtgtaatggtaatgatgatattcatactgaatttactgctacaatgttacaatctgttgccagttaaaattacccagggaactggtggatatcggaaaacaaaagctccctgatggctcggagatcccgctccctcctattctgctcggcaggctgggctccgacccacagaagaagaccgtgtgcatttacgggcacctggatgtgcagcctgcagccctggaggacggctgggacagcgagcccttcaccctggtggagcgagacggcaagctgtatgggagaggttcgactgatgataagggcccggtggccggctggataaacgccctggaagcgtatcagaaaacaggccaggagattcctgtcaacgtccgattctgcctcgaaggcatggaggagtcaggctctgagggcctagacgagctgatttttgcccggaaagacacattctttaaggatgtggactatgtctgcatttctgacaattactggctgggaaagaagaagccctgcatcacctacggcctcaggggcatttgctactttttcatcgaggtggagtgcagcaacaaagacctccattctggggtgtacgggggctcggtgcatgaggccatgactgatctcattttgctgatgggctctttggtggacaagagggggaacatcctgatccccggcattaacgaggccgtggccgccgtcacggaagaggagcacaagctgtacgacgacatcgactttgacatagaggagtttgccaaggatgtgggggcgcagatcctcctgcacagccacaagaaagacatcctcatgcaccgatggcggtacccgtctctgtccctccatggcatcgaaggcgccttctctgggtctggggccaagaccgtgattcccaggaaggtggttggcaagttctccatcaggctcgtgccgaacatgactcctgaagtcgtcggcgagcaggtcacaagctacctaactaagaagtttgctgaactacgcagccccaatgagttcaaggtgtacatgggccacggtgggaagccctgggtctccgacttcagtcaccctcattacctggctgggagaagagccatgaagacagtttttggtgttgagccagacttgaccagggaaggcggcagtattcccgtgaccttgacctttcaggaggccacgggcaagaacgtcatgctgctgcctgtggggtcagcggatgacggagcccactcccagaatgaaaagctcaacaggtataactacatagagggaaccaagatgctggccgcgtacctgtatgaggtctcccagctgaaggactaggccaagccctctgtgtgccatctccaatgagaaggaatcctgccctcacctcacccttttccaacttgcccagggaagtggaggttccctctttcctttccctcttgtcaggtcatccatgactttagagaacagacacaagtgtatccagctgtccacgggtggagctacccgttgggcttatgagtgacctggagtgacagctgagtcaccctgggtaagttctcagagtggtcaggatggcttgacctgcagaagatacccaaggtccaaaagcacaaggtctgcggaaagttctggttgtcggctgggcaccacggctcacacctataatcgagcactttgggaggccaagacaggaggatcacttgaggccaggagtctgagacaagcctaggcaacaaaacaagactctgtctctacaaaaagtttaagaaatgagccagacatggtggtgtatgcctgtagtcccagccactcagaaggctgaggcaggaggatcgcttgagaccaagagtttgagcctgcggtgagctgtgaatgcaccacggcactcaagcctgggcaatgtagcaagatcctgtctctacaagaaattttttaaaaatgagccaagtgtggtggtgcatgcctgtagttccagctactcaggacactgacgtaggagggttgcttgagactgagagttggaggctgcgatgagccatgaatgccccactgcactccagcctgggcgacagaacgagaccccatctcaaaaaaaataagttctggttgtcattgaattgggataaacagagagcttgatgctttctgccttctgtctcaggtgatgcattgcacatttgggatatttggaaaggaaatgaggaaagaaattagggcctcctctgatctctcgctatctgcgggtcctgtccttttctcaagaccttcaccattactggtgttttcctgtcttctctttagtatgatccctcaaaacctcactaactggaaggatgattttgtctcagtttgtactcctaaataaaaagtaaacatgacacctctaaaa

SEQ ID NO: 66422 - DNA, 2538 bp, Homo sapiens
agcggggtggtggccagggcgaccgcggggcgggccagcgccgggggtcgtggccaggacacgtggtacggaaccggcgccgcgcttgctgctggtaacagggccttgcctagtgggccttccttcccaggtcgcccctcagtctccactagagacaggactgaccagttgctcttccttccaagaaccttcgagatctgcggtctggggtctggttgaaagatggcggccctcactaccctgtttaagtacatagatgaaaatcaggatcgctacattaagaaactcgcaaaatgggtggctatccagagtgtgtctgcgtggccggagaagagaggcgaaatcaggaggatgatggaagttgctgctgcagatgttaagcagttggggggctctgtggaactggtggatatcggaaaacaaaagctccctgatggctcggagatcccgctccctcctattctgctcggcaggctgggctccgacccacagaagaagaccgtgtgcatttacgggcacctggatgtgcagcctgcagccctggaggacggctgggacagcgagcccttcaccctggtggagcgagacggcaagctgtatgggagaggttcgactgatgataagggcccggtggccggctggataaacgccctggaagcgtatcagaaaacaggccaggagattcctgtcaacgtccgattctgcctcgaaggcatggaggagtcaggctctgagggcctagacgagctgatttttgcccggaaagacacattctttaaggatgtggactatgtctgcatttctgacaattactggctgggaaagaagaagccctgcatcacctacggcctcaggggcatttgctactttttcatcgaggtggagtgcagcaacaaagacctccattctggggtgtacgggggctcggtgcatgaggccatgactgatctcattttgctgatgggctctttggtggacaagagggggaacatcctgatccccggcattaacgaggccgtggccgccgtcacggaagaggagcacaagctgtacgacgacatcgactttgacatagaggagtttgccaaggatgtgggggcgcagatcctcctgcacagccacaagaaagacatcctcatgcaccgatggcggtacccgtctctgtccctccatggcatcgaaggcgccttctctgggtctggggccaagaccgtgattcccaggaaggtggttggcaagttctccatcaggctcgtgccgaacatgactcctgaagtcgtcggcgagcaggtcacaagctacctaactaagaagtttgctgaactacgcagccccaatgagttcaaggtgtacatgggccacggtgggaagccctgggtctccgacttcagtcaccctcattacctggctgggagaagagccatgaagacagtttttggtgttgagccagacttgaccagggaaggcggcagtattcccgtgaccttgacctttcaggaggccacgggcaagaacgtcatgctgctgcctgtggggtcagcggatgacggagcccactcccagaatgaaaagctcaacaggtataactacatagagggaaccaagatgctggccgcgtacctgtatgaggtctcccagctgaaggactaggccaagccctctgtgtgccatctccaatgagaaggaatcctgccctcacctcacccttttccaacttgcccagggaagtggaggttccctctttcctttccctcttgtcaggtcatccatgactttagagaacagacacaagtgtatccagctgtccacgggtggagctacccgttgggcttatgagtgacctggagtgacagctgagtcaccctgggtaagttctcagagtggtcaggatggcttgacctgcagaagatacccaaggtccaaaagcacaaggtctgcggaaagttctggttgtcggctgggcaccacggctcacacctataatcgagcactttgggaggccaagacaggaggatcacttgaggccaggagtctgagacaagcctaggcaacaaaacaagactctgtctctacaaaaagtttaagaaatgagccagacatggtggtgtatgcctgtagtcccagccactcagaaggctgaggcaggaggatcgcttgagaccaagagtttgagcctgcggtgagctgtgaatgcaccacggcactcaagcctgggcgacagaacgagaccccatctcaaaaaaaataagttctggttgtcattgaattgggataaacagagagcttgatgctttctgccttctgtctcaggtgatgcattgcacatttgggatatttggaaaggaaatgaggaaagaaattagggcctcctctgatctctcgctatctgcgggtcctgtccttttctcaagaccttcaccattactggtgttttcctgtcttctctttagtatgatccctcaaaacctcactaactggaaggatgattttgtctcagtttgtactcctaaataaaaagtaaacatgacacctctaaaa

SEQ ID NO: 66423 - DNA, 2647 bp, Homo sapiens
agcggggtggtggccagggcgaccgcggggcgggccagcgccgggggtcgtggccaggacacgtggtacggaaccggcgccgcgcttgctgctggtaacagggccttgcctagtgggccttccttcccaggtcgcccctcagtctccactagagacaggactgaccagttgctcttccttccaagaaccttcgagatctgcggtctggggtctggttgaaagatggcggccctcactaccctgtttaagtacatagatgaaaatcaggatcgctacattaagaaactcgcaaaatgggtggctatccagagtgtgtctgcgtggccggagaagagaggcgaaatcaggaggatgatggaagttgctgctgcagatgttaagcagttggggggctctgtggaactggtggatatcggaaaacaaaagctccctgatggctcggagatcccgctccctcctattctgctcggcaggctgggctccgacccacagaagaagaccgtgtgcatttacgggcacctggatgtgcagcctgcagccctggaggacggctgggacagcgagcccttcaccctggtggagcgagacggcaagctgtatgggagaggttcgactgatgataagggcccggtggccggctggataaacgccctggaagcgtatcagaaaacaggccaggagattcctgtcaacgtccgattctgcctcgaaggcatggaggagtcaggctctgagggcctagacgagctgatttttgcccggaaagacacattctttaaggatgtggactatgtctgcatttctgacaattactggctgggaaagaagaagccctgcatcacctacggcctcaggggcatttgctactttttcatcgaggtggagtgcagcaacaaagacctccattctggggtgtacgggggctcggtgcatgaggccatgactgatctcattttgctgatgggctctttggtggacaagagggggaacatcctgatccccggcattaacgaggccgtggccgccgtcacggaagaggagcacaagctgtacgacgacatcgactttgacatagaggagtttgccaaggatgtgggggcgcagatcctcctgcacagccacaagaaagacatcctcatgcaccgatggcggtacccgtctctgtccctccatggcatcgaaggcgccttctctgggtctggggccaagaccgtgattcccaggaaggtggttggcaagttctccatcaggctcgtgccgaacatgactcctgaagtcgtcggcgagcaggtcacaagctacctaactaagaagtttgctgaactacgcagccccaatgagttcaaggtgtacatgggccacggtgggaagccctgggtctccgacttcagtcaccctcattacctggctgggagaagagccatgaagacagtttttggtgttgagccagacttgaccagggaaggcggcagtattcccgtgaccttgacctttcaggaggccacgggcaagaacgtcatgctgctgcctgtggggtcagcggatgacggagcccactcccagaatgaaaagctcaacaggtataactacatagagggaaccaagatgctggccgcgtacctgtatgaggtctcccagctgaaggactaggccaagccctctgtgtgccatctccaatgagaaggaatcctgccctcacctcacccttttccaacttgcccagggaagtggaggttccctctttcctttccctcttgtcaggtcatccatgactttagagaacagacacaagtgtatccagctgtccacgggtggagctacccgttgggcttatgagtgacctggagtgacagctgagtcaccctgggtaagttctcagagtggtcaggatggcttgacctgcagaagatacccaaggtccaaaagcacaaggtctgcggaaagttctggttgtcggctgggcaccacggctcacacctataatcgagcactttgggaggccaagacaggaggatcacttgaggccaggagtctgagacaagcctaggcaacaaaacaagactctgtctctacaaaaagtttaagaaatgagccagacatggtggtgtatgcctgtagtcccagccactcagaaggctgaggcaggaggatcgcttgagaccaagagtttgagcctgcggtgagctgtgaatgcaccacggcactcaagcctgggcaatgtagcaagatcctgtctctacaagaaattttttaaaaatgagccaagtgtggtggtgcatgcctgtagttccagctactcaggacactgacgtaggagggttgcttgagactgagagttggaggctgcgatgagccatgaatgccccactgcactccagcctgggcgacagaacgagaccccatctcaaaaaaaataagttctggttgtcattgaattgggatatttggaaaggaaatgaggaaagaaattagggcctcctctgatctctcgctatctgcgggtcctgtccttttctcaagaccttcaccattactggtgttttcctgtcttctctttagtatgatccctcaaaacctcactaactggaaggatgattttgtctcagtttgtactcctaaataaaaagtaaacatgacacctctaaaa

SEQ ID NO: 66424 - DNA, 2449 bp, Homo sapiens
agcggggtggtggccagggcgaccgcggggcgggccagcgccgggggtcgtggccaggacacgtggtacggaaccggcgccgcgcttgctgctggtaacagggccttgcctagtgggccttccttcccaggtcgcccctcagtctccactagagacaggactgaccagttgctcttccttccaagaaccttcgagatctgcggtctggggtctggttgaaagatggcggccctcactaccctgtttaagtacatagatgaaaatcaggatcgctacattaagaaactcgcaaaatgggtggctatccagagtgtgtctgcgtggccggagaagagaggcgaaatcaggaggatgatggaagttgctgctgcagatgttaagcagttggggggctctgtggaactggtggatatcggaaaacaaaagctccctgatggctcggagatcccgctccctcctattctgctcggcaggctgggctccgacccacagaagaagaccgtgtgcatttacgggcacctggatgtgcagcctgcagccctggaggacggctgggacagcgagcccttcaccctggtggagcgagacggcaagctgtatgggagaggttcgactgatgataagggcccggtggccggctggataaacgccctggaagcgtatcagaaaacaggccaggagattcctgtcaacgtccgattctgcctcgaaggcatggaggagtcaggctctgagggcctagacgagctgatttttgcccggaaagacacattctttaaggatgtggactatgtctgcatttctgacaattactggctgggaaagaagaagccctgcatcacctacggcctcaggggcatttgctactttttcatcgaggtggagtgcagcaacaaagacctccattctggggtgtacgggggctcggtgcatgaggccatgactgatctcattttgctgatgggctctttggtggacaagagggggaacatcctgatccccggcattaacgaggccgtggccgccgtcacggaagaggagcacaagctgtacgacgacatcgactttgacatagaggagtttgccaaggatgtgggggcgcagatcctcctgcacagccacaagaaagacatcctcatgcaccgatggcggtacccgtctctgtccctccatggcatcgaaggcgccttctctgggtctggggccaagaccgtgattcccaggaaggtggttggcaagttctccatcaggctcgtgccgaacatgactcctgaagtcgtcggcgagcaggtcacaagctacctaactaagaagtttgctgaactacgcagccccaatgagttcaaggtgtacatgggccacggtgggaagccctgggtctccgacttcagtcaccctcattacctggctgggagaagagccatgaagacagtttttggtgttgagccagacttgaccagggaaggcggcagtattcccgtgaccttgacctttcaggaggccacgggcaagaacgtcatgctgctgcctgtggggtcagcggatgacggagcccactcccagaatgaaaagctcaacaggtataactacatagagggaaccaagatgctggccgcgtacctgtatgaggtctcccagctgaaggactaggccaagccctctgtgtgccatctccaatgagaaggaatcctgccctcacctcacccttttccaacttgcccagggaagtggaggttccctctttcctttccctcttgtcaggtcatccatgactttagagaacagacacaagtgtatccagctgtccacgggtggagctacccgttgggcttatgagtgacctggagtgacagctgagtcaccctgggtaagttctcagagtggtcaggatggcttgacctgcagaagatacccaaggtccaaaagcacaaggtctgcggaaagttctggttgtcggctgggcaccacggctcacacctataatcgagcactttgggaggccaagacaggaggatcacttgaggccaggagtctgagacaagcctaggcaacaaaacaagactctgtctctacaaaaagtttaagaaatgagccagacatggtggtgtatgcctgtagtcccagccactcagaaggctgaggcaggaggatcgcttgagaccaagagtttgagcctgcggtgagctgtgaatgcaccacggcactcaagcctgggcaatgtagcaagatcctgtctctacaagaaattttttaaaaatgagccaagtgtggtggtgcatgcctgtagttccagctactcaggacactgacgtaggagggttgcttgagactgagacaggagaattgcttgaacatgggaggcagaggttgcagtgagccaagattgcgccactgcactccatccagtctggcgacagagcaagactctgtcgcaaaaaaagaaaaaaag

SEQ ID NO: 66425 - DNA, 2015 bp, Homo sapiens
agtaccccccaccgcaggttgcatggaggagtcaggctctgagggcctagacgagctgatttttgcccggaaagacacattctttaaggatgtggactatgtctgcatttctgacaattactggctgggaaagaagaagccctgcatcacctacggcctcaggggcatttgctactttttcatcgaggtggagtgcagcaacaaagacctccattctggggtgtacgggggctcggtgcatgaggccatgactgatctcattttgctgatgggctctttggtggacaagagggggaacatcctgatccccggcattaacgaggccgtggccgccgtcacggaagaggagcacaagctgtacgacgacatcgactttgacatagaggagtttgccaaggatgtgggggcgcagatcctcctgcacagccacaagaaagacatcctcatgcaccgatggcggtacccgtctctgtccctccatggcatcgaaggcgccttctctgggtctggggccaagaccgtgattcccaggaaggtggttggcaagttctccatcaggctcgtgccgaacatgactcctgaagtcgtcggcgagcaggtcacaagctacctaactaagaagtttgctgaactacgcagccccaatgagttcaaggtgtacatgggccacggtgggaagccctgggtctccgacttcagtcaccctcattacctggctgggagaagagccatgaagacagtttttggtgttgagccagacttgaccagggaaggcggcagtattcccgtgaccttgacctttcaggaggccacgggcaagaacgtcatgctgctgcctgtggggtcagcggatgacggagcccactcccagaatgaaaagctcaacaggtataactacatagagggaaccaagatgctggccgcgtacctgtatgaggtctcccagctgaaggactaggccaagccctctgtgtgccatctccaatgagaaggaatcctgccctcacctcacccttttccaacttgcccagggaagtggaggttccctctttcctttccctcttgtcaggtcatccatgactttagagaacagacacaagtgtatccagctgtccacgggtggagctacccgttgggcttatgagtgacctggagtgacagctgagtcaccctgggtaagttctcagagtggtcaggatggcttgacctgcagaagatacccaaggtccaaaagcacaaggtctgcggaaagttctggttgtcggctgggcaccacggctcacacctataatcgagcactttgggaggccaagacaggaggatcacttgaggccaggagtctgagacaagcctaggcaacaaaacaagactctgtctctacaaaaagtttaagaaatgagccagacatggtggtgtatgcctgtagtcccagccactcagaaggctgaggcaggaggatcgcttgagaccaagagtttgagcctgcggtgagctgtgaatgcaccacggcactcaagcctgggcaatgtagcaagatcctgtctctacaagaaattttttaaaaatgagccaagtgtggtggtgcatgcctgtagttccagctactcaggacactgacgtaggagggttgcttgagactgagagttggaggctgcgatgagccatgaatgccccactgcactccagcctgggcgacagaacgagaccccatctcaaaaaaaataagttctggttgtcattgaattgggataaacagagagcttgatgctttctgccttctgtctcaggtgatgcattgcacatttgggatatttggaaaggaaatgaggaaagaaattagggcctcctctgatctctcgctatctgcgggtcctgtccttttctcaagaccttcaccattactggtgttttcctgtcttctctttagtatgatccctcaaaacctcactaactggaaggatgattttgtctcagtttgtactcctaaataaaaagtaaacatgacacctctaaaa

SEQ ID NO: 66426 - DNA, 2030 bp, Homo sapiens
agcggggtggtggccagggcgaccgcggggcgggccagcgccgggggtcgtggccaggacacgtggtacggaaccggcgccgcgcttgctgctggtaacagggccttgcctagtgggccttccttcccaggtcgcccctcagtctccactagagacaggactgaccagttgctcttccttccaagaaccttcgagatctgcggtctggggtctggttgaaagatggcggccctcactaccctgtttaagtacatagatgaaaatcaggatcgctacattaagaaactcgcaaaatgggtggctatccagagtgtgtctgcgtggccggagaagagaggcgaaatcaggaggatgatggaagttgctgctgcagatgttaagcagttggggggctctgtggaactggtggatatcggaaaacaaaagctccctgatggctcggagatcccgctccctcctattctgctcggcaggctgggctccgacccacagaagaagaccgtgtgcatttacgggcacctggatgtgcagcctgcagccctggaggacggctgggacagcgagcccttcaccctggtggagcgagacggcaagctgtatgggagaggttcgactgatgataagggcccggtggccggctggataaacgccctggaagcgtatcagaaaacaggccaggagattcctgtcaacgtccgattctgcctcgaaggcatggaggagtcaggctctgagggcctagacgagctgatttttgcccggaaagacacattctttaaggatgtggactatgtctgcatttctgacaattactggctgggaaagaagaagccctgcatcacctacggcctcaggggcatttgctactttttcatcgaggtggagtgcagcaacaaagacctccattctggggtgtacgggggctcggtgcatgaggccatgactgatctcattttgctgatgggctctttggtggacaagagggggaacatcctgatccccggcattaacgaggccgtggccgccgtcacggaagaggagcacaagctgtacgacgacatcgactttgacatagaggagtttgccaaggatgtgggggcgcagatcctcctgcacagccacaagaaagacatcctcatgcaccgatggcggtacccgtctctgtccctccatggcatcgaaggcgccttctctgggtctggggccaagaccgtgattcccaggaaggtggttggcaagttctccatcaggctcgtgccgaacatgactcctgaagtcgtcggcgagcaggtcacaagctacctaactaagaagtttgctgaactacgcagccccaatgagttcaaggtgtacatgggccacggtgggaagccctgggtctccgacttcagtcaccctcattacctggctgggagaagagccatgaagacagtttttggtgttgagccagacttgaccagggaaggcggcagtattcccgtgaccttgacctttcaggaggccacgggcaagaacgtcatgctgctgcctgtggggtcagcggatgacggagcccactcccagaatgaaaagctcaacaggtataactacatagagggaaccaagatgctggccgcgtacctgtatgaggtctcccagctgaaggactaggccaagccctctgtgtgccatctccaatgagaaggaatcctgccctcacctcacccttttccaacttgcccagggaagtggaggttccctctttcctttccctcttgtcaggtcatccatgactttagagaacagacacaagtgtatccagctgtccacgggtggagctacccgttgggcttatgagtgacctggagtgacagctgagtcaccctgggtaagttctcagagtggtcaggatggcttgacctgcagaagatacccaaggtccaaaagcacaaggtctgcggaaagttctggttgtcggctgggcaccacggctcacacctataatcgagcactttgggagccacttcgtggaagcgggccgagcctgacta

SEQ ID NO: 66427 - DNA, 1942 bp, Homo sapiens
agcggggtggtggccagggcgaccgcggggcgggccagcgccgggggtcgtggccaggacacgtggtacggaaccggcgccgcgcttgctgctggtaacagggccttgcctagtgggccttccttcccaggtcgcccctcagtctccactagagacaggactgaccagttgctcttccttccaagaaccttcgagatctgcggtctggggtctggttgaaagatggcggccctcactaccctgtttaagtacatagatgaaaatcaggatcgctacattaagaaactcgcaaaatgggtggctatccagagtgtgtctgcgtggccggagaagagaggcgaaatcaggaggatgatggaagttgctgctgcagatgttaagcagttggggggctctgtggaactggtggatatcggaaaacaaaagctccctgatggctcggagatcccgctccctcctattctgctcggcaggctgggctccgacccacagaagaagaccgtgtgcatttacgggcacctggatgtgcagcctgcagccctggaggacggctgggacagcgagcccttcaccctggtggagcgagacggcaagctgtatgggagaggttcgactgatgataagggcccggtggccggctggataaacgccctggaagcgtatcagaaaacaggccaggagattcctgtcaacgtccgattctgcctcgaaggcatggaggagtcaggctctgagggcctagacgagctgatttttgcccggaaagacacattctttaaggatgtggactatgtctgcatttctgacaattactggctgggaaagaagaagccctgcatcacctacggcctcaggggcatttgctactttttcatcgaggtggagtgcagcaacaaagacctccattctggggtgtacgggggctcggtgcatgaggccatgactgatctcattttgctgatgggctctttggtggacaagagggggaacatcctgatccccggcattaacgaggccgtggccgccgtcacggaagaggagcacaagctgtacgacgacatcgactttgacatagaggagtttgccaaggatgtgggggcgcagatcctcctgcacagccacaagaaagacatcctcatgcaccgatggcggtacccgtctctgtccctccatggcatcgaaggcgccttctctgggtctggggccaagaccgtgattcccaggaaggtggttggcaagttctccatcaggctcgtgccgaacatgactcctgaagtcgtcggcgagcaggtcacaagctacctaactaagaagtttgctgaactacgcagccccaatgagttcaaggtgtacatgggccacggtgggaagccctgggtctccgacttcagtcaccctcattacctggctgggagaagagccatgaagacagtttttggtgttgagccagacttgaccagggaaggcggcagtattcccgtgaccttgacctttcaggaggccacgggcaagaacgtcatgctgctgcctgtggggtcagcggatgacggagcccactcccagaatgaaaagctcaacaggtataactacatagagggaaccaagatgctggccgcgtacctgtatgaggctgaggcaggaggatcgcttgagaccaagagtttgagcctgcggtgagctgtgaatgcaccacggcactcaagcctgggcaatgtagcaagatcctgtctctacaagaaattttttaaaaatgaggaaagaaattagggcctcctctgatctctcgctatctgcgggtcctgtccttttctcaagaccttcaccattactggtgttttcctgtcttctctttagtatgatccctcaaaacctcactaactggaaggatgattttgtctcagtttgtactcctaaataaaaagtaaacatgacacctctaaaa

SEQ ID NO: 66428 - DNA, 1540 bp, Homo sapiens
tcattatttatttatctcatttacttctattgctctgccaagaccgtgattcccaggaaggtggttggcaagttctccatcaggctcgtgccgaacatgactcctgaagtcgtcggcgagcaggtcacaagctacctaactaagaagtttgctgaactacgcagccccaatgagttcaaggtgtacatgggccacggtgggaagccctgggtctccgacttcagtcaccctcattacctggctgggagaagagccatgaagacagtttttggtgttgagccagacttgaccagggaaggcggcagtattcccgtgaccttgacctttcaggaggccacgggcaagaacgtcatgctgctgcctgtggggtcagcggatgacggagcccactcccagaatgaaaagctcaacaggtataactacatagagggaaccaagatgctggccgcgtacctgtatgaggtctcccagctgaaggactaggccaagccctctgtgtgccatctccaatgagaaggaatcctgccctcacctcacccttttccaacttgcccagggaagtggaggttccctctttcctttccctcttgtcaggtcatccatgactttagagaacagacacaagtgtatccagctgtccacgggtggagctacccgttgggcttatgagtgacctggagtgacagctgagtcaccctgggtaagttctcagagtggtcaggatggcttgacctgcagaagatacccaaggtccaaaagcacaaggtctgcggaaagttctggttgtcggctgggcaccacggctcacacctataatcgagcactttgggaggccaagacaggaggatcacttgaggccaggagtctgagacaagcctaggcaacaaaacaagactctgtctctacaaaaagtttaagaaatgagccagacatggtggtgtatgcctgtagtcccagccactcagaaggctgaggcaggaggatcgcttgagaccaagagtttgagcctgcggtgagctgtgaatgcaccacggcactcaagcctgggcaatgtagcaagatcctgtctctacaagaaattttttaaaaatgagccaagtgtggtggtgcatgcctgtagttccagctactcaggacactgacgtaggagggttgcttgagactgagagttggaggctgcgatgagccatgaatgccccactgcactccagcctgggcgacagaacgagaccccatctcaaaaaaaataagttctggttgtcattgaattgggataaacagagagcttgatgctttctgccttctgtctcaggtgatgcattgcacatttgggatatttggaaaggaaatgaggaaagaaattagggcctcctctgatctctcgctatctgcgggtcctgtccttttctcaagaccttcaccattactggtgttttcctgtcttctctttagtatgatccctcaaaacctcactaactggaaggatgattttgtctcagtttgtactcctaaataaaaagtaaacatgacacctctaaaa

SEQ ID NO: 66429 - DNA, 1110 bp, Homo sapiens
agcggggtggtggccagggcgaccgcggggcgggccagcgccgggggtcgtggccaggacacgtggtacggaaccggcgccgcgcttgctgctggtaacagggccttgcctagtgggccttccttcccaggtcgcccctcagtctccactagagacaggactgaccagttgctcttccttccaagaaccttcgagatctgcggtctggggtctggttgaaagatggcggccctcactaccctgtttaagtacatagatgaaaatcaggatcgctacattaagaaactcgcaaaatgggtggctatccagagtgtgtctgcgtggccggagaagagaggcgaaatcaggaggatgatggaagttgctgctgcagatgttaagcagttggggggctctgtggaactggtggatatcggaaaacaaaagctccctgatggctcggagatcccgctccctcctattctgctcggcaggctgggctccgacccacagaagaagaccgtgtgcatttacgggcacctggatgtgcagcctgcagccctggaggacggctgggacagcgagcccttcaccctggtggagcgagacggcaagctgtatgggagaggttcgactgatgataagggcccggtggccggctggataaacgccctggaagcgtatcagaaaacaggccaggagattcctgtcaacgtccgattctgcctcgaaggcatggaggagtcaggctctgagggcctagacgagctgatttttgcccggaaagacacattctttaaggatgtggactatgtctgcatttctgacaattactggctgggaaagaagaagccctgcatcacctacggcctcaggggcatttgctactttttcatcgaggtggagtgcagcaacaaagacctccattctggggtgtacgggggctcggtgcatgaggccatgactgatctctcgctatctgcgggtcctgtccttttctcaagaccttcaccattactggtgttttcctgtcttctctttagtatgatccctcaaaacctcactaactggaaggatgattttgtctcagtttgtactcctaaataaaaagtaaacatgacacctctaaaa

SEQ ID NO: 66430 - DNA, 430 bp, Homo sapiens
  misc_feature (4)..(4): n is a, c, g, or t
gttncactctagagtatcccctgagacgaccttgtaggagggttgcttgagactgagagttggaggctgcgatgagccatgaatgccccactgcactccagcctgggcgacagaacgagaccccatctcaaaaaaaataagttctggttgtcattgaattgggataaacagagagcttgatgctttctgccttctgtctcaggtgatgcattgcacatttgggatatttggaaaggaaatgaggaaagaaattagggcctcctctgatctctcgctatctgcgggtcctgtccttttctcaagaccttcaccattactggtgttttcctgtcttctctttagtatgatccctcaaaacctcactaactggaaggatgattttgtctcagtttgtactcctaaataaaaagtaaacatgacacctctaaaa

SEQ ID NO: 66431 - DNA, 1086 bp, Homo sapiens
agcggggtggtggccagggcgaccgcggggcgggccagcgccgggggtcgtggccaggacacgtggtacggaaccggcgccgcgcttgctgctggtaacagggccttgcctagtgggccttccttcccaggtcgcccctcagtctccactagagacaggactgaccagttgctcttccttccaagaaccttcgagatctgcggtctggggtctggttgaaagatggcggccctcactaccctgtttaagtacatagatgaaaatcaggatcgctacattaagaaactcgcaaaatgggtggctatccagagtgtgtctgcgtggccggagaagagaggcgaaatcaggaggatgatggaagttgctgctgcagatgttaagcagttggggggctctgtggaactggtggatatcggaaaacaaaagctccctgatggctcggagatcccgctccctcctattctgctcggcaggctgggctccgacccacagaagaagaccgtgtgcatttacgggcacctggatgtgcagcctgcagccctggaggacggctgggacagcgagcccttcaccctggtggagcgagacggcaagctgtatgggagaggttcgactgatgataagggcccggtggccggctggataaacgccctggaagcgtatcagaaaacaggccaggtatgccccccacgctgacttctgcctgagtcctgggttccatctgagccatacaaagacaggctctctgttcacacaacagcttataaagctcacaggaaaagataagacaagcgtcccccagcccttatcagcacagatgactcggatgtaagagtataggtttgttttccagctttaggaaacattcaaagtgtaattgttttacagctgcttaaaggtcacaatattggcgactcagcgtgatttttgccaccgcatgaaatgtgacttttcagtccctgcctgtctctgtgagtgtggtcccttgccagaacatagtgcaggctctgtcacatcacacaggcccctcactgtctctgtgtggtttacgtcctcctaaaaataaattctgatttttaaaatgta

SEQ ID NO: 66432 - DNA, 893 bp, Homo sapiens
ccacgcgtccgcggacgcgtgggcggcattaacgaggccgtggccgccgtcacggaagaggagcacaagctgtacgacgacatcgactttgacatagaggagtttgccaaggatgtgggggcgcagatcctcctgcacagccacaagaaagacatcctcatgcaccgatggcggtacccgtctctgtccctccatggcatcgaaggcgccttctctgggtctggggccaagaccgtgattcccaggaaggtggttggcaagttctccatcaggctcgtgccgaacatgactcctgaagtcgtcggcgagcaggtcacaagctacctaactaagaagtttgctgaactacgcagccccaatgagttcaaggtgtacatgggccacggtgggaagccctgggtctccgacttcagtcaccctcattacctggctgggagaagagccatgaagacagtttttggtgttgagccagacttgaccagggaaggcggcagtattcccgtgaccttgacctttcaggaggccacgggcaagaacgtcatgctgctgcctgtggggtcagcggatgacggagcccactcccagaatgaaaagctcaacaggtataactacatagagggaaccaagatgctggccgcgtacctgtatgaggtctcccagctgaaggactaggccaagccctctgtgtgccatctccaatgagaaggaaagaaattagggcctcctctgatctctcgctatctgcgggtcctgtccttttctcaagaccttcaccattactggtgttttcctgtcttctctttagtatgatccctcaaaacctcactaactggaaggatgattttgtctcagtttgtactcctaaataaaaagtaaacatgacacctctaaaa

SEQ ID NO: 66433 - DNA, 518 bp, Homo sapiens
aaagaaggtaggtacgaggcgggtgtgaatcggccggctggtaacagggccttgcctagtgggccttccttcccaggcatggtggctcatgtgtgtaacctcggcactttgggagaccaaggcggacagatcgcttgagtccaggagttcgagaccagcctgagtaacacgagcaaaccccgtctctacaaaaaatacaaaaattagctgggtgtggtggtgcgcacctgcagtcccagctacttgggaagctgaggcaggaggatcatttgagcctgggagacagaggttgcagtgagccaaaatcacagcaatgcactcctgcctgggtgacagaatgacaacctgtctctaaataaataaataaagttactccgtatgaactttagatttttagaggggagtcaggtgtcatttaaaaggataatgcttttgcttaaatcagcatactgcttttaccttaattagtggtgttctccagagcatataaaaatggttccatttaatggctttgtaac

SEQ ID NO: 66434 - DNA, 236 bp, Homo sapiens
tttaaacaggtactgagtgtaaaacaatatgagagggtctctctcttccctcagtacaaacagtttttaaaatctttaacccaaagcacacgtgatgggtctgtcctatttccaatcagcctgttcaactgcagcagccacagagggtgagcctggaacgtggcaacgttacgggagcctcttctccctcaaggacaccttttcagaatccctcgttgcttcttgtccacaaacag

SEQ ID NO: 66435 - DNA, 363 bp, Homo sapiens
actatgtctgcatttctgacaattactggctgggaaagaagaagccctgcatcacctacggcctcaggggcatttgctactttttcatcgagggtacagtgccaagctgtacgggtcacttctttctaacccctgaatctcccggttctcccaaacgcaaagtagacaaggacccagaagtcaggtgcacaggaaggagaagcacagggctcacttagtgccccaattcccagcttccataaaccaccgtcctacaccagggtggacagcaacacttccagtgatcagaagttaatctcacagcagcatcaaggtaggacagtgtgatttgtaatgttgctttggagcggctgagaggagatt

SEQ ID NO: 66436 - DNA, 658 bp, Homo sapiens
agagcatgcgcgctggagcctgtgtggcctcttggtcaggtgcttgtggaggtttagctgatgccctttggctgtttctggactaagatcatcaactttcttaaactgaatctggttttccttgggctctgtcgtctgtgttgtgggtttgtggtggtggacacaggatgtgacattcttgctgggatccctgaagtgactatatcctctgcaataacagaaagtgaaacttatctttgtgctttaagagtgtaaaaatttttattaaagtaccagtaaaactaaaagtgcctacttttagttttcactgtattttcttcaactcaggccctccctctgttgttacctgccatctgacacggaattttgtgtaattttccttccaagtaaagaagggaagtttagccccagcctctaactggttcccaaagtttttgtctctgaagccgcagtcacttcctggagcgtctctggctgggtgttgcagtgctggctgggagggtggggcaacaatttacaattctgaacacgtgctttctgggcaggtcgcccctcagtctccactagagacaggactgaccagttgctcttccttccaagaaccttcgagatctgcggtctggggtctggttgaaagatggcggccctcactaccctg

SEQ ID NO: 66437 - DNA, 2707 bp, Homo sapiens
agcggggtggtggccagggcgaccgcggggcgggccagcgccgggggtcgtggccaggacacgtggtacggaaccggcgccgcgcttgctgctggtaacagggccttgcctagtgggccttccttcccaggtcgcccctcagtctccactagagacaggactgaccagttgctcttccttccaagaaccttcgagatctgcggtctggggtctggttgaaagatggcggccctcactaccctgtttaagtacatagatgaaaatcaggatcgctacattaagaaactcgcaaaatgggtggctatccagagtgtgtctgcgtggccggagaagagaggcgaaatcaggaggatgatggaagttgctgctgcagatgttaagcagttggggggctctgtggaactggtggatatcggaaaacaaaagctccctgatggctcggagatcccgctccctcctattctgctcggcaggctgggctccgacccacagaagaagaccgtgtgcatttacgggcacctggatgtgcagcctgcagccctggaggacggctgggacagcgagcccttcaccctggtggagcgagacggcaagctgtatgggagaggttcgactgatgataagggcccggtggccggctggataaacgccctggaagcgtatcagaaaacaggccaggagattcctgtcaacgtccgattctgcctcgaaggcatggaggagtcaggctctgagggcctagacgagctgatttttgcccggaaagacacattctttaaggatgtggactatgtctgcatttctgacaattactggctgggaaagaagaagccctgcatcacctacggcctcaggggcatttgctactttttcatcgaggtggagtgcagcaacaaagacctccattctggggtgtacgggggctcggtgcatgaggccatgactgatctcattttgctgatgggctctttggtggacaagagggggaacatcctgatccccggcattaacgaggccgtggccgccgtcacggaagaggagcacaagctgtacgacgacatcgactttgacatagaggagtttgccaaggatgtgggggcgcagatcctcctgcacagccacaagaaagacatcctcatgcaccgatggcggtacccgtctctgtccctccatggcatcgaaggcgccttctctgggtctggggccaagaccgtgattcccaggaaggtggttggcaagttctccatcaggctcgtgccgaacatgactcctgaagtcgtcggcgagcaggtcacaagctacctaactaagaagtttgctgaactacgcagccccaatgagttcaaggtgtacatgggccacggtgggaagccctgggtctccgacttcagtcaccctcattacctggctgggagaagagccatgaagacagtttttggtgttgagccagacttgaccagggaaggcggcagtattcccgtgaccttgacctttcaggaggccacgggcaagaacgtcatgctgctgcctgtggggtcagcggatgacggagcccactcccagaatgaaaagctcaacaggtataactacatagagggaaccaagatgctggccgcgtacctgtatgaggtctcccagctgaaggactaggccaagccctctgtgtgccatctccaatgagaaggaatcctgccctcacctcacccttttccaacttgcccagggaagtggaggttccctctttcctttccctcttgtcaggtcatccatgactttagagaacagacacaagtgtatccagctgtccacgggtggagctacccgttgggcttatgagtgacctggagtgacagctgagtcaccctgggtaagttctcagagtggtcaggatggcttgacctgcagaagatacccaaggtccaaaagcacaaggtctgcggaaagttctggttgtcggctgggcaccacggctcacacctataatcgagcactttgggaggccaagacaggaggatcacttgaggccaggagtctgagacaagcctaggcaacaaaacaagactctgtctctacaaaaagtttaagaaatgagccagacatggtggtgtatgcctgtagtcccagccactcagaaggctgaggcaggaggatcgcttgagaccaagagtttgagcctgcggtgagctgtgaatgcaccacggcactcaagcctgggcaatgtagcaagatcctgtctctacaagaaattttttaaaaatgagccaagtgtggtggtgcatgcctgtagttccagctactcaggacactgacgtaggagggttgcttgagactgagagttggaggctgcgatgagccatgaatgccccactgcactccagcctgggcgacagaacgagaccccatctcaaaaaaaataagttctggttgtcattgaattgggataaacagagagcttgatgctttctgccttctgtctcaggtgatgcattgcacatttgggatatttggaaaggaaatgaggaaagaaattagggcctcctctgatctctcgctatctgcgggtcctgtccttttctcaagaccttcaccattactggtgttttcctgtcttctctttagtatgatccctcaaaacctcactaactggaaggatgattttgtctcagtttgtactcctaaataaaaagtaaacatgacacctctaaaa

SEQ ID NO: 66438 - DNA, 2814 bp, Homo sapiens
tacccagttacaacagctcaagggacagggactgagattctcagaactagaagactcatttgtgtttactactgacggttccaggtgccacagcaatttctcctgccctccactagtctcaacatttaaatcatgatactcccttgccaggcatggtggctcatgtgtgtaacctcggcactttgggagaccaaggcggacagatcgcttgagtccaggagttcgagaccagcctgagtcgcccctcagtctccactagagacaggactgaccagttgctcttccttccaagaaccttcgagatctgcggtctggggtctggttgaaagatggcggccctcactaccctgtttaagtacatagatgaaaatcaggatcgctacattaagaaactcgcaaaatgggtggctatccagagtgtgtctgcgtggccggagaagagaggcgaaatcaggaggatgatggaagttgctgctgcagatgttaagcagttggggggctctgtggaactggtggatatcggaaaacaaaagctccctgatggctcggagatcccgctccctcctattctgctcggcaggctgggctccgacccacagaagaagaccgtgtgcatttacgggcacctggatgtgcagcctgcagccctggaggacggctgggacagcgagcccttcaccctggtggagcgagacggcaagctgtatgggagaggttcgactgatgataagggcccggtggccggctggataaacgccctggaagcgtatcagaaaacaggccaggagattcctgtcaacgtccgattctgcctcgaaggcatggaggagtcaggctctgagggcctagacgagctgatttttgcccggaaagacacattctttaaggatgtggactatgtctgcatttctgacaattactggctgggaaagaagaagccctgcatcacctacggcctcaggggcatttgctactttttcatcgaggtggagtgcagcaacaaagacctccattctggggtgtacgggggctcggtgcatgaggccatgactgatctcattttgctgatgggctctttggtggacaagagggggaacatcctgatccccggcattaacgaggccgtggccgccgtcacggaagaggagcacaagctgtacgacgacatcgactttgacatagaggagtttgccaaggatgtgggggcgcagatcctcctgcacagccacaagaaagacatcctcatgcaccgatggcggtacccgtctctgtccctccatggcatcgaaggcgccttctctgggtctggggccaagaccgtgattcccaggaaggtggttggcaagttctccatcaggctcgtgccgaacatgactcctgaagtcgtcggcgagcaggtcacaagctacctaactaagaagtttgctgaactacgcagccccaatgagttcaaggtgtacatgggccacggtgggaagccctgggtctccgacttcagtcaccctcattacctggctgggagaagagccatgaagacagtttttggtgttgagccagacttgaccagggaaggcggcagtattcccgtgaccttgacctttcaggaggccacgggcaagaacgtcatgctgctgcctgtggggtcagcggatgacggagcccactcccagaatgaaaagctcaacaggtataactacatagagggaaccaagatgctggccgcgtacctgtatgaggtctcccagctgaaggactaggccaagccctctgtgtgccatctccaatgagaaggaatcctgccctcacctcacccttttccaacttgcccagggaagtggaggttccctctttcctttccctcttgtcaggtcatccatgactttagagaacagacacaagtgtatccagctgtccacgggtggagctacccgttgggcttatgagtgacctggagtgacagctgagtcaccctgggtaagttctcagagtggtcaggatggcttgacctgcagaagatacccaaggtccaaaagcacaaggtctgcggaaagttctggttgtcggctgggcaccacggctcacacctataatcgagcactttgggaggccaagacaggaggatcacttgaggccaggagtctgagacaagcctaggcaacaaaacaagactctgtctctacaaaaagtttaagaaatgagccagacatggtggtgtatgcctgtagtcccagccactcagaaggctgaggcaggaggatcgcttgagaccaagagtttgagcctgcggtgagctgtgaatgcaccacggcactcaagcctgggcaatgtagcaagatcctgtctctacaagaaattttttaaaaatgagccaagtgtggtggtgcatgcctgtagttccagctactcaggacactgacgtaggagggttgcttgagactgagagttggaggctgcgatgagccatgaatgccccactgcactccagcctgggcgacagaacgagaccccatctcaaaaaaaataagttctggttgtcattgaattgggataaacagagagcttgatgctttctgccttctgtctcaggtgatgcattgcacatttgggatatttggaaaggaaatgaggaaagaaattagggcctcctctgatctctcgctatctgcgggtcctgtccttttctcaagaccttcaccattactggtgttttcctgtcttctctttagtatgatccctcaaaacctcactaactggaaggatgattttgtctcagtttgtactcctaaataaaaagtaaacatgacacctctaaaa

SEQ ID NO: 66439 - DNA, 2918 bp, Homo sapiens
aaagaaggtaggtacgaggcgggtgtgaatcggccggctggtaacagggccttgcctagtgggccttccttcccaggcatggtggctcatgtgtgtaacctcggcactttgggagaccaaggcggacagatcgcttgagtccaggagttcgagaccagcctgatgaaagtcgtaacttagataattacagtcatatgttgcttaaggatggggatacattccaagaaaatgcattgttaggcgattcgttgttgtgtgcacatcctgagctgcgctcacacaaacctggatggtacagcctcctacatacctaggctatatggtgtagcctattgctcctaggctacaaacccgtacatgtacctttactggatgctgtaggcagttgtaacacagtgccttcgagatctgcggtctggggtctggttgaaagatggcggccctcactaccctgtttaagtacatagatgaaaatcaggatcgctacattaagaaactcgcaaaatgggtggctatccagagtgtgtctgcgtggccggagaagagaggcgaaatcaggaggatgatggaagttgctgctgcagatgttaagcagttggggggctctgtggaactggtggatatcggaaaacaaaagctccctgatggctcggagatcccgctccctcctattctgctcggcaggctgggctccgacccacagaagaagaccgtgtgcatttacgggcacctggatgtgcagcctgcagccctggaggacggctgggacagcgagcccttcaccctggtggagcgagacggcaagctgtatgggagaggttcgactgatgataagggcccggtggccggctggataaacgccctggaagcgtatcagaaaacaggccaggagattcctgtcaacgtccgattctgcctcgaaggcatggaggagtcaggctctgagggcctagacgagctgatttttgcccggaaagacacattctttaaggatgtggactatgtctgcatttctgacaattactggctgggaaagaagaagccctgcatcacctacggcctcaggggcatttgctactttttcatcgaggtggagtgcagcaacaaagacctccattctggggtgtacgggggctcggtgcatgaggccatgactgatctcattttgctgatgggctctttggtggacaagagggggaacatcctgatccccggcattaacgaggccgtggccgccgtcacggaagaggagcacaagctgtacgacgacatcgactttgacatagaggagtttgccaaggatgtgggggcgcagatcctcctgcacagccacaagaaagacatcctcatgcaccgatggcggtacccgtctctgtccctccatggcatcgaaggcgccttctctgggtctggggccaagaccgtgattcccaggaaggtggttggcaagttctccatcaggctcgtgccgaacatgactcctgaagtcgtcggcgagcaggtcacaagctacctaactaagaagtttgctgaactacgcagccccaatgagttcaaggtgtacatgggccacggtgggaagccctgggtctccgacttcagtcaccctcattacctggctgggagaagagccatgaagacagtttttggtgttgagccagacttgaccagggaaggcggcagtattcccgtgaccttgacctttcaggaggccacgggcaagaacgtcatgctgctgcctgtggggtcagcggatgacggagcccactcccagaatgaaaagctcaacaggtataactacatagagggaaccaagatgctggccgcgtacctgtatgaggtctcccagctgaaggactaggccaagccctctgtgtgccatctccaatgagaaggaatcctgccctcacctcacccttttccaacttgcccagggaagtggaggttccctctttcctttccctcttgtcaggtcatccatgactttagagaacagacacaagtgtatccagctgtccacgggtggagctacccgttgggcttatgagtgacctggagtgacagctgagtcaccctgggtaagttctcagagtggtcaggatggcttgacctgcagaagatacccaaggtccaaaagcacaaggtctgcggaaagttctggttgtcggctgggcaccacggctcacacctataatcgagcactttgggaggccaagacaggaggatcacttgaggccaggagtctgagacaagcctaggcaacaaaacaagactctgtctctacaaaaagtttaagaaatgagccagacatggtggtgtatgcctgtagtcccagccactcagaaggctgaggcaggaggatcgcttgagaccaagagtttgagcctgcggtgagctgtgaatgcaccacggcactcaagcctgggcaatgtagcaagatcctgtctctacaagaaattttttaaaaatgagccaagtgtggtggtgcatgcctgtagttccagctactcaggacactgacgtaggagggttgcttgagactgagagttggaggctgcgatgagccatgaatgccccactgcactccagcctgggcgacagaacgagaccccatctcaaaaaaaataagttctggttgtcattgaattgggataaacagagagcttgatgctttctgccttctgtctcaggtgatgcattgcacatttgggatatttggaaaggaaatgaggaaagaaattagggcctcctctgatctctcgctatctgcgggtcctgtccttttctcaagaccttcaccattactggtgttttcctgtcttctctttagtatgatccctcaaaacctcactaactggaaggatgattttgtctcagtttgtactcctaaataaaaagtaaacatgacacctctaaaa

SEQ ID NO: 66440 - DNA, 2683 bp, Homo sapiens
aaagaaggtaggtacgaggcgggtgtgaatcggccggctggtaacagggccttgcctagtgggccttccttcccaggcatggtggctcatgtgtgtaacctcggcactttgggagaccaaggcggacagatcgcttgagtccaggagttcgagaccagcctgaccttcgagatctgcggtctggggtctggttgaaagatggcggccctcactaccctgtttaagtacatagatgaaaatcaggatcgctacattaagaaactcgcaaaatgggtggctatccagagtgtgtctgcgtggccggagaagagaggcgaaatcaggaggatgatggaagttgctgctgcagatgttaagcagttggggggctctgtggaactggtggatatcggaaaacaaaagctccctgatggctcggagatcccgctccctcctattctgctcggcaggctgggctccgacccacagaagaagaccgtgtgcatttacgggcacctggatgtgcagcctgcagccctggaggacggctgggacagcgagcccttcaccctggtggagcgagacggcaagctgtatgggagaggttcgactgatgataagggcccggtggccggctggataaacgccctggaagcgtatcagaaaacaggccaggagattcctgtcaacgtccgattctgcctcgaaggcatggaggagtcaggctctgagggcctagacgagctgatttttgcccggaaagacacattctttaaggatgtggactatgtctgcatttctgacaattactggctgggaaagaagaagccctgcatcacctacggcctcaggggcatttgctactttttcatcgaggtggagtgcagcaacaaagacctccattctggggtgtacgggggctcggtgcatgaggccatgactgatctcattttgctgatgggctctttggtggacaagagggggaacatcctgatccccggcattaacgaggccgtggccgccgtcacggaagaggagcacaagctgtacgacgacatcgactttgacatagaggagtttgccaaggatgtgggggcgcagatcctcctgcacagccacaagaaagacatcctcatgcaccgatggcggtacccgtctctgtccctccatggcatcgaaggcgccttctctgggtctggggccaagaccgtgattcccaggaaggtggttggcaagttctccatcaggctcgtgccgaacatgactcctgaagtcgtcggcgagcaggtcacaagctacctaactaagaagtttgctgaactacgcagccccaatgagttcaaggtgtacatgggccacggtgggaagccctgggtctccgacttcagtcaccctcattacctggctgggagaagagccatgaagacagtttttggtgttgagccagacttgaccagggaaggcggcagtattcccgtgaccttgacctttcaggaggccacgggcaagaacgtcatgctgctgcctgtggggtcagcggatgacggagcccactcccagaatgaaaagctcaacaggtataactacatagagggaaccaagatgctggccgcgtacctgtatgaggtctcccagctgaaggactaggccaagccctctgtgtgccatctccaatgagaaggaatcctgccctcacctcacccttttccaacttgcccagggaagtggaggttccctctttcctttccctcttgtcaggtcatccatgactttagagaacagacacaagtgtatccagctgtccacgggtggagctacccgttgggcttatgagtgacctggagtgacagctgagtcaccctgggtaagttctcagagtggtcaggatggcttgacctgcagaagatacccaaggtccaaaagcacaaggtctgcggaaagttctggttgtcggctgggcaccacggctcacacctataatcgagcactttgggaggccaagacaggaggatcacttgaggccaggagtctgagacaagcctaggcaacaaaacaagactctgtctctacaaaaagtttaagaaatgagccagacatggtggtgtatgcctgtagtcccagccactcagaaggctgaggcaggaggatcgcttgagaccaagagtttgagcctgcggtgagctgtgaatgcaccacggcactcaagcctgggcaatgtagcaagatcctgtctctacaagaaattttttaaaaatgagccaagtgtggtggtgcatgcctgtagttccagctactcaggacactgacgtaggagggttgcttgagactgagagttggaggctgcgatgagccatgaatgccccactgcactccagcctgggcgacagaacgagaccccatctcaaaaaaaataagttctggttgtcattgaattgggataaacagagagcttgatgctttctgccttctgtctcaggtgatgcattgcacatttgggatatttggaaaggaaatgaggaaagaaattagggcctcctctgatctctcgctatctgcgggtcctgtccttttctcaagaccttcaccattactggtgttttcctgtcttctctttagtatgatccctcaaaacctcactaactggaaggatgattttgtctcagtttgtactcctaaataaaaagtaaacatgacacctctaaaa

SEQ ID NO: 66441 - DNA, 2774 bp, Homo sapiens
agcggggtggtggccagggcgaccgcggggcgggccagcgccgggggtcgtggccaggacacgtggtacggaaccggcgccgcgcttgctgctggtaacagggccttgcctagtgggccttccttcccaggtcgcccctcagtctccactagagacaggactgaccagttgctcttccttccaagaaccttcgagatctgcggtctggggtctggttgaaagatggcggccctcactaccctgtttaagtacatagatgaaaatcaggatcgctacattaagaaactcgcaaaatgggtggctatccagagtgtgtctgcgtggccggagaagagaggcgaaatcaggaggatgatggaagttgctgctgcagatgttaagcagttggggggctctgtggaactggtggatatcggaaaacaaaagctccctgatggctcggagatcccgctccctcctattctgctcggcaggctgggctccgacccacagaagaagaccgtgtgcatttacgggcacctggatgtgcagcctgcagccctggaggacggctgggacagcgagcccttcaccctggtggagcgagacggcaagctgtatgggagaggttcgactgatgataagggcccggtggccggctggataaacgccctggaagcgtatcagaaaacaggccaggagattcctgtcaacgtccgattctgcctcgaaggcatggaggagtcaggctctgagggcctagacgagctgatttttgcccggaaagacacattctttaaggatgtggactatgtctgcatttctgacaattactggctgggaaagaagaagccctgcatcacctacggcctcaggggcatttgctactttttcatcgaggtggagtgcagcaacaaagacctccattctggggtgtacgggggctcggtgcatgaggccatgactgatctcattttgctgatgggctctttggtggacaagagggggaacatcctgatccccggcattaacgaggccgtggccgccgtcacggaagaggagcacaagctgtacgacgacatcgactttgacatagaggagtttgccaaggatgtgggggcgcagatcctcctgcacagccacaagaaagacatcctcatgcaccgatggcggtacccgtctctgtccctccatggcatcgaaggcgccttctctgggtctggggccaagaccgtgattcccaggaaggtggttggcaagttctccatcaggctcgtgccgaacatgactcctgaagtcgtcggcgagcaggtcacaagctacctaactaagaagtttgctgaactacgcagccccaatgagttcaaggtgtacatgggccacggtgggaagccctgggtctccgacttcagtcaccctcattacctggctgggagaagagccatgaagacagtttttggtgttgagccagacttgaccagggaaggcggcagtattcccgtgaccttgacctttcaggaggccacgggcaagaacgtcatgctgctgcctgtggggtcagcggatgacggagcccactcccagaatgaaaagctcaacaggtataactacatagagggaaccaagatgctggccgcgtacctgtatgaggtctcccagctgaaggactaggccaagccctctgtgtgccatctccaatgagaaggaatcctgccctcacctcacccttttccaacttgcccagggaagtggaggttccctctttcctttccctcttgtcaggtcatccatgactttagagaacagacacaagtgtatccagctgtccacgggtggagctacccgttgggcttatgagtgacctggagtgacagctgagtcaccctgggtaagttctcagagtggtcaggatggcttgacctgcagaagatacccaaggtccaaaagcacaaggtctgcggaaagttctggttgtcggctgggcaccacggctcacacctataatcgagcactttgggaggccaagacaggaggatcacttgaggccaggagtctgagacaagcctaggcaacaaaacaagactctgtctctacaaaaagtttaagaaatgagccagacatggtggtgtatgcctgtagtcccagccactcagaaggctgaggcaggaggatcgcttgagaccaagagtttgagcctgcggtgagctgtgaatgcaccacggcactcaagcctgggcaatgtagcaagatcctgtctctacaagaaattttttaaaaatgagccaagtgtggtggtgcatgcctgtagttccagctactcaggacactgacgtaggagggttgcttgagactgagagttggaggctgcgatgagccatgaatgccccactgcactccagcctgggcgacagaacgagaccccatctcaaaaaaaataagttctggttgtcattgaattgggataaacagagagcttgatgctttctgccttctgtctcaggtgatgcattgcacatttgggatatttggaaaggaaatgaggaaagaaattagggcctcctctgatctctcgctatctgcgggtcctgtccttttctcaagaccttcaccattactggtgttttcctgtcttctctttagtatgatccctcaaaacctcactaactggaaggatgattttgtctcagtttgtactcctaaataaaaagtaaacatgacacctctaaaaaaacagacatgaacacaacgagtccacccaacacacacacaacaatacaacaacaacaacaaggggg

SEQ ID NO: 66442 - DNA, 3002 bp, Homo sapiens
aaacctggccctagttctagactatggaacctggcctagcctggtttgactggatgagtgattaacaggagttgctttttagcccatctctgatggtggaacaatctgatccctgtttcctctcttttagtgaaagtcgtaacttagataattacagtcatatgttgcttaaggatggggatacattccaagaaaatgcattgttaggcgattcgttgttgtgtgcacatcctgagctgcgctcacacaaacctggatggtacagcctcctacatacctaggctatatggtgtagcctattgctcctaggctacaaacccgtacatgtacctttactggatgctgtaggcagttgtaacacagtgccttcgagatctgcggtctggggtctggttgaaagatggcggccctcactaccctgtttaagtacatagatgaaaatcaggatcgctacattaagcctgttcaactgcagcagccacagagggtgagcctggaacgtggcaacgttacgggagcctcttctccctcaaggacaccttttcagaatccctcgttgcttcttgtccacaaacagaaactcgcaaaatgggtggctatccagagtgtgtctgcgtggccggagaagagaggcgaaatcaggaggatgatggaagttgctgctgcagatgttaagcagttggggggctctgtggaactggtggatatcggaaaacaaaagctccctgatggctcggagatcccgctccctcctattctgctcggcaggctgggctccgacccacagaagaagaccgtgtgcatttacgggcacctggatgtgcagcctgcagccctggaggacggctgggacagcgagcccttcaccctggtggagcgagacggcaagctgtatgggagaggttcgactgatgataagggcccggtggccggctggataaacgccctggaagcgtatcagaaaacaggccaggagattcctgtcaacgtccgattctgcctcgaaggcatggaggagtcaggctctgagggcctagacgagctgatttttgcccggaaagacacattctttaaggatgtggactatgtctgcatttctgacaattactggctgggaaagaagaagccctgcatcacctacggcctcaggggcatttgctactttttcatcgaggtggagtgcagcaacaaagacctccattctggggtgtacgggggctcggtgcatgaggccatgactgatctcattttgctgatgggctctttggtggacaagagggggaacatcctgatccccggcattaacgaggccgtggccgccgtcacggaagaggagcacaagctgtacgacgacatcgactttgacatagaggagtttgccaaggatgtgggggcgcagatcctcctgcacagccacaagaaagacatcctcatgcaccgatggcggtacccgtctctgtccctccatggcatcgaaggcgccttctctgggtctggggccaagaccgtgattcccaggaaggtggttggcaagttctccatcaggctcgtgccgaacatgactcctgaagtcgtcggcgagcaggtcacaagctacctaactaagaagtttgctgaactacgcagccccaatgagttcaaggtgtacatgggccacggtgggaagccctgggtctccgacttcagtcaccctcattacctggctgggagaagagccatgaagacagtttttggtgttgagccagacttgaccagggaaggcggcagtattcccgtgaccttgacctttcaggaggccacgggcaagaacgtcatgctgctgcctgtggggtcagcggatgacggagcccactcccagaatgaaaagctcaacaggtataactacatagagggaaccaagatgctggccgcgtacctgtatgaggtctcccagctgaaggactaggccaagccctctgtgtgccatctccaatgagaaggaatcctgccctcacctcacccttttccaacttgcccagggaagtggaggttccctctttcctttccctcttgtcaggtcatccatgactttagagaacagacacaagtgtatccagctgtccacgggtggagctacccgttgggcttatgagtgacctggagtgacagctgagtcaccctgggtaagttctcagagtggtcaggatggcttgacctgcagaagatacccaaggtccaaaagcacaaggtctgcggaaagttctggttgtcggctgggcaccacggctcacacctataatcgagcactttgggaggccaagacaggaggatcacttgaggccaggagtctgagacaagcctaggcaacaaaacaagactctgtctctacaaaaagtttaagaaatgagccagacatggtggtgtatgcctgtagtcccagccactcagaaggctgaggcaggaggatcgcttgagaccaagagtttgagcctgcggtgagctgtgaatgcaccacggcactcaagcctgggcaatgtagcaagatcctgtctctacaagaaattttttaaaaatgagccaagtgtggtggtgcatgcctgtagttccagctactcaggacactgacgtaggagggttgcttgagactgagagttggaggctgcgatgagccatgaatgccccactgcactccagcctgggcgacagaacgagaccccatctcaaaaaaaataagttctggttgtcattgaattgggataaacagagagcttgatgctttctgccttctgtctcaggtgatgcattgcacatttgggatatttggaaaggaaatgaggaaagaaattagggcctcctctgatctctcgctatctgcgggtcctgtccttttctcaagaccttcaccattactggtgttttcctgtcttctctttagtatgatccctcaaaacctcactaactggaaggatgattttgtctcagtttgtactcctaaataaaaagtaaacatgacacctctaaaa

SEQ ID NO: 66443 - DNA, 2673 bp, Homo sapiens
agcggggtggtggccagggcgaccgcggggcgggccagcgccgggggtcgtggccaggacacgtggtacggaaccggcgccgcgcttgctgctggtaacagggccttgcctagtgggccttccttcccaggtcgcccctcagtctccactagagacaggactgaccagttgctcttccttccaagaaccttcgagatctgcggtctggggtctggttgaaagatggcggccctcactaccctgtttaagtacatagatgaaaatcaggatcgctacattaagaaactcgcaaaatgggtggctatccagagtgtgtctgcgtggccggagaagagaggcgaaatcaggaggatgatggaagttgctgctgcagatgttaagcagttggggggctctgtggaactggtggatatcggaaaacaaaagctccctgatggctcggagatcccgctccctcctattctgctcggcaggctgggctccgacccacagaagaagaccgtgtgcatttacgggcacctggatgtgcagcctgcagccctggaggacggctgggacagcgagcccttcaccctggtggagcgagacggcaagctgtatgggagaggttcgactgatgataagggcccggtggccggctggataaacgccctggaagcgtatcagaaaacaggccaggagattcctgtcaacgtccgattctgcctcgaaggcatggaggagtcaggctctgagggcctagacgagctgatttttgcccggaaagacacattctttaaggatgtggactatgtctgcatttctgacaattactggctgggaaagaagaagccctgcatcacctacggcctcaggggcatttgctactttttcatcgaggtggagtgcagcaacaaagacctccattctggggtgtacgggggctcggtgcatgaggccatgactgatctcattttgctgatgggctctttggtggacaagagggggaacatcctgatccccggcattaacgaggccgtggccgccgtcacggaagaggagcacaagctgtacgacgacatcgactttgacatagaggagtttgccaaggatgtgggggcgcagatcctcctgcacagccacaagaaagacatcctcatgcaccgatggcggtacccgtctctgtccctccatggcatcgaaggcgccttctctgggtctggggccaagaccgtgattcccaggaaggtggttggcaagttctccatcaggctcgtgccgaacatgactcctgaagtcgtcggcgagcaggtcacaagctacctaactaagaagtttgctgaactacgcagccccaatgagttcaaggtgtacatgggccacggtgggaagccctgggtctccgacttcagtcaccctcattacctggctgggagaagagccatgaagacagtttttggtgttgagccagacttgaccagggaaggcggcagtattcccgtgaccttgacctttcaggaggccacgggcaagaacgtcatgctgctgcctgtggggtcagcggatgacggagcccactcccagaatgaaaagctcaacaggtataactacatagagggaaccaagatgctggccgcgtacctgtatgaggtctcccagctgaaggactaggccaagccctctgtgtgccatctccaatgagaaggaatcctgccctcacctcacccttttccaacttgcccagggaagtggaggttccctctttcctttccctcttgtcaggtcatccatgactttagagaacagacacaagtgtatccagctgtccacgggtggagctacccgttgggcttatgagtgacctggagtgacagctgagtcaccctgggtaagttctcagagtggtcaggatggcttgacctgcagaagatacccaaggtccaaaagcacaaggtctgcggaaagttctggttgtcggctgggcaccacggctcacacctataatcgagcactttgggaggccaagacaggaggatcacttgaggccaggagtctgagacaagcctaggcaacaaaacaagactctgtctctacaaaaagtttaagaaatgagccagacatggtggtgtatgcctgtagtcccagccactcagaaggctgaggcaggaggatcgcttgagaccaagagtttgagcctgcggtgagctgtgaatgcaccacggcactcaagcctgggcaatgtagcaagatcctgtctctacaagaaattttttaaaaatgagccaagtgtggtggtgcatgcctgtagttccagctactcaggacactgacgtaggagggttgcttgagactgagagttggaggctgcgatgagccatgaatgccccactgcactccagcctgggcgacagaacgagaccccatctcaaaaaaaataagttctggttgtcattgaattgggataaacagagagcttgatgctttctgccttctgtctcaggtgatgcattgcacatttgggatatttggaaaggaaatgaggaaagaaattagggcctcctctgatctctcgctatctgcgggtcctgtccttttctcaagaccttcaccattactggtgttttcctgtatacacctatcccccattctcctcctatccctcaaccccggcatcattaccgggttttcctttta

SEQ ID NO: 66444 - DNA, 2188 bp, Homo sapiens
  misc_feature (46)..(46): n is a, c, g, or t
ttatcgagctggctaccagtttcgacggagactctcccatacagcnagcccttactggtggagcgagacggcaagctgtatgggagaggttcgactgatgataagggcccggtggccggctggataaacgccctggaagcgtatcagaaaacaggccaggagattcctgtcaacgtccgattctgcctcgaaggcatggaggagtcaggctctgagggcctagacgagctgatttttgcccggaaagacacattctttaaggatgtggactatgtctgcatttctgacaattactggctgggaaagaagaagccctgcatcacctacggcctcaggggcatttgctactttttcatcgaggtggagtgcagcaacaaagacctccattctggggtgtacgggggctcggtgcatgaggccatgactgatctcattttgctgatgggctctttggtggacaagagggggaacatcctgatccccggcattaacgaggccgtggccgccgtcacggaagaggagcacaagctgtacgacgacatcgactttgacatagaggagtttgccaaggatgtgggggcgcagatcctcctgcacagccacaagaaagacatcctcatgcaccgatggcggtacccgtctctgtccctccatggcatcgaaggcgccttctctgggtctggggccaagaccgtgattcccaggaaggtggttggcaagttctccatcaggctcgtgccgaacatgactcctgaagtcgtcggcgagcaggtcacaagctacctaactaagaagtttgctgaactacgcagccccaatgagttcaaggtgtacatgggccacggtgggaagccctgggtctccgacttcagtcaccctcattacctggctgggagaagagccatgaagacagtttttggtgttgagccagacttgaccagggaaggcggcagtattcccgtgaccttgacctttcaggaggccacgggcaagaacgtcatgctgctgcctgtggggtcagcggatgacggagcccactcccagaatgaaaagctcaacaggtataactacatagagggaaccaagatgctggccgcgtacctgtatgaggtctcccagctgaaggactaggccaagccctctgtgtgccatctccaatgagaaggaatcctgccctcacctcacccttttccaacttgcccagggaagtggaggttccctctttcctttccctcttgtcaggtcatccatgactttagagaacagacacaagtgtatccagctgtccacgggtggagctacccgttgggcttatgagtgacctggagtgacagctgagtcaccctgggtaagttctcagagtggtcaggatggcttgacctgcagaagatacccaaggtccaaaagcacaaggtctgcggaaagttctggttgtcggctgggcaccacggctcacacctataatcgagcactttgggaggccaagacaggaggatcacttgaggccaggagtctgagacaagcctaggcaacaaaacaagactctgtctctacaaaaagtttaagaaatgagccagacatggtggtgtatgcctgtagtcccagccactcagaaggctgaggcaggaggatcgcttgagaccaagagtttgagcctgcggtgagctgtgaatgcaccacggcactcaagcctgggcaatgtagcaagatcctgtctctacaagaaattttttaaaaatgagccaagtgtggtggtgcatgcctgtagttccagctactcaggacactgacgtaggagggttgcttgagactgagagttggaggctgcgatgagccatgaatgccccactgcactccagcctgggcgacagaacgagaccccatctcaaaaaaaataagttctggttgtcattgaattgggataaacagagagcttgatgctttctgccttctgtctcaggtgatgcattgcacatttgggatatttggaaaggaaatgaggaaagaaattagggcctcctctgatctctcgctatctgcgggtcctgtccttttctcaagaccttcaccattactggtgttttcctgtcttctctttagtatgatccctcaaaacctcactaactggaaggatgattttgtctcagtttgtactcctaaataaaaagtaaacatgacacctctaaaa

SEQ ID NO: 66445 - DNA, 2928 bp, Homo sapiens
agcggggtggtggccagggcgaccgcggggcgggccagcgccgggggtcgtggccaggacacgtggtacggaaccggcgccgcgcttgctgctggtaacagggccttgcctagtgggccttccttcccaggtcgcccctcagtctccactagagacaggactgaccagttgctcttccttccaagaaccttcgagatctgcggtctggggtctggttgaaagatggcggccctcactaccctgtttaagtacatagatgaaaatcaggatcgctacattaagaaactcgcaaaatgggtggctatccagagtgtgtctgcgtggccggagaagagaggcgaaatcaggaggatgatggaagttgctgctgcagatgttaagcagttggggggctctgtggaactggtggatatcggaaaacaaaagctccctgatggctcggagatcccgctccctcctattctgctcggcaggctgggctccgacccacagaagaagaccgtgtgcatttacgggcacctggatgtgcagcctgcagccctggaggacggctgggacagcgagcccttcaccctggtggagcgagacggcaagctgtatgggagaggttcgactgatgataagggcccggtggccggctggataaacgccctggaagcgtatcagaaaacaggccaggagattcctgtcaacgtccgattctgcctcgaaggcatggaggagtcaggctctgagggcctagacgagctgatttttgcccggaaagacacattctttaaggatgtggactatgtctgcatttctgacaattactggctgggaaagaagaagccctgcatcacctacggcctcaggggcatttgctactttttcatcgagggtacagtgccaagctgtacgggtcacttctttctaacccctgaatctcccggttctcccaaacgcaaagtagacaaggacccagaagtcaggtgcacaggaaggagaagcacagggctcacttagtgccccaattcccagcttccataaaccaccgtcctacaccagggtggacagcaacacttccagtgatcagaagttaatctcacagcagcatcaaggtggagtgcagcaacaaagacctccattctggggtgtacgggggctcggtgcatgaggccatgactgatctcattttgctgatgggctctttggtggacaagagggggaacatcctgatccccggcattaacgaggccgtggccgccgtcacggaagaggagcacaagctgtacgacgacatcgactttgacatagaggagtttgccaaggatgtgggggcgcagatcctcctgcacagccacaagaaagacatcctcatgcaccgatggcggtacccgtctctgtccctccatggcatcgaaggcgccttctctgggtctggggccaagaccgtgattcccaggaaggtggttggcaagttctccatcaggctcgtgccgaacatgactcctgaagtcgtcggcgagcaggtcacaagctacctaactaagaagtttgctgaactacgcagccccaatgagttcaaggtgtacatgggccacggtgggaagccctgggtctccgacttcagtcaccctcattacctggctgggagaagagccatgaagacagtttttggtgttgagccagacttgaccagggaaggcggcagtattcccgtgaccttgacctttcaggaggccacgggcaagaacgtcatgctgctgcctgtggggtcagcggatgacggagcccactcccagaatgaaaagctcaacaggtataactacatagagggaaccaagatgctggccgcgtacctgtatgaggtctcccagctgaaggactaggccaagccctctgtgtgccatctccaatgagaaggaatcctgccctcacctcacccttttccaacttgcccagggaagtggaggttccctctttcctttccctcttgtcaggtcatccatgactttagagaacagacacaagtgtatccagctgtccacgggtggagctacccgttgggcttatgagtgacctggagtgacagctgagtcaccctgggtaagttctcagagtggtcaggatggcttgacctgcagaagatacccaaggtccaaaagcacaaggtctgcggaaagttctggttgtcggctgggcaccacggctcacacctataatcgagcactttgggaggccaagacaggaggatcacttgaggccaggagtctgagacaagcctaggcaacaaaacaagactctgtctctacaaaaagtttaagaaatgagccagacatggtggtgtatgcctgtagtcccagccactcagaaggctgaggcaggaggatcgcttgagaccaagagtttgagcctgcggtgagctgtgaatgcaccacggcactcaagcctgggcaatgtagcaagatcctgtctctacaagaaattttttaaaaatgagccaagtgtggtggtgcatgcctgtagttccagctactcaggacactgacgtaggagggttgcttgagactgagagttggaggctgcgatgagccatgaatgccccactgcactccagcctgggcgacagaacgagaccccatctcaaaaaaaataagttctggttgtcattgaattgggataaacagagagcttgatgctttctgccttctgtctcaggtgatgcattgcacatttgggatatttggaaaggaaatgaggaaagaaattagggcctcctctgatctctcgctatctgcgggtcctgtccttttctcaagaccttcaccattactggtgttttcctgtcttctctttagtatgatccctcaaaacctcactaactggaaggatgattttgtctcagtttgtactcctaaataaaaagtaaacatgacacctctaaaa

SEQ ID NO: 66446 - DNA, 1871 bp, Homo sapiens
agcggggtggtggccagggcgaccgcggggcgggccagcgccgggggtcgtggccaggacacgtggtacggaaccggcgccgcgcttgctgctggtaacagggccttgcctagtgggccttccttcccaggtcgcccctcagtctccactagagacaggactgaccagttgctcttccttccaagaaccttcgagatctgcggtctggggtctggttgaaagatggcggccctcactaccctgtttaagtacatagatgaaaatcaggatcgctacattaagaaactcgcaaaatgggtggctatccagagtgtgtctgcgtggccggagaagagaggcgaaatcaggaggatgatggaagttgctgctgcagatgttaagcagttggggggctctgtggaactggtggatatcggaaaacaaaagctccctgatggctcggagatcccgctccctcctattctgctcggcaggctgggctccgacccacagaagaagaccgtgtgcatttacgggcacctggatgtgcagcctgcagccctggaggacggctgggacagcgagcccttcaccctggtggagcgagacggcaagctgtatgggagaggttcgactgatgataagggcccggtggccggctggataaacgccctggaagcgtatcagaaaacaggccaggagattcctgtcaacgtccgattctgcctcgaaggcatggaggagtcaggctctgagggcctagacgagctgatttttgcccggaaagacacattctttaaggatgtggactatgtctgcatttctgacaattactggctgggaaagaagaagccctgcatcacctacggcctcaggggcatttgctactttttcatcgaggtggagtgcagcaacaaagacctccattctggggtgtacgggggctcggtgcatgaggccatgactgatctcattttgctgatgggctctttggtggacaagagggggaacatcctgatccccggcattaacgaggccgtggccgccgtcacggaagaggagcacaagctgtacgacgacatcgactttgacatagaggagtttgccaaggatgtgggggcgcagatcctcctgcacagccacaagaaagacatcctcatgcaccgatggcggtacccgtctctgtccctccatggcatcgaaggcgccttctctgggtctggggccaagaccgtgattcccaggaaggtggttggcaagttctccatcaggctcgtgccgaacatgactcctgaagtcgtcggcgagcaggtcacaagctacctaactaagaagtttgctgaactacgcagccccaatgagttcaaggtgtacatgggccacggtgggaagccctgggtctccgacttcagtcaccctcattacctggctgggagaagagccatgaagacagtttttggtgttgagccagacttgaccagggaaggcggcagtattcccgtgaccttgacctttcaggaggccacgggcaagaacgtcatgctgctgcctgtggggtcagcggatgacggagcccactcccagaatgaaaagctcaacaggtataactacatagagggaaccaagatgctggccgcgtacctgtatgaggtctcccagctgaaggactaggccaagccctctgtgtgccatctccaatgagaaggaaagaaattagggcctcctctgatctctcgctatctgcgggtcctgtccttttctcaagaccttcaccattactggtgttttcctgtcttctctttagtatgatccctcaaaacctcactaactggaaggatgattttgtctcagtttgtactcctaaataaaaagtaaacatgacacctctaaaa

SEQ ID NO: 66447 - DNA, 1331 bp, Homo sapiens
aattcgcggccgcgtcgaccgacagaagggggctgggagaagagccatgaagacagtttttggtgttgagccagacttgaccagggaaggcggcagtattcccgtgaccttgacctttcaggaggccacgggcaagaacgtcatgctgctgcctgtggggtcagcggatgacggagcccactcccagaatgaaaagctcaacaggtataactacatagagggaaccaagatgctggccgcgtacctgtatgaggtctcccagctgaaggactaggccaagccctctgtgtgccatctccaatgagaaggaatcctgccctcacctcacccttttccaacttgcccagggaagtggaggttccctctttcctttccctcttgtcaggtcatccatgactttagagaacagacacaagtgtatccagctgtccacgggtggagctacccgttgggcttatgagtgacctggagtgacagctgagtcaccctgggtaagttctcagagtggtcaggatggcttgacctgcagaagatacccaaggtccaaaagcacaaggtctgcggaaagttctggttgtcggctgggcaccacggctcacacctataatcgagcactttgggaggccaagacaggaggatcacttgaggccaggagtctgagacaagcctaggcaacaaaacaagactctgtctctacaaaaagtttaagaaatgagccagacatggtggtgtatgcctgtagtcccagccactcagaaggctgaggcaggaggatcgcttgagaccaagagtttgagcctgcggtgagctgtgaatgcaccacggcactcaagcctgggcaatgtagcaagatcctgtctctacaagaaattttttaaaaatgagccaagtgtggtggtgcatgcctgtagttccagctactcaggacactgacgtaggagggttgcttgagactgagagttggaggctgcgatgagccatgaatgccccactgcactccagcctgggcgacagaacgagaccccatctcaaaaaaaataagttctggttgtcattgaattgggataaacagagagcttgatgctttctgccttctgtctcaggtgatgcattgcacatttgggatatttggaaaggaaatgaggaaagaaattagggcctcctctgatctctcgctatctgcgggtcctgtccttttctcaagaccttcaccattactggtgttttcctgtcttctctttagtatgatccctcaaaacctcactaactggaaggatgattttgtctcagtttgtactcctaaataaaaagtaaacatgacacctctaaaa

SEQ ID NO: 66448 - DNA, 1118 bp, Homo sapiens
agcggggtggtggccagggcgaccgcggggcgggccagcgccgggggtcgtggccaggacacgtggtacggaaccggcgccgcgcttgctgctggtaacagggccttgcctagtgggccttccttcccaggtcgcccctcagtctccactagagacaggactgaccagttgctcttccttccaagaaccttcgagatctgcggtctggggtctggttgaaagatggcggccctcactaccctgtttaagtacatagatgaaaatcaggatcgctacattaagaaactcgcaaaatgggtggctatccagagtgtgtctgcgtggccggagaagagaggcgaaatcaggaggatgatggaagttgctgctgcagatgttaagcagttggggggctctgtggaactggtggatatcggaaaacaaaagctccctgatggctcggagatcccgctccctcctattctgctcggcaggctgggctccgacccacagaagaagaccgtgtgcatttacgggcacctggatgtgcagcctgcagccctggaggacggctgggacagcgagcccttcaccctggtggagcgagacggcaagctgtatgggagaggttcgactgatgataagggcccggtggccggctggataaacgccctggaagcgtatcagaaaacaggccaggagattcctgtcaacgtccgattctgcctcgaaggcatggaggagtcaggctctgagggcctagacgagctgatttttgcccggaaagacacattctttaaggatgtggactatgtctgcatttctgacaattactggctgggaaagaagaagccctgcatcacctacggcctcaggggcatttgctactttttcatcgaggtggagtgcagcaacaaagacctccattctggggtgtacgggggctcggtgcatgaggccatgactgatctcattttgctgatgggctcttgggtggcagagggggacctctgtcccggttacgagccgggcgcgtcggagaggcccagcgtcgcgactccttgctacggttgcccgctggggggcccccgggccaagaccccggcgggggccctccccgaggccccggggcccctccg

SEQ ID NO: 66449 - DNA, 876 bp, Homo sapiens
agcggggtggtggccagggcgaccgcggggcgggccagcgccgggggtcgtggccaggacacgtggtacggaaccggcgccgcgcttgctgctggtaacagggccttgcctagtgggccttccttcccaggtcgcccctcagtctccactagagacaggactgaccagttgctcttccttccaagaaccttcgagatctgcggtctggggtctggttgaaagatggcggccctcactaccctgtttaagtacatagatgaaaatcaggatcgctacattaagaaactcgcaaaatgggtggctatccagagtgtgtctgcgtggccggagaagagaggcgaaatcaggaggatgatggaagttgctgctgcagatgttaagcagttggggggctctgtggaactggtggatatcggaaaacaaaagctccctgatggctcggagatcccgctccctcctattctgctcggcaggctgggctccgacccacagaagaagaccgtgtgcatttacgggcacctggatgtgcagcctgcagccctggaggacggctgggacagcgagcccttcaccctggtggagcgagacggcaagctgtatgggagaggttcgactgatgataagggcccggtggccggctggataaacgccctggaagcgtatcagaaaacaggccagctgcttaaaggtcacaatattggcgactcagcgtgatttttgccaccgcatgaaatgtgacttttcagtccctgcctgtctctgtgagtgtggtcccttgccagaacatagtgcaggctctgtcacatcacacaggcccctcactgtctctgtgtggtttacgtcctcctaaaaataaattctgatttttaaaatgta

SEQ ID NO: 66450 - DNA, 801 bp, Homo sapiens
agcggggtggtggccagggcgaccgcggggcgggccagcgccgggggtcgtggccaggacacgtggtacggaaccggcgccgcgcttgctgctggtaacagggccttgcctagtgggccttccttcccaggtcgcccctcagtctccactagagacaggactgaccagttgctcttccttccaagaaccttcgagatctgcggtctggggtctggttgaaagatggcggccctcactaccctgtttaagtacatagatgaaaatcaggatcgctacattaagaaactcgcaaaatgggtggctatccagagtgtgtctgcgtggccggagaagagaggcgaaatcaggaggatgatggaagttgctgctgcagatgttaagcagttggggggctctgtggaactggtggatatcggaaaacaaaaggtaggaggcaacattctttgcattgcaggaccgtagacagattctgcctgaggggttgacaagacgccacaagttcttaaaagatcttttgcttcacataccccactcacctttaaaacaaaaaaggaagggcctgatttggatggtaagttctgtacgtgactgcttcagttggattggggcaaaggttttgtggcactcagcatttttctccaggaaggagaactgctgacagttactcaggactaagttaatgtaacagtcattctgagagaatggctgagattcccctcccagcaatccataagctttcaaactaggaagttacactttattcaagtccatttaaaaattataaagactccccccaacccc

SEQ ID NO: 66451 - DNA, 538 bp, Homo sapiens
ggcccccaagctgggatgggggatgctccccaggaagaaggcagagtgtgtctgggctcgggaggagtcaccccacacctgggtgttggctcacgacaccagccaacacaatgatgtgttcctctctaccaggtataactacatagagggaaccaagatgctggccgcgtacctgtatgaggtctcccagctgaaggactaggccaagccctctgtgtgccatctccaatgagaaggaatcctgccctcacctcacccttttccaacttgcccagggaagtggaggttccctctttcctttccctcttgtcaggtcatccatgactttagagaacagacacaagtgtatccagctgtccacgggtggagctacccgttgggcttatgagtgacctggagtgacagctgagtcaccctgggtaagttctcagagtggtcaggatggcttgacctgcagaagatacccaaggtccaaaagcacaaggtctgcggaaagttctggttgtcggctgggcaccacggctcacacctataatcg

SEQ ID NO: 66452 - DNA, 2111 bp, Homo sapiens
  misc_feature (16)..(16): n is a, c, g, or t
  misc_feature (19)..(19): n is a, c, g, or t
  misc_feature (48)..(48): n is a, c, g, or t
  misc_feature (100)..(100): n is a, c, g, or t
  misc_feature (1236)..(1236): n is a, c, g, or t
  misc_feature (1762)..(1762): n is a, c, g, or t
ggcacccaggcctgtnagngaggctggtcccatggccttcctcttccnccaccaccaccggctgcccaggtggcccccatcgtgtccccagggaacgctnggccatggccacaaggggctcatggagagggcagcctggctccctcccaggccaaggcccggccggacgactcctgtaaacccaagagtgtctatgagaacttccgactctggcagcactacaagcccctggcccggaggcaccttccccagagtcctgacactgaagcgctttcctgcttcctcatcccagttctccgatccctggcccggcggaagcccaccatgacgctggaggagggactgtggcaggccatgcgggaatggcagcacacgagcaactttgaccggatgatcttctacgagatggcggaaaagttcctggaatttgaggctgaggaggagatgcagattcagaaatcgcagtggatgaaggggccccagagcctgcctcctccagccccgccgaggcttgaacctcgaggaccccctgcccctgaggtggtcaagcagccagtgtaccttcccagcaaggatggccccaaggccccgactgcctgcctgccaccacccaggccccagaggccagcggagaccaaggcccacctgccaccacccaggccccagaggccagcggagaccaacgcccacctgccaccacccaggccccagaggccagcggagaccaaggtccctgaggagatcccccctgaagtggtgcaggagtatgtggacatcatggaggagctgctggggtctcaccctggggacacaggggagcctgagggacaacgggaaaagggcaaagtggagcagccgcaggaagaggacgggataacctcagacccgggcctcctgagctacattgacaagctgtgttcccaggaagactttgtcaccaaggtggaggccgtcattcacccccgattcctggaagaattgctttccccagatccacagatggatttcttggccctaagccaggagctggagcaggaggaaggactcacccttgcccagctagtggagaagcgcctcctgtccttgaaggagaaagggtgcgggagggcagcccctcgacatggcacggccaggttggactcaagtccttctgagtttgcagctggccaagaagcagcgagagaggtccctgacccccaacaaagggtcagcgtggaaacctccccaccccagacngctgcccaggaccctcagggacagggcagagtgcgcactggcatggccaggtccgaagaccctgctgtgcttttgggatgtcaggattcccccaggctgaaggctgtccggccaacctctcctccccaggaccacagacccacctgccccggcctggggaccaaggacgccttgggtctccctggagagtctcctgtcaaggagtcacatgggctggctaaggggtcaagtgaggagacggaactccctggcatggtctatgtcgtgggttcccaccacaggctgaggccctggaggctgtcccagagccctgtcccttcctcgggccttctcagcccaggagggagaggaccccagggagctcttcagtctccatctgctcagaaaagaggcctcagcccatcacctcctgccagcaagtccaagaagcgacctctctttggaagcccatcccctgctgaaaagacaccgcacccagggcctgggctcagggtctctggggagcaatccctggcttgggggctgngtggcccctcacagtctcaaaagagaaagggtgaccccttggcctccaggaggaagaagaagcggcattgtagccagtaggggccgccatggggcagactctctgatgccagtccccaaaagtggggctctgaagtctcggaccctcatggcacccggtgccccaaagcaaaggctgcttctcctccagtgctgatcttgctgggccttagctttggagggtaggggaaggaggggagggagaaggtggctgaacggggagggcaggaagggagggcctggggggtgggaagcagtgccttgggggccttgtgtgtaaatgtgaataaatgtagttgttttggaaaatg

SEQ ID NO: 66453 - DNA, 415 bp, Homo sapiens
ttttgctgtttgtgcttttggtgtcatacattcagaatgctttgcctcctccaaagtcatcaacatttattactgtatttctttttaagaattttatagtttgagcccttgtatttaggtctatgatccatattgggttaactttgtgtactgtgttgttgtaggtgcccaaattctttctcttggacgtggatatccagttgctccagcaatatttgtcaaaatggctattttttccctatcaaattctcttgaaatccttgtcaatatcaactgatcctaaatgctcattactgaactctcattccattccatttcattgacaaatatgtctacacttatgccagtactgctctatcgtaattactgtagctttatggtaagttttgaaatcagtaagcatgagtcctctgac

SEQ ID NO: 66454 - DNA, 1325 bp, Homo sapiens
  misc_feature (1209)..(1209): n is a, c, g, or t
  misc_feature (1217)..(1217): n is a, c, g, or t
  misc_feature (1280)..(1281): n is a, c, g, or t
  misc_feature (1283)..(1283): n is a, c, g, or t
  misc_feature (1323)..(1324): n is a, c, g, or t
ccaggctctagggacagaaccttcccaaggcgggggggaggggagactctgattttcccgccgaaagcgtccccttggattggctactttaaattcagagtacgcacacgccgatttgcccttttgattcttccacaatcagggtgagactgctcccagtgccatgaacggagacgacgcctttgcaaggagacccagggatgatgctcaaatatcagagaagttacgaaaggccttcgatgatattgccaaatacttctctaagaaagagtgggaaaagatgaaatcctcggagaaaatcgtctatgtgtatatgaagctaaactatgaggtcatgactaaactaggtttcaaggtcaccctcccacctttcatgcgtagtaaacgggctgcagacttccacgggaatgattttggtaacgatcgaaaccacaggaatcaggttgaacgtcctcagatgactttcggcagcctccagagaatcttcccgaagatcatgcccaagaagccagcagaggaagaaaatggtttgaaggaagtgccagaggcatctggcccacaaaatgatgggaaacagctgtgccccccgggaaatccaagtaccttggagaagattaacaagacatctggacccaaaagggggaaacatgcctggacccacagactgcgtgagagaaagcagctggtggtttatgaagagatcagcgaccctgaggaagatgacgagtaactcccctcggggatatgacacatgcccatgatgagaagcagaacgtggtgacctttcacgaacatgggcatggctgcggacccctcgtcatcaggtgcatagcaagtgaaagcaagtgttcacaacagtgaaaagttgagcgtcatttttcttagtgtgccaagagttcgatgttggcgtttccgctgtattttcttgcagtgtgccattctgttagacattagcgttttcgttgatgagcaagacatgcttaatgcatatttcggcttgtgtatccatgcacctacctcagaaaacaagtattgtcaggtattctctccatagaacagcactaccctcctctctccccagatgtgactactgaggggaggtctgagtgtttaatttccgattttttcctctgcatttacacacacaccacacacgcacacacacacaccaagtaccagtataagcatctcccatctgcttttctccantgccatgngtcctggtcaagcccccctcactctgtttcctgttcagcatgtactcccctcatccgattccnntntatcagtcactgacagttaataaacctttgcaaacgttcnnc

SEQ ID NO: 66455 - DNA, 984 bp, Homo sapiens
  misc_feature (868)..(868): n is a, c, g, or t
  misc_feature (876)..(876): n is a, c, g, or t
  misc_feature (939)..(940): n is a, c, g, or t
  misc_feature (942)..(942): n is a, c, g, or t
  misc_feature (982)..(983): n is a, c, g, or t
gactcacaacctctgctgcagaatgccctcatgcgacagaagtctctctagagtttggaaatctttaccaacaaagaaaaattctgatgtattctctttcagttgaacgtcctcagatgactttcggcagcctccagagaatcttcccgaagatcatgcccaagaagccagcagaggaagaaaatggtttgaaggaagtgccagaggcatctggcccacaaaatgatgggaaacagctgtgccccccgggaaatccaagtaccttggagaagattaacaagacatctggacccaaaagggggaaacatgcctggacccacagactgcgtgagagaaagcagctggtggtttatgaagagatcagcgaccctgaggaagatgacgagtaactcccctcggggatatgacacatgcccatgatgagaagcagaacgtggtgacctttcacgaacatgggcatggctgcggacccctcgtcatcaggtgcatagcaagtgaaagcaagtgttcacaacagtgaaaagttgagcgtcatttttcttagtgtgccaagagttcgatgttggcgtttccgctgtattttcttgcagtgtgccattctgttagacattagcgttttcgttgatgagcaagacatgcttaatgcatatttcggcttgtgtatccatgcacctacctcagaaaacaagtattgtcaggtattctctccatagaacagcactaccctcctctctccccagatgtgactactgaggggaggtctgagtgtttaatttccgattttttcctctgcatttacacacacaccacacacgcacacacacacaccaagtaccagtataagcatctcccatctgcttttctccantgccatgngtcctggtcaagcccccctcactctgtttcctgttcagcatgtactcccctcatccgattccnntntatcagtcactgacagttaataaacctttgcaaacgttcnnc

SEQ ID NO: 66456 - DNA, 1718 bp, Homo sapiens
agccgagcgccgactcacgccccagccccaattgggcggccggtttccaattggaagggcttctgagcctcagtcttcgggcggcgctgaccattggcgggcaggatggaggcggagccttgggtcgtcgcccgccgccgggggttaaggtgagcgactgcaggcaaacccggcgacagcgcagctcgcgtcgaccctggctcctctgcctgccccctcaggcccccgcctccttcaggatgacgctggacgtggggccggaggatgagctgcccgactgggccgccgccaaagagttttaccagaagtacgaccctaaggacgtcatcggcagaggagtgagctctgtggtccgccgttgtgttcatcgagctactggccacgagtttgcggtgaagattatggaagtgacagctgagcggctgagtcctgagcagctggaggaggtgcgggaagccacacggcgagagacacacatccttcgccaggtcgccggccacccccacatcatcaccctcatcgattcctacgagtcttctagcttcatgttcctggtgtttgacctgatgcggaagggagagctgtttgactatctcacagagaaggtggccctctctgaaaaggaaaccaggtccatcatgcggtctctgctggaagcagtgagctttctccatgccaacaacattgtgcatcgagatctgaagcccgagaatattctcctagatgacaatatgcagatccgactttcagatttcgggttctcctgccacttggaacctggcgagaagcttcgagagttgtgtgggaccccagggtatctagcgccagagatccttaaatgctccatggatgaaacccacccaggctatggcaaggaggtcgacctctgggcctgtggggtgatcttgttcacactcctggctggctcgccacccttctggcaccggcggcagatcctgatgttacgcatgatcatggagggccagtaccagttcagttcccccgagtgggatgaccgttccagcactgtcaaagacctgatctccaggctgctgcaggtggatcctgaggcacgcctgacagctgagcaggccctacagcaccccttctttgagcgttgtgaaggcagccaaccctggaacctcaccccccgccagcggttccgggtggcagtgtggacagtgctggctgctggacgagtggccctaagcacccatcgtgtacggccactgaccaagaatgcactgttgagggacccttatgcgctgcggtcagtgcggcacctcatcgacaactgtgccttccggctctacgggcactgggtaaagaaaggggagcagcagaaccgggcggctctctttcagcaccggccccctgggccttttcccatcatgggccctgaagaggagggagactctgctgctataactgaggatgaggccgtgcttgtgctgggctaggacctcaaccccagggattcccaggaagcagaactctccagaagaagggttttgatcattccagctcctctgggctctggcctcaggcccactaatgatcctgctaccctcttgaagaccagcccggtacctctctccccactggccaggactctgagatcagagctggggtggaagggagccattctgaacgccacgcctggcccggtcagtgctgcatgcactgcatatgaaataaaatctgctacacgccaggga

SEQ ID NO: 66457 - DNA, 888 bp, Homo sapiens
  misc_feature (786)..(786): n is a, c, g, or t
gaaaaggtagtagcaggctgtgtgttgaatcggacgagcaggcaaacccggcgacagcgcagctcgcgtcgaccctggctcctctgcctgccccctcaggcccccgcctccttcaggatgacgctggacgtggggccggaggatgagctgcccgactgggccgccgccaaagagttttaccagaagtacgaccctaaggacgtcatcggcagaggagtgagctctgtggtccgccgttgtgttcatcgagctactggccacgagtttgcggtgaagattatggaagtgacagctgagcggctgagtcctgagcagctggaggaggtgcgggaagccacacggcgagagacacacatccttcgccaggtcgccggccacccccacatcatcaccctcatcgattcctacgagtcttctagcttcatgttcctggtgtttgacctgatgcggaagggagagctgtttgactatctcacagagaaggtggccctctctgaaaaggaaaccaggtccatcatgcggtctctgctggaagcagtgagctttctccatgccaacaacattgtgcatcgagatctgaagcccgagaatattctcctagatgacaatatgcagatccgactttcagatttcgggttctcctgccacttggaacctggcgagaagcttcgagagttgtgtgggaccccagggtatctagcgccagagatccttaaatgctccatggatgaaacccacccaggctatggcaaggaggtcgacctctgggctgtggggtgatcttgnttccacaactcctggccttggcctccgcccaccccttctgggccaccccgcgccggccaggcaattccgtcggactcggtcgacccgccactggatcactgg

SEQ ID NO: 66458 - DNA, 1585 bp, Homo sapiens
gctggtacaggtcccaaggcgtatgatcaggcaaacccggcgacagcgcagctcgcgtcgaccctggctcctctgcctgccccctcaggcccccgcctccttcaggatgacgctggacgtggggccggaggatgagctgcccgactgggccgccgccaaagagttttaccagaagtacgaccctaaggacgtcatcggcagaggagtgagctctgtggtccgccgttgtgttcatcgagctactggccacgagtttgcggtgaagattatggaagtgacagctgagcggctgagtcctgagcagctggaggaggtgcgggaagccacacggcgagagacacacatccttcgccaggtcgccggccacccccacatcatcaccctcatcgattcctacgagtcttctagcttcatgttcctggtgtttgacctgatgcggaagggagagctgtttgactatctcacagagaaggtggccctctctgaaaaggaaaccaggtccatcatgcggtctctgctggaagcagtgagctttctccatgccaacaacattgtgcatcgagatctgaagcccgagaatattctcctagatgacaatatgcagatccgactttcagatttcgggttctcctgccacttggaacctggcgagaagcttcgagagttgtgtgggaccccagggtatctagcgccagagatccttaaatgctccatggatgaaacccacccaggctatggcaaggaggtcgacctctgggcctgtggggtgatcttgttcacactcctggctggctcgccacccttctggcaccggcggcagatcctgatgttacgcatgatcatggagggccagtaccagttcagttcccccgagtgggatgaccgttccagcactgtcaaagacctgatctccaggctgctgcaggtggatcctgaggcacgcctgacagctgagcaggccctacagcaccccttctttgagcgttgtgaaggcagccaaccctggaacctcaccccccgccagcggttccgggtggcagtgtggacagtgctggctgctggacgagtggccctaagcacccatcgtgtacggccactgaccaagaatgcactgttgagggacccttatgcgctgcggtcagtgcggcacctcatcgacaactgtgccttccggctctacgggcactgggtaaagaaaggggagcagcagaaccgggcggctctctttcagcaccggccccctgggccttttcccatcatgggccctgaagaggagggagactctgctgctataactgaggatgaggccgtgcttgtgctgggctaggacctcaaccccagggattcccaggaagcagaactctccagaagaagggttttgatcattccagctcctctgggctctggcctcaggcccactaatgatcctgctaccctcttgaagaccagcccggtacctctctccccactggccaggactctgagatcagagctggggtggaagggagccattctgaacgccacgcctggcccggtcagtgctgcatgcactgcatatgaaataaaatctgctacacgccaggga

SEQ ID NO: 66459 - DNA, 1853 bp, Homo sapiens
agccgagcgccgactcacgccccagccccaattgggcggccggtttccaattggaagggcttctgagcctcagtcttcgggcggcgctgaccattggcgggcaggatggaggcggagccttgggtcgtcgcccgccgccgggggttaaggtgagcgactgcaggcaaacccggcgacagcgcagctcgcgtcgaccctggctcctctgcctgccccctcaggcccccgcctccttcaggatgacgctggacgtggggccggaggatgagctgcccgactgggccgccgccaaagagttttaccagaagtacgaccctaaggacgtcatcggcagaggagtgagctctgtggtccgccgttgtgttcatcgagctactggccacgagtttgcggtgaagattatggaagtgacagctgagcggctgagtcctgagcagctggaggaggtgcgggaagccacacggcgagagacacacatccttcgccaggtcgccggccacccccacatcatcaccctcatcgattcctacgagtcttctagcttcatgttcctggtgtttgacctgatgcggaagggagagctgtttgactatctcacagagaaggtggccctctctgaaaaggaaaccaggtccatcatgcggtctctgctggaagcagtgagctttctccatgccaacaacattgtgcatcgagatctgaagcccgagaatattctcctagatgacaatatgcagatccgactttcagatttcgggttctcctgccacttggaacctggcgagaagcttcgagagttgtgtgggaccccagggtatctagcgccagagatccttaaatgctccatggatgaaacccacccaggctatggcaaggaggtcgacctctgggcctgtggggtgatcttgttcacactcctggctggctcgccacccttctggcaccggcggcagatcctgatgttacgcatgatcatggagggccagtaccagttcagttcccccgagtgggatgaccgttccagcactgtcaaagacctgatctccaggctgctgcaggtggatcctgaggcacgcctgacagctgagcaggccctacagcaccccttctttgagcgttgtgaaggcagccaaccctggaacctcaccccccgccagcggttccgggtggcagtgtggacagtgctggctgctggacgagtggccctaagcacccatcgtgtacggccactgaccaagaatgcactgttgagggacccttatgcgctgcggtcagtgcggcacctcatcgacaactgtgccttccggctctacgggcactgggtaaagaaaggggagcagcagaaccgggcggctctctttcagcaccggccccctgggccttttcccatcatgggccctgaagaggagggagactctgctgctataactgaggatgaggccgtgcttgtgctgggctaggacctcaaccccagggattcccaggaagcagaactctccagaagaagggttttgatcattccagctcctctgggctctggcctcaggcccactaatgatcctgctaccctcttgaagaccagcccggtacctctctccccactggccaggactctgagatcagagctggggtggaagggagccattctgaacgccacgcctggcccggtcagtgctgcatgcactgcatatgaaataaaatctgctacacgccagggaaaaaaaaaaaatatttttatatataaattttatttagtgttagttttcccaaaaaacctctgggggcggcctggtaccaaatttgcccttatttgggtgtttttatgggcccctttttgccagtgtgtaaaaagg

SEQ ID NO: 66460 - DNA, 1787 bp, Homo sapiens
agccgagcgccgactcacgccccagccccaattgggcggccggtttccaattggaagggcttctgagcctcagtcttcgggcggcgctgaccattggcgggcaggatggaggcggagccttgggtcgtcgcccgccgccgggggttaaggtgagcgactgcaggcaaacccggcgacagcgcagctcgcgtcgaccctggctcctctgcctgccccctcaggcccccgcctccttcaggatgacgctggacgtggggccggaggatgagctgcccgactgggccgccgccaaagagttttaccagaagtacgaccctaaggacgtcatcggcagaggagtgagctctgtggtccgccgttgtgttcatcgagctactggccacgagtttgcggtgaagattatggaagtgacagctgagcggctgagtcctgagcagctggaggaggtgcgggaagccacacggcgagagacacacatccttcgccaggtcgccggccacccccacatcatcaccctcatcgattcctacgagtcttctagcttcatgttcctggtgtttgacctgatgcggaagggagagctgtttgactatctcacagagaaggtggccctctctgaaaaggaaaccaggtccatcatgcggtctctgctggaagcagtgagctttctccatgccaacaacattgtgcatcgagatctgaagcccgagaatattctcctagatgacaatatgcagatccgactttcagatttcgggttctcctgccacttggaacctggcgagaagcttcgagagttgtgtgggaccccagggtatctagcgccagagatccttaaatgctccatggatgaaacccacccaggctatggcaaggaggtcgacctctgggcctgtggggtgatcttgttcacactcctggctggctcgccacccttctggcaccggcggcagatcctgatgttacgcatgatcatggagggccagtaccagttcagttcccccgagtgggatgaccgttccagcactgtcaaagacctggtgagcgggggctgagaggacagtaggggaggcccaagagctgcccctcatgctctgggtctctcctagatctccaggctgctgcaggtggatcctgaggcacgcctgacagctgagcaggccctacagcaccccttctttgagcgttgtgaaggcagccaaccctggaacctcaccccccgccagcggttccgggtggcagtgtggacagtgctggctgctggacgagtggccctaagcacccatcgtgtacggccactgaccaagaatgcactgttgagggacccttatgcgctgcggtcagtgcggcacctcatcgacaactgtgccttccggctctacgggcactgggtaaagaaaggggagcagcagaaccgggcggctctctttcagcaccggccccctgggccttttcccatcatgggccctgaagaggagggagactctgctgctataactgaggatgaggccgtgcttgtgctgggctaggacctcaaccccagggattcccaggaagcagaactctccagaagaagggttttgatcattccagctcctctgggctctggcctcaggcccactaatgatcctgctaccctcttgaagaccagcccggtacctctctccccactggccaggactctgagatcagagctggggtggaagggagccattctgaacgccacgcctggcccggtcagtgctgcatgcactgcatatgaaataaaatctgctacacgccaggga

SEQ ID NO: 66461 - DNA, 1552 bp, Homo sapiens
cccaccccccaggaccctggcgccccagctgcaagggctgcgcccccgggagccgccatgcgggtcgtctcagagcctgtgggcctccctgccctcactgccctcctgcctccgcgcaggcccccgcctccttcaggatgacgctggacgtggggccggaggatgagctgcccgactgggccgccgccaaagagttttaccagaagtacgaccctaaggacgtcatcggcagaggagtgagctctgtggtccgccgttgtgttcatcgagctactggccacgagtttgcggtgaagattatggaagtgacagctgagcggctgagtcctgagcagctggaggagtcaccctcatcgattcctacgagtcttctagcttcatgttcctggtgtttgacctgatgcggaagggagagctgtttgactatctcacagagaaggtggccctctctgaaaaggaaaccaggtccatcatgcggtctctgctggaagcagtgagctttctccatgccaacaacattgtgcatcgagatctgaagcccgagaatattctcctagatgacaatatgcagatccgactttcagatttcgggttctcctgccacttggaacctggcgagaagcttcgagagttgtgtgggaccccagggtatctagcgccagagatccttaaatgctccatggatgaaacccacccaggctatggcaaggaggtcgacctctgggcctgtggggtgatcttgttcacactcctggctggctcgccacccttctggcaccggcggcagatcctgatgttacgcatgatcatggagggccagtaccagttcagttcccccgagtgggatgaccgttccagcactgtcaaagacctgatctccaggctgctgcaggtggatcctgaggcacgcctgacagctgagcaggccctacagcaccccttctttgagcgttgtgaaggcagccaaccctggaacctcaccccccgccagcggttccgggtggcagtgtggacagtgctggctgctggacgagtggccctaagcacccatcgtgtacggccactgaccaagaatgcactgttgagggacccttatgcgctgcggtcagtgcggcacctcatcgacaactgtgccttccggctctacgggcactgggtaaagaaaggggagcagcagaaccgggcggctctctttcagcaccggccccctgggccttttcccatcatgggccctgaagaggagggagactctgctgctataactgaggatgaggccgtgcttgtgctgggctaggacctcaaccccagggattcccaggaagcagaactctccagaagaagggttttgatcattccagctcctctgggctctggcctcaggcccactaatgatcctgctaccctcttgaagaccagcccggtacctctctccccactggccaggactctgagatcagagctggggtggaagggagccattctgaacgccacgcctggcccggtcagtgctgcatgcactgcatatgaaataaaatctgctacacgccaggga

SEQ ID NO: 66462 - DNA, 1508 bp, Homo sapiens
gctggtacaggtcccaaggcgtatgatcaggcaaacccggcgacagcgcagctcgcgtcgaccctggctcctctgcctgccccctcaggcccccgcctccttcaggatgacgctggacgtggggccggaggatgagctgcccgactgggccgccgccaaagagttttaccagaagtacgaccctaaggacgtcatcggcagaggagtgagctctgtggtccgccgttgtgttcatcgagctactggccacgagtttgcggtgaagattatggaagtgacagctgagcggctgagtcctgagcagctggaggaggtgcgggaagccacacggcgagagacacacatccttcgccaggatgcggaagggagagctgtttgactatctcacagagaaggtggccctctctgaaaaggaaaccaggtccatcatgcggtctctgctggaagcagtgagctttctccatgccaacaacattgtgcatcgagatctgaagcccgagaatattctcctagatgacaatatgcagatccgactttcagatttcgggttctcctgccacttggaacctggcgagaagcttcgagagttgtgtgggaccccagggtatctagcgccagagatccttaaatgctccatggatgaaacccacccaggctatggcaaggaggtcgacctctgggcctgtggggtgatcttgttcacactcctggctggctcgccacccttctggcaccggcggcagatcctgatgttacgcatgatcatggagggccagtaccagttcagttcccccgagtgggatgaccgttccagcactgtcaaagacctgatctccaggctgctgcaggtggatcctgaggcacgcctgacagctgagcaggccctacagcaccccttctttgagcgttgtgaaggcagccaaccctggaacctcaccccccgccagcggttccgggtggcagtgtggacagtgctggctgctggacgagtggccctaagcacccatcgtgtacggccactgaccaagaatgcactgttgagggacccttatgcgctgcggtcagtgcggcacctcatcgacaactgtgccttccggctctacgggcactgggtaaagaaaggggagcagcagaaccgggcggctctctttcagcaccggccccctgggccttttcccatcatgggccctgaagaggagggagactctgctgctataactgaggatgaggccgtgcttgtgctgggctaggacctcaaccccagggattcccaggaagcagaactctccagaagaagggttttgatcattccagctcctctgggctctggcctcaggcccactaatgatcctgctaccctcttgaagaccagcccggtacctctctccccactggccaggactctgagatcagagctggggtggaagggagccattctgaacgccacgcctggcccggtcagtgctgcatgcactgcatatgaaataaaatctgctacacgccaggga

SEQ ID NO: 66463 - DNA, 775 bp, Homo sapiens
gaggctacttagaggatccccattggatagcggatggggccagtaccagttcagttcccccgagtgggatgaccgttccagcactgtcaaagacctgatctccaggctgctgcaggtggatcctgaggcacgcctgacagctgagcaggccctacagcaccccttctttgagcgttgtgaaggcagccaaccctggaacctcaccccccgccagcggttccgggtggcagtgtggacagtgctggctgctggacgagtggccctaagcacccatcgtgtacggccactgaccaagaatgcactgttgagggacccttatgcgctgcggtcagtgcggcacctcatcgacaactgtgccttccggctctacgggcactgggtaaagaaaggggagcagcagaaccgggcggctctctttcagcaccggccccctgggccttttcccatcatgggccctgaagaggagggagactctgctgctataactgaggatgaggccgtgcttgtgctgggctaggacctcaaccccagggattcccaggaagcagaactctccagaagaagggttttgatcattccagctcctctgggctctggcctcaggcccactaatgatcctgctaccctcttgaagaccagcccggtacctctctccccactggccaggactctgagatcagagctggggtggaagggagccattctgaacgccacgcctggcccggtcagtgctgcatgcactgcatatgaaataaaatctgctacacgccaggga

SEQ ID NO: 66464 - DNA, 1010 bp, Homo sapiens
  misc_feature (908)..(908): n is a, c, g, or t
agccgagcgccgactcacgccccagccccaattgggcggccggtttccaattggaagggcttctgagcctcagtcttcgggcggcgctgaccattggcgggcaggatggaggcggagccttgggtcgtcgcccgccgccgggggttaaggtgagcgactgcaggcaaacccggcgacagcgcagctcgcgtcgaccctggctcctctgcctgccccctcaggcccccgcctccttcaggatgacgctggacgtggggccggaggatgagctgcccgactgggccgccgccaaagagttttaccagaagtacgaccctaaggacgtcatcggcagaggagtgagctctgtggtccgccgttgtgttcatcgagctactggccacgagtttgcggtgaagattatggaagtgacagctgagcggctgagtcctgagcagctggaggaggtgcgggaagccacacggcgagagacacacatccttcgccaggtcgccggccacccccacatcatcaccctcatcgattcctacgagtcttctagcttcatgttcctggtgtttgacctgatgcggaagggagagctgtttgactatctcacagagaaggtggccctctctgaaaaggaaaccaggtccatcatgcggtctctgctggaagcagtgagctttctccatgccaacaacattgtgcatcgagatctgaagcccgagaatattctcctagatgacaatatgcagatccgactttcagatttcgggttctcctgccacttggaacctggcgagaagcttcgagagttgtgtgggaccccagggtatctagcgccagagatccttaaatgctccatggatgaaacccacccaggctatggcaaggaggtcgacctctgggctgtggggtgatcttgnttccacaactcctggccttggcctccgcccaccccttctgggccaccccgcgccggccaggcaattccgtcggactcggtcgacccgccactggatcactgg

SEQ ID NO: 66465 - DNA, 1142 bp, Homo sapiens
  misc_feature (868)..(868): n is a, c, g, or t
  misc_feature (870)..(870): n is a, c, g, or t
  misc_feature (965)..(965): n is a, c, g, or t
  misc_feature (990)..(990): n is a, c, g, or t
  misc_feature (1049)..(1049): n is a, c, g, or t
  misc_feature (1086)..(1086): n is a, c, g, or t
  misc_feature (1092)..(1092): n is a, c, g, or t
  misc_feature (1139)..(1139): n is a, c, g, or t
agccgagcgccgactcacgccccagccccaattgggcggccggtttccaattggaagggcttctgagcctcagtcttcgggcggcgctgaccattggcgggcaggatggaggcggagccttgggtcgtcgcccgccgccgggggttaaggtgagcgactgcaggcaaacccggcgacagcgcagctcgcgtcgaccctggctcctctgcctgccccctcaggcccccgcctccttcaggatgacgctggacgtggggccggaggatgagctgcccgactgggccgccgccaaagagttttaccagaagtacgaccctaaggacgtcatcggcagaggagtgagctctgtggtccgccgttgtgttcatcgagctactggccacgagtttgcggtgaagattatggaagtgacagctgagcggctgagtcctgagcagctggaggaggtgcgggaagccacacggcgagagacacacatccttcgccaggtcgccggccacccccacatcagtgaggctgtcttccttgctcctgttagcagacgacctcccacctcctgctggccctgcccatagcccacttccgccaacattgcctccacacctctcctcccttcattccactaaagagtggccatccgttgggcgcccactgcctcctctggttctcctttcttcccagtaacagcccgctgctgtcccagggtggccaagccccgttaatgtgcatccactcctttccatctctgtctctctgcctctcttcctctctccctagtcaccctcatcgattcctacgagtcttctagcttcatgttcctggtgtttgacctgtgagtatctccctgccaccatctgagaagcctccncnccacctccatgtatggcccagcatttgtggtgcagtgggctggacccatcctgctcacaccttcctgttccagctggggctctctatcacctggncctgcctgctagcgcatggctctgnccttctcccttggtgccatgattgaggcaaattctttaatagtgactagtggctgggtncagtggctcacgcctgtaatcccagcactttgggagnccgagncgggtggatcatgaggtcaggagatcgagaccatcctggctaacacngtg

SEQ ID NO: 66466 - DNA, 201 bp, Homo sapiens
tatgcagatccgactttcagatttcgggttctcctgccacttggaacctggcgagaagcttcgaggtgaggggatctagtgccctaataggcttgggaggggagacccaggcctgatgagattggttggctgggtctgagtaccaagtccctggtgccaagaaaaagggagaagtcattgggcacttgccaagtatcctgt

SEQ ID NO: 66467 - DNA, 721 bp, Homo sapiens
ttttttgcgtatgtattatgatgtatgtaaaaatacataatctttccatatgcattatgatatatataaaactaaggtaacaagttgtgaggagtgggtaggttggcttggatagtgggtaggtagggttggaggaggcaaatgatatggtggaacaaggaccttgaaatcaatccaaaacccaggttttcctaggaaggccaccaggagccatggtgagccaactgttgcgcagggatagtgcctcagcaggagacttggcagaaggcagacagaaggaagatgggaacactggtagtcctggcagcgttgaggaggctccagcagagatccagtgctaagggccctagaggggctggtggcatcccctcaatcttggtcctctctccccagagttgtgtgggaccccagggtatctagcgccagagatccttaaatgctccatggatgaaacccacccaggctatggcaaggaggtcgacctgtgagttcctggtctccccctccctcccgtgcttgctgtcctttgctgggtctgcccgtcacctagtcccgcctgactccagtctctttcccagctgggcctgtggggtgatcttgttcacactcctggctggctcgccacccttctggcaccggcggcagatcctgatgttacgcatgatcatggagggccagtaccagttcagttcccccgagtgggatgaccgttccagcactg

SEQ ID NO: 66468 - DNA, 1585 bp, Homo sapiens
ggctggtacgccccggatagtacgggacaggcaaacccggcgacagcgcagctcgcgtcgaccctggctcctctgcctgccccctcaggcccccgcctccttcaggatgacgctggacgtggggccggaggatgagctgcccgactgggccgccgccaaagagttttaccagaagtacgaccctaaggacgtcatcggcagaggagtgagctctgtggtccgccgttgtgttcatcgagctactggccacgagtttgcggtgaagattatggaagtgacagctgagcggctgagtcctgagcagctggaggaggtgcgggaagccacacggcgagagacacacatccttcgccaggtcgccggccacccccacatcatcaccctcatcgattcctacgagtcttctagcttcatgttcctggtgtttgacctgatgcggaagggagagctgtttgactatctcacagagaaggtggccctctctgaaaaggaaaccaggtccatcatgcggtctctgctggaagcagtgagctttctccatgccaacaacattgtgcatcgagatctgaagcccgagaatattctcctagatgacaatatgcagatccgactttcagatttcgggttctcctgccacttggaacctggcgagaagcttcgagagttgtgtgggaccccagggtatctagcgccagagatccttaaatgctccatggatgaaacccacccaggctatggcaaggaggtcgacctctgggcctgtggggtgatcttgttcacactcctggctggctcgccacccttctggcaccggcggcagatcctgatgttacgcatgatcatggagggccagtaccagttcagttcccccgagtgggatgaccgttccagcactgtcaaagacctgatctccaggctgctgcaggtggatcctgaggcacgcctgacagctgagcaggccctacagcaccccttctttgagcgttgtgaaggcagccaaccctggaacctcaccccccgccagcggttccgggtggcagtgtggacagtgctggctgctggacgagtggccctaagcacccatcgtgtacggccactgaccaagaatgcactgttgagggacccttatgcgctgcggtcagtgcggcacctcatcgacaactgtgccttccggctctacgggcactgggtaaagaaaggggagcagcagaaccgggcggctctctttcagcaccggccccctgggccttttcccatcatgggccctgaagaggagggagactctgctgctataactgaggatgaggccgtgcttgtgctgggctaggacctcaaccccagggattcccaggaagcagaactctccagaagaagggttttgatcattccagctcctctgggctctggcctcaggcccactaatgatcctgctaccctcttgaagaccagcccggtacctctctccccactggccaggactctgagatcagagctggggtggaagggagccattctgaacgccacgcctggcccggtcagtgctgcatgcactgcatatgaaataaaatctgctacacgccaggga

SEQ ID NO: 66469 - DNA, 1985 bp, Homo sapiens
agccgagcgccgactcacgccccagccccaattgggcggccggtttccaattggaagggcttctgagcctcagtcttcgggcggcgctgaccattggcgggcaggatggaggcggagccttgggtcgtcgcccgccgccgggggttaaggtgagcgactgcaggcaaacccggcgacagcgcagctcgcgtcgaccctggctcctctgcctgccccctcaggcccccgcctccttcaggatgacgctggacgtggggccggaggatgagctgcccgactgggccgccgccaaagagttttaccagaagtacgaccctaaggacgtcatcggcagaggagtgagctctgtggtccgccgttgtgttcatcgagctactggccacgagtttgcggtgaagattatggaagtgacagctgagcggctgagtcctgagcagctggaggaggtgcgggaagccacacggcgagagacacacatccttcgccaggtcgccggccacccccacatcagtgaggctgtcttccttgctcctgttagcagacgacctcccacctcctgctggccctgcccatagcccacttccgccaacattgcctccacacctctcctcccttcattccactaaagagtggccatccgttgggcgcccactgcctcctctggttctcctttcttcccagtaacagcccgctgctgtcccagggtggccaagccccgttaatgtgcatccactcctttccatctctgtctctctgcctctcttcctctctccctagtcaccctcatcgattcctacgagtcttctagcttcatgttcctggtgtttgacctgatgcggaagggagagctgtttgactatctcacagagaaggtggccctctctgaaaaggaaaccaggtccatcatgcggtctctgctggaagcagtgagctttctccatgccaacaacattgtgcatcgagatctgaagcccgagaatattctcctagatgacaatatgcagatccgactttcagatttcgggttctcctgccacttggaacctggcgagaagcttcgagagttgtgtgggaccccagggtatctagcgccagagatccttaaatgctccatggatgaaacccacccaggctatggcaaggaggtcgacctctgggcctgtggggtgatcttgttcacactcctggctggctcgccacccttctggcaccggcggcagatcctgatgttacgcatgatcatggagggccagtaccagttcagttcccccgagtgggatgaccgttccagcactgtcaaagacctgatctccaggctgctgcaggtggatcctgaggcacgcctgacagctgagcaggccctacagcaccccttctttgagcgttgtgaaggcagccaaccctggaacctcaccccccgccagcggttccgggtggcagtgtggacagtgctggctgctggacgagtggccctaagcacccatcgtgtacggccactgaccaagaatgcactgttgagggacccttatgcgctgcggtcagtgcggcacctcatcgacaactgtgccttccggctctacgggcactgggtaaagaaaggggagcagcagaaccgggcggctctctttcagcaccggccccctgggccttttcccatcatgggccctgaagaggagggagactctgctgctataactgaggatgaggccgtgcttgtgctgggctaggacctcaaccccagggattcccaggaagcagaactctccagaagaagggttttgatcattccagctcctctgggctctggcctcaggcccactaatgatcctgctaccctcttgaagaccagcccggtacctctctccccactggccaggactctgagatcagagctggggtggaagggagccattctgaacgccacgcctggcccggtcagtgctgcatgcactgcatatgaaataaaatctgctacacgccaggga

SEQ ID NO: 66470 - DNA, 1657 bp, Homo sapiens
agccgagcgccgactcacgccccagccccaattgggcggccggtttccaattggaagggcttctgagcctcagtcttcgggcggcgctgaccattggcgggcaggatggaggcggagccttgggtcgtcgcccgccgccgggggttaaggtgagcgactggcccccgcctccttcaggatgacgctggacgtggggccggaggatgagctgcccgactgggccgccgccaaagagttttaccagaagtacgaccctaaggacgtcatcggcagaggagtgagctctgtggtccgccgttgtgttcatcgagctactggccacgagtttgcggtgaagattatggaagtgacagctgagcggctgagtcctgagcagctggaggaggtgcgggaagccacacggcgagagacacacatccttcgccaggtcgccggccacccccacatcatcaccctcatcgattcctacgagtcttctagcttcatgttcctggtgtttgacctgatgcggaagggagagctgtttgactatctcacagagaaggtggccctctctgaaaaggaaaccaggtccatcatgcggtctctgctggaagcagtgagctttctccatgccaacaacattgtgcatcgagatctgaagcccgagaatattctcctagatgacaatatgcagatccgactttcagatttcgggttctcctgccacttggaacctggcgagaagcttcgagagttgtgtgggaccccagggtatctagcgccagagatccttaaatgctccatggatgaaacccacccaggctatggcaaggaggtcgacctctgggcctgtggggtgatcttgttcacactcctggctggctcgccacccttctggcaccggcggcagatcctgatgttacgcatgatcatggagggccagtaccagttcagttcccccgagtgggatgaccgttccagcactgtcaaagacctgatctccaggctgctgcaggtggatcctgaggcacgcctgacagctgagcaggccctacagcaccccttctttgagcgttgtgaaggcagccaaccctggaacctcaccccccgccagcggttccgggtggcagtgtggacagtgctggctgctggacgagtggccctaagcacccatcgtgtacggccactgaccaagaatgcactgttgagggacccttatgcgctgcggtcagtgcggcacctcatcgacaactgtgccttccggctctacgggcactgggtaaagaaaggggagcagcagaaccgggcggctctctttcagcaccggccccctgggccttttcccatcatgggccctgaagaggagggagactctgctgctataactgaggatgaggccgtgcttgtgctgggctaggacctcaaccccagggattcccaggaagcagaactctccagaagaagggttttgatcattccagctcctctgggctctggcctcaggcccactaatgatcctgctaccctcttgaagaccagcccggtacctctctccccactggccaggactctgagatcagagctggggtggaagggagccattctgaacgccacgcctggcccggtcagtgctgcatgcactgcatatgaaataaaatctgctacacgccaggga

SEQ ID NO: 66471 - DNA, 1616 bp, Homo sapiens
cccaccccccaggaccctggcgccccagctgcaagggctgcgcccccgggagccgccatgcgggtcgtctcagagcctgtgggcctccctgccctcactgccctcctgcctccgcgcaggcccccgcctccttcaggatgacgctggacgtggggccggaggatgagctgcccgactgggccgccgccaaagagttttaccagaagtacgaccctaaggacgtcatcggcagaggagtgagctctgtggtccgccgttgtgttcatcgagctactggccacgagtttgcggtgaagattatggaagtgacagctgagcggctgagtcctgagcagctggaggaggtgcgggaagccacacggcgagagacacacatccttcgccaggtcgccggccacccccacatcatcaccctcatcgattcctacgagtcttctagcttcatgttcctggtgtttgacctgatgcggaagggagagctgtttgactatctcacagagaaggtggccctctctgaaaaggaaaccaggtccatcatgcggtctctgctggaagcagtgagctttctccatgccaacaacattgtgcatcgagatctgaagcccgagaatattctcctagatgacaatatgcagatccgactttcagatttcgggttctcctgccacttggaacctggcgagaagcttcgagagttgtgtgggaccccagggtatctagcgccagagatccttaaatgctccatggatgaaacccacccaggctatggcaaggaggtcgacctctgggcctgtggggtgatcttgttcacactcctggctggctcgccacccttctggcaccggcggcagatcctgatgttacgcatgatcatggagggccagtaccagttcagttcccccgagtgggatgaccgttccagcactgtcaaagacctgatctccaggctgctgcaggtggatcctgaggcacgcctgacagctgagcaggccctacagcaccccttctttgagcgttgtgaaggcagccaaccctggaacctcaccccccgccagcggttccgggtggcagtgtggacagtgctggctgctggacgagtggccctaagcacccatcgtgtacggccactgaccaagaatgcactgttgagggacccttatgcgctgcggtcagtgcggcacctcatcgacaactgtgccttccggctctacgggcactgggtaaagaaaggggagcagcagaaccgggcggctctctttcagcaccggccccctgggccttttcccatcatgggccctgaagaggagggagactctgctgctataactgaggatgaggccgtgcttgtgctgggctaggacctcaaccccagggattcccaggaagcagaactctccagaagaagggttttgatcattccagctcctctgggctctggcctcaggcccactaatgatcctgctaccctcttgaagaccagcccggtacctctctccccactggccaggactctgagatcagagctggggtggaagggagccattctgaacgccacgcctggcccggtcagtgctgcatgcactgcatatgaaataaaatctgctacacgccaggga

SEQ ID NO: 66472 - DNA, 2032 bp, Homo sapiens
agccgagcgccgactcacgccccagccccaattgggcggccggtttccaattggaagggcttctgagcctcagtcttcgggcggcgctgaccattggcgggcaggatggaggcggagccttgggtcgtcgcccgccgccgggggttaaggtgagcgactgcaggcaaacccggcgacagcgcagctcgcgtcgaccctggctcctctgcctgccccctcaggcccccgcctccttcaggatgacgctggacgtggggccggaggatgagctgcccgactgggccgccgccaaagagttttaccagaagtacgaccctaaggacgtcatcggcagaggagtgagctctgtggtccgccgttgtgttcatcgagctactggccacgagtttgcggtgaagattatggaagtgacagctgagcggctgagtcctgagcagctggaggaggtgcgggaagccacacggcgagagacacacatccttcgccaggtcgccggccacccccacatcagtgaggctgtcttccttgctcctgttagcagacgacctcccacctcctgctggccctgcccatagcccacttccgccaacattgcctccacacctctcctcccttcattccactaaagagtggccatccgttgggcgcccactgcctcctctggttctcctttcttcccagtaacagcccgctgctgtcccagggtggccaagccccgttaatgtgcatccactcctttccatctctgtctctctgcctctcttcctctctccctagtcaccctcatcgattcctacgagtcttctagcttcatgttcctggtgtttgacctcccccactgtgggatgcagctgcctcctatgcccctccttcccttaggatgcggaagggagagctgtttgactatctcacagagaaggtggccctctctgaaaaggaaaccaggtccatcatgcggtctctgctggaagcagtgagctttctccatgccaacaacattgtgcatcgagatctgaagcccgagaatattctcctagatgacaatatgcagatccgactttcagatttcgggttctcctgccacttggaacctggcgagaagcttcgagagttgtgtgggaccccagggtatctagcgccagagatccttaaatgctccatggatgaaacccacccaggctatggcaaggaggtcgacctctgggcctgtggggtgatcttgttcacactcctggctggctcgccacccttctggcaccggcggcagatcctgatgttacgcatgatcatggagggccagtaccagttcagttcccccgagtgggatgaccgttccagcactgtcaaagacctgatctccaggctgctgcaggtggatcctgaggcacgcctgacagctgagcaggccctacagcaccccttctttgagcgttgtgaaggcagccaaccctggaacctcaccccccgccagcggttccgggtggcagtgtggacagtgctggctgctggacgagtggccctaagcacccatcgtgtacggccactgaccaagaatgcactgttgagggacccttatgcgctgcggtcagtgcggcacctcatcgacaactgtgccttccggctctacgggcactgggtaaagaaaggggagcagcagaaccgggcggctctctttcagcaccggccccctgggccttttcccatcatgggccctgaagaggagggagactctgctgctataactgaggatgaggccgtgcttgtgctgggctaggacctcaaccccagggattcccaggaagcagaactctccagaagaagggttttgatcattccagctcctctgggctctggcctcaggcccactaatgatcctgctaccctcttgaagaccagcccggtacctctctccccactggccaggactctgagatcagagctggggtggaagggagccattctgaacgccacgcctggcccggtcagtgctgcatgcactgcatatgaaataaaatctgctacacgccaggga

SEQ ID NO: 66473 - DNA, 2265 bp, Homo sapiens
agcaggctggtacggtccgaagtcttagatccaggcaaacccggcgacagcgcagctcgcgtcgaccctggctcctctgcctgccccctcaggcccccgcctccttcaggatgacgctggacgtggggccggaggatgagctgcccgactgggccgccgccaaagagttttaccagaagtacgaccctaaggacgtcatcggcagaggagtgagctctgtggtccgccgttgtgttcatcgagctactggccacagagcgagactctatctccaaaaaaaaagagagtgttcagcagtggactgaccacttagaaaatagatcctcactcaccagcctctcgcgctgcttaacacgctaactattctggtgtctgtctctgcccatcagttctttttctggtcagaatctgaatgtccgatgcaattggtataatgcaaaccaactgcaaaggtattttgaaagagaatgatttgaattccaaagatttaaaagaggcccttggaaaaaattcatgaaggcttcgatatatttacagaaatggccctctgcaaaagtcagaggggacgtaaggatgtctattatgccatcctgcagccatgcagagtgcctacactccccaaaacagcacctgataatgttactttgaggactgatgcagagtgcaagtataacctcaattttgaaagtattatttttaattgacacataattataacctcagcttttaaagacgaaacttcaaaataaggtcctattcaacctttgtgccacaaaaaactgaaattttggtccattttctttatagattcactttgagaggcctttttcaggcatagttactctcaacaagaacctcctataaattatattgtcacaagaagtctcttatttttgccataattgccccatcatggcataatgcaggtatttcagctgccaacacaccaggccaaactgccttgttggagtgctgtgtttctagaccctttggtttgtctgcagagatctatctttagtggcctcttccacaatattttgtatgagcactggtctgtcttctcagcccccactgtgggatgcagctgcctcctatgcccctccttcccttaggatgcggaagggagagctgtttgactatctcacagagaaggtggccctctctgaaaaggaaaccaggtccatcatgcggtctctgctggaagcagtgagctttctccatgccaacaacattgtgcatcgagatctgaagcccgagaatattctcctagatgacaatatgcagatccgactttcagatttcgggttctcctgccacttggaacctggcgagaagcttcgagagttgtgtgggaccccagggtatctagcgccagagatccttaaatgctccatggatgaaacccacccaggctatggcaaggaggtcgacctctgggcctgtggggtgatcttgttcacactcctggctggctcgccacccttctggcaccggcggcagatcctgatgttacgcatgatcatggagggccagtaccagttcagttcccccgagtgggatgaccgttccagcactgtcaaagacctgatctccaggctgctgcaggtggatcctgaggcacgcctgacagctgagcaggccctacagcaccccttctttgagcgttgtgaaggcagccaaccctggaacctcaccccccgccagcggttccgggtggcagtgtggacagtgctggctgctggacgagtggccctaagcacccatcgtgtacggccactgaccaagaatgcactgttgagggacccttatgcgctgcggtcagtgcggcacctcatcgacaactgtgccttccggctctacgggcactgggtaaagaaaggggagcagcagaaccgggcggctctctttcagcaccggccccctgggccttttcccatcatgggccctgaagaggagggagactctgctgctataactgaggatgaggccgtgcttgtgctgggctaggacctcaaccccagggattcccaggaagcagaactctccagaagaagggttttgatcattccagctcctctgggctctggcctcaggcccactaatgatcctgctaccctcttgaagaccagcccggtacctctctccccactggccaggactctgagatcagagctggggtggaagggagccattctgaacgccacgcctggcccggtcagtgctgcatgcactgcatatgaaataaaatctgctacacgccaggga

SEQ ID NO: 66474 - DNA, 1173 bp, Homo sapiens
gatatggtggaacaaggaccttgaaatcaatccaaaacccaggttttcctaggaaggccaccaggagccatggtgagccaactgttgcgcagggatagtgcctcagcaggagacttggcagaaggcagacagaaggaagatgggaacactggtagtcctggcagcgttgaggaggctccagcagagatccagtgctaagggccctagaggggctggtggcatcccctcaatcttggtcctctctccccagagttgtgtgggaccccagggtatctagcgccagagatccttaaatgctccatggatgaaacccacccaggctatggcaaggaggtcgacctctgggcctgtggggtgatcttgttcacactcctggctggctcgccacccttctggcaccggcggcagatcctgatgttacgcatgatcatggagggccagtaccagttcagttcccccgagtgggatgaccgttccagcactgtcaaagacctgatctccaggctgctgcaggtggatcctgaggcacgcctgacagctgagcaggccctacagcaccccttctttgagcgttgtgaaggcagccaaccctggaacctcaccccccgccagcggttccgggtggcagtgtggacagtgctggctgctggacgagtggccctaagcacccatcgtgtacggccactgaccaagaatgcactgttgagggacccttatgcgctgcggtcagtgcggcacctcatcgacaactgtgccttccggctctacgggcactgggtaaagaaaggggagcagcagaaccgggcggctctctttcagcaccggccccctgggccttttcccatcatgggccctgaagaggagggagactctgctgctataactgaggatgaggccgtgcttgtgctgggctaggacctcaaccccagggattcccaggaagcagaactctccagaagaagggttttgatcattccagctcctctgggctctggcctcaggcccactaatgatcctgctaccctcttgaagaccagcccggtacctctctccccactggccaggactctgagatcagagctggggtggaagggagccattctgaacgccacgcctggcccggtcagtgctgcatgcactgcatatgaaataaaatctgctacacgccaggga

SEQ ID NO: 66475 - DNA, 1455 bp, Homo sapiens
agccgagcgccgactcacgccccagccccaattgggcggccggtttccaattggaagggcttctgagcctcagtcttcgggcggcgctgaccattggcgggcaggatggaggcggagccttgggtcgtcgcccgccgccgggggttaaggtgagcgactgcaggcaaacccggcgacagcgcagctcgcgtcgaccctggctcctctgcctgccccctcaggcccccgcctccttcaggatgacgctggacgtggggccggaggatgagctgcccgactgggccgccgccaaagagttttaccagaagtacgaccctaaggacgtcatcggcagaggagtgagctctgtggtccgccgttgtgttcatcgagctactggccacgagtttgcggtgaagattatggaagtgacagctgagcggctgagtcctgagcagctggaggaggtgcgggaagccacacggcgagagacacacatccttcgccaggtcgccggccacccccacatcagtgaggctgtcttccttgctcctgttagcagacgacctcccacctcctgctggccctgcccatagcccacttccgccaacattgcctccacacctctcctcccttcattccactaaagagtggccatccgttgggcgcccactgcctcctctggttctcctttcttcccagtaacagcccgctgctgtcccagggtggccaagccccgttaatgtgcatccactcctttccatctctgtctctctgcctctcttcctctctccctagtcaccctcatcgattcctacgagtcttctagcttcatgttcctggtgtttgacctgatgcggaagggagagctgtttgactatctcacagagaaggtggccctctctgaaaaggaaaccaggtccatcatgcggtctctgctggaagcagtgagctttctccatgccaacaacattgtgcatcgagatctgaagcccgagaatattctcctagatgacaatatgcagatccgactttcagatttcgggttctcctgccacttggaacctggcgagaagcttcgaggtagacagtgagctcggtaagggctcatctcatttgccacttggcaaatcaatgcaacttggcattcaagaaatacttggtgtaggaatgaatttcccaacaaagtcagtttcaattcggggctgttaaaatctcctggaagtgtgccatggaacaaggttcagaaagtactggaagaattggtgcccgagtggtagaacaaactaaaaatacagacttgagccaagcgtggtggcacgcatctgtcaccccagctactcgggaggctgaaggaggaggctcacttgagcctaggagcccaaggctacaatgagctgtgatagtgccaccacactccagcctgtgtgacatagcgaccctgtctctaaaaataaataaatataaaaatacaaa

SEQ ID NO: 66476 - DNA, 1013 bp, Homo sapiens
attctccttgtgtagttcaaaaaaatctcctctggtaatactgaaacaactaatttttcttattttgtttgttcctctttattattaaatactatgtgaattaactctttagtagttggcctggttgaagctctgtgaggagcaaagcagccctctccaggtgaactgcttgactttaccacctgaaggagtatttactgcaagaattaacaaagcaggtgttcctgatccaagcagaaccctgttatttgaagagcctgagaaatcttatcccgtttacaaatgtcctgggagtgcatccaaagtgaaacttgggtatcctcaatactaagaaatctctgagaatgactgggtcttggctctttgatcttacctctactcctctgaaaaacatgattatctaaaattgtgttaggtggatgaaccgcatcaaagacttccagaagccactccagtgaccataagataaatgtcagaatcgcataacccccaggatcaggcaagtgttatcctctcttaaaactctttgtttacaaccatgatctccttttgggaatcattacatttgacttactgcttatttttgttgaatgttaccagtgcttggtgataaaacttgatgtggctctttgctttgaaaaagaaaaaaactttttattaaaagaaacagttgtatacactgcataaaaattgggaaaatattatgaagaaaaagaagatataataaaggaaacaaaaatttacagatgaccccaaatctcttttaatatttggcaagtttcaagcatgaattttttgttttgttttgtttttgttttatagagacagcaccttgctatgttgcccaggctagtctttttttttttttgagacggagcctcgctctgttgcccaggctggagtgcagtggcgcaatcttcgctcactgcaagctctgcctcccgggttcatgccattctcctgcctcagcctcccgagcagccgggactacaggcgctcgccatcacgcccgg

SEQ ID NO: 66477 - DNA, 858 bp, Homo sapiens
gggcatcccgcgtccacgccgcggggaggagggtttcaccgtctccagggacttggctcgaggaaattaaactctaatgagtagctcgagaaatgttccgggatggtggatgagcgatcatccttaaaagaaaatgctattctgggagctccaacctgcaattaacctacagaaggaaccttttgagaggctggtgcagcgcttcggggaggcagattaagaactgtgttcctgatccaagcagaaccctgttatttgaagagcctgagaaatcttatcccgtttacaaatgtcctgggagtgcatccaaagtgaaacttgggtatcctcaatactaagaaatctctgagaatgactgggtcttggctctttgatcttacctctactcctctgaaaaacatgattatctaaaattgtgttaggtggatgaaccgcatcaaagacttccagaagccactccagtgaccataagataaatgtcagaatcgcataacccccaggatcagcctgttgctcaggctggagtgcaatggcacgatctgagctcactgcaaccacctgcctcccgggttcaagctattctcctgcctcagcctcctgagtagctgggattacaggcgcctgcaaccacacccagctaatttttgtacttttagtagagatggggttttgccatgttggccaggctggtctcgaactcttgacctcaggtgatctgcctgcctcagcctcccaaagtgctgggattacaggcttgagccaccgagcctggcctctactttttattactgtcatgtagttagtgataaaatgcttctatctgaaaaaaaatttgttgttctaaattctaaaaaattc

SEQ ID NO: 66478 - DNA, 616 bp, Homo sapiens
attctccttgtgtagttcaaaaaaatctcctctggtaatactgaaacaactaatttttcttattttgtttgttcctctttattattaaatactatgtgaattaactctttagtagttggcctggttgaagctctgtgaggagcaaagcagccctctccaggtgaactgcttgactttaccacctgaaggagtatttactgcaagaattaacaaagcaggtgttcctgatccaagcagaaccctgttatttgaagagcctgagaaatcttatcccgtttacaaatgtcctgggagtgcatccaaagtgaaacttgggtggatgaaccgcatcaaagacttccagaagccactccagtgaccataagataaatgtcagaatcgcataacccccaggatcagagatggagtctcgctctgtcacccagcctggaatgtagtggcatcattgtaactcactgcagcctgaaactccttggcttaagtgatcctcccacctcagcctcccaagtagctggaactataggcacaagctaccatgcctggctattcttttttgttaattttttttaaactaaggaatgaagaaaataaaacattacatgactggtacaattta

SEQ ID NO: 66479 - DNA, 723 bp, Homo sapiens
gggcatcccgcgtccacgccgcggggaggagggtttcaccgtctccagggacttggctcgaggaaattaaactctaatgagtagctcgagaaatgttccgggatggtggatgagcgatcatccttaaaagaaaatgctattctgggagctccaacctgcaattaacctacagaaggaaccttttgagaggctggtgcagcgcttcggggaggcagattaagaactgtgttcctgatccaagcagaaccctgttatttgaagagcctgagaaatcttatcccgtttacaaatgtcctgggagtgcatccaaagtgaaacttgggtatcctcaatactaagaaatctctgagaatgactgggtcttggctctttgatcttacctctactcctctgaaaaacatgattatctaaaattgtgttaggtggatgaaccgcatcaaagacttccagaagccactccagtgaccataagataaatgtcagaatcgcataacccccaggatcagagatggagtctcgctctgtcacccagcctggaatgtagtggcatcattgtaactcactgcagcctgaaactccttggcttaagtgatcctcccacctcagcctcccaagtagctggaactataggcacaagctaccatgcctggctattcttttttgttaattttttttaaactaaggaatgaagaaaataaaacattacatgactggtacaattta

SEQ ID NO: 66480 - DNA, 452 bp, Homo sapiens
  misc_feature (447)..(449): n is a, c, g, or t
  misc_feature (451)..(451): n is a, c, g, or t
ctgcgttcggacccgtctgatcgtaaatcccatgtaaggtacctgccgtcggaagatttgaacgttctacttggacacctaaaacccacagtcctccagacagaaagacaacaggtacaaagccctaaggattataaaggtatgctgcttaccatcatcttagtgaccaaggcagcgaagctgtttctgtaccttggaacagtcttccctgacaagccagagaacagtgataaagccaccagccttgggatcaggactgaaaaggcaagagtgatggagatttctcctgcgctaagccaagagaaggtttcagcacttcagacagctcccaccgaagtagccgcgctcccagctgcttgcagatgttgaaaaggaaagcctcggtttgtcttgaggttgtcagcaggtgcaagacacgtaataaaatgcaatgtgttcctaaaaaannnana

SEQ ID NO: 66481 - DNA, 491 bp, Homo sapiens
  misc_feature (486)..(488): n is a, c, g, or t
  misc_feature (490)..(490): n is a, c, g, or t
gggactggctctcagtaatcccacgtaaggtacctgccgtcggaagatttgaactttctacttggacaactaacacccacagtcctccagttcccgagctgcgttcggacccatgtcttattgtaaatcccacgcaagacagaaagacaacaggtacaaagccctaaggattataaaggtatgctgcttaccatcatcttagtgaccaaggcagcgaagctgtttctgtaccttggaacagtcttccctgacaagccagagaacagtgataaagccaccagccttgggatcaggactgaaaaggcaagagtgatggagatttctcctgcgctaagccaagagaaggtttcagcacttcagacagctcccaccgaagtagccgcgctcccagctgcttgcagatgttgaaaaggaaagcctcggtttgtcttgaggttgtcagcaggtgcaagacacgtaataaaatgcaatgtgttcctaaaaaannnana

SEQ ID NO: 66482 - DNA, 1969 bp, Homo sapiens
  misc_feature (118)..(119): n is a, c, g, or t
  misc_feature (381)..(381): n is a, c, g, or t
  misc_feature (515)..(515): n is a, c, g, or t
  misc_feature (654)..(654): n is a, c, g, or t
  misc_feature (720)..(720): n is a, c, g, or t
  misc_feature (746)..(746): n is a, c, g, or t
  misc_feature (807)..(808): n is a, c, g, or t
  misc_feature (1331)..(1331): n is a, c, g, or t
  misc_feature (1352)..(1352): n is a, c, g, or t
  misc_feature (1964)..(1966): n is a, c, g, or t
  misc_feature (1968)..(1968): n is a, c, g, or t
ggctctcagtccccgcctcgcggggggtgcctcccacctctgcgatgggggtcctaagagccagtgggggaaccaggggctggctctcaatctctgcctcgggggggtgcctcccccnncctgcgatgggggtaccaacagccaggggcggaagaggggatagctctcagtccccaccctcgtggggttgcctccccctcctgcgatgggggtcctaagaacccgggggggaagagggactggctctcagtccctgcctcgcgggggtgcctccccccctgcgatgggggtactcacagccaggggcggaagaggggatagctctcagtccccactctcgtggggggtgcctccccctcctgcgatgggggtccccagagncagggggggaagagggactggctctcagtaatcccacgtaaggtacctgccgtcggaagatttgaactttctacttggacaactaacacccacagtcctccaggtgggtcctaaggatcttaggatcaacgatngggggtcctaagccgggggggaagagggtctggctctcagtccccacctcgcggggggtgcctccccctcctgcgatgggggtccccagagccagggggggaagagggactggctctcagtccctgcctcgcgggggtncctccgcccccagcgatgggggtcctaagagcaaaggggggaagaggggctcgctctagtccccgngtcgtgaggggtgcctcctcccctgngatgagggtgcaaagagccaggggaggaaagggggaggttcgcagtccccgcctcgcgggnnttgcctcccccactgcgatagtggtcccaagagccaggcggggaagaggggttgctctgagtccccgcctcgcggggggtgcctccccccactgcgatgggagtcccaagagccaggggggaagaggggatggatctcagccatcacaaaatggggggcctttatattcaggttttacccaagaatcagcttatttgcttcttgtactagcagggcagttgctgccaaggccctctaataggggggccatcctttagaaacctgtctagttgtttagagacgtaggctaccggcctcagccagggccccacagtttgggttaaaagtccagctgccatcttttctctctctgacgcatacaatggaaaaggctttgtcagatcgggtagccccagggctggggctgccagaagtttttcctttaactaatgaaagacttgctgttgtcgggatccccatttcaaagtttccgggtccccgccccctttgtgacctcatacaaaggcttggctaatactgcaangtttgggatccacagtctacnaaaccccacagctcctaagaattctctcacctgccttctgcccttaagctccggtagattgcaaataacctgctttctttctgttcccgagctgcgttcggacccatgtcttattgtaaatcccacgcaaggtacctgccgtcggaagatttgagctttcttcttgaacacctcatacccacagtcctccaggcgccagtgggatcaagagagggcaacattgcaactctccatgctcctgcaatatccatggctattctgtagacagaaagacaacaggtacaaagccctaaggattataaaggtatgctgcttaccatcatcttagtgaccaaggcagcgaagctgtttctgtaccttggaacagtcttccctgacaagccagagaacagtgataaagccaccagccttgggatcaggactgaaaaggcaagagtgatggagatttctcctgcgctaagccaagagaaggtttcagcacttcagacagctcccaccgaagtagccgcgctcccagctgcttgcagatgttgaaaaggaaagcctcggtttgtcttgaggttgtcagcaggtgcaagacacgtaataaaatgcaatgtgttcctaaaaaannnana

SEQ ID NO: 66483 - DNA, 661 bp, Homo sapiens
gcttatttgcttcttgtactagcagggcagttgctgccaaagccctcaaatagggaggccgtcctttagcaaccctgtctagttgtttagagacgtaggctaccggcctcagccagggccccacagtttgggttaaaagtccagctgccatcttttctctctctgacgcatacaatggaaaaggctttgtcagatcgggtagccccagggctggggctgccagaagattttcttgtaactcatgaaaaacttgctgttgttgggatccccatttcaaaagttccgggtccccgacccctttgtgacctcatacaaaggcttggctaatactgcaaagtttgggatccacagtctacaaaaccccacagctcctaagaattctctcacctgccttctgcccttaagctccggtagattgcaaataacctgctttctttctgttcccgagctgcgttcggacccgtctgatcgtaaatcccatgtaaggtacctgccgtcggaagatttgaacgttctacttggacacctaaaacccacagtcctccaggtgggtcctaaggatcttaggagcaacgatggggggtcctaagccagggggggaagagggtctggctctcagtccccgcctcgcggggggtgcctcccccctctgcgatggggg

SEQ ID NO: 66484 - DNA, 515 bp, Homo sapiens
tcagaggcagagtctcactatgtcaaccatgctggagtgcagtggcacaatcagctcactgcaaccttgaactcctgtcttcgagagatcctcccagctctgcttaccaaagtgctgggattacaggcatgagccatacaccagcccaaagacaagatttgactaatgaatgatacaggtaatgaacatgagggattcagatggaggagagcttacttcttcctaggtagctcagaaaatactgcagagaaaagatgagaatggaagtggacagttgaggcagagttgaatttcaatggcagcaagggtatatttaaagcaatagaagataaattcacaaaggccccatagtcaagacagcaaagggcctgttgaaaatactttacccagcctcttttccaatcagaaaagagggctttctatctcctattccttggggtcttattttctttcctctgatctgataaactaatccttcctgaagtgcaaatggattgatgagtagccctttctga

SEQ ID NO: 66485 - DNA, 1050 bp, Homo sapiens
caaatggcagttctcgagaatcgacgaggaacttaaatctggactcagggtttcagtgcggtctccgactcccaccaccccgcccctccgcctgtctcgccgccaggtgtgacctccacgcgaaggaatcttcttcggatgggtgcaccttgccaacaggtgtggcacctggaggactaggaggcgcctccagactaagggcgctcagtgcggcgttcttgttgcagatgattctggaaggccggtaggtgtcgggcgacatttgaccttcttcaggtgcttagaactaagtgtctggaaacatgatcctttcgcgtaagtttctttctgaaagccaccaatcttgactgtaagctgtatttgagagatcttttggctgagtttacttatgacctaacggttagtcaccaactgaggcagggcacaggatgaccaaaaaaaaagtgtcagtttttacacaactctggcctgcaagagcctacgtgcttcataaataaaaataaacatacgagcaaggaaggtgcagagccccggaaatatttttttctcacatttttgaaataccatgcacatatatgtggctatttaagtataactactagtgttcactcttactcatttctacaacttttttttttccatttaaaaatcgattattgttacggtttaaacctcgggttggtctaaagtgacattgttggtctcattacagcctctagtggacagttaacatcagtttcctgaaaaggctctgactggttttgttttcgttgacaagctttgtcaaggtgaaggttagtacgtaagagcataaccgggtaaaatgtcccctcacccctatcctcacccccgcccccaacaccctgcttggcaaagacgacttcagaaaggagcagaagcttgttggctttgtatagaaaagacgtatgctttgtgctgcaggtattattattactggactgtgaataaacagaaagcttctgctatcatttcagtttcagacagctttcataaaaactaaattcatctcaaatatttttataacagaaa

SEQ ID NO: 66486 - DNA, 987 bp, Homo sapiens
caaatggcagttctcgagaatcgacgaggaacttaaatctggactcagggtttcagtgcggtctccgactcccaccaccccgcccctccgcctgtctcgccgccaggtgtgacctccacgcgaaggaatcttcttcggatgggtgcaccttgccaacaggtgtggcacctggaggactaggaggcgcctccagactaagggcgctcagtgcggcgttcttgttgcagatgattctggaaggccggtaggtgtcgggcgacatttgaccttcttcaggtgcttagaactaagtgtctggaaacatgatcctttcgcgtaagtttctttctgaaagccaccaatcttgactgtaagctgtatttgagagatcttttggctgagtttacttatgacctaacggttagtcaccaactgaggcagggcacaggatgaccaaaaaaaaagtgtcagtttttacacaactctggcctgcaagagcctacgtgcttcataaataaaaataaacatacgagcaaggaaggtgcagagccccggaaatatttttttctcacatttttgaaataccatgcacatatatgtggctatttaagtataactactagtgttcactcttactcatttctacaacttttttttttccatttaaaaatcgattattgttacggtttaaacctcgggttggtctaaagtgacattgttggtctcattacagcctctagtggacagttaacatcagtttcctgaaaaggctctgactggttttgttttcgttgacaagctttgtcaaggtgaaggttagtacgtaagagcataaccgggtaaaatgtcccctcacccctatcctcacccccgcccccaacaccctgcttggcaaagacgacttcagaaaggagcagaagcttgttggctttgtatagaaaagacgtatgctttgtgctgcaggtattattattactggactgtgaataaacagaaagcttctgctat

SEQ ID NO: 66487 - DNA, 762 bp, Homo sapiens
aacaaacgaacaaacaaacaaacaaacatcatgggagccattggaaggtgttcccattggaagatgctcccatatgccacagggggccgatatctgatttttgcttcattttcaacccgttcatggtgcaaatgaggaaaccagaccaagaagggagtgactttccccagatcacagcaccagtgcccagcctgtccgacttgtattccgggctgtgtctcgcccctgtgagaagtttctttcctcacagttgtaaaggccagaggtccaaaatccaggggtcagcaggaccctgcagtctctgaaggcccttttccttcctaatccttccatctctaagtctgtgaggcagctaacaggttttgtagtattgtctcacattagcgtggtgatgtccccaggaagtagacgttagaaccatccccattgtgcaggtcaggagactggggaggccctgaaaggcacaatggctagtttggggtcacagaactggcaagaggcaggagcttggtgacccagatggcttcccctctctgagcctcaggggctgggagcatgagaacacactggttggctgtcccagctcccagggtggctgtgagtacctggaagtgccccttgtctcccctcacacatctgccatcactctccccatttccttaacccccagcactgctgccacttgatttttacgaacatctgaatatgacgaacatacagatttttacgaacatctgaatatgacgaagtagcaaaggtgga

SEQ ID NO: 66488 - DNA, 354 bp, Homo sapiens
gacaatgttatggactgaattgtttcccctaaaaatttatgtgttgaagacttcacacctgagtaccttagaatgtgaccttacttggtgatagggtgtttacggaggtaatcaagctcaagtaaggttataaggtggaatttaatcctgcgtgacaaatttccttataaaaagggtgaatttcaacacagaaacatgcatatagggaaggtgatatgaaattgcagggaggacaccatctacaagcctaggagacaggcctggaacagacaaaagaccctcccctcacagccttcagaaggaaccaatcttgtcaacatcttgatttcagatagctagcctccagaactgtga

SEQ ID NO: 66489 - DNA, 465 bp, Homo sapiens
ttttatcttgcaagatatattaaagcctcctagtacactgaagattcttggaaaattattgatcctctctgagaaagaaagagctctctccactcttagaagttctgtaagatcccaccaaaaaatatcaccttctttgtgaagcctcttactttccttccgacccattgtcaagatcccactaaaatatcaattcctctgggaagcctcccaaaatgtcctaggctgctctccttctgaggtttcaaaagcatttcctcgatcactctgtcatgattatttgactattattttacatcccccatcagattgtggatcacctaaggctagggccaggcttgcttcactgaagactgctctacggcctaggacagtaatcagagaaaatgcactgtaaaatgtgttaggtaatctattagtctgtcgtcatgctgctaataaaaagacatacctgaaactgtgtaa

SEQ ID NO: 66490 - DNA, 2650 bp, Homo sapiens
ggcgcggactctgcggttcgcttgactgacggcgcagcctccgggcctagccacagcagcaacggcagaggccagcgggcgaggtcaagatggtggctccgcgggcgggggaggcagtggagggaggaggagtcagaccttagccagccggaaacaccgaaacccagagacctcctggggagccgccgccgccgccgccctctcggccatcgctgcctccgccgcctgctccacctcgagggacgcgagcgggcggcggggctggccgtgagagagacaggagaggaaggagggcaggggcggagttgcccgccttagcccccgcccccggccgcggccccgggccctgccccgcgcggccctgcccggcccaccgagccctggtgtggcagcggctcatggcggccgtggggcccccgcagcagcaggtgcggatggcccatcagcaggtctgggcggcgctcgaagtggcgctccgggtgccctgcctttacatcatcgacgccatcttcaactcctacccggattccagccaaagccggttctgcatcgtgctccagatcttcctccggctctttggtgtatttgcatccagtattgttctgatcttgtcacaacgatcacttttcaagttttacacgtacagctcagcctttctgttagctgcaacttcagtgttggtgaattattatgcttctttgcacattgacttctatggtgcctacaacacgtcagcttttggaattgagctgcttcctcgaaaaggtccctcgctgtggatggcacttatcgttctacagctaacatttggaattggatacgttacactactccagattcattccatctattcacaattaattattttggatctcttggttcctgtaataggcttaatcacagagctaccattacacatcagagagactttactgtttacttcttccttgattctcacattaaatacagtgtttgtcctggcagtgaaactgaagtggttttattattccacacgatatgtttatcttttggtgaggcacatgtatcgaatttatggattacagttattgatggaggacacatggaagaggattcgtttcccagacatactacgagtcttttggctaacaagagttacagctcaggctacagtgttaatgtacatcttaaggatggcaaatgaaactgattccttctttatttcttgggatgatttttgggacctcatttgcaatcttataattagtgggtgcgattctacactaactgtactgggcatgagtgctgtaatttcctcagtagcccattatttggggcttggaatattggcctttattggatcaactgaggaagatgacaggcgtcttggctttgttgcacctgttttattttttattttggctcttcagactgggttaagtgggctaagaccagaagagagacttattcgcttaagtagaaacatgtgccttttattaactgcagtcctgcattttatccatggaatgacagaccctgtattaatgtctctcagtgcctctcatgtgtcatcttttcgtagacattttcctgtgctgtttgtctctgcttgcctgtttattcttcctgtcttactcagttatgttctttggcatcactatgcactaaatacatggttgtttgcagttacagcattttgtgtggaactgtgcttaaaagtaattgtttctctcactgtttatacgttattcatgattgatggctactataatgtcctctgggaaaagcttgacgattatgtctactacgttcgttcaacaggcagtattattgaatttatatttggagttgtaatgtttggaaatggggcttacactatgatgtttgagtcgggaagtaaaattcgggcttttatgatgtgcctacatgcatattttaacatctacttacaagccaaaaatggctggaagacatttatgaatcgtaggactgctgtgaagaaaattaattcacttcctgaaataaaagggagccgcttacaagaaataaatgatgtatgtgcaatctgctatcatgagtttacaacatctgctcgtattacaccgtgtaatcattatttccatgcactttgccttcggaaatggctgtacattcaagatacttgtccaatgtgccatcagaaagtatacatcgaagatgatatcaaggataattcaaatgtatctaacaacaatggatttattccacccaatgaaactccagaggaagctgtaagagaagctgctgctgaatctgacagggaattgaacgaagatgacagtacagattgtgatgatgatgttcaaagagaaagaaatggagtgattcagcacacaggcgcagcagctgaagaatttaatgatgatactgactgatgaaaatagcatttattaatgattgaggtatttgtttaaaattcagttcatccaaaatggagtaatatccttcaccttcagtgtgtaaccaagcacaaaaacagtatcaatgttgaatctgtgaatggttttccgtttactgtgatgtgctactgtaaatatacctctttaattacttctggtctctttggtgacctgtttaaatttgtgtacattattgtacatagaataaaatgttttcacatttttatgacaaa

SEQ ID NO: 66491 - DNA, 2134 bp, Homo sapiens
agtggattgtgaaatgcgtctactgtaataatatgcaatgtcttgattacctgctgaaataaggtgtatttgcatccagtattgttctgatcttgtcacaacgatcacttttcaagttttacacgtacagctcagcctttctgttagctgcaacttcagtgttggtgaattattatgcttctttgcacattgacttctatggtgcctacaacacgtcagcttttggaattgagctgcttcctcgaaaaggtccctcgctgtggatggcacttatcgttctacagctaacatttggaattggatacgttacactactccagattcattccatctattcacaattaattattttggatctcttggttcctgtaataggcttaatcacagagctaccattacacatcagagagactttactgtttacttcttccttgattctcacattaaatacagtgtttgtcctggcagtgaaactgaagtggttttattattccacacgatatgtttatcttttggtgaggcacatgtatcgaatttatggattacagttattgatggaggacacatggaagaggattcgtttcccagacatactacgagtcttttggctaacaagagttacagctcaggctacagtgttaatgtacatcttaaggatggcaaatgaaactgattccttctttatttcttgggatgatttttgggacctcatttgcaatcttataattagtgggtgcgattctacactaactgtactgggcatgagtgctgtaatttcctcagtagcccattatttggggcttggaatattggcctttattggatcaactgaggaagatgacaggcgtcttggctttgttgcacctgttttattttttattttggctcttcagactgggttaagtgggctaagaccagaagagagacttattcgcttaagtagaaacatgtgccttttattaactgcagtcctgcattttatccatggaatgacagaccctgtattaatgtctctcagtgcctctcatgtgtcatcttttcgtagacattttcctgtgctgtttgtctctgcttgcctgtttattcttcctgtcttactcagttatgttctttggcatcactatgcactaaatacatggttgtttgcagttacagcattttgtgtggaactgtgcttaaaagtaattgtttctctcactgtttatacgttattcatgattgatggctactataatgtcctctgggaaaagcttgacgattatgtctactacgttcgttcaacaggcagtattattgaatttatatttggagttgtaatgtttggaaatggggcttacactatgatgtttgagtcgggaagtaaaattcgggcttttatgatgtgcctacatgcatattttaacatctacttacaagccaaaaatggctggaagacatttatgaatcgtaggactgctgtgaagaaaattaattcacttcctgaaataaaagggagccgcttacaagaaataaatgatgtatgtgcaatctgctatcatgagtttacaacatctgctcgtattacaccgtgtaatcattatttccatgcactttgccttcggaaatggctgtacattcaagatacttgtccaatgtgccatcagaaagtatacatcgaagatgatatcaaggataattcaaatgtatctaacaacaatggatttattccacccaatgaaactccagaggaagctgtaagagaagctgctgctgaatctgacagggaattgaacgaagatgacagtacagattgtgatgatgatgttcaaagagaaagaaatggagtgattcagcacacaggcgcagcagctgaagaatttaatgatgatactgactgatgaaaatagcatttattaatgattgaggtatttgtttaaaattcagttcatccaaaatggagtaatatccttcaccttcagtgtgtaaccaagcacaaaaacagtatcaatgttgaatctgtgaatggttttccgtttactgtgatgtgctactgtaaatatacctctttaattacttctggtctctttggtgacctgtttaaatttgtgtacattattgtacatagaataaaatgttttcacatttttatgacaaa

SEQ ID NO: 66492 - DNA, 3106 bp, Homo sapiens
ggcgcggactctgcggttcgcttgactgacggcgcagcctccgggcctagccacagcagcaacggcagaggccagcgggcgaggtcaagatggtggctccgcgggcgggggaggcagtggagggaggaggagtcagaccttagccagccggaaacaccgaaacccagagacctcctggggagccgccgccgccgccgccctctcggccatcgctgcctccgccgcctgctccacctcgagggacgcgagcgggcggcggggctggccgtgagagagacaggagaggaaggagggcaggggcggagttgcccgccttagcccccgcccccggccgcggccccgggccctgccccgcgcggccctgcccggcccaccgagccctggtgtggcagcggctcatggcggccgtggggcccccgcagcagcaggtgcggatggcccatcagcaggtctgggcggcgctcgaagtggcgctccgggtgccctgcctttacatcatcgacgccatcttcaactcctacccggattccagccaaagccggttctgcatcgtgctccagatcttcctccggctctttggtgtatttgcatccagtattgttctgatcttgtcacaacgatcacttttcaagttttacacgtacagctcagcctttctgttagctgcaacttcagtgttggtgaattattatgcttctttgcacattgacttctatggtgcctacaacacgtcagcttttggaattgagctgcttcctcgaaaaggtccctcgctgtggatggcacttatcgttctacagctaacatttggaattggatacgttacactactccagattcattccatctattcacaattaattattttggatctcttggttcctgtaataggcttaatcacagagctaccattacacatcagagagactttactgtttacttcttccttgattctcacattaaatacagtgtttgtcctggcagtgaaactgaagtggttttattattccacacgatatgtttatcttttggtgaggcacatgtatcgaatttatggattacagttattgatggaggacacatggaagaggattcgtttcccagacatactacgagtcttttggctaacaagagttacagctcaggctacagtgttaatgtacatcttaaggatggcaaatgaaactgattccttctttatttcttgggatgatttttgggacctcatttgcaatcttataattagtgggtgcgattctacactaactgtactgggcatgagtgctgtaatttcctcagtagcccattatttggggcttggaatattggcctttattggatcaactgaggaagatgacaggcgtcttggctttgttgcacctgttttattttttattttggctcttcagactgggttaagtgggctaagaccagaagagagacttattcgcttaagtagaaacatgtgccttttattaactgcagtcctgcattttatccatggaatgacagaccctgtattaatgtctctcagtgcctctcatgtgtcatcttttcgtagacattttcctgtgctgtttgtctctgcttgcctgtttattcttcctgtcttactcagttatgttctttggcatcactatgcactaaatacatggttgtttgcagttacagcattttgtgtggaactgtgcttaaaagtaattgtttctctcactgtttatacgttattcatgattgatggctactataatgtcctctgggaaaagcttgacgattatgtctactacgttcgttcaacaggcagtattattgaatttatatttggagttgtaatgtttggaaatggggcttacactatgatgtttgagtcgggaagtaaaattcgggcttttatgatgtgcctacatgcatattttaacatctacttacaagccaaaaatggctggaagacatttatgaatcgtaggactgctgtgaagaaaattaattcacttcctgaaataaaagggagccgcttacaagaaataaatgatgtatgtgcaatctgctatcatgagtttacaacatctgctcgtattacaccgtgtaatcattatttccatgcactttgccttcggaaatggctgtacattcaagatacttgtccaatgtgccatcagaaagtatacatcgaagatgatatcaaggataattcaaatgtatctaacaacaatggatttattccacccaatgaaactccagaggaagctgtaagagaagctgctgctgaatctgacagggaattgaacgaagatgacagtacagattgtgatgatgatgttcaaagagaaagaaatggagtgattcagcacacaggcgcagcagctgaagaatttaatgatgatactgactgatgaaaatagcatttattaatgattgaggtatttgtttaaaattcagttcatccaaaatggagtaatatccttcaccttcagtgtgtaaccaagcacaaaaacagtatcaatgttgaatctgtgaatggttttccgtttactgtgatgtgctactgtaaatatacctctttaattacttctggtctctttggtgacctgtttaaatttgtgtacattattgtacatagaataaaatgttttcacatttttatgacaaaatttgaacaaatagctttttaatagatgtaatgatcatatggtgcgtcacctgtgccaaatattcttcaatgaaattatataatgtaactttggacctcagtttttctttagaaatgggtgggagaatgaaaatgcaaatcaggaaaccacattaaagtcaaggaaataaaataatttgaccagaggataaaggacatgagagagtattttaaaactaaagaaaaaattagctgccagaagcaactgaggaccttttttgaaacttgagtagcagtgtaattgagctgagtttgaaagtcctgattcagagagagactgagggttgacaaataaactgtatcaactaaactttgatataaaccagaatgtgctaaatgttttttatgtaaaattgtatatttgttagccattctgtgtctgcagtattgtcataaaattgtcctttcattcttttg

SEQ ID NO: 66493 - DNA, 2136 bp, Homo sapiens
ggcgcggactctgcggttcgcttgactgacggcgcagcctccgggcctagccacagcagcaacggcagaggccagcgggcgaggtcaagatggtggctccgcgggcgggggaggcagtggagggaggaggagtcagaccttagccagccggaaacaccgaaacccagagacctcctggggagccgccgccgccgccgccctctcggccatcgctgcctccgccgcctgctccacctcgagggacgcgagcgggcggcggggctggccgtgagagagacaggagaggaaggagggcaggggcggagttgcccgccttagcccccgcccccggccgcggccccgggccctgccccgcgcggccctgcccggcccaccgagccctggtgtggcagcggctcatggcggccgtggggcccccgcagcagcaggtgcggatggcccatcagcaggtctgggcggcgctcgaagtggcgctccgggtgccctgcctttacatcatcgacgccatcttcaactcctacccggattccagccaaagccggttctgcatcgtgctccagatcttcctccggctctttggtgtatttgcatccagtattgttctgatcttgtcacaacgatcacttttcaagttttacacgtacagctcagcctttctgttagctgcaacttcagtgttggtgaattattatgcttctttgcacattgacttctatggtgcctacaacacgtcagcttttggaattgagctgcttcctcgaaaaggtccctcgctgtggatggcacttatcgttctacagctaacatttggaattggatacgttacactactccagattcattccatctattcacaattaattattttggatctcttggttcctgtaataggcttaatcacagagctaccattacacatcagagagaacttattcgcttaagtagaaacatgtgccttttattaactgcagtcctgcattttatccatggaatgacagaccctgtattaatgtctctcagtgcctctcatgtgtcatcttttcgtagacattttcctgtgctgtttgtctctgcttgcctgtttattcttcctgtcttactcagttatgttctttggcatcactatgcactaaatacatggttgtttgcagttacagcattttgtgtggaactgtgcttaaaagtaattgtttctctcactgtttatacgttattcatgattgatggctactataatgtcctctgggaaaagcttgacgattatgtctactacgttcgttcaacaggcagtattattgaatttatatttggagttgtaatgtttggaaatggggcttacactatgatgtttgagtcgggaagtaaaattcgggcttttatgatgtgcctacatgcatattttaacatctacttacaagccaaaaatggctggaagacatttatgaatcgtaggactgctgtgaagaaaattaattcacttcctgaaataaaagggagccgcttacaagaaataaatgatgtatgtgcaatctgctatcatgagtttacaacatctgctcgtattacaccgtgtaatcattatttccatgcactttgccttcggaaatggctgtacattcaagatacttgtccaatgtgccatcagaaagtatacatcgaagatgatatcaaggataattcaaatgtatctaacaacaatggatttattccacccaatgaaactccagaggaagctgtaagagaagctgctgctgaatctgacagggaattgaacgaagatgacagtacagattgtgatgatgatgttcaaagagaaagaaatggagtgattcagcacacaggcgcagcagctgaagaatttaatgatgatactgactgatgaaaatagcatttattaatgattgaggtatttgtttaaaattcagttcatccaaaatggagtaatatccttcaccttcagtgtgtaaccaagcacaaaaacagtatcaatgttgaatctgtgaatggttttccgtttactgtgatgtgctactgtaaatatacctctttaattacttctggtctctttggtgacctgtttaaatttgtgtacattattgtacatagaataaaatgttttcacatttttatgacaaa

SEQ ID NO: 66494 - DNA, 1376 bp, Homo sapiens
ttcgagcggccgcccgggcaggtacgcgcccattatttggggcttggaatattggcctttattggatcaactgaggaagatgacaggcgtcttggctttgttgcacctgttttattttttattttggctcttcagactgggttaagtgggctaagaccagaagagagacttattcgcttaagtagaaacatgtgccttttattaactgcagtcctgcattttatccatggaatgacagaccctgtattaatgtctctcagtgcctctcatgtgtcatcttttcgtagacattttcctgtgctgtttgtctctgcttgcctgtttattcttcctgtcttactcagttatgttctttggcatcactatgcactaaatacatggttgtttgcagttacagcattttgtgtggaactgtgcttaaaagtaattgtttctctcactgtttatacgttattcatgattgatggctactataatgtcctctgggaaaagcttgacgattatgtctactacgttcgttcaacaggcagtattattgaatttatatttggagttgtaatgtttggaaatggggcttacactatgatgtttgagtcgggaagtaaaattcgggcttttatgatgtgcctacatgcatattttaacatctacttacaagccaaaaatggctggaagacatttatgaatcgtaggactgctgtgaagaaaattaattcacttcctgaaataaaagggagccgcttacaagaaataaatgatgtatgtgcaatctgctatcatgagtttacaacatctgctcgtattacaccgtgtaatcattatttccatgcactttgccttcggaaatggctgtacattcaagatacttgtccaatgtgccatcagaaagtatacatcgaagatgatatcaaggataattcaaatgtatctaacaacaatggatttattccacccaatgaaactccagaggaagctgtaagagaagctgctgctgaatctgacagggaattgaacgaagatgacagtacagattgtgatgatgatgttcaaagagaaagaaatggagtgattcagcacacaggcgcagcagctgaagaatttaatgatgatactgactgatgaaaatagcatttattaatgattgaggtatttgtttaaaattcagttcatccaaaatggagtaatatccttcaccttcagtgtgtaaccaagcacaaaaacagtatcaatgttgaatctgtgaatggttttccgtttactgtgatgtgctactgtaaatatacctctttaattacttctggtctctttggtgacctgtttaaatttgtgtacattattgtacatagaataaaatgttttcacatttttatgacaaa

SEQ ID NO: 66495 - DNA, 2696 bp, Homo sapiens
ggcgcggactctgcggttcgcttgactgacggcgcagcctccgggcctagccacagcagcaacggcagaggccagcgggcgaggtcaagatggtggctccgcgggcgggggaggcagtggagggaggaggagtcagaccttagccagccggaaacaccgaaacccagagacctcctggggagccgccgccgccgccgccctctcggccatcgctgcctccgccgcctgctccacctcgagggacgcgagcgggcggcggggctggccgtgagagagacaggagaggaaggagggcaggggcggagttgcccgccttagcccccgcccccggccgcggccccgggccctgccccgcgcggccctgcccggcccaccgagccctggtgtggcagcggctcatggcggccgtggggcccccgcagcagcaggtgcggatggcccatcagcaggtctgggcggcgctcgaagtggcgctccgggtgccctgcctttacatcatcgacgccatcttcaactcctacccggattccagccaaagccggttctgcatcgtgctccagatcttcctccggctctttggtgtatttgcatccagtattgttctgatcttgtcacaacgatcacttttcaagttttacacgtacagctcagcctttctgttagctgcaacttcagtgttggtgaattattatgcttctttgcacattgacttctatggtgcctacaacacgtcagcttttggaattgagctgcttcctcgaaaaggtccctcgctgtggatggcacttatcgttctacagctaacatttggaattggatacgttacactactccagattcattccatctattcacaattaattattttggatctcttggttcctgtaataggcttaatcacagagctaccattacacatcagagagactttactgtttacttcttccttgattctcacattaaatacagtgtttgtcctggcagtgaaactgaagtggttttattattccacacgatatgtttatcttttggtgaggcacatgtatcgaatttatggattacagttattgatggaggacacatggaagaggattcgtttcccagacatactacgagtcttttggctaacaagagttacagctcaggctacagtgttaatgtacatcttaaggatggcaaatgaaactgattccttctttatttcttgggatgatttttgggacctcatttgcaatcttataattagtgggtgcgattctacactaactgtactgggcatgagtgctgtaatttcctcagtagcccattatttggggcttggaatattggcctttattggatcaactgaggaagatgacaggcgtcttggctttgttgcacctgttttattttttattttggctcttcagactgggttaagtgggctaagaccagaagagagacttattcgcttaagtagaaacatgtgccttttattaactgcagtcctgcattttatccatggaatgacagaccctgtattaatgtctctcagtgcctctcatgtgtcatcttttcgtagacattttcctgtgctgtttgtctctgcttgcctgtttattcttcctgtcttactcagttatgttctttggcatcactatgcactaaatacatggttgtttgcagttacagcattttgtgtggaactgtgcttaaaagtaattgtttctctcactgtttatacgttattcatgattgatggctactataatgtcctctgggaaaagcttgacgattatgtctactacgttcgttcaacaggcagtattattgaatttatatttggagttgtaatgtttggaaatggggcttacactatgatgtttgagtcgggaagtaaaattcgggcttttatgatgtgcctacatgcatattttaacatctacttacaagccaaaaatggctggaagacatttatgaatcgtaggactgctgtgaagaaaattaattcacttcctgaaataaaagggagccgcttacaagaaataaatgatgtatgtgcaatctgctatcatgagtttacaacatctgctcgtattacaccgtgtaatcattatttccatgcactttgccttcggaaatggctgtacattcaagatacttgtccaatgtgccatcagaaagtatacatcgaagatgatatcaaggataattcaaatgtatctaacaacaatggatttattccacccaatgaaactccagaggaagctgtaagagaagctgctgctgaatctgacagggaattgaacgaagatgacagtacagattgtgatgatgatgttcaaagagaaagaaatggagtgattcagcacacaggcgcagcagctgaagaatttaatgatgatactgactgatgaaaatagcatttattaatgattgaggtatttgtttaaaattcagttcatccaaaatggagtaatatccttcaccttcagtgtgtaaccaagcacaaaaacagtatcaatgttgaatctgtgaatggttttccgtttactgtgatgtgctactgtaaatatacctctttaattacttctggtctctttggtgacctgtttaaatttgtgtacattattgtacatagaataaaatgttttcacatttttatgacaaaaaaaaaagtcgacgcggccgcgaatttaggtagtagctagtagtag

SEQ ID NO: 66496 - DNA, 2845 bp, Homo sapiens
ggcgcggactctgcggttcgcttgactgacggcgcagcctccgggcctagccacagcagcaacggcagaggccagcgggcgaggtcaagatggtggctccgcgggcgggggaggcagtggagggaggaggagtcagaccttagccagccggaaacaccgaaacccagagacctcctggggagccgccgccgccgccgccctctcggccatcgctgcctccgccgcctgctccacctcgagggacgcgagcgggcggcggggctggccgtgagagagacaggagaggaaggagggcaggggcggagttgcccgccttagcccccgcccccggccgcggccccgggccctgccccgcgcggccctgcccggcccaccgagccctggtgtggcagcggctcatggcggccgtggggcccccgcagcagcaggtgcggatggcccatcagcaggtctgggcggcgctcgaagtggcgctccgggtgccctgcctttacatcatcgacgccatcttcaactcctacccggattccagccaaagccggttctgcatcgtgctccagatcttcctccggctctttggtgtatttgcatccagtattgttctgatcttgtcacaacgatcacttttcaagttttacacgtacagctcagcctttctgttagctgcaacttcagtgttggtgaattattatgcttctttgcacattgacttctatggtgcctacaacacgtcagcttttggaattgagctgcttcctcgaaaaggtccctcgctgtggatggcacttatcgttctacagctaacatttggaattggatacgttacactactccagattcattccatctattcacaattaattattttggatctcttggttcctgtaataggcttaatcacagagctaccattacacatcagagagactttactgtttacttcttccttgattctcacattaaatacagtgtttgtcctggcagtgaaactgaagtggttttattattccacacgatatgtttatcttttggtgaggcacatgtatcgaatttatggattacagttattgatggaggacacatggaagaggattcgtttcccagacatactacgagtcttttggctaacaagagttacagctcaggctacagtgttaatgtacatcttaaggatggcaaatgaaactgattccttctttatttcttgggatgatttttgggacctcatttgcaatcttataattagtgggtgcgattctacactaactgtactgggcatgagtgctgtaatttcctcagtagcccattatttggggcttggaatattggcctttattggatcaactgaggaagatgacaggcgtcttggctttgttgcacctgttttattttttattttggctcttcagactgggttaagtgggctaagaccagaagagagacttattcgcttaagtagaaacatgtgccttttattaactgcagtcctgcattttatccatggaatgacagaccctgtattaatgtctctcagtgcctctcatgtgtcatcttttcgtagacattttcctgtgctgtttgtctctgcttgcctgtttattcttcctgtcttactcagttatgttctttggcatcactatgcactaaatacatggttgtttgcagttacagcattttgtgtggaactgtgcttaaaagtaattgtttctctcactgtttatacgttattcatgattgatggctactataatgtcctctgggaaaagcttgacgattatgtctactacgttcgttcaacaggcagtattattgaatttatatttggagttgtaatgtttggaaatggggcttacactatgatgtttgagtcgggaagtaaaattcgggcttttatgatgtgcctacatgcatattttaacatctacttacaagccaaaaatggctggaagacatttatgaatcgtaggactgctgtgaagaaaattaattcacttcctgaaataaaagggagccgcttacaagaaataaatgatgtatgtgcaatctgctatcatgagtttacaacatctgctcgtattacaccgtgtaatcattatttccatgcactttgccttcggaaatggctgtacattcaagatacttgtccaatgtgccatcagaaagtatacatcgaagatgatatcaaggataattcaaatgtatctaacaacaatggatttattccacccaatgaaactccagaggaagctgtaagagaagctgctgctgaatctgacagggaattgaacgaagatgacagtacagattgtgatgatgatgttcaaagagaaagaaatggagtgattcagcacacaggcgcagcagctgaagaatttaatgatgatactgactgatgaaaatagcatttattaatgattgaggtatttgtttaaaattcagttcatccaaaatggagtaatatccttcaccttcagtgtgtaaccaagcacaaaaacagtatcaatgttgaatctgtgaatggttttccgtttactgtgatgtgctactgtaaatatacctctttaattacttctggtctctttggtgacctgtttaaatttgtgtacattattgtacatagaataaaatgttttcacatttttatgacaaataaaaaaaaaaaaaaaaaaaaaaagggggggggcgaaaaaatccgaggggccattagggtacagttttttgaaggggcccaaggaggataaaagaagaggggggttaaaggggaggaaaggcgggattggagaccatctggggaaaggaacccaaatagaggaaaatggtaggaacttgtgattgtataaaaaaa

SEQ ID NO: 66497 - DNA, 1812 bp, Homo sapiens
  misc_feature (277)..(277): n is a, c, g, or t
  misc_feature (312)..(312): n is a, c, g, or t
  misc_feature (331)..(331): n is a, c, g, or t
  misc_feature (333)..(334): n is a, c, g, or t
  misc_feature (343)..(343): n is a, c, g, or t
  misc_feature (377)..(377): n is a, c, g, or t
  misc_feature (389)..(389): n is a, c, g, or t
attcatacaggagagaacccctatgaatgccatgaatgtgggaaagccttcagtcggaaataccagcttatttcacaccagagaactcatgcaggagagaagccttatgaatgcaccgactgtggaaaggcttttggtttaaagtcacagcttattatacaccagagaactcatacaggggagaaaccatttgaatgtagtgagtgtcagaaagcctttaatacaaagtcaaacctgattgtacatcagagaactcatacaggagagaaaccctatngttgtaatgaatgtggaaaagcctttacgttcaantcacagctcattgtacatnanngagtgcacnctggagtaaaaccctatggatgcagtcaatgtgnaaaaacctttantttgaagtcccagctcattgtacatcagagaagtcacacaggagtaaaaccatatggatgcagtgagtgtgggaaagccttcaggagcaagtcataccttattatacatatgagaactcatacaggagagaaaccacatgagtgcagggaatgcgggaaatcctttagtttcaattcacaactcattgtgcatcagagaattcacacaggagaaaatccctatgaatgcagtgaatgtgggaaagcctttaataggaaagaccagctcatttcacatcagcgaactcatgcaggggaaaagccttatgggtgcagtgaatgtgggaaagcttttagcagcaagtcatacctaattatacacatgagaactcattcaggtgaaaaaccatatgaatgtaatgaatgtgggaaagccttcatttggaaatcactactcattgtacatgagcgaactcatgcaggggtcaacccttataaatgcagtcaatgtgagaaatccttcagtgggaaattacgccttcttgtacaccagagaatgcacacaacagagaaaccatatgaatgcagtgagtgtggaaaagccttcattaggaattctcaactcattgtacatcaaagaactcattcaggagagaaaccctatgggtgcaatgaatgtgggaaaaccttctctcaaaaatcaattctcagtgcacatcagagaacacatacaggagagaagccttgtaagtgcactgaatgtgggaaagccttttgttggaagtcacagctcattatgcatcagagaactcatgtagatgacaaacattgataattttacgaaactctgaaaagtggattcacaagagatagaaacaatcatatataaagagaaactctgtaagtggaatcatcttgtcatcttccagaaaactcatactgaatagaactttatgaatgcacagcatatggaaaggcatccacagaaagctgttctttacatgcaaaaagatagtagacaatacacaggaaaactgaatttagtaaccactctgaaaatttttagcagcaagtcatacctttttttaaaaagttcatacaggtgaggaaccatgttaaacgttgtaaagtcattttactaacataagattcacaaagaggaaacttcatgaaccagatgaatatagaatagacttctttgaaattcatagtttacagaattttaatgagagaaattattgagctaatgaatggcagaattaacaaaattacaaacattttatgtatcggaaggatataccttggagggaccatgctatgagggaaagtgtaaatctagaaatgagaaacccctagggaaaaaatatatataggagtgaacatcttatgaatgtaccaaataaaccacagctggactgttaacctcaccttagaagcttcattc

SEQ ID NO: 66498 - DNA, 370 bp, Homo sapiens
actttttagtttacaaaggtgtttgccaaattagtgtaaccacagggtgtgttaacacatgcagagattagcagcatcaggaccacgctgcccctcctgatgccagggaaagagatgtgtttccagagcctgatgagagctgcaacaatggaaaggggcccttctgccagcaactgttatcttaaaggcatatggctaagtcagaatatcacaaaagcagggaggaagcagaaatctcctgtcatcgcctcctgctggccaaactcagctgaagccaccaactaaaacaaagttctgtatgctgaattcacataaaactcttaatgtcacacttagcagattcagttgattgcttacaatatttagcttc

SEQ ID NO: 66499 - DNA, 481 bp, Homo sapiens
tggttatcaattgttaaacggcccaggatctctcagagctcatccaggtatgtgcatagagccctgaaatgctgatattgccttagggggttatttgttttttatagccccacaggccatagctggtgcatttgcctgagcttcctcatcctttgtacatatacccagggaggagaaggtgaatagataagatctttcagcctgcagatttccagtaataaaagcaaatgctttctgttgagacccagctgagactggaggtggtgaataagggctgtatgtgtaagcactgtaggcttctggccagtaaagaatccagacacagcctgcaccctcctggcctcctggaactctaagagcacagaaggacagggtacagacctatggagtatgacacttattccagggactttgacctgctacatttacaggtcatgacagctttgatgctgcctctggggaagggccaccattcaacttg

SEQ ID NO: 66500 - DNA, 363 bp, Homo sapiens
agcatttgtataaaaatatttacttagaattataatattttctctataccttcaagttgatgaacttgactttctgttgatttttggtcttataataaattatgtcaattttgagataccagttaatacaacaaggaatttacattttagaattacttgtttatataactgaaataatgaatggaaaggagatttcagttaatttctgaccatcagcttcagtgttaatattacatgaagcatcagtttcagtgttcttattacatgttcctaaacagaataatattcctgttttatggatggagaaattgaggcattatttatagcaggaattttttgttttaccaccaaggtaattgcaga

SEQ ID NO: 66501 - DNA, 327 bp, Homo sapiens
gtatgtggccatcccagctgtcccacgcatttcagcccaggaggcctggagaacccaggagtttccaagctgtgctgccacccgagctctggatccacctggctgtggtggcctgtggcaatcggctggaggagacgctggtcatgctcaaatcagctgtgctttttagccacaggaagatccaattccacatcttcactgaagactctctgaagcccgagtttgataagcagttacgccagtggcctgactcatatacaaagaagtttgagcacagaatctaccccatcacattttctgttggaaaccctcaggagtggaagaaat

SEQ ID NO: 66502 - DNA, 534 bp, Homo sapiens
aacccccttgtgataaccaacctaaatttaattaacttccataggtcccaccttcaaataccagcacatgaggggttaggatttcaacacaggaatttcaggaggacacattcagcccataacaccaaccagttttatttttaccatcctctggaaacaaaataaggaacttgtaacatgttcttcccgggcattagatgatctgaatgtgtcaccctcaaactcatatgttgaaacttgatccccaatgtgacagtatttttaagaggtggggctcttaggcatgattaggtcatgagggtggagcaatgggattagtcctcttatcaaggggcttcatgcagtgtcctcccctttttcttttttgcccttctgctatgtgaggacacggtttccctgtgaggatgcagcaagaaagcaccatcttggaagcagagatccttcaccaggcacagattctgctggcaccgagatcttggacttcccagcccccaaactatgagaaataaatttcttgtatttctaaagtaaaca

SEQ ID NO: 66503 - DNA, 380 bp, Homo sapiens
gaagaaatgagaagcaaagaaaaaccgtgaggcatgaacatttcatggcaatcacgatgtcctggtttgtgagataatgggatagaggagtagaaaacaaggagaaagatgagaaggtacaaagtggttcaagtcaaacagctcaactgaacttttcttaatagaatatttaaaaagtggtacattaaaaaacttcccccagttcacatcaaaaattctctcttcaggactaagttgggtagagactgttcaatgtgcctagatatcttcagaacttatatattttctgttttctacgtatgttgaagggcagtgccaaatgatgtgtaattatctaggttgtaaaaataaaacatactcccccttcccttgaggataaa

SEQ ID NO: 66504 - DNA, 445 bp, Homo sapiens
taattttagggactaggttttgctatgttgcccaggctggccttaaactcctggcctcaaggtgatccttctgccttggcctcccgagtagctgggactagaggtgtgcaccgtcacacccagcttcaagtctcttttaattattataaagttctggccatgcacagtggctcgcaactgtaatctcagcactttcggaagccaaggcggtcagatcacctgaggtcaggagttcgagaccagtctggccaacatggagaaactccgtctctactaaaaatacaagaattagctgggcgtggtggcacacgcctgtagtcccagctactcgggaggctgaggcaagagaattgcttgaacctgggaggcagaggttgcagtgaaccaagatcaagccatttgcactccagcctgggcaacagagtgagactctgtctcaaaaaaa

SEQ ID NO: 66505 - DNA, 357 bp, Homo sapiens
taattttagggactaggttttgctatgttgcccaggctggccttaaactcctggcctcaaggtgatccttctgccttggcctcccgagtagctgggactagaggtgtgcaccgtcacacccagcttcaagtctcttttaattattataaagttctggccatgcacagtggctcgcaactgtaatctcagcactttcggaagccaaggcggtcagatcacctgaggtcaggagttcgagaccagtctggccaacatggagaaactccgtctctactaaaaatacaagaattagctgggcgtggtggcacacctttacaaaattaataattccaatcatcctatagttgatcagtgttc

SEQ ID NO: 66506 - DNA, 299 bp, Homo sapiens
taattttagggactaggttttgctatgttgcccaggctggccttaaactcctggcctcaaggtgatccttctgccttggcctcccgagtagctgggactagaggtgtgcaccgtcacacccagcttcaagtctcttttaattattataaagttctggccatgcacagtggctcgcaactgtaatctcagcactttcggaagccaaggcggtcagatcacctgaggtcaggagttcaagcgattctcccacctcagcctgccaagtagctgggattacaggcatgtgccactgtgcccag

SEQ ID NO: 66507 - DNA, 168 bp, Homo sapiens
tatgaatgcaacaaatgtgggaaattctttaggtattgcttcacactgaatagacatcagagagttcactctggagagaggccttatgaatgcagtgaatgtggcaaattctttgtggacagctgtacactgaagagtcatcagagagttcacactggagaaagacct

SEQ ID NO: 66508 - DNA, 441 bp, Homo sapiens
tgaaaccatgagattcttccctagtgttccaatctcctttgatttttcaggcctatttcagctctcattttcatatcccagctttgcctttacactcgatattttaaagagcttcagagttgaccaaaattgtgtcctagtgcatggagaagttattccattctctccaaattgttatcctggatgattggatttaacaacctctaggaggatttgtggaggttttagtttgatttccctgtgatcattgatggtatttttattttcatttgctaagaagctttctgcagtacagggaatagctaatcatgccattcctatctttggctcatcttaacttccttcttactaaacatccacctttaaatactatgatctaagaatcataattattcctatacaatgtgctaaccaaatcacagcacaagtgatagatgtgat

SEQ ID NO: 66509 - DNA, 693 bp, Homo sapiens
ggcttcacactgggaacacctggccccatgagcactctccgagccaggctgctcccgcagatggcgggggtcagaggaggaggaggacggcagcttgctcctggtctgcccgctgcttcctcgccaggacccaagcagccctggcttcatgggcagggagaggaggaaggtgtattgcctgtttcacctggcccacgtttcccacaagagggtaaatgatggctgtcttcccagcctggcccaccaatgaatgtttaactcagaatgcaggcttgaaatctgaataggtcagacctgtggaactgccaatggcttacagaagtggcaattccatatggttcacacctaatacaaatattgatactacatggcctacatgttccaagatctgagtctttgtgataaagttgtttgcatgctctgaggacaaactgctggttgaatgttctcaggtgacaaatggtgtcttctttgggctactgttaccccatccttctggggtcctcaggtaagtcctcctgccgtggaacggtctgtttatatgtgaatgccctgccttcttagggctctgaatctcagttgaaattggggctatgtcacaaagcattaaccggctgtgtctgtattgtctgtttatattacacaccaaatagaaattattctttaagaaccaaaaaaatgcttaaaaacgaa

SEQ ID NO: 66510 - DNA, 474 bp, Homo sapiens
ctctgccatgtgaggtcacagtgttcctccctcctgaggatgcagtgttcatgaaagcaaacactgggccctcaccaggcaacaaacctgctggtgccttcatcttggacttcccagccttcggaactatggagcccgcactctccagttcatcaccaccccagcatccctactcttgcatctaacagtttccgctattttgcaccacctgcctggcccttatgggcaactcaaggaagaaaggaaagaagagatagaggaaaaatggattcaacagatgaaagtgttctttctgactactgctgtgtttacaaacattttaatcatcaaaacatgctttatttgatagaaagatcaaatctgcctttgtaaaacaagagactattttaatcattaagacaacacacatgtttgatttggaggcgtgttctcattcaaaaccttgcaaaatataatttcttcttgtctgggaga

SEQ ID NO: 66511 - DNA, 746 bp, Homo sapiens
ttctagctaatgatacggattacaggcgtgagccaccacacccggccatgaattaatatttatgaagtatttgaaacactgtctagcacaaagtaaggactcaacgagttcagcttttattattttttaaaaagtattttctgtattgtagccccttgatctagatgagtaagttgagcttaaacaggttaagtcaaagactgcaatctggtcactcactgttggcttgcctggtttaaacaaatgtttaaatggattgcaaccatttggaacctgagaggtttcatatgaatatgaagaattctggcttatttgagtaacaggataatctcttagcactgggccagcattcctgcaaggcacccattggctcttgctgaccagtggcttctcgttgcagatggagcccgcactctccagttcatcaccaccccagcatccctactcttgcatctaacagtttccgctattttgcaccacctgcctggcccttatgggcaactcaaggaagaaaggaaagaagagatagaggaaaaatggattcaacagatgaaagtgttctttctgactactgctgtgtttacaaacattttaatcatcaaaacatgctttatttgatagaaagatcaaatctgcctttgtaaaacaagagactattttaatcattaagacaacacacatgtttgatttggaggcgtgttctcattcaaaaccttgcaaaatataatttcttcttgtctgggaga

SEQ ID NO: 66512 - DNA, 291 bp, Homo sapiens
tgctctagccttctggagggcagaaatctgggtctctggctggttataaggcttttattctcatgtttatctcctggatgatgaataaaaggatcagtgacctcaggagatactccctagaagggatgtggctattccctaatggaattaccaaataccagcatagctggctaaaccagtttgaaaactacttttgtacaactttaagtttacaattattttaagaatttagatagtactgtgcaaataaatggagagagcccaaggcagaaaaaaactacatactctatt

SEQ ID NO: 66513 - DNA, 398 bp, Homo sapiens
taagatctcccccaaatgatgcctgtaaaggacatctcatttctaacacctttctgggatgttactgtgtggagcactgctcagagacgtagcacaagatggtcggtttaccaactgcatttatttattgaccaaatcatttctttatgttcagaatatttttaaaggaaaacaggagaagatttgtgaaaccaaattatatccactttaagtacacttagaggctgacactttctcttaagaattctcgaacagtgaaaccgacatttttagccaggtccctcagcataaaacacaaacagaacattttctagggcgggaaaattcaagttactccacacacataggtgaagatgatgtttatgctgtttggtggcaaacctctccagctggacgtg

SEQ ID NO: 66514 - DNA, 313 bp, Homo sapiens
ggcaacaagccaagtagcaaagatataagcaacaatcaaatggagcctgaaatatgataagagcatacatgcactttaacaataattttgatactggaatgattatttcagaagcaatattttttctgaaaagcattggtcttctgtacagaaaaataaaaaagtgagctgccactcatagtgaattaagagctgtgggctgaaagggtctcttttatagccagtttgaaatttttcatataataaaaacagtatgtaaatattatatatatatacacacatacatatatatgcatatatgtacatatttctg

SEQ ID NO: 66515 - DNA, 1970 bp, Homo sapiens
  misc_feature (649)..(649): n is a, c, g, or t
  misc_feature (843)..(843): n is a, c, g, or t
  misc_feature (845)..(845): n is a, c, g, or t
  misc_feature (1121)..(1121): n is a, c, g, or t
  misc_feature (1137)..(1137): n is a, c, g, or t
  misc_feature (1294)..(1294): n is a, c, g, or t
  misc_feature (1394)..(1394): n is a, c, g, or t
gtcatttcagagatacctatccttgaactataccctggtaagagtgggcatctattctttatgacaggagtcactatcaatataatttaggcctgcagagagatgttttctgagagaaaccaataggactattaaccagaagctaaagacaggtatcactatcaccagatgttatctatggaagacacatgtagagactctgcctgggagaaaatgctgattgaaaattctctctgtccatgtgtgagtgattttatacatttgactccctcttatgatagatttttcttagaagaaagaatagaccccaaaagattaatatgaagactgaggaggcttcacgagcatgtcaggtgatttatggcaggcttgaattggagcttaatcagagtgttaccagtagagggtgtccaggttcttggcatcttgaacaaagaattggacaaaacgcacaaacgaagcaaggaagaaatgaagggattgaaaattaaagtacactccacaatgtgggagcaagcctgagcataggggctcaagggccccgttacagaatttgtaggggtttaaataccttctatgggtttccattggttacttggtatatgccctatgtaaaagagaggatgaagtaaagttacttatatttggngtatgccctatggagaggctatttcccgtcatagctgaagtgtgaatcggctttatgttcccttcccccagaccctattttcctgcctcattttctctctgagagacgtgatccccataaatctttataagaggcagagggacccacagtctttcttctataactgcttcatgctggcttgagatgtagctccnancgactgagtatcacagtactcaccctgctctgtctagtggggacagggtttccttgatggtcaggggtggtgtctttcacctggaactggctggaacccttgtcacatgatcatctgaagcttgatggtctctaggcaagaggaaatgaatttcgttaaaagatttaatgggaacttcaaggagtggatacctgtgctgtcaagaatgtttgttatagagatttgtatgagaaaaacaaaacctggtttgtgttgtgttctaggatctatgtgttnccttaaagtcttagcncaagcaactccattatagtttggtttggtctgttggagcctagtgcatgagctcagtccaaaacaatggccttccataactttgttttaaaaaatccccctttttggtcaggttctcacttaggtgagagggtaaccaaaacttagggccttaatancactctcagttaccatcattttgggtttcagtcttagcacatcattcataggttatggtgtcctcatggttgctcatttctttcagctcttgttatttcnattgaagagagaccgtatgacactctagagatggctgcatgcaaacattcaaaacctttgagagaatacagcatgccaggaagactattattacgactaatgggaagataataccaagaatttggagtatactccttacccaaggtccccataaactgaacttcctaaaatcaaatagatcaaagaatgagctagataaacagtttactacttaactaagcagtccctttgcaaattctctaccactgaatttctataatcttcatttgatgtatttttccataggccacaagtattagcagctgcacagataattttctgttcagcaaattctattataactttcacaagacaatttaaagtctttgtgtaactgtagcctttacagtaaaatttgagcctatcatgaggtgtacatttctaatcattgctttttcactttaaaccaaggaaaaaggacctaacaaatgatgctcttctggaagagtgaaggcctactggcaatgttctctttaacccatgatgtgggctaagaggagtgaaccaataaataaaataataaaataatccaaattg

SEQ ID NO: 66516 - DNA, 703 bp, Homo sapiens
aagctagctgttaccagtccaggtaagggtaccgtagcttgggctacgcagccatgtgctattttgggggtcggaatcagacacacctgcattaaattcccagctctaagctaataaactcaggcaattttctgaggggagttaagaatatatgttgacaagtaacacaatgaaatgtaagccctgcagagcatctcgctgccttgcctactaaccctacgcacctagaactttcgtctgaaacagagtatatatttaaatccctttgttcaagtgtgcaagtaaactgagtactgcagtctttccacttgtttcccacttcttcccagtcttgactgagaagactcctaagattcagggaatctgtggaatacaaatattgtggagacaaagatggaaaacatccagcctaagaacacaggacaggacaggcgcggtggctcaagtctgtaatcccggcacttcgggaggccgaggtgggcggatcacgaggtcaggagttcgagacaagcctaaccaacacaatgaaaccctgtctctactaaaaatacaaaaattagtcaggtgtggtggcacgtgtctgtaatcccagctactcaggaggctgagacaggcgaatcgcttgaacccgggaggcagaggttgcactgagccgagatcatgccactgcactccagcctaggggacagagtgagactgtctc

SEQ ID NO: 66517 - DNA, 930 bp, Homo sapiens
cgtgaggttttttcagtgggattatttgtgtccctgtggctcttcagggagcttgcagaattctagctaaagataagaagggcatcgcttcaaatgggaggccaatcaatgcagcattaggaaggcttcattcagctcagcaccaccttggtgaagatcccggtgttacacatccaatcgttcacctccttccaagactatgacattccaggaaaccttcactgctaagaggaactaagatctagagtatctcctcgaggaagtacaactggattctccctccttggttcttccctggaccaaggacagaagaatcattcaacacagaggctattgacaaaaggggcatatttggtgcaaacaggggtaattaataagaagtccagtggctcacacctgcgatcccagcactttgggaggctgagatgggcagattgctcgagcccaggaattcaagaccaacctgggcaacatggcaaaaccccatctctacaaaaatacaaaaattgaaccagatgtgatggttcatgcctgtagtcccagctactctggaggctgatgtgggaggatcgcttgagcctaggaagtcaaggctgcagtgagtcatgattgctccgctccactgcactctggccttgatgatagagtgagaaccagtctcaaaaaaaaaaaggtcattttctaagcatttgttgattcaatactgcccactatgtacactgacaattagacataatttaatttcagctcatggtatgaatggagacaaaatgaaatcattttaatgcacattaaggcaatatagtgcccttaaataaaaagttgaagttcataagggaccatcattaagatttaactttgtaacaaatattttgtttttgtttgttttatttttagatttgcataataaaacattcatattcttaccca

SEQ ID NO: 66518 - DNA, 416 bp, Homo sapiens
ggagcttcttcccaccagggtgtgaagtagttttgacagcaggtgtggtgtgtcagcctgaaacctgaacagggcatcaccttttacctggtgccatcacagagtgctccagatttgggtaggaagaggatcccgtcacatccaggcatctcttggcagaggaaagggagctggtcagggagttttgaaaacaaaaattgtactataaaatgttttatttggggagctgtgctctggcagcatcctgatctgaaataattcctagccttttgtgtggttggtggtggctgatccatggaatcctgctgtgtcgctcagctgctgttaaaatattggatcaaagaaatgactcaggaggaaaagtgtcaagtaaaagttaatcatttcatccttgctgaaagatagaatttgagttg

SEQ ID NO: 66519 - DNA, 344 bp, Homo sapiens
gtatgtatgtctgtaggtatttctatacttaaccatctgtgtcccaattaagctaaacatgattcattctgatgccaacccccatccatcatgccatggatcgctctagacttcttcccttgtaacctcccactcaaacagtgagaaacctttgcccagtatgttttgagtaacctcactggagttgcagtcccactagatgaatgccaacccatttgttcatttaaaaggactttggaaccatagagcaatggctgggctgggtctgccacgctcatctcactgaaacatttgccatgaaggcactgccaagaaactctaggaccacagggtcctggtgctgc

SEQ ID NO: 66520 - DNA, 423 bp, Homo sapiens
ctatttcattaataccgctattattccactttgatgagtgctttgagattttcagtttttggctattataagtaatgcttcagtaagcatctttgtgtacataaacatgtttccataggatgtgtacctaggagtggaattgctcagttataaggtacgcacacctttaaaattttatattcccacctctgcttccatgatgtatgagagtgcttgtttatcaacacttggtgtggccagattttaattttagccaatatgatgtttatatagtagacgtttgtttgtgtgtgtgtgtgtgcgttttctctctctcttctgagatggagtcatgctctgtcacccaggctggagttcagtgagccaaaatggtgtcactgcactccagcctgggcaacagagtgagactgtctcaaaaaaaaa

SEQ ID NO: 66521 - DNA, 430 bp, Homo sapiens
tctttttaaatatttttactacacaaaaacttctggtagctgaaaaccactgtaaattatttttttgacaagcaacatactaatagatttttttttccagttttctaatccctcttcttaaattatcttgagattcttctggttacaaaataggaaaactataaaggaaaaggccagtagcccaacagttgaagaaccaccatatcatcagctgcttattttctatatttttatgttctttggggagcaaaaatagaactggcgtgttttgtaaggtattatccagacttaaaaattaaaagaacacatctatttttaggtcatggtagtcagaggcttgttgtcacattaggtgatatcctccagtcttttgtattagaggtgacgttttggctatccatgtgaatggatttgcccaaatcaggcctaa

SEQ ID NO: 66522 - DNA, 1902 bp, Homo sapiens
  misc_feature (782)..(782): n is a, c, g, or t
ttttttgtggatttggttgtagttgttaaaagttctctacgttttggatggattgccttaattgtatttatacaaatgagtttggtttatattacgctacttatttagaaggacactctgctcacaaattatactagtttggtagtttcataaactagcttgaatcaaaataaaatggtgctaaaatggatgttattttcaactgtgcactcagtaattgcaaatagttgtactatatacctgggggtgaacacaaaggaagtagttgcatcatctctgtataaaacacagatttatctttcgtgtagttgtgcattacgtagaatatggtaaggcaacatctgagttgtagaagtgctactggagtaacagaggtgaggaatcggttctgctcaagggagaggactggagaagagacctagaggggagagtggaccttgaagaactgattggatttctcctgttggggaatgtgaatcataaagctgaggtagggggaacaagtatgaggctggcaagtagtcggtttggcaggagcacagagtgcctgcagggagggccatgggagatcaagctgggaatgtagaaaggaattttaacttgataaattttgactaggtaacaggttcttttatcaaggagtgacattttatgtcacaaaaatttttaaaccatttctgtctcttggaaaacccaaaggtagcagtggcatgtgaaaaattcttgttttaaaagattcaaacaataaagaaacatgtagaatattttgtgtccgtacattntatgtttaggagttgaatattaatttgtaattaatagaatggagaaaagcaatcagttaattagaattcactttataggaatgaaatctaggcttaaagtgtgagaataatctgtcttgctttgttgaaagtgaccttggtattcgaagacagagctgctcactactgtcagtaagacgtatatcttaaattgattaaggctaggtaatcagtttgtgaggattcattcttaacgcttgtgccattggcaggcatattttaggtgctgtctcttgggccataaattagtgacactgagtgctgtggatttacccaaataacctctttaatatttgctactgttaggtgtaattagaagatacatgaaagaggcagggtgtggtggcttatgcttgtaatcctagcactttgggaggctgaggcaggtggatcaacatggcgaaatcccatctctaccaaaaatacaaaaaattagccaggcgtggtggcacccgctgcacctgtatcagctattcaggaggccaaggtgggaggatcacttgggccctggaggcagagattgcagtaagccaggatctcaggatcgtgccactgcactccagccttggagacagagagagactccatctcggggtggggggaaaaaaaagagaaaaagtgagagagcctggacaacataacaagagcctgtctctacaaaaataaaattaaaaaaaaattagccaggtgtgatgccacatgcctgtagtcctagctacttgcaagcctaaggtgggaggatccattgagcccaggagttcaaggctgcagtgagctgtgatgttgccgctacactccaggtgacagagcaagaccctaagaccttatctcttaaaaaaaaaaaaaaaaaagacgtgaaagttcagtaaatgtttgcagagatgaacgctggtatttaaagaagtagaagggattttaaagcaattactgcatttcagctaaaatccgaagaccttatcatggtctcataggtccaacattatctggactttacccatctaacctcaggtcctaccttatctaccacttcactgtatcttggctacgtaggcttcctttttgccatgccaaacttatcctt

SEQ ID NO: 66523 - DNA, 601 bp, Homo sapiens
cacagcctcaacaccagccaggctgcatgacatgtgtctagaagaaagcctgactttcagcaggtgttcaataagtgtgtgcttctgctcttaaagtctcagcctatttagtccactcaccacacagggcaccctgaggggtgaagttttgggtggagatgacggcatgggaaattatatgtctcatgccttggctgcaggtgtgctggactccagctgagctggacagagagtcacattgtgcaaggcctgctgtcccattgatgtggtcctggactctcagcagtgtaaaaagccatgttcccatttaaaccaccgcgtgtagacatcgtctcatctgcttctgtgttgcaaacattgctccctccttatactttagttgtcagcatcttcattacataggggccagaattggctatctgaatgcaggagtgtttcctgacctgcccagggactgcaggaaccaccatcgcttgcaccacctggggacccacaattgcatctcagagacctgtgtttctcatctgtaaagtggagataataatatgtttccaaaagggcccctgcacggaataaagtggtagaaataaataacctactg

SEQ ID NO: 66524 - DNA, 394 bp, Homo sapiens
tctgggtctccagtctgcccatctgcctgccctacagattttggacttgcacctccataattgcatgagccaactccttaaaataagtctttcttcacatatatacacatatcctgttggctctgtttctctggagaatgctcactgatgcagggatgatcagattggttgtgctattgtggaagtagtagttttcctctagatgctgatcctggcagggcagatccaggttttgtggggcctgaagcttatacaatgtcagggcctgctataagaaaaagcataaagaattatggatatgaaattacaactttgcatgtctgacaactggaagaattttccagactcttttggaatcatgcttttcaaatcttatttcttctttgctactttc

SEQ ID NO: 66525 - DNA, 425 bp, Homo sapiens
gagacggagtcttgctccgtcacccaggctagagtgcagtggtgttaaaaaaaaaaaaaaaaaatccaagacgtttaaacatctattgatatcagggtgagatattacacttgactttattgtattatgactattatactatatattaaagggcccaagtattctttctaggtaaggtatattattaaaaaaaagaaaaaatattgtgccaccagaaatgttagttatgaatctgagtggtgagctttgatgtttgctaccttagttgttaaacaattttgtcttgatatttgagagtttctatggacacatttatttctacttcatcaaaagctaaaacttcggttttttaaaattccagctttttcccttgataaaccttagatctgtttttttcatgctaatgttcttgacaacaacatgaa

SEQ ID NO: 66526 - DNA, 369 bp, Homo sapiens
tatttatactccctggcctccggctctctcagagccaacctctctcttctcctagtgttatgaccctgtcagtcaacattgggctcattagaaaaggccacatgggcataaattatgcctcaagagggaggtcatttatcattggccttcacttgagaagatcaaggctggaaagttcatgtttttattaccaaaattctccttctccaacctttcagaggttcctagagaaaggctttgggaggattggcttgagcatgaagtgaaatagaacaaaggtgaaaagccaggctgggctctgtgaaaggagacagtttgcaaactaccatgtcatatgtggtggtagatttcacactttaaaagagtggc

SEQ ID NO: 66527 - DNA, 1951 bp, Homo sapiens
  misc_feature (1)..(1): n is a, c, g, or t
  misc_feature (547)..(547): n is a, c, g, or t
  misc_feature (1035)..(1035): n is a, c, g, or t
nggaggtgttttctatctactaggagaccgccgttccctggcgccagctgagaccaattattacttcagagagacagttaacaaccacctgaccatcacctgatggtctcccaacactcctggtgtgaggtatgggagccctttcctgccctgctcatacccgactagctaccaagtataacaatagcactcaaagtgatagctaacattttggtcacctttattaaccagattctaccatgacacatgtgttgtataaatgatttcttttcattgccatagcaactccaataggctggtattcattatatctgtttttttaggaaactgaaattgagactcagagaggttaagtaacatccccaaaccagacagctaatacgaaacaaagccatatttgatctctcatcttttaaattaacataaaatatgaaatgaaaaattctgagaaaatataagtgaaaatgggtccagtttagggttaagaaagttatttctaggccaaaatccaagaaggaaactgtaaataaatattttatttttttancttcttatagattttaaaatttttgtgtcaaaataagctaaatgaaatttaaaaagaaataataaatttaagtgattaaatgaagaaaaatggttgatatccttaatacacatttattttaatgagtattatgttttatgtgatcaaatctattagtcttttaaaaaaaaattatgtcctggaagttgtacatagaaaagccttccccaaatattttgttttcattttcatacattgaaatgttcaatccacctggaatttattagacatatagtgtgaggtatggatttagccagctatcacaatattattaataataaacaatttattttatttaaatggctaaatccatccatcctttcattgttctttctcatttattgaatacttatatacatccttgcctgtttctgaacttcctattttattccattgatctgtaccagcaaaatactgtttttattattgtaggttatttatactttacnaaagtgttcttggttagtccctaaaatgtattcctccaaatgaactttttatttatttattgagagggagtctcactctgtcgcccaggctgtagtgcagtggcacaatctcggctcactgcaacctccgcctcctgagttcaagcatttctccagcctcagcctcctgcatagctgggattacaggtgcatgccaccatgcccagctaattttttgtatttctagtagagatgaagtttcaccatgttggccaggctgtctcctgacctcaggtgatccacccacctcagcctcgaaaagttctgggattacaggcatgagccaccacgcctggccaacctccgaatgaactttaaatgactttttaccgaggtctttactccacccctacaaaatgcaagtgggactttcagtgacattacaatatgtttataaattatatggaaatgtcatatctgtaatagtgagtttctccaacttcatatgtggtatgcctctccttttatgcaagcagtagagtcactttttttcatatagttcttagtaatagtctattaaatttatcaccataagtttctttgttgttgttatagaaaatgactttgttagctccattaagattttctgttataatccaagatatttgtaaaaccttatctattatgcatctttgtatgaaatttagacatacttgtgaaatgtaaaaatgtaccaagctttattttttaataaccaaaaagattaaatgtttattttaaattttaacttattttataaataaatatttcctcactttctgatagcttggacctatcaactaggtttgaatagagacttttatttaatgagactgaaatgttattaaccatgaaatttatacccattaaaaatattatccaagagggcctgagggga

SEQ ID NO: 66528 - DNA, 327 bp, Homo sapiens
ttcattgtaaacgttttctgaaatgagtaaatttaagccattggacactaaacatacatgttagcagaacactttgaaaatctgtttcttatcgtttttcccttttgggggtatctttttattaaaaaaattggttgaagttattaacttatttgaactacacatagttataagatcacacatctgtttttcagcaaccttcaattatttgtttatttttttttaacactttcggttcaaatataatgttatcagatagtcagaaatttatgttgaggagcaaggatttaagttggccgtgagaggttatgtacagtatctttttta

SEQ ID NO: 66529 - DNA, 496 bp, Homo sapiens
gaaaagggaactcttatacactgttggtgagaatgtgcatttgtacaacctctatggaaaacattataaagatttctcagagacctaaatatagaactaccattcgatccagcattcccactatggggtatctacctaaaggacaagaaatcactgtatcaaaaagatacctccacctgtatgtttattgcagcattcttcacaaaagcaaagacatggaatcaacctaagtgtccatcagtggatgactggataaagaaaatgtggtatacatacaaaatggaatactattcagccataacaacgaatgaaattatgtcttttgtagcaacatggatggaggtaattatcttaagtgaaacaaatcagccatagaaagacaaataccacgttttcacttataagcgggagctatataatgtatacacatgaacgtagaatgtggaatgatagacaatagagacttggaagggtgagccattggtggagtagatgc

SEQ ID NO: 66530 - DNA, 410 bp, Homo sapiens
cctccctgccaacataccacagcttcttcctgtccacagtcttgaaaatctatcctttcttccaagaactcttctccgactcagagaagcaatctttactcaaccccacttgtaggataaaattcctctccctttccacacagtgaatgtactttgcctaggttgcaaatattgactttatctgtatttatctcacatttattcctccttattctatgctctgtttacccatgtgtattgttagatcatgcccttgaccagcctacctcatggggttgatgtgacaatcaaatcagacaacataggcacagtgctttataatgtaaggattattattaggaggtaggaatttcatctcattttctcagagaagtagctagggcattgtagaaaatagagatttggagtaa

SEQ ID NO: 66531 - DNA, 3932 bp, Homo sapiens
  misc_feature (1585)..(1585): n is a, c, g, or t
ggatcctggagacaactttgccgtgtgacgcgccgggaggactgcagggcccgcggccgagggctcggcgccgcctgtgagcgggcccgcgcggccggctctcccgggcaccaagcttgctccgcgccactgcccgccggcccgcggcgaggacgacctgcccgtctccgccgccggcggcccttcctggcgcgaggcagtgagggcgaggcgctcaggtgcgagcgcggggccccgccgcagcgcccgccgcagcgccgcgccaagccgcgcccggctccgctccggggggctccagcgccttcgcttccgtctcagccaagttgcgtggacccgctctttcgccaccttccccagccgccggccgaaccgccgctcccactgacgctgctttcgcttcacccgaaccggggctgcggggcccccgacgcggaaaggatggggagaaggctgcagatgccgaggcgccccgagacgcccgtgcggcagtgacccgcgacctccgccccgcccggcgcgcccctcgggcccccggggccctcggcgccccttccctgccgcgcgggaacccccgaggcccggccggccccctccccctgcgagccggcggcagccctcccggcgggcgggcgggcggaggcccgggcgggcgcgggcgcgggcgggggcggggcggggcggcgcgcccggagcccggagcccggccctgcgctcggctcgactcggctcgcctcgcggcgggcgccctcgtcgccagcggcgcaccatggacgggctgcccggtcgggcgctgggggccgcctgccttctgctgctggcggccggctggctggggcctgaggcctggggctcacccacgcccccgccgacgcctgccgcgccgccgccacccccgccacccggagccccgggtggctcgcaggacacctgtacgtcgtgcggcggcttccggcggccagaggagctcggccgagtggacggcgacttcctggaggcggtgaagcggcacatcttgagccgcctgcagatgcggggccggcccaacatcacgcacgccgtgcctaaggccgccatggtcacggccctgcgcaagctgcacgcgggcaaggtgcgcgaggacggccgcgtggagatcccgcacctcgacggccacgccagcccgggcgccgacggccaggagcgcgtttccgaaatcatcagcttcgccgagacagatggcctcgcctcctcccgggtccgcctatacttcttcatctccaacgaaggcaaccagaacctgtttgtggtccaggccagcctgtggctttacctgaaactcctgccctacgtcctggagaagggcagccggcggaaggtgcgggtcaaagtgtacttccaggagcagggccacggtgacaggtggaacatggtggagaagagggtggacctcaagcgcagcggctggcataccttcccactcacggaggccatccaggccttgtttgagcggggcgagcggcgactcaacctagacgtgcagtgtgacagctgccaggagctggccgtggtgccggtgttcgtggacccaggcgaagagtcgcaccgnccctttgtggtggtgcaggctcggctgggcgacagcaggcaccgcattcgcaagcgaggcctggagtgcgatggccggaccaacctctgttgcaggcaacagttcttcattgacttccgcctcatcggctggaacgactggatcatagcacccaccggctactacgggaactactgtgagggcagctgcccagcctacctggcaggggtccccggctctgcctcctccttccacacggctgtggtgaaccagtaccgcatgcggggtctgaaccccggcacggtgaactcctgctgcattcccaccaagctgagcaccatgtccatgctgtacttcgatgatgagtacaacatcgtcaagcgggacgtgcccaacatgattgtggaggagtgcggctgcgcctgacagtgcaaggcaggggcacggtggtggggcacggagggcagtcccgggtgggcttcttccagcccccgcgggaacggggtacacggtgggctgagtacagtcattctgttgggctgtggagatagtgccagggtgcggcctgagatatttttctacagcttcatagagcaaccagtcaaaaccagagcgagaaccctcaactgacatgaaatactttaaaatgcacacgtagccacgcacagccagacgcatcctgccacccacacagcagcctccaggataccagcaaatggatgcggtgacaaatggcagcttagctacaaatgcctgtcagtcggagagaatggggtgagcagccaccattcccaccagctggcccggccacgtctcgaagttgcgccttcccgagcacacataaaagcacaaagacagagacgcagagagagagagagagccacggagaggaaaagcagatgcaggggtggggagcgcagctcggcggaggctgcgtgtgccccgtggcttttaccaggcctgctctgcctggctcgatgtctgcttcttcccagcctgggatccttcgtgcttcaaggcctggggagcctgtccttccatgcccttgtcgagggaaagagacccagaaaggacacaacccgtcagagacctgggagcaggggcaatgaccgtttgactgtttgtggcttgggcctctgacatgacttatgtgtgtgtgtgtttttggggtggggagggagggagagaagagggggctaaatttgatgctttaactgatctccaacagttgacaggtcatccttgccagttgtataactgaaaaaggacttttctaccaggtatgaccttttaagtgaaaatctgaattgttctaaatggaaagaaaaaaagttgcaatctgtgcccttcattggggacattcctctaggactggtttggggacgggtgggaatgacccctaggcaaggggatgagaccgcaggaggaaatggcggggaggaggcattcttgaactgctgaggatggggggtgtcccctcagcggaggccaagggaggggagcagcctagttggtcttggagagatggggaaggctttcagctgatttgcagaagttgcccatgtgggccccagccatcagggctggccgtggacgtggcccctgcccactcacctgcccgcctgcccgcccgcccgcatagcacttgcagacctgcctgaacgcacatgacatagcacttgccgatctgcgtgtgtccagaagtggcccttggccgagcgccgaactcgctcgccctctagatgtccaagtgccacgtgaactatgcaatttaaagggttgacccacactagacgaaactggactcgtacgactctttttatattttttatacttgaaatgaaatcctttgcttcttttttaagcgaatgattgcttttaatgtttgcactgatttagttgcatgattagtcagaaactgccatttgaaaaaaagttatttttatagcagcaaaaaaaaaaaaaaaagaatacagttaaatgtattatacataattttggaaccaaagaggccaacagatcagttttaattttattagacggtgaggccatctgagatgaggtggacgttctgagcagtcccttgagtggcctgccaacgtttcagggtatgaatggattttgtttattcggtttgatgtgtcttttccatccttacacacccagaaggtagagtaaaaatgactatgatagaatgcaggtgtgtatccttaaatcctcatctttatgtttatttaataaagctccccttagattctgtttcataataatttaaaaccaaacaattttcccatagacttgctgttaaagtattgtacgtttgtgtacagtttaagaaaataaaagattgagtgccacgggcaaactg

SEQ ID NO: 66532 - DNA, 1123 bp, Homo sapiens
gcacgagggttattgttatattcagtaagtcacaattctctttgatggctgagcagggaagccatgagtgttctctgaaccacatcattgtttaaacttaaaagatagtgggctattaaacttatattctgaaataattgtactctcacaagaacttggaaaaatagtacagagaggtctcatgcatccatcacccacatgcctcaccagtgacatcttacgtaactatagtccattatcaaaaccaggaaactgaccttgtgtgcccactgtcttttatgtccctagttttcctaatgactaatgatttcatttaagatctctcatttctgtttctcttggaaagagaatcaaataccacatgagtctctgtcagctgccaaaatgcccataactgtttaacttacttcacaaaggtacatagatgacgattatgttggtgcatctttcaatataagcatatgtacctatactggagatttagtgtgtagtctaccaacatataagcaatatgtatctggcatatccttccccataaagaatcctaccctttgttaattgggttggaaatagatacaggttatcatctggaatcagagcacccaggatgttgtagatggatgtacccattacagtaagtccgactttgaagtgcctgaaacaccgctcaagggaacagctggccctcactttttccattttatgccagtgttattctgctcattctttcctgatttatgtggccttgtaaatattgtttgtattgctgtgaaatatttggcatgtgtcaagtgatgatgttctgttcagtactgcacattaatggacggaatctgaaattatactttgagctacataacttgcagaagaaacttcatatgtcagggaggtgcagtgtcccagaactttgggaggccaaggtgagcagatcacctgaggccaggagttcgaaaccagcctggccaacatggtgaaaccccctctctatttaaaaaagaagagaaaaaaagcaacttcatagtgtgccaagcttttgttcagaaggagcaactcagtgttgagcaagaatttatgaagatagtggaggtggagtttttagtctacaccatgaattgagaacaga

SEQ ID NO: 66533 - DNA, 411 bp, Homo sapiens
gactttggagcctaaacttgggaagagttgacttggtagagtggacagagccatcagctggatagaagattgcacctgacctcacccttgtcaagcccaagaatacataagtgcttgctggaggtatggagtataggaagagagaaggccaaagaaagcagatgccaataattggtcttctgccatccttgtcagataaattacttctgaaaagaagggctaaaggttttcctccaaccttcattcctttggggaacatcctttctcttcaatttacaatcataaggagtgggattaatgagcataacccccctatatggaagttagatcttaaatttctcttctttagaaataatgcccagagggaattagtcaaaaataagattccaccccctaagccaaaaaaaaaaa

SEQ ID NO: 66534 - DNA, 2071 bp, Homo sapiens
  misc_feature (1)..(1): n is a, c, g, or t
  misc_feature (107)..(107): n is a, c, g, or t
  misc_feature (460)..(460): n is a, c, g, or t
  misc_feature (523)..(523): n is a, c, g, or t
  misc_feature (941)..(941): n is a, c, g, or t
  misc_feature (1199)..(1199): n is a, c, g, or t
  misc_feature (1837)..(1837): n is a, c, g, or t
  misc_feature (1860)..(1860): n is a, c, g, or t
  misc_feature (1884)..(1884): n is a, c, g, or t
  misc_feature (1891)..(1891): n is a, c, g, or t
  misc_feature (1904)..(1904): n is a, c, g, or t
  misc_feature (1915)..(1915): n is a, c, g, or t
  misc_feature (1919)..(1919): n is a, c, g, or t
  misc_feature (1981)..(1981): n is a, c, g, or t
  misc_feature (1984)..(1984): n is a, c, g, or t
  misc_feature (1995)..(1995): n is a, c, g, or t
  misc_feature (2008)..(2008): n is a, c, g, or t
  misc_feature (2013)..(2013): n is a, c, g, or t
  misc_feature (2020)..(2020): n is a, c, g, or t
  misc_feature (2038)..(2038): n is a, c, g, or t
ntctacaaggaacttaaacaactttacaaaaaaacaaacaataccatcaaaaattgggcaaagggtatgaacagacacttctcaaaagaagacattcatgcaaccancaaacttatgaaaaatagctcaacatcactgatcattagagaaatgcagttcaaaaccacaatgagatatcatctcatgccagtcactatggtgattatcaaaatgtcaggaaacgatagatgctggcgaggctgtgggaaaataggaattcttttacactgttggtgggaatgtaaattagttcaacaattgtggtagatgtgtggcaattcctcaaggatctagaaccagaaataccatttgacccagcaatcccattactgggtatatacctaaaggaatataagtttgcctactttctacttcaaagtatttgtggaaagaatgtgacagatcaacagataaatacatnttgaaaatgactggactgggtagtctttcagtccttctatcctgacattgtaaggtccataangacaacaggtatagtaacttgagttaacaaaggttttcatatgcagggacttgatgggattcatcacaaccttgcaaataatgttctgtagcaaaaagtcattcaattttgaatgagaagatctgggtatacaacgtgattcaccattaggaggtatattagtcaaaacatggaaaatatttaagccttattatccttttttataacttgggatctgtaagactgctttgtgaatttcactgtgttattatgaagattattataataacatatgggacatttctttgtaaaccataatatggccatgaaaatattagtgtttttatatctcttgctattgttatctcaatcttttctattcaatttttcatagaagaatttaagtcttcacctaagatcacagcattaagatttattnttgagtttgtccagtgaagtactctttcctcataaaataatacattttgatgacattaagaaaaaaaaacccagaagaagctaccattaatattaccatgttttgacttagtatttataaggaaacataatttctaaataagtaaaaatatatttggtatgatttatttaaatttcatattgaacatttatttatgattcttcacaagtatttctgatattctcgttttcaccagaagaggccactatgaccaaactntctgaatttattatcaatttgaacaattccatttagtttagaaaattgttatgcatgtcaaaagtcaatgatcaggagtaagtctttttcctctttaagctccttttgaaaagcagccttccaactgagagtagtaaacatatacattcttccctctgatttcttgtaaaaagccacagttttaaaggttgatagacatagattcaagtcttagttctaccacagagacaaactgcttaaccttggcaaatagcttaaacttgttcacttttctaaaaagaaaataatgatatctagcttttttttaaagattaaataagctatgattactaaattacttaaaacagtggcttaacacaaatgaacaaatactagttccggttactctagaatgtctggtatatcctttgtcagcaagcagtttttaacggatcctaaaatgctttaggtatttttacgtgaaaatgaaaaaaatgaatggaagatcaatttcaagaatgtttacgaggttaatatgcggaagtttgaatagttgatgaggggagattatgaatttatttgttttttttctataaagtacataatttcacagtggctcatgcatgtgaccctagcactttgagaggcagaggtgggcngatcacttgaggtcaagagttcnagacctgcctgggtaatatgatgnaaccccntctctaccaaaantacaaaaattngctnggtgtggtggcatgcacctgtaatcccagctacttgggaggctgaggtgggagaatttgctngancctggaaggcngaggttgcagtgngccangatcgcnccactgcacttcagcccngcgagagagcaagactctatttcaaaaaaaaaa

SEQ ID NO: 66535 - DNA, 367 bp, Homo sapiens
tagtcagttattgctgcactagagctaaataaaagacataaatatctaaggcacttactggaataaacatcttatttccgctaagaggttggctagggaagctctgcttcagagtatgggttgagtataagcctgttccacatgtcttttgctctgggaccaggcgttgtgcagcccatccttttctcaagacaaaagccaagccaagcaaggacatttaaagcttcacttctgctcacatcatatctattggccaaacattccattggccaaagcaaatcacatggccaagtcaagcatcagtagtctggggaatattcttcctctactctagacacatggaaaaggttatgcatactaattctat

SEQ ID NO: 66536 - DNA, 2185 bp, Homo sapiens
ggagacagagactcactctgtcacccattctggagtgcagtggcgcaatcctggctcactgcaacctctgcctcccgggttcaagcatttctcctgcctcagcctcctgagtagctgggattacaggcacacgccacaatgcccggctaatttttgtatttttagtagagacggggtttcgccatgctaggctggtctcgaactcctgacctcataatctgcctgtctcagcctcccaaatgcttggattacaggcttgagccaccacgcccggccatgtgtgtccttttaagggaagtaccatatgtgactgctgatggtaacatttcttgtatgcagcaggaaaacctgcaggctatacgcaaggtatgtgaataaagactgtggattgaagggggaaaagttgataatacatacccatgataagaattcatattttctctttctttgtctcttcatacagaagcaagttcgagcagagaaggttagcagttacagcacttaaaagtttaggattgagggtttttggttggtttttttgttttttcatatttcactgttgctgaacattgatttagtcttccaaaatggacatcactagtaagtgcactgaatactgaaatacgctgattggcaagcatatatctgtagctagaatttttttaaccgtaattccagaatttaaaaaggtaagagatctgctttttgatagaggccttttaaaaagactatataacatttctatttggctgtttatgtgaatgctcagggaatttggacatgtgttttatacagaagtggctttttatatttcttcaagtgataaattagcattaggacatatcagatagaacaggccagtttcctgatgagattggtagagatgttacggtaggttcatccttcctttttccatgttatatgtggagaagtgttaaacttgctcaagcaaatgggagtaggagataggctgaaaatagagattgctacaccattctattttgttttcatgcctgttttttctccaatcctatatggacatttgagaaatggaccacaaatctgagagggatagagtaaaaagaggcattaatgtatgtactcacaagttagacctattttgctgttaaaataggtctggtcttgtcataggtcataggaattgtgtagtttgagttgctgcgagaaagagtcaagaacttagacttgaatgggaaggccaactggtgagggaagtggggtattatctactcaaatgttctaagctaatacaaaacaattacctggcaagcatccccctctgcccttcttgagattctgaatgaacttagaatcagatcaatggtgagacccagttatgtaactttcctttgaagttctaaaggataattgaaaataaagtagtctggcatgtttaacagtaaggagtgacactaaaatttgaatataacagtatgttgcaactatttataatagacctatttatgttttgagaactaagtaaaatgctatgaaaaattcacataaagcacgtaagcaccaaatgaaaatcatttcgtgctttcaaattaatgatactaggcttgtaggatgtcttagaatcatgtttaacaagaagttaaaatatttgcattttgaaatttttatgcagtttggctaaggaggaacttggaaaataacattcatcagcttctacactgcactttttgtatgtggactttgtaaagtttaatgtccgtttaacagttgcttgtttatttgtgtaaacctagctagtaaatattgatgatgttcagggccactgacttgcacagcccttggagcactattcacacagaacacaattcagagtttgttaagacattaacacactttgatatctattccaaaaatacttttgttaccacaggttcattgctgtcatttagacaaaattaatgtactgtgatattttcccactcttaagatgatgttgcccagcctagtactgtcagaaattcagttctgatgtctgtgtgtgcaagatattaatgtggtccctgtaagaaataccagagttggtcatgatttactaaggagatgtaatattttctttgacctgttaggaatataacttgtgtcttgatttgttgcacatcatattttttgcaacattaatgaatttaaataaattaattggaacgtt

SEQ ID NO: 66537 - DNA, 2590 bp, Homo sapiens
ggagacagagactcactctgtcacccattctggagtgcagtggcgcaatcctggctcactgcaacctctgcctcccgggttcaagcatttctcctgcctcagcctcctgagtagctgggattacaggcacacgccacaatgcccggctaatttttgtatttttagtagagacggggtttcgccatgctaggctggtctcgaactcctgacctcataatctgcctgtctcagcctcccaaatgcttggattacaggcttgagccaccacgcccggccatgtgtgtccttttaagggaagtaccatatgtgactgctgatggtaacatttcttgtatgcagcaggaaaacctgcaggctatacgcaaggtatgtgaataaagactgtggattgaagggggaaaagttgataatacatacccatgataagaattcatattttctctttctttgtctcttcatacagaagcaagttcgagcagagaaggttagcagttacagcacttaaaagtttaggattgagggtttttggttggtttttttgttttttcatatttcactgttgctgaacattgatttagtcttccaaaatggacatcactagtaagtgcactgaatactgaaatacgctgattggcaagcatatatctgtagctagaatttttttaaccgtaattccagaatttaaaaaggtaagagatctgctttttgatagaggccttttaaaaagactatataacatttctatttggctgtttatgtgaatgctcagggaatttggacatgtgttttatacagaagtggctttttatatttcttcaagtgataaattagcattaggacatatcagatagaacaggccagtttcctgatgagattggtagagatgttacggtaggttcatccttcctttttccatgttatatgtggagaagtgttaaacttgctcaagcaaatgggagtaggagataggctgaaaatagagattgctacaccattctattttgttttcatgcctgttttttctccaatcctatatggacatttgagaaatggaccacaaatctgagagggatagagtaaaaagaggcattaatgtatgtactcacaagttagacctattttgctgttaaaataggtctggtcttgtcataggtcataggaattgtgtagtttgagttgctgcgagaaagagtcaagaacttagacttgaatgggaaggccaactggtgagggaagtggggtattatctactcaaatgttctaagctaatacaaaacaattacctggcaagcatccccctctgcccttcttgagattctgaatgaacttagaatcagatcaatggtgagacccagttatgtaactttcctttgaagttctaaaggataattgaaaataaagtagtctggcatgtttaacagtaaggagtgacactaaaatttgaatataacagtatgttgcaactatttataatagacctatttatgttttgagaactaagtaaaatgctatgaaaaattcacataaagcacgtaagcaccaaatgaaaatcatttcgtgctttcaaattaatgatactaggcttgtaggatgtcttagaatcatgtttaacaagaagttaaaatatttgcattttgaaatttttatgcagtttggctaaggaggaacttggaaaataacattcatcagcttctacactgcactttttgtatgtggactttgtaaagtttaatgtccgtttaacagttgcttgtttatttgtgtaaacctagctagtaaatattgatgatgttcagggccactgacttgcacagcccttggagcactattcacacagaacacaattcagagtttgttaagacattaacacactttgatatctattccaaaaatacttttgttaccacaggttcattgctgtcatttagacaaaattaatgtactgtgatattttcccactcttaagatgatgttgcccagcctagtactgtcagaaattcagttctgatgtctgtgtgtgcaagatattaatgtggtccctgtaagaaataccagagttggtcatgatttactaaggagatgtaatattttctttgacctgttaggaatataacttgtgtcttgatttgttgcacatcatattttttgcaacattaatgaatttaaataaattaattggaacgttaaaaaaaaaaaaaaaaaaacaaaaaaaaaaaaaaaaaaaaaaaaagaaaaaaaaaaaacacaacaaaagaaaaagaaaaaaaaataacaaacacagaagccaatgcagtggagcacgccacacacatagtctcacagccaagaagtgccactgaacacatgcatagcacgaacatggaaacagcaatacaaacaagactagacgacgctcttatacaataacacggactactccaaccacaacaacaccacgttatgtagctcgcacaatcagcatgatatctatcactacataaataaacgatagacagaaacaaaatatcaacacgccctcatgcgagatataaataaatatgacagagaaagcaacataagatcaacaagaaagcgttcgatccgcaaacat

SEQ ID NO: 66538 - DNA, 915 bp, Homo sapiens
cgtctagaggatcccggagctcctagcctgtggccctcctttgaggatcgaatgaacttagaatcagatcaatggtgagacccagttatgtaactttcctttgaagttctaaaggataattgaaaataaagtagtctggcatgtttaacagtaaggagtgacactaaaatttgaatataacagtatgttgcaactatttataatagacctatttatgttttgagaactaagtaaaatgctatgaaaaattcacataaagcacgtaagcaccaaatgaaaatcatttcgtgctttcaaattaatgatactaggcttgtaggatgtcttagaatcatgtttaacaagaagttaaaatatttgcattttgaaatttttatgcagtttggctaaggaggaacttggaaaataacattcatcagcttctacactgcactttttgtatgtggactttgtaaagtttaatgtccgtttaacagttgcttgtttatttgtgtaaacctagctagtaaatattgatgatgttcagggccactgacttgcacagcccttggagcactattcacacagaacacaattcagagtttgttaagacattaacacactttgatatctattccaaaaatacttttgttaccacaggttcattgctgtcatttagacaaaattaatgtactgtgatattttcccactcttaagatgatgttgcccagcctagtactgtcagaaattcagttctgatgtctgtgtgtgcaagatattaatgtggtccctgtaagaaataccagagttggtcatgatttactaaggagatgtaatattttctttgacctgttaggaatataacttgtgtcttgatttgttgcacatcatattttttgcaacattaatgaatttaaataaattaattggaacgtt

SEQ ID NO: 66539 - DNA, 215 bp, Homo sapiens
tctcgtgtatcatttcactaaatttccttacattgatattctagctcatgaattctttcttctactctggctcatctgtagtctaatttattcaatgagttataaatttcaaataattaaatttttatttctaagtattgtttttattatttaagaaaaatctttttgaatttatctataatgtcctgtttctgctatgtttctatttttttaaa

SEQ ID NO: 66540 - DNA, 362 bp, Homo sapiens
atttactgcttcgactgccagctcattggtagcagctgaggctgcagcaattgataagaaacaatccctgctcttatgctcacattctagtagggaaagacagataggtatacaaattattgtaatacaggataacagaaatatatgtgtggtgctgtactagcagagttttgtaaagtttatttgctgtcctgaggccagtagaaaagaaaggggaggaaggtattctggttcagaagggctaagggacctgattggctgaggcaggagaatcgcttgaatccgggaggcagaggttgcagtgagttgggattgtgccactgcagtccaacttgggcgacagagtgagactctgtctagga

SEQ ID NO: 66541 - DNA, 821 bp, Homo sapiens
ctttaggtcctctgtttattctgtcaaatgaaagtgttaggccaaggtcgcattatctctttggaaactacatcgagaacagaattcccatggaacgaactcttaatagttcactggtagtcccccttttctgaatattcttcccaacatgacactttataacaaaaatttaactgcaaaactctttttttttcaccaacagccagattttgatgagaaaatggccatatttatttactccaaatatatattatgtctgtgataatttgcctaaactgtttaaggaatattaacaagtatgatactgcatcgtggtatgtagcaaaaagataggtaatctgacatacatggatgcaagcagcatggctgtgaacctggatatatttagaaatgatcttcagtggagtccttgatgtgacattttccactaaaacattcttctaactctggtatatcttagtgtttcgaactataatttccgtcttcaagccaagacagcagctctacatccttacctaggtaattcaggcatgcgccagtattttggaggggtccaaattagagttagttatgatggtatagatctttaaagtatagtctaaccaagcttgctctggtcttttgtgacatcaaggcttctcagtctgtattcacataaagttgaaacaactaatcaattcagtgaaaaaaaatcagcagatttcactcatacactggtgatatataccactggtattgggtacaatgtaaggagagaggattacccatctcttcagttacttgtaaaatatgattttaaaaaaataaatcaatacattttg

SEQ ID NO: 66542 - DNA, 1041 bp, Homo sapiens
cgacttcgttcgaggttggcgcccgcctttttcagagagcacttcttagtgggtattccgtccggggccacttttctgaggccgaaggacccctagtcagtgtgtgagacatagcctggccgagcctgggaaccacctggggctgagagacgaccttaagtggacagagattctagaacaggagaaataaaacagctatcgtttgggagcaatgagtttaaaaccctttacctacccgtttccagagacgaggtttcttcatgcaggacccaatgtgtataaattcaaaatcagatatgggaagagtatcagaggagaagagatagaaaataaggaagtcatcacccaggagctggaggtcccagttgagaagaaagcagtaggagctgtgatgaggaaacgaaaacacatggacgagcccagctcccccagcaggccagggctggacagggccaagatagggacttccagccaaggccccagcaaaaagaagccccctgtggaaaccaggagaaatagggaaagaaaaacccaacaaggattgcaggagactctggcctctgatatcactgatgtccagaaacaagattctgagtggggacacagcctgccagggcgaattgtcccacccctgcagcacaactcacctccacctaaggagcgagcagccaccggcttctttgggtttctaagctctctcttcccgtttcgatatttcttcaggaagagcagccactcttgagccttccaaatgcagcgctggaaagaggatcatctcttgtagtgactcctcccgagccattcttcctccaactctatccttttcttatgacacttcagtcgtggggaatgaggtccccatgctgagtcctctgtggttttatcgtgtcctttgcccctttataatagattttttcccccaatttaaaacattaagaatggaactttctaaaatgttcatgtcctgagggccggtttaggccttttgtcttcggcacttaggatcctaatgacaataaattatttatgaagagataaaaa

SEQ ID NO: 66543 - DNA, 847 bp, Homo sapiens
cgacttcgttcgaggttggcgcccgcctttttcagagagcacttcttagtgggtattccgtccggggccacttttctgaggccgaaggacccctagtcagtgtgtgagacatagcctggccgagcctgggaaccacctggggctgagagacgaccttaagtggacagagattctagaacaggagaaataaaacagctatcgtttgggagcaatgagtttaaaaccctttacctacccgtttccagagacgaggtttcttcatgcaggacccaatgtgtataaattcaaaatcagatatgggaagagtatcagaggagaagagatagaaaataaggaagtcatcacccaggagctggaggtcccagttgagaagaaagcagtaggagctgtgatgaggaaacgaaaacacatggacgagcccagctcccccagcaggccagggctggacagggccaagatagggacttccagccaaggccccagcaaaaagaagccccctgtggaaaccaggagaaatagggaaagaaaaacccaacaaggattgcaggagactctggcctctgatatcactgatgtccagaaacaagattctgagtggggacacagcctgccagggcgaattgtcccacccctgcagcacaactcacctccacctaaggagcgagcagccaccggcttctttgggtttctaagaagccatcatctgtcacatgccagagggtgcccctcaagagtgggagagcaggggctgaactgctgagttcccgctgcgtcctgttgctatgctgcctgcacccttggtggggagaagagaagaggtggactgctgcggaggacctggcaaaca

SEQ ID NO: 66544 - DNA, 365 bp, Homo sapiens
aagatatcttgcaatatcagtgtctgtgggccaaatcagacatcctttttgttgttgttgctgccaccatccccactctccttccctccctagacgcaacctagtacctgcctctcagacactgtattttgcagaaacttaattgataagtaatgtctacatgagctgttaaagggaattttcaaagaatattattattttcttcatttactttttaaaggttagttagatatgtattatagagactgtgtttaggttttttctcttggaaattttacattctaggtttaataactacatttattgaatttagtactatagtaataaatatgagtataaatacctggacttctaaatttaggatt

SEQ ID NO: 66545 - DNA, 931 bp, Homo sapiens
agtaattatggtgcatgcctctttgggtcaaggtgcagaggcttgtgaaatacctttgttttctaggggttgggaaggttcagttgcggaaataggtatgtgccaggaaggctggtggcccagatttaagcctggccagcagaggcaggagtggaggagacaatatagggtaagaaggggatgagtcgatgaaggaagaaaagagacgtggttttcttgggtctgggagcacagaagcaaaaatcactaagcaggtagtcagagactagagagggcagagccactccctttgatgcagagggggcactgaggaacttgccctttcattccaggtttgctggtcgctaggcaggtgtcctagagtgagactggcttagcaagtgggtgtctccttcagagttggttcaggagctcacttccctctacagacacactgtcactgctaggccctagtgttttcctttgttagggctccaagtaatgagaaaggctgccccatgtagggtgccacctcaaatcctttttctcatttcacctcacagtaaccctggtgagccctctacatagtgcctgtccagcccatgcctctgggtaggcagccacataaaaatcaaacacctgttttgttggctaatctggggaggaagaaagggagtgattctttgtgtcatactccacaaagggccatctctggcctaggcagcactgcagaaggcaggaccatgtacctgagactgatgagctgagtcgggtgcgagcctcactcaaggagagggtagagagggtaggtacccacctatcccatccggctctgttctttgagtttatgggacttccttcatcccgatcacttgggtgccattgttacaaggggctggctattcctacttttcttttttctttttcttttcttttttttttttttttgaga

SEQ ID NO: 66546 - DNA, 488 bp, Homo sapiens
gcagtgtccacctttcatttctgtgatcaggacatggctctaaaattgcaagtcctaacttatttgtcttagccagttgtttgtaacccttcgatgttcccattttcctttcaactagaagccccaaatctttttatttatctaaaattcagcttaaaaagggtaatcaggctttatgggacaggtaagagctatctgtataatgattttttttcccccatataagaaatgaaatcatgggaggccaaggcaggaggcttgcttgaggccaggggttcaagaccagcctgggtaacatagtgagagctcgtctctacaaaaacaaaaaacaaacaaacaaaaatggctaggtgtggtggcacacacctgtagtcctagctacttgggaggctgcggtgggagaggatcacttgagctcaggagtttgaggttactgtaagctgtgattgcatccctgtctccaacctgggtgacagagccagactgtt

SEQ ID NO: 66547 - DNA, 261 bp, Homo sapiens
ttaatatacaaccatacctcaaaatattgcaggatcagttccagaccactgccatgaagtcaatattgcaacaaagtgcccaaaaatcatggtctagttttccctgctttcaccctcacaactggagggttcatggagctctccaggggatgacggttgtgccatgcagagcagcatttctaagcaagtgtgagttcatgagtgtgattgaaactgctgtttcacatagaaaggcctgcgtgcagcaggttgcaaacaggt

SEQ ID NO: 66548 - DNA, 3212 bp, Homo sapiens
agaaatcagagacgctgcctgcctgctcccatctctcgcgcgctctctctctcttctgctctctccctcccttgcaaacattggatttaaacctgctcagaattcagcacagaggaaggcagcagcggtagcagcagcagaagcagtagcaagcccggcagctgagagcaccgcagcgtcgagatgtaccatcctgcctactgggtcgtcttctcggcgacaactgccctgctcttcatcccaggagtgcccgtgcgcagcggagatgccaccttccccaaagctatggacaacgtgacggtccggcagggggagagcgccaccctcaggtgtaccatagatgaccgggtaacccgggtggcctggctaaaccgcagcaccatcctctacgctgggaatgacaagtggtccatagaccctcgtgtgatcatcctggtcaatacaccaacccagtacagcatcatgatccaaaatgtggatgtgtatgacgaaggtccgtacacctgctctgtgcagacagacaatcatcccaaaacgtcccgggttcacctaatagtgcaagttcctcctcagatcatgaatatctcctcagacatcactgtgaatgagggaagcagtgtgaccctgctgtgtcttgctattggcagaccagagccaactgtgacatggagacacctgtcagtcaaggaaggccagggctttgtaagtgaggatgagtacctggagatctctgacatcaagcgagaccagtccggggagtacgaatgcagcgcgttgaacgatgtcgctgcgcccgatgtgcggaaagtaaaaatcactgtaaactatcctccctatatctcaaaagccaagaacactggtgtttcagtcggtcagaagggcatcctgagctgtgaagcctctgcagtccccatggctgaattccagtggttcaaggaagaaaccaggttagccactggtctggatggaatgaggattgaaaacaaaggccgcatgtccactctgactttcttcaatgtttctgaaaaggattatgggaactatacttgtgtggccacgaacaagcttgggaacaccaatgccagcatcacattgtatgggcctggagcagtcattgatggtgtaaactcggcctccagagcactggcttgtctctggctatcagggaccctcttagcccacttcttcatcaagttttgataagaaatcctaggtcctctgagcaacgcctgcttctcatatcacagactttaatctacactgcggagagcaaaccagcttgggcttctttttgtttttttctgttattctagatttgttttctttttgtttttgtttatttgtttgtttgcttttatttccagcttgaatgagtggggttgggggcggggtgggcagggttctaccacgtgtaggataatcattcattggtgtgtccaaaaatggggtctgctcctgctaccttgacccttccctttcctctgcttctctcctcatcatcattcccaacaacatcctctgccacacacaacaaaacgtaagtttcatttgggcaaaaattgagcctcacaataaacaccctgaagacacaacttgacttataacatagtgcacagcaagagctacatccaagtgtcctattatctgtgattattttcttaatgacaatgtacatatgcccccatccatgttaattattatctaattccattagggttcacgtcttttctttctgggacactatcctactatatccatatctatagatttcaatatagatgattgtgccatcttctgtagcccctccgctctactcattccttccaccatctgcagagatttgaagtttggggctatgcatgaaacccaacactaaattttgcaagtcaagtgaccaaaaaagggggaggcattttgaagatagaacctctattttaaaaagagaagttcaactcataaacgtgattgataggtggctgatttatttaggttttgtcaagctatctatcaaagtaatggtacagttacccatctactcaaatatctgatttatctcaccatccaattatctacccacctgtcttcctctctagcaatctatttactgtttatcaatctatcaatgtaattgtctaacactcctttctattctctccctactactcactatcaattcatccccatatgaatctctaaccatattgtatctctcccactgtattcatttatacaccatcagcagacattggcatcttcaaaattatctttcaacttctgtgaaagccaacgatctcacaggttaacaaaatacaaaagcaataccctgtgttgtggactctttaaaatctggtatcctatccacccaagggagacactaacagataggccaaagtagcaagctaatgatcagtcactcactattcccggaagagcctgtgttttctaaaacactttcttgggaagcagatcagcctagaaaagttttgattagcactgtggttttccttttgcacttgaaggacaaaggtgccagcctttatgcttctctcaacccttcaagaaagtacatgtcaggaacctatggctggctttccttagcagcaagaacttgagagaaaaacacatctgtctctgcaatgcaaagtgaagagtccacccgcctgagtgggatgacttcagctagagtctcctttctgctccagttctggtttaatctgtttgaaaactatccagtaaaaagctgatggaggccaattacatggcgggtgtattgacaactctggtatttgtttcaggaagctcttctaagctgagggcacttgagcaactgacttaattttcaagcacttgattaacacaacactgcaaacagaagggagaaagtgtcagtgacacagtttcctctgatgcagctgcttctccaatggctttggggaagaacttcaccagctcttcaggttcaaagcagacccagcatacaaacaagagctgagccacctttgctgtcttgtctcctgggacgagaaggactcatccagcaaagttgcctgggattcaaaataaaggcattgcagaccgcacaggtgtgctgcagggactgatccacagagaggatgagaatgcagcatcaatcgcagacctgccctgcctcagttggaaaaccttttcaggccctcagtctaaaaaataaaaaatatgagcaccaaaaaaaa

SEQ ID NO: 66549 - DNA, 3100 bp, Homo sapiens
gaccaggactgtgcggctgccggagtcctgggaagttgtggctgtcgagaatgggggtctgtgggtacctgttcctgccctggaagtgcctcgtggtcgtgtctctcaggctgctgttccttgtacccacaggagtgcccgtgcgcagcggagatgccaccttccccaaagctatggacaacgtgacggtccggcagggggagagcgccaccctcaggtgtaccatagatgaccgggtaacccgggtggcctggctaaaccgcagcaccatcctctacgctgggaatgacaagtggtccatagaccctcgtgtgatcatcctggtcaatacaccaacccagtacagcatcatgatccaaaatgtggatgtgtatgacgaaggtccgtacacctgctctgtgcagacagacaatcatcccaaaacgtcccgggttcacctaatagtgcaagttcctcctcagatcatgaatatctcctcagacatcactgtgaatgagggaagcagtgtgaccctgctgtgtcttgctattggcagaccagagccaactgtgacatggagacacctgtcagtcaaggaaggccagggctttgtaagtgaggatgagtacctggagatctctgacatcaagcgagaccagtccggggagtacgaatgcagcgcgttgaacgatgtcgctgcgcccgatgtgcggaaagtaaaaatcactgtaaactatcctccctatatctcaaaagccaagaacactggtgtttcagtcggtcagaagggcatcctgagctgtgaagcctctgcagtccccatggctgaattccagtggttcaaggaagaaaccaggttagccactggtctggatggaatgaggattgaaaacaaaggccgcatgtccactctgactttcttcaatgtttctgaaaaggattatgggaactatacttgtgtggccacgaacaagcttgggaacaccaatgccagcatcacattgtatgggcctggagcagtcattgatggtgtaaactcggcctccagagcactggcttgtctctggctatcagggaccctcttagcccacttcttcatcaagttttgataagaaatcctaggtcctctgagcaacgcctgcttctcatatcacagactttaatctacactgcggagagcaaaccagcttgggcttctttttgtttttttctgttattctagatttgttttctttttgtttttgtttatttgtttgtttgcttttatttccagcttgaatgagtggggttgggggcggggtgggcagggttctaccacgtgtaggataatcattcattggtgtgtccaaaaatggggtctgctcctgctaccttgacccttccctttcctctgcttctctcctcatcatcattcccaacaacatcctctgccacacacaacaaaacgtaagtttcatttgggcaaaaattgagcctcacaataaacaccctgaagacacaacttgacttataacatagtgcacagcaagagctacatccaagtgtcctattatctgtgattattttcttaatgacaatgtacatatgcccccatccatgttaattattatctaattccattagggttcacgtcttttctttctgggacactatcctactatatccatatctatagatttcaatatagatgattgtgccatcttctgtagcccctccgctctactcattccttccaccatctgcagagatttgaagtttggggctatgcatgaaacccaacactaaattttgcaagtcaagtgaccaaaaaagggggaggcattttgaagatagaacctctattttaaaaagagaagttcaactcataaacgtgattgataggtggctgatttatttaggttttgtcaagctatctatcaaagtaatggtacagttacccatctactcaaatatctgatttatctcaccatccaattatctacccacctgtcttcctctctagcaatctatttactgtttatcaatctatcaatgtaattgtctaacactcctttctattctctccctactactcactatcaattcatccccatatgaatctctaaccatattgtatctctcccactgtattcatttatacaccatcagcagacattggcatcttcaaaattatctttcaacttctgtgaaagccaacgatctcacaggttaacaaaatacaaaagcaataccctgtgttgtggactctttaaaatctggtatcctatccacccaagggagacactaacagataggccaaagtagcaagctaatgatcagtcactcactattcccggaagagcctgtgttttctaaaacactttcttgggaagcagatcagcctagaaaagttttgattagcactgtggttttccttttgcacttgaaggacaaaggtgccagcctttatgcttctctcaacccttcaagaaagtacatgtcaggaacctatggctggctttccttagcagcaagaacttgagagaaaaacacatctgtctctgcaatgcaaagtgaagagtccacccgcctgagtgggatgacttcagctagagtctcctttctgctccagttctggtttaatctgtttgaaaactatccagtaaaaagctgatggaggccaattacatggcgggtgtattgacaactctggtatttgtttcaggaagctcttctaagctgagggcacttgagcaactgacttaattttcaagcacttgattaacacaacactgcaaacagaagggagaaagtgtcagtgacacagtttcctctgatgcagctgcttctccaatggctttggggaagaacttcaccagctcttcaggttcaaagcagacccagcatacaaacaagagctgagccacctttgctgtcttgtctcctgggacgagaaggactcatccagcaaagttgcctgggattcaaaataaaggcattgcagaccgcacaggtgtgctgcagggactgatccacagagaggatgagaatgcagcatcaatcgcagacctgccctgcctcagttggaaaaccttttcaggccctcagtctaaaaaataaaaaatatgagcaccaaaaaaaa

SEQ ID NO: 66550 - DNA, 3967 bp, Homo sapiens
aatacaggctagaggttgaagagcaggcgtgctgaatgagagtggcgtcgcagcgatggccagcgctgaggggtatcaaggtcttattcatgcattctcatgtcttttgactccaagatgccttggaagcattcctttgctcttttcattttcaatttttgaaaaatatacacaacacctgggcaattctgtgttgctcttttgaatctctacatggcctctccatctgcccacttttccaaagggtcatcttgggttttcccctctcctgcagtggactcagtgtcgcctgccaggagaagtgccactgctgctcctctcttctggcccacaattgtccgtgcctgggctacagtgacagccacctgattcatttccctacctctccagtctagtctccacaccacagcgaaggcaatctttagaaaatctttataaaacctccagctcaaaattttctctggctcttcactgtccttcgagcaaaatctgaaaccctgagcataatttatagaagacctgtgactgggctccagctgacctctccagcctcatctctcctcccaccctccctgcctcgctaggttccagctgcacagagaactttcaattcccgcattgctgggcctctgtaaaggctgcacctccccaccaggaaaagctctccccaccacctcttccttcacatggagaattctatcccatcctccaggtcccagcacagtcccacctcccccagggaatgtgcctgactcctctgcattaggttggaggctctccctgctgtgtgcccatggcacactgtgttcctcatgagatcttgagcttcttgaaggcgagggctgtgactggtccaccagttgtatcccaacacctgggacgatgcctggcctgtagcaggtgttcagtgaatatgcattcgtggaatttctaagtgaatgaaggaacacaggtttcacccttgcagtcagtggaaaaagttggtgagggactgaatccttgttctgttgtttatccatgaagcctatatatttctagtgcaaaaggcccagtgggtctcaaaacattcttggaggggtttgacacactgctattagtagtgactcataattccacgattccctgggatacagagaaggcaggggggtagtactgtttgaacaaaaatcttcccaagaccctggcaaagagatcttccttaggaatcagtggcatatgcgtttatgttctttaacagggaaagtaaaagtgagcgcacttttttgaagctcataaatactcatgtgactgtaaatttagaaatgttaattaattgggcctaatgtttgatctggaaaagtacttagcagtcaccaggaatttgccttgaactgactcgaaccacaaatcagaaccgtatttccacaatttaatttttccatgagacaatcataaaaactctgctgggattatattactaaaacctttatatcccattgcattggatatgtttgtaggtgagtaatgttaaatttaaaaaaaaaaattaataaagcatttgtttaggacctctgtatgcttgataaagtaaaaaaaaaatatatgaaaatgttaccctaacctacaataactaaacttgaacataatgataaaagcagaagaaaatagtcattgaaaacactgtagcagagttgaaatgcaacttaaacccttaatgaacttaagcttctttatcaataaagatgtcagtcaatacttaactataaaaatttaaggagtttcatctgatgaccattaagaattatcccaactaataatgtatatagcatttattgtgaaaccacaataaatataaaacacggtagtcaatgtcattaaaacttaaaatggaatgagcgtaatttgaaaaacaaaatagccctggcacttctttttgtttagaacaacgtatagaaagcacatgcctcactgagaatacttagtggaatctcgataaccacaaaagcaattaaatgcttttaaattatagaaaacactaaaatttttaaagttgttcacccttggtagcttttaagtaaggatcacttgtgatttatagttgtagcttttcttgaacacgtcctcttgcactgatgactaacaaagttagttttaaacggaggtttgctggtgggtttttttttttttttaatgaaaagaaacaacaacaaaaaaatcacaccaaggctagaaagatgcatatcagtatctttgctcttttgccttttatgagcaattagagtaaaccataatcatacctcctaaatgagtttctgagtgttaatattagtgctgtactcaaaggaatgtccatgttccacatggaaagtgttaaattactgagattagtgatttgtgtgtatatccatctgttgactgaccatctgtatgtgtgtcactgactgttgcgaggcttctgtgttccttagcagtgcctccaggtcaccataggacatttaattattgcatgacttaaaagattcaatacggcaaccacagcaaagagaaaattctagttctgccactaacacttcctttaacacaactctgctcaaacatgtgcctttcattgcattccaaagttatcgataattaccagctatcattgttttgggtgttttctctgctaatttctattggcatgcattctagatagttgcccattgtaactataaattgactatttaaataaacaaaagcataattcatggaaaactgccattctaaggtatgatgcaagatggtagatattctgcttccttttccatattctatcatagagatgcattactataaatcaggacttggtatatccatttgttacatattttcttaatgtgggagtcaaagtgaagctacatagctaacaagtcttattcatttagtaagttggctgccctctgctgttcataatgtttcttaaacagattcgtttcctctaagagaagtttctatctccccttggcaaaacaaaatactattcttgaaaacagaagttataataattaatgatatcattcagtgtgtaacattagaaactatgaagtttaaaagagtcagaggttagttttcctgtagaagaaatagtatgtctctctaaacagaagagaaattactggaaattctctctcctgtcagttaccctaaaaaccagctccagcaaagccatttcacgaacaattatgcatctataatgatctaaataataattggagaaaaatagtattttatggacattaaaatctcaattaatactattgcaactattgaatcaaatataaattgaattaaatttttaaattcaacagaaaatagcaaattggttactagaatattttgtctctaccaatttcactattacttctgaggtgtaaaccaaatataatactggcataaagaaggaaaaatatctcaagatttctaggcattttcctatgtctaatagtaggatgttctctctgaatttatttattacaaaaataacattacaacaataaagcaaaataatatttaaaagaaagaaaaaacaaacagtcgcaataccagaacaccattgtagtcgtttgtgtatgtgtgacttctttactgtgttcatgcagagacaagctttgtaatacctttgtaactactgtacaggtgcgtggttagattccgttttgactgcttggtatctcattgtaagcatttcccagggacactacacagtctttataattatgatcactacatcttttggataacttaggcttttgcactattttgtcacgatgcctcaaacttttctatcattgtctgtaattactcctataatcttttattataaaatattgaaacaaagtcacatcactaaaaacactgtgagtataatttattagtaagtgtagactgtgtatcattagcaaaacttgtaaatgcaacgagtcaataaaacagtagaacaatgtcaaaa

SEQ ID NO: 66551 - DNA, 3987 bp, Homo sapiens
aatacaggctagaggttgaagagcaggcgtgctgaatgagagtggcgtcgcagcgatggccagcgctgaggggtatcaaggtcttattcatgcattctcatgtcttttgactccaagatgccttggaagcattcctttgctcttttcattttcaatttttgaaaaatatacacaacacctgggcaattctgtgttgctcttttgaatctctacatggcctctccatctgcccacttttccaaagggtcatcttgggttttcccctctcctgcagtggactcagtgtcgcctgccaggagaagtgccactgctgctcctctcttctggcccacaattgtccgtgcctgggctacagtgacagccacctgattcatttccctacctctccagtctagtctccacaccacagcgaaggcaatctttagaaaatctttataaaacctccagctcaaaattttctctggctcttcactgtccttcgagcaaaatctgaaaccctgagcataatttatagaagacctgtgactgggctccagctgacctctccagcctcatctctcctcccaccctccctgcctcgctaggttccagctgcacagagaactttcaattcccgcattgctgggcctctgtaaaggctgcacctccccaccaggaaaagctctccccaccacctcttccttcacatggagaattctatcccatcctccaggtcccagcacagtcccacctcccccagggaatgtgcctgactcctctgcattaggttggaggctctccctgctgtgtgcccatggcacactgtgttcctcatgagatcttgagcttcttgaaggcgagggctgtgactggtccaccagttgtatcccaacacctgggacgatgcctggcctgtagcaggtgttcagtgaatatgcattcgtggaatttctaagtgaatgaaggaacacaggtttcacccttgcagtcagtggaaaaagttggtgagggactgaatccttgttctgttgtttatccatgaagcctatatatttctagtgcaaaaggcccagtgggtctcaaaacattcttggaggggtttgacacactgctattagtagtgactcataattccacgattccctgggatacagagaaggcaggggggtagtactgtttgaacaaaaatcttcccaagaccctggcaaagagatcttccttaggaatcagtggcatatgcgtttatgttctttaacagggaaagtaaaagtgagcgcacttttttgaagctcataaatactcatgtgactgtaaatttagaaatgttaattaattgggcctaatgtttgatctggaaaagtacttagcagtcaccaggaatttgccttgaactgactcgaaccacaaatcagaaccgtatttccacaatttaatttttccatgagacaatcataaaaactctgctgggattatattactaaaacctttatatcccattgcattggatatgtttgtaggtgagtaatgttaaatttaaaaaaaaaaattaataaagcatttgtttaggacctctgtatgcttgataaagtaaaaaaaaaatatatgaaaatgttaccctaacctacaataactaaacttgaacataatgataaaagcagaagaaaatagtcattgaaaacactgtagcagagttgaaatgcaacttaaacccttaatgaacttaagcttctttatcaataaagatgtcagtcaatacttaactataaaaatttaaggagtttcatctgatgaccattaagaattatcccaactaataatgtatatagcatttattgtgaaaccacaataaatataaaacacggtagtcaatgtcattaaaacttaaaatggaatgagcgtaatttgaaaaacaaaatagccctggcacttctttttgtttagaacaacgtatagaaagcacatgcctcactgagaatacttagtggaatctcgataaccacaaaagcaattaaatgcttttaaattatagaaaacactaaaatttttaaagttgttcacccttggtagcttttaagtaaggatcacttgtgatttatagttgtagcttttcttgaacacgtcctcttgcactgatgactaacaaagttagttttaaacggaggtttgctggtgggtttttttttttttttaatgaaaagaaacaacaacaaaaaaatcacaccaaggctagaaagatgcatatcagtatctttgctcttttgccttttatgagcaattagagtaaaccataatcatacctcctaaatgagtttctgagtgttaatattagtgctgtactcaaaggaatgtccatgttccacatggaaagtgttaaattactgagattagtgatttgtgtgtatatccatctgttgactgaccatctgtatgtgtgtcactgactgttgcgaggcttctgtgttccttagcagtgcctccaggtcaccataggacatttaattattgcatgacttaaaagattcaatacggcaaccacagcaaagagaaaattctagttctgccactaacacttcctttaacacaactctgctcaaacatgtgcctttcattgcattccaaagttatcgataattaccagctatcattgttttgggtgttttctctgctaatttctattggcatgcattctagatagttgcccattgtaactataaattgactatttaaataaacaaaagcataattcatggaaaactgccattctaaggtatgatgcaagatggtagatattctgcttccttttccatattctatcatagagatgcattactataaatcaggacttggtatatccatttgttacatattttcttaatgtgggagtcaaagtgaagctacatagctaacaagtcttattcatttagtaagttggctgccctctgctgttcataatgtttcttaaacagattcgtttcctctaagagaagtttctatctccccttggcaaaacaaaatactattcttgaaaacagaagttataataattaatgatatcattcagtgtgtaacattagaaactatgaagtttaaaagagtcagaggttagttttcctgtagaagaaatagtatgtctctctaaacagaagagaaattactggaaattctctctcctgtcagttaccctaaaaaccagctccagcaaagccatttcacgaacaattatgcatctataatgatctaaataataattggagaaaaatagtattttatggacattaaaatctcaattaatactattgcaactattgaatcaaatataaattgaattaaatttttaaattcaacagaaaatagcaaattggttactagaatattttgtctctaccaatttcactattacttctgaggtgtaaaccaaatataatactggcataaagaaggaaaaatatctcaagatttctaggcattttcctatgtctaatagtaggatgttctctctgaatttatttattacaaaaataacattacaacaataaagcaaaataatatttaaaagaaagaaaaaacaaacagtcgcaataccagaacaccattgtagtcgtttgtgtatgtgtgacttctttactgtgttcatgcagagacaagctttgtaatacctttgtaactactgtacaggtgcgtggttagattccgttttgactgcttggtatctcattgtaagcatttcccagggacactacacagtctttataattatgatcactacatcttttggataacttaggcttttgcactattttgtcacgatgcctcaaacttttctatcattgtctgtaattactcctataatcttttattataaaatattgaaacaaagtcacatcactaaaaacactgtgagtataatttattagtaagtgtagactgtgtatcattagcaaaacttgtaaatgcaacgagtcaataaaacagtagaacaatgtcaaaaaaaaacacccacaaacagca

SEQ ID NO: 66552 - DNA, 1052 bp, Homo sapiens
  misc_feature (153)..(153): n is a, c, g, or t
tggcgcatgcctgtggtcccagctactcaggaggccgaggtaggaggatcacgagctcgggcagttgaggctgcagtgagccatgattgtgccactgcactccagcctgggtaacagagtgagaacttgtctcaaaaaataaggaaaagtatnaaaacaagaaagagatcactttacaggaaagaaatagtatgtctctctaaacagaagagaaattactggaaattctctctcctgtcagttaccctaaaaaccagctccagcaaagccatttcacgaacaattatgcatctataatgatctaaataataattggagaaaaatagtattttatggacattaaaatctcaattaatactattgcaactattgaatcaaatataaattgaattaaatttttaaattcaacagaaaatagcaaattggttactagaatattttgtctctaccaatttcactattacttctgaggtgtaaaccaaatataatactggcataaagaaggaaaaatatctcaagatttctaggcattttcctatgtctaatagtaggatgttctctctgaatttatttattacaaaaataacattacaacaataaagcaaaataatatttaaaagaaagaaaaaacaaacagtcgcaataccagaacaccattgtagtcgtttgtgtatgtgtgacttctttactgtgttcatgcagagacaagctttgtaatacctttgtaactactgtacaggtgcgtggttagattccgttttgactgcttggtatctcattgtaagcatttcccagggacactacacagtctttataattatgatcactacatcttttggataacttaggcttttgcactattttgtcacgatgcctcaaacttttctatcattgtctgtaattactcctataatcttttattataaaatattgaaacaaagtcacatcactaaaaacactgtgagtataatttattagtaagtgtagactgtgtatcattagcaaaacttgtaaatgcaacgagtcaataaaacagtagaacaatgtcaaaa

SEQ ID NO: 66553 - DNA, 797 bp, Homo sapiens
  misc_feature (794)..(795): n is a, c, g, or t
  misc_feature (797)..(797): n is a, c, g, or t
cgaaggcttcattataattttatcaatcaaattcttagaagagggaaaaagtctgttctccccaccctcccccctcactcgtccccccccttcactctcactttcttccattcataatttcctatgatgcacctcaaacaacttcctggactggggatcccggctaaatatagctgtttctgtcttacaacacaggctccagtatataaatcaggcaaattccccatttgagcatgaacctctgaaaactgccggcatctgaggtttcctccaaggccctctgaagtgcagcccataatgaaggtcttggcggcaggtaaatacacccgccccgcgccggcttcgcgtccccgctgcggggcgcggcggcaacttggggcgcttggcagcgcgagccggacgcccacccgccgcagacacacgaacacttggggcgcccgcgcagccaccggaggcgctgggtggcggcccggagcgagcgcgggcacatggtcccaagcaccgcacgccccgcggcaggttggcggcgagggagggggcgccgagccttcctcctcctcctcttcttccccctctccttctcctcctcctcctcctcgctccggacactcgctggctgctcttccctctgcgctttctcccagattcactctccctctctctttttcttttctttctttctttccgctttctcctttccaaccgcggtcccgggctgctcccagggaggggcgcgggcggcgagcagcttgcaaactccggcctgggacgggagcaggtgcccctcgtgccanntn

SEQ ID NO: 66554 - DNA, 2170 bp, Homo sapiens
cgaaggcttcattataattttatcaatcaaattcttagaagagggaaaaagtctgttctccccaccctcccccctcactcgtccccccccttcactctcactttcttccattcataatttcctatgatgcacctcaaacaacttcctggactggggatcccggctaaatatagctgtttctgtcttacaacacaggctccagtatataaatcaggcaaattccccatttgagcatgaacctctgaaaactgccggcatctgaggtttcctccaaggccctctgaagtgcagcccataatgaaggtcttggcggcaggagttgtgcccctgctgttggttctgcactggaaacatggggcggggagccccctccccatcacccctgtcaacgccacctgtgccatacgccacccatgtcacaacaacctcatgaaccagatcaggagccaactggcacagctcaatggcagtgccaatgccctctttattctctattacacagcccagggggagccgttccccaacaacctggacaagctatgtggccccaacgtgacggacttcccgcccttccacgccaacggcacggagaaggccaagctggtggagctgtaccgcatagtcgtgtaccttggcacctccctgggcaacatcacccgggaccagaagatcctcaaccccagtgccctcagcctccacagcaagctcaacgccaccgccgacatcctgcgaggcctccttagcaacgtgctgtgccgcctgtgcagcaagtaccacgtgggccatgtggacgtgacctacggccctgacacctcgggtaaggatgtcttccagaagaagaagctgggctgtcaactcctggggaagtataagcagatcatcgccgtgttggcccaggccttctagcaggaggtcttgaagtgtgctgtgaaccgagggatctcaggagttgggtccagatgtgggggcctgtccaagggtggctggggcccagggcatcgctaaacccaaatgggggctgctggcagaccccgagggtgcctggccagtccactccactctgggctgggctgtgatgaagctgagcagagtggaaacttccatagggagggagctagaagaaggtgccccttcctctgggagattgtggactggggagcgtgggctggacttctgcctctacttgtccctttggccccttgctcactttgtgcagtgaacaaactacacaagtcatctacaagagccctgaccacagggtgagacagcagggcccaggggagtggaccagcccccagcaaattatcaccatctgtgcctttgctgccccttaggttgggacttaggtgggccagaggggctaggatcccaaaggactccttgtcccctagaagtttgatgagtggaagatagagaggggcctctgggatggaaggctgtcttcttttgaggatgatcagagaacttgggcataggaacaatctggcagaagtttccagaaggaggtcacttggcattcaggctcttggggaggcagagaagccaccttcaggcctgggaaggaagacactgggaggaggagaggcctggaaagctttggtaggttcttcgttctcttccccgtgatcttccctgcagcctgggatggccagggtctgatggctggacctgcagcaggggtttgtggaggtgggtagggcaggggcaggttgctaagtcaggtgcagaggttctgagggacccaggctcttcctctgggtaaaggtctgtaagaaggggctggggtagctcagaagtagacatagtgtgtggggttggagctctggcacccggggaggtagcatttccctgcagatggtacagatgttcctgccttagagtcatctctagttccccacctcaatcccggcatccagccttcagtcccgcccacgtgctagctccgtgggcccaccgtgcggccttagaggtttccctccttcctttccactgaaaagcacatggccttgggtgacaaattcctctttgatgaatgtaccctgtggggatgtttcatactgacagattatttttatttattcaatgtcatatttaaaatatttattttttataccaaatgaatacttttttttttaagaaaaaaaagagaaatgaataaagaatctactct

SEQ ID NO: 66555 - DNA, 123 bp, Homo sapiens
cagtgccaatgccctctttattctctatgtaagttacccctgggatactgacaggagatggcagggagggggcttgtaaatatcattaggggctgtcctgatctgggttgaggggaccttttg

SEQ ID NO: 66556 - DNA, 4098 bp, Homo sapiens
cgaaggcttcattataattttatcaatcaaattcttagaagagggaaaaagtctgttctccccaccctcccccctcactcgtccccccccttcactctcactttcttccattcataatttcctatgatgcacctcaaacaacttcctggactggggatcccggctaaatatagctgtttctgtcttacaacacaggctccagtatataaatcaggcaaattccccatttgagcatgaacctctgaaaactgccggcatctgaggtttcctccaaggccctctgaagtgcagcccataatgaaggtcttggcggcaggagttgtgcccctgctgttggttctgcactggaaacatggggcggggagccccctccccatcacccctgtcaacgccacctgtgccatacgccacccatgtcacaacaacctcatgaaccagatcaggagccaactggcacagctcaatggcagtgccaatgccctctttattctctattacacagcccagggggagccgttccccaacaacctggacaagctatgtggccccaacgtgacggacttcccgcccttccacgccaacggcacggagaaggccaagctggtggagctgtaccgcatagtcgtgtaccttggcacctccctgggcaacatcacccgggaccagaagatcctcaaccccagtgccctcagcctccacagcaagctcaacgccaccgccgacatcctgcgaggcctccttagcaacgtgctgtgccgcctgtgcagcaagtaccacgtgggccatgtggacgtgacctacggccctgacacctcgggtaaggatgtcttccagaagaagaagctgggctgtcaactcctggggaagtataagcagatcatcgccgtgttggcccaggccttctagcaggaggtcttgaagtgtgctgtgaaccgagggatctcaggagttgggtccagatgtgggggcctgtccaagggtggctggggcccagggcatcgctaaacccaaatgggggctgctggcagaccccgagggtgcctggccagtccactccactctgggctgggctgtgatgaagctgagcagagtggaaacttccatagggagggagctagaagaaggtgccccttcctctgggagattgtggactggggagcgtgggctggacttctgcctctacttgtccctttggccccttgctcactttgtgcagtgaacaaactacacaagtcatctacaagagccctgaccacagggtgagacagcagggcccaggggagtggaccagcccccagcaaattatcaccatctgtgcctttgctgccccttaggttgggacttaggtgggccagaggggctaggatcccaaaggactccttgtcccctagaagtttgatgagtggaagatagagaggggcctctgggatggaaggctgtcttcttttgaggatgatcagagaacttgggcataggaacaatctggcagaagtttccagaaggaggtcacttggcattcaggctcttggggaggcagagaagccaccttcaggcctgggaaggaagacactgggaggaggagaggcctggaaagctttggtaggttcttcgttctcttccccgtgatcttccctgcagcctgggatggccagggtctgatggctggacctgcagcaggggtttgtggaggtgggtagggcaggggcaggttgctaagtcaggtgcagaggttctgagggacccaggctcttcctctgggtaaaggtctgtaagaaggggctggggtagctcagagtagcagctcacatctgaggccctgggaggtcttgtgaggtcacacagaggtacttgagggggactggaggccgtctctggtccccagggcaagggaacagcagaacttagggtcagggtctcagggaaccctgagctccaagcgtgctgtgcgtctgacctggcatgatttctatttattatgatatcctatttatattaacttattggtgctttcagtggccaagttaattcccctttccctggtccctactcaacaaaatatgatgatggctcccgacacaagcgccagggccagggcttagcagggcctggtctggaagtcgacaatgttacaagtggaataagccttacgggtgaagctcagagaagggtcggatctgagagaatggggaggcctgagtgggagtggggggccttgctccacccccatcccctactgtgacttgctttagcgtgtcagggtccaggctgcaggggctgggccaatttgtggagaggccgggtgcctttctgtcttgcttccagggggctggttcacactgttcttgggcgccccagcattgtgttgtgaggcgcactgttcctggcagatattgtgccccctggagcagtgggcaagacagtccttgtggcccaccctgtccttgtttctgtgtccccatgctgcctctgaaatagcgccctggaacaaccctgcccctgcacccagcatgctccgacacagcagggaagctcctcctgtggcccggacacccatagacggtgcggggggcctggctgggccagaccccaggaaggtggggtagactggggggatcagctgcccattgctcccaagaggaggagagggaggctgcagacgcctgggactcagaccaggaagctgtgggccctcctgctccacccccatcccactcccacccatgtctgggctcccaggcagggaacccgatctcttcctttgtgctggggccaggcgagtggagaaacgccctccagtctgagagcaggggagggaaggaggcagcagagttggggcagctgctcagagcagtgttctggcttcttctcaaaccctgagcgggctgccggcctccaagttcctccgacaagatgatggtactaattatggtacttttcactcactttgcacctttccctgtcgctctctaagcactttacctggatggcgcgtgggcagtgtgcaggcaggtcctgaggcctggggttggggtggagggtgcggcccggagttgtccatctgtccatcccaacagcaagacgaggatgtggctgttgagatgtgggccacactcacccttgtccaggatgcagggactgccttctccttcctgcttcatccggcttagcttggggctggctgcattcccccaggatgggcttcgagaaagacaaacttgtctggaaaccagagttgctgattccacccggggggcccggctgactcgcccatcacctcatctccctgtggacttgggagctctgtgccaggcccaccttgcggccctggctctgagtcgctctcccacccagcctggacttggccccatgggacccatcctcagtgctccctccagatcccgtccggcagcttggcgtccaccctgcacagcatcactgaatcacagagcctttgcgtgaaacagctctgccaggccgggagctgggtttctcttccctttttatctgctggtgtggaccacacctgggcctggccggaggaagagagagtttaccaagagagatgtctccgggcccttatttattatttaaacatttttttaaaaagcactgctagtttacttgtctctcctccccatcgtccccatcgtcctccttgtccctgacttggggcacttccaccctgacccagccagtccagctctgccttgccggctctccagagtagacatagtgtgtggggttggagctctggcacccggggaggtagcatttccctgcagatggtacagatgttcctgccttagagtcatctctagttccccacctcaatcccggcatccagccttcagtcccgcccacgtgctagctccgtgggcccaccgtgcggccttagaggtttccctccttcctttccactgaaaagcacatggccttgggtgacaaattcctctttgatgaatgtaccctgtggggatgtttcatactgacagattatttttatttattcaatgtcatatttaaaatatttattttttataccaaatgaatacttttttttttaagaaaaaaaagagaaatgaataaagaatctactct

SEQ ID NO: 66557 - DNA, 1210 bp, Homo sapiens
gttacctagcaggctgtgttctacacagggcttggttctctctcacagcttgtggtaagcgaaattattccaagattcaatgaatacctgctattgagcggcttccctaaccacccaaactggtcttttgttagtggttattgagaggattgtcacagccattgacctacgcaattttacttcaaaagaaatgagcatttttcttcccctttcatttctaaaagcagatatggcaatttgcttaaattgctgtctttaaaagtttagatgattatactttttcccccttgccttttttcttccttttcatttaagcagcacagtgccgtctctttttctgggattggacacggttcctgctgcagggttcatgaagtggttgtgcatgtgtgtgtgtgtgtgtgtgtgtgtgtgtgtgtgtgtatgtatattatctccttacacattagtgttcatttgtctgagaactcttttcagacaaagtaaggctacgttgaactcttcgattaacattttatattttaatgctagggttcattttctctaggccccaatactagaggtttgcgggtgaaaataaaatgaaaatacacctaatggaaaaatctctgtctctttatgtaggaagatatggtagcaactagcctcagagacttaggagtaggcaagataggttacaccttcaagattttatgtctgaagaagaaacagaatttgatctaaatgtaggaagaggaaataaaaggtgcctgtgaagaactaacgctaggaacacagggaagaaagagatgaagatgaaaggttacggctagttggcagaggccaagagagcatcctattcttagacccagcaccttggatctagtttccctgtgttgcagttatctctactatgatgtgcaacaaaccatactgagccatatacttgatgccatatactttatacgtgccaaagaatatgatgcaataaatacattttaaattatagtatggaaaaaataaaaaaaaaatgaaaagactcagttctgtcttcagggaactcacaatctagtagccagactttatccctaatagggataaaggagctgtattgcaaataggccaccatatcagagtggagaccagttgatgtaaaaagcaaacccataactatctttggtgatggtaggctgaacccctcaaagctcagaacccactgataagggtttgt

SEQ ID NO: 66558 - DNA, 814 bp, Homo sapiens
ggttaagtagaactggagattttaagaactggaaaaaaggaaaaggtgaaaagtagcatacaaaattgagaaactaaattctgacggtaattttattaatgaaaataaactttatttaatacaggggaattcttaggtatgaatatttcacataaataaatgtcacaatagcgtcaaatcccagactttcaggaaagtaactgtagcactgttaatatcacaacaacaacaacaaaattctcatctactttgttctgaaaagttttatttttcttaaaaaagaaaaaaaagcaaaccaccccccccaaaaaaaattttttttaaaaataaaaataagaacaaacagaaaccagtctgagctggcagctgtgacagccagtgagacacccgggctttccgggtagtgcttggctttgggctggatgtccacgcagagagccctggagccatcccgcaggtcccacacccaggtacccagaaaatgacggcggccgcacacacgggggctggcggggtccgggccacgctgcagacggggagaggcactcggggtgaaggatcgcggggaaggcactgcggtcggaaccgagaggcaaggcctgggaaagcgccggggacgtcccgtgctccgggacgtcgggtgcccgcgcgggacgccctgtcatgactcacggaggcgagaaagcacgggcagggaaagaggctgcaggatggagggaagcccgaccgtcgggagggaacccaacccgggggaggccccgacctcgcgcgggacggggaagagggcccgccttcccacgccctggccgcccgg

SEQ ID NO: 66559 - DNA, 381 bp, Homo sapiens
aggttggctgcctgtggaggaagggagttcaggtaaagggtgagcagtagaaatattgtagaggacattcaaagatttttaactggtagttaaaccagatgatcctaaaatgctatttatattctgagactccattaaatatttgagcacctactgtttccataacaatgtgagcatcacagcagacagattcagcagtgtgagaaacgagatgactacccatgctggagtattccaatctcatggtggtggtggtaaaataaaaattaaaaaagaaaaaagttggcaaataacattataattctatacaataaaatgcaggatatttaagctatttattcattcaataaatatttgaatgccaataaacttcataagtgt

SEQ ID NO: 66560 - DNA, 218 bp, Homo sapiens
atttttgggatttgtattaaacttctgagaatatttttactagtagaaatcactgttttatttctcaaaattgctaaattattttgagaaactataattatatatttaaaatgtaagttaaatatatgcatatattagcactctatgtatatgtatactaaatatacacacaagtatgtatactatagataaactttcttgtattcttatgtatatgt

SEQ ID NO: 66561 - DNA, 373 bp, Homo sapiens
actgttaaagatgggtggaatagattccaaagctaagatttgaaacttaaactaaatttgaaatttaagattggaatttgaggcccggtgcagtggctcatgcctgtaatcctagcactttgggcaatcaaggtgggaggattgcttaagcccaggagttggagagcagcctgggcaacatggtgaaaccccatctcaagaaaaaatacaaaaattaaccaggcatggtggtatgcacctgtattccgagctactcaggaggctgaggtgtgaggatcacttgagcccaggaggcagaggttgcagtgagccgagattgcatcactgcactccagcttgggcaacgaagtgagactgtatctgaaacaaaaaa

SEQ ID NO: 66562 - DNA, 639 bp, Homo sapiens
gagttggctgagacaatacatgtgcatcattttggaagagatgctcttaaaaagaagaaagccactacagaatgccacatttgcttaggtctaagacccttctgtggtagtcggtgagggagggaggaaagtaaaaccccaagctgaataggccccccatagtttccgagtgatgcagtaaacaaatctatgatgcttgttgaataatcttccaataattgcagtcattaaaatcatcacacagtctacagtcaccttccttcctttgacacaccagtctttcccttaattgttaatgcatttttggctcagataaacacatagaggccagcttaaaatatatggcccagatacatctaacagcagaaaattagttgtgtaacaaacgtttggactgtgcttaatagactaggggttttcaatttcttcagcagaccctacagaggcaagaaagatttgcatcttctaccactgctaaatagcagtgacgcctctgagatacaaaaaaaaaaaaaaaagaaaaaaaagatgaaagtcccattggcctattgaatcttccttgctctttcatttgcaagggttgggctggaattaggacattatagaacaaatattaaaggaaagcttaacagaaactgt

SEQ ID NO: 66563 - DNA, 527 bp, Homo sapiens
gttgcctcctgcctgttctgatttccactgtgtgaaggaagcccgtgaccttggctgaagcagcctgtgctgtaccagctggttggtccgtgtcttcctgctgtggcaaataggaagagtaccaccatcatctgggccagtggtctggtttttatttttattagcaacaaatgcccttaagaagcagctgaacatgctggctaattagagccagaaagaacagcttagcagcaagtgcactaaaatggaaattgcacttggcctccactcagcgtgtgcaagtggtcagcactaaatagcgccatctactaggtctgtccctccggctacttgggagacactccacagccagctcctcctggcaggctgactgggatgccattctcctggaagccggggatcctgcaggggccaaacccacatggtttagtggccgaggcaggcacttgatagcctctgccctgacgacattcctgccactgcagaagggcctcttccgagctctgtggagcagagcctggggcttg

SEQ ID NO: 66564 - DNA, 463 bp, Homo sapiens
aaagtccagttacatttaaatttcagataaacaataaatacttttttagaatagatagttagatgtcccatgaaacatttgggacatatttatactaaaaattattttttgtatatttcagaatagctacaagagaggacttgaaatgttcctaacaaatagaaatgataaatattcaaggtgacagatatcctaaatacccttacttgatcatggcacattctgtgcatgtaacaaaatgtcatatgtacccaataaatatgtataaatattatgtatcaataaaatatttttaaaataattatttttaacggaaacaaattattttatctagcaattatacccctccccccccacacacaactcccatttagctttttaataccttactattacatgcagaaaaccaagaatcacagaacattttttcagcatccgataggaaagacagaggccaaacaaa

SEQ ID NO: 66565 - DNA, 542 bp, Homo sapiens
gcaacctaaatgtccatcgacagatgaataaatcaacaaaatgtggaatagtcatacaatgaatatcagccttaaaaggatggaaattctgacacattttacaacatcgataaaacttgaggagcttatagtaagtgaaacaggccagatacaaaaagacaaatagtgatagttcccctcagatgaggcacctagaatagtcaaatccacagagacagaaaggagaatggaggtttccaggggcaggagagagaatgaggcgttagtgtttagtgggtgcagattttcagctggggaagatgaagaggttccaggggtagccgcacaacagtgtgaatatactttaaaatggctaagatggcaaattctatgttaggtatttttttaaacacagtaataaaaaaaaaaaagcatctagtttagggatttggcaagaccaatacccaagagccaggtttctcccactccctgcaccctccctaaattctcaggcccacctgatggaaaacaagcctccctgcgcctgtgctctccacaagaca

SEQ ID NO: 66566 - DNA, 420 bp, Homo sapiens
gagatgaggtcttgctatgttgcccaagctggtcatgaactcctagcttcaagtgattctcccaccttggcctccaaagggctgggattacaggcatgagcaccgtgcccagcctattgtgtggtcttttgtgactggcttctttcacttagcatcgttttcgaggttcatgcatattgcaggatgtaccagaacttcactcccttttattgctgaataacattccattgcatggacacagcactaatatttggtatatttgaagtttgtacagcttgtgtaggatgaagctccttctctgttcctcacatcaccacaaccccagtgtgtgcatttgggaggtcagtggaatggccacacccacccagaagagacttcttggctaagcaggggaggcgtggatgatgccaccttcttttt

SEQ ID NO: 66567 - DNA, 196 bp, Homo sapiens
ggttgaaattatgcagccttctcaaactggcttctctcatttaggaatatccacctgaggttcctccgtgttttttcatggcttgatggctcatttcttttcagcactgagcactattccagtgtgtggctgtgccacagtttattttatccactcacctactgaagcacatcgtggctgcttgcaagttttggca

SEQ ID NO: 66568 - DNA, 197 bp, Homo sapiens
acagaacgtggcctctgactggaaaccctcgaagcttcccgctacttctcctccccttttggaatcatctagaaagcgggtggatatacagttccagagttcaagagcgagctctcggctgaagatcgaggtctgagagtcactgtctggggttcttcgccagagctgggtcgtggagagcctcaagtgcaatagtg

SEQ ID NO: 66569 - DNA, 795 bp, Homo sapiens
atcccagctactcgggaggctgaggcaggagaatcacttgaaccggggaggcagaggttgcagtgagccgagatcgcgcccctgcactccagcctgggtgacagagcaagactccatctcaaaaaaaataaaggaaatatgcgtcgttggatgctgtatgacaatcaagctacttataacaaacaaaattgagaatgaaggattatgatccaaactcagctgggcctcccctccctgccccaggattgtggagtgagaacgttgcagcaggagagaacaacgcagcaaagcacagcaggggaaccggaaatgctcaccttttgacagggtacttttagttctggggccttatcttaaggatattccaacatatacaaaaagattcatgcacagagatatttactttagtattatttaccataggaaaaaagttggaaacaatacattttatgttctgtaaaatgaaagaacagttaaataaatcatggctctaagacgactccagggctgtgtacggaagttcagggacagaatcagttgaggctgttccacctgagcctaagcttcctctgctgtatgtcgggaatcaggtgggggccaagcgagatcaccacagtgcaggccagtgtgcagggcacaggtgggcgccagggaggggacgccgcacagccccatgctctcgccaaaaacgtgcagcacaatttggaagaaaacatttccatcttcagggtcgtctgtgtctgttaaagtcgagtctagtttcgggtctcagagcacctccctaaagctgccgta

SEQ ID NO: 66570 - DNA, 1260 bp, Homo sapiens
gacggcagaggagccagtcatcatccccaaagacacagctccgaatacctcatcctgaaatcccaaagatcaaaatcccaaaagtataaatctggaaaaaataatgtcgatgttatttatttacatttttaaaaggtatgtatttgagaaacataaaaacacaacagaacatttcataggccactttacacaataaaataggcaatgataacaggtatttttgcataaacactgacgtaactaacgacggcggcatgggtgtagcagttataagaagacagaccataaagaaataagtcaaaagagaaacgcgtacacgtatatcgctacggttactaattgtgtgcacctagccctgtagctgtggtcatctgaaatatcagggattttagacttgagggattttgatctttagggatttcaacattccacattatggtgcttgggattgtgtctttcaggattatgatccaaactcagctgggcctcccctccctgccccaggattgtggagtgagaacgttgcagcaggagagaacaacgcagcaaagcacagcaggggaaccggaaatgctcaccttttgacagggtacttttagttctggggccttatcttaaggatattccaacatatacaaaaagattcatgcacagagatatttactttagtattatttaccataggaaaaaagttggaaacaatacattttatgttctgtaaaatgaaagaacagttaaataaatcatggctctaagacgactccagggctgtgtacggaagttcagggacagaatcagttgaggctgttccacctgagcctaagcttcctctgctgtatgtcgggaatcaggtgggggccaagcgagatcaccacagtgcaggccagtgtgcagggcacaggtgggcgccagggaggggacgccgcacagccccatgctctcgccaaaaacgtgcagcacaatttggaagaaaacatttccatctgttaataaagagcaacggcctctggtcataagtgacacatgaccctttgcctgagtctttttaaatttttccatatgttccatattttctacaccaaatgtaagctactttcataatcacaaaaacttaatggaaagaggaggaggaggacgggggtggggagtagtagccatgggttcgagcccttcctctccgcatgacttggataacacggtatattcacacagctatttccccatctatgaacttctgaggtgcttttattagttgatgtc

SEQ ID NO: 66571 - DNA, 934 bp, Homo sapiens
gacggcagaggagccagtcatcatccccaaagacacagctccgaatacctcatcctgaaatcccaaagatcaaaatcccaaaagtataaatctggaaaaaataatgtcgatgttatttatttacatttttaaaaggattatgatccaaactcagctgggcctcccctccctgccccaggattgtggagtgagaacgttgcagcaggagagaacaacgcagcaaagcacagcaggggaaccggaaatgctcaccttttgacagggtacttttagttctggggccttatcttaaggatattccaacatatacaaaaagattcatgcacagagatatttactttagtattatttaccataggaaaaaagttggaaacaatacattttatgttctgtaaaatgaaagaacagttaaataaatcatggctctaagacgactccagggctgtgtacggaagttcagggacagaatcagttgaggctgttccacctgagcctaagcttcctctgctgtatgtcgggaatcaggtgggggccaagcgagatcaccacagtgcaggccagtgtgcagggcacaggtgggcgccagggaggggacgccgcacagccccatgctctcgccaaaaacgtgcagcacaatttggaagaaaacatttccatctgttaataaagagcaacggcctctggtcataagtgacacatgaccctttgcctgagtctttttaaatttttccatatgttccatattttctacaccaaatgtaagctactttcataatcacaaaaacttaatggaaagaggaggaggaggacgggggtggggagtagtagccatgggttcgagcccttcctctccgcatgacttggataacacggtatattcacacagctatttccccatctatgaacttctgaggtgcttttattagttgatgtc

SEQ ID NO: 66572 - DNA, 1037 bp, Homo sapiens
  misc_feature (13)..(13): n is a, c, g, or t
  misc_feature (15)..(15): n is a, c, g, or t
  misc_feature (104)..(104): n is a, c, g, or t
caaaagcaaacanangaggcacacgcgaaacaaaaagtggcacgattggacctttcggcctggtcctgactgctgggtacaacaattatggcaagaggacaaangacaacatcaagagtcagggctcgggggtcctgacaggcccaggatgggtacagacccacacaggaatcccagagtgtgttccacagcaggacacgcctgcgctgaaagagtggacagaaaggagctgacctgggattatgatccaaactcagctgggcctcccctccctgccccaggattgtggagtgagaacgttgcagcaggagagaacaacgcagcaaagcacagcaggggaaccggaaatgctcaccttttgacagggtacttttagttctggggccttatcttaaggatattccaacatatacaaaaagattcatgcacagagatatttactttagtattatttaccataggaaaaaagttggaaacaatacattttatgttctgtaaaatgaaagaacagttaaataaatcatggctctaagacgactccagggctgtgtacggaagttcagggacagaatcagttgaggctgttccacctgagcctaagcttcctctgctgtatgtcgggaatcaggtgggggccaagcgagatcaccacagtgcaggccagtgtgcagggcacaggtgggcgccagggaggggacgccgcacagccccatgctctcgccaaaaacgtgcagcacaatttggaagaaaacatttccatctgttaataaagagcaacggcctctggtcataagtgacacatgaccctttgcctgagtctttttaaatttttccatatgttccatattttctacaccaaatgtaagctactttcataatcacaaaaacttaatggaaagaggaggaggaggacgggggtggggagtagtagccatgggttcgagcccttcctctccgcatgacttggataacacggtatattcacacagctatttccccatctatgaacttctgaggtgcttttattagttgatgtc

SEQ ID NO: 66573 - DNA, 999 bp, Homo sapiens
atcccagctactcgggaggctgaggcaggagaatcacttgaaccggggaggcagaggttgcagtgagccgagatcgcgcccctgcactccagcctgggtgacagagcaagactccatctcaaaaaaaataaaggaaatatgcgtcgttggatgctgtatgacaatcaagctacttataacaaacaaaattgagaatgaaggattatgatccaaactcagctgggcctcccctccctgccccaggattgtggagtgagaacgttgcagcaggagagaacaacgcagcaaagcacagcaggggaaccggaaatgctcaccttttgacagggtacttttagttctggggccttatcttaaggatattccaacatatacaaaaagattcatgcacagagatatttactttagtattatttaccataggaaaaaagttggaaacaatacattttatgttctgtaaaatgaaagaacagttaaataaatcatggctctaagacgactccagggctgtgtacggaagttcagggacagaatcagttgaggctgttccacctgagcctaagcttcctctgctgtatgtcgggaatcaggtgggggccaagcgagatcaccacagtgcaggccagtgtgcagggcacaggtgggcgccagggaggggacgccgcacagccccatgctctcgccaaaaacgtgcagcacaatttggaagaaaacatttccatctgttaataaagagcaacggcctctggtcataagtgacacatgaccctttgcctgagtctttttaaatttttccatatgttccatattttctacaccaaatgtaagctactttcataatcacaaaaacttaatggaaagaggaggaggaggacgggggtggggagtagtagccatgggttcgagcccttcctctccgcatgacttggataacacggtatattcacacagctatttccccatctatgaacttctgaggtgcttttattagttgatgtc

SEQ ID NO: 66574 - DNA, 3566 bp, Homo sapiens
actccagatataggatcactccatgccatcaagaaagttgatgctattgggcccatctcaagctgatcttggcacctctcatgctctgctctcttcaaccagacctctacattccattttggaagaagactaaaaatggtgtttccaatgtggacactgaagagacaaattcttatcctttttaacataatcctaatttccaaactccttggggctagatggtttcctaaaactctgccctgtgatgtcactctggatgttccaaagaaccatgtgatcgtggactgcacagacaagcatttgacagaaattcctggaggtattcccacgaacaccacgaacctcaccctcaccattaaccacataccagacatctccccagcgtcctttcacagactggaccatctggtagagatcgatttcagatgcaactgtgtacctattccactggggtcaaaaaacaacatgtgcatcaagaggctgcagattaaacccagaagctttagtggactcacttatttaaaatccctttacctggatggaaaccagctactagagataccgcagggcctcccgcctagcttacagcttctcagccttgaggccaacaacatcttttccatcagaaaagagaatctaacagaactggccaacatagaaatactctacctgggccaaaactgttattatcgaaatccttgttatgtttcatattcaatagagaaagatgccttcctaaacttgacaaagttaaaagtgctctccctgaaagataacaatgtcacagccgtccctactgttttgccatctactttaacagaactatatctctacaacaacatgattgcaaaaatccaagaagatgattttaataacctcaaccaattacaaattcttgacctaagtggaaattgccctcgttgttataatgccccatttccttgtgcgccgtgtaaaaataattctcccctacagatccctgtaaatgcttttgatgcgctgacagaattaaaagttttacgtctacacagtaactctcttcagcatgtgcccccaagatggtttaagaacatcaacaaactccaggaactggatctgtcccaaaacttcttggccaaagaaattggggatgctaaatttctgcattttctccccagcctcatccaattggatctgtctttcaattttgaacttcaggtctatcgtgcatctatgaatctatcacaagcattttcttcactgaaaagcctgaaaattctgcggatcagaggatatgtctttaaagagttgaaaagctttaacctctcgccattacataatcttcaaaatcttgaagttcttgatcttggcactaactttataaaaattgctaacctcagcatgtttaaacaatttaaaagactgaaagtcatagatctttcagtgaataaaatatcaccttcaggagattcaagtgaagttggcttctgctcaaatgccagaacttctgtagaaagttatgaaccccaggtcctggaacaattacattatttcagatatgataagtatgcaaggagttgcagattcaaaaacaaagaggcttctttcatgtctgttaatgaaagctgctacaagtatgggcagaccttggatctaagtaaaaatagtatattttttgtcaagtcctctgattttcagcatctttctttcctcaaatgcctgaatctgtcaggaaatctcattagccaaactcttaatggcagtgaattccaacctttagcagagctgagatatttggacttctccaacaaccggcttgatttactccattcaacagcatttgaagagcttcacaaactggaagttctggatataagcagtaatagccattattttcaatcagaaggaattactcatatgctaaactttaccaagaacctaaaggttctgcagaaactgatgatgaacgacaatgacatctcttcctccaccagcaggaccatggagagtgagtctcttagaactctggaattcagaggaaatcacttagatgttttatggagagaaggtgataacagatacttacaattattcaagaatctgctaaaattagaggaattagacatctctaaaaattccctaagtttcttgccttctggagtttttgatggtatgcctccaaatctaaagaatctctctttggccaaaaatgggctcaaatctttcagttggaagaaactccagtgtctaaagaacctggaaactttggacctcagccacaaccaactgaccactgtccctgagagattatccaactgttccagaagcctcaagaatctgattcttaagaataatcaaatcaggagtctgacgaagtattttctacaagatgccttccagttgcgatatctggatctcagctcaaataaaatccagatgatccaaaagaccagcttcccagaaaatgtcctcaacaatctgaagatgttgcttttgcatcataatcggtttctgtgcacctgtgatgctgtgtggtttgtctggtgggttaaccatacggaggtgactattccttacctggccacagatgtgacttgtgtggggccaggagcacacaagggccaaagtgtgatctccctggatctgtacacctgtgagttagatctgactaacctgattctgttctcactttccatatctgtatctctctttctcatggtgatgatgacagcaagtcacctctatttctgggatgtgtggtatatttaccatttctgtaaggccaagataaaggggtatcagcgtctaatatcaccagactgttgctatgatgcttttattgtgtatgacactaaagacccagctgtgaccgagtgggttttggctgagctggtggccaaactggaagacccaagagagaaacattttaatttatgtctcgaggaaagggactggttaccagggcagccagttctggaaaacctttcccagagcatacagcttagcaaaaagacagtgtttgtgatgacagacaagtatgcaaagactgaaaattttaagatagcattttacttgtcccatcagaggctcatggatgaaaaagttgatgtgattatcttgatatttcttgagaagccctttcagaagtccaagttcctccagctccggaaaaggctctgtgggagttctgtccttgagtggccaacaaacccgcaagctcacccatacttctggcagtgtctaaagaacgccctggccacagacaatcatgtggcctatagtcaggtgttcaaggaaacggtctagcccttctttgcaaaacacaactgcctagtttaccaaggagaggcctggctgtttaaattgttttcatatatatcacaccaaaagcgtgttttgaaattcttcaagaaatgagattgcccatatttcaggggagccaccaacgtctgtcacaggagttggaaagatggggtttatataatgcatcaagtcttctttcttatctctctgtgtctctatttgcacttgagtctctcacctcagctcctgtaaaagagtggcaagtaaaaaacatggggctctga

SEQ ID NO: 66575 - DNA, 343 bp, Homo sapiens
actccagatataggatcactccatgccatcaagaaagttgatgctattgggcccatctcaagctgatcttggcacctctcatgctctgctctcttcaaccagacctctacattccattttggaagaagactaaaaatgttaatcttccttctggcatggatcttggaatgcaaacttgctgggatctccgagttccaggcttcccgtgcagccggtgtggagagccaagagatgttttgtttggcataaagcattccaagggtcagtgggcttgggctcaactattgagcataggacaagggcagccccatcctgactgtgactcttcccacaagagacaaac

SEQ ID NO: 66576 - DNA, 5007 bp, Homo sapiens
actccagatataggatcactccatgccatcaagaaagttgatgctattgggcccatctcaagctgatcttggcacctctcatgctctgctctcttcaaccagacctctacattccattttggaagaagactaaaaatggtgtttccaatgtggacactgaagagacaaattcttatcctttttaacataatcctaatttccaaactccttggggctagatggtttcctaaaactctgccctgtgatgtcactctggatgttccaaagaaccatgtgatcgtggactgcacagacaagcatttgacagaaattcctggaggtattcccacgaacaccacgaacctcaccctcaccattaaccacataccagacatctccccagcgtcctttcacagactggaccatctggtagagatcgatttcagatgcaactgtgtacctattccactggggtcaaaaaacaacatgtgcatcaagaggctgcagattaaacccagaagctttagtggactcacttatttaaaatccctttacctggatggaaaccagctactagagataccgcagggcctcccgcctagcttacagcttctcagccttgaggccaacaacatcttttccatcagaaaagagaatctaacagaactggccaacatagaaatactctacctgggccaaaactgttattatcgaaatccttgttatgtttcatattcaatagagaaagatgccttcctaaacttgacaaagttaaaagtgctctccctgaaagataacaatgtcacagccgtccctactgttttgccatctactttaacagaactatatctctacaacaacatgattgcaaaaatccaagaagatgattttaataacctcaaccaattacaaattcttgacctaagtggaaattgccctcgttgttataatgccccatttccttgtgcgccgtgtaaaaataattctcccctacagatccctgtaaatgcttttgatgcgctgacagaattaaaagttttacgtctacacagtaactctcttcagcatgtgcccccaagatggtttaagaacatcaacaaactccaggaactggatctgtcccaaaacttcttggccaaagaaattggggatgctaaatttctgcattttctccccagcctcatccaattggatctgtctttcaattttgaacttcaggtctatcgtgcatctatgaatctatcacaagcattttcttcactgaaaagcctgaaaattctgcggatcagaggatatgtctttaaagagttgaaaagctttaacctctcgccattacataatcttcaaaatcttgaagttcttgatcttggcactaactttataaaaattgctaacctcagcatgtttaaacaatttaaaagactgaaagtcatagatctttcagtgaataaaatatcaccttcaggagattcaagtgaagttggcttctgctcaaatgccagaacttctgtagaaagttatgaaccccaggtcctggaacaattacattatttcagatatgataagtatgcaaggagttgcagattcaaaaacaaagaggcttctttcatgtctgttaatgaaagctgctacaagtatgggcagaccttggatctaagtaaaaatagtatattttttgtcaagtcctctgattttcagcatctttctttcctcaaatgcctgaatctgtcaggaaatctcattagccaaactcttaatggcagtgaattccaacctttagcagagctgagatatttggacttctccaacaaccggcttgatttactccattcaacagcatttgaagagcttcacaaactggaagttctggatataagcagtaatagccattattttcaatcagaaggaattactcatatgctaaactttaccaagaacctaaaggttctgcagaaactgatgatgaacgacaatgacatctcttcctccaccagcaggaccatggagagtgagtctcttagaactctggaattcagaggaaatcacttagatgttttatggagagaaggtgataacagatacttacaattattcaagaatctgctaaaattagaggaattagacatctctaaaaattccctaagtttcttgccttctggagtttttgatggtatgcctccaaatctaaagaatctctctttggccaaaaatgggctcaaatctttcagttggaagaaactccagtgtctaaagaacctggaaactttggacctcagccacaaccaactgaccactgtccctgagagattatccaactgttccagaagcctcaagaatctgattcttaagaataatcaaatcaggagtctgacgaagtattttctacaagatgccttccagttgcgatatctggatctcagctcaaataaaatccagatgatccaaaagaccagcttcccagaaaatgtcctcaacaatctgaagatgttgcttttgcatcataatcggtttctgtgcacctgtgatgctgtgtggtttgtctggtgggttaaccatacggaggtgactattccttacctggccacagatgtgacttgtgtggggccaggagcacacaagggccaaagtgtgatctccctggatctgtacacctgtgagttagatctgactaacctgattctgttctcactttccatatctgtatctctctttctcatggtgatgatgacagcaagtcacctctatttctgggatgtgtggtatatttaccatttctgtaaggccaagataaaggggtatcagcgtctaatatcaccagactgttgctatgatgcttttattgtgtatgacactaaagacccagctgtgaccgagtgggttttggctgagctggtggccaaactggaagacccaagagagaaacattttaatttatgtctcgaggaaagggactggttaccagggcagccagttctggaaaacctttcccagagcatacagcttagcaaaaagacagtgtttgtgatgacagacaagtatgcaaagactgaaaattttaagatagcattttacttgtcccatcagaggctcatggatgaaaaagttgatgtgattatcttgatatttcttgagaagccctttcagaagtccaagttcctccagctccggaaaaggctctgtgggagttctgtccttgagtggccaacaaacccgcaagctcacccatacttctggcagtgtctaaagaacgccctggccacagacaatcatgtggcctatagtcaggtgttcaaggaaacggtctagcccttctttgcaaaacacaactgcctagtttaccaaggagaggcctggctgtttaaattgttttcatatatatcacaccaaaagcgtgttttgaaattcttcaagaaatgagattgcccatatttcaggggagccaccaacgtctgtcacaggagttggaaagatggggtttatataatgcatcaagtcttctttcttatctctctgtgtctctatttgcacttgagtctctcacctcagctcctgtaaaagagtggcaagtaaaaaacatggggctctgattctcctgtaattgtgataattaaatatacacacaatcatgacattgagaagaactgcatttctacccttaaaaagtactggtatatacagaaatagggttaaaaaaaactcaagctctctctatatgagaccaaaatgtactagagttagtttagtgaaataaaaaaccagtcagctggccgggcatggtggctcatgcttgtaatcccagcactttgggaggccgaggcaggtggatcacgaggtcaggagtttgagaccagtctggccaacatggtgaaaccccgtctgtactaaaaatacaaaaattagctgggcgtggtggtgggtgcctgtaatcccagctacttgggaggctgaggcaggagaatcgcttgaacccgggaggtggaggtggcagtgagccgagatcacgccactgcaatgcagcccgggcaacagagctagactgtctcaaaagaacaaaaaaaaaaaaacacaaaaaaactcagtcagcttcttaaccaattgcttccgtgtcatccagggccccattctgtgcagattgagtgtgggcaccacacaggtggttgctgcttcagtgcttcctgctctttttccttgggcctgcttctgggttccatagggaaacagtaagaaagaaagacacatccttaccataaatgcatatggtccacctacaaatagaaaaatatttaaatgatctgcctttatacaaagtgatattctctacctttgataatttacctgcttaaatgtttttatctgcactgcaaagtactgtatccaaagtaaaatttcctcatccaatatctttcaaactgttttgttaactaatgccatatatttgtaagtatctgcacacttgatacagcaacgttagatggttttgatggtaaaccctaaaggaggactccaagagtgtgtatttatttatagttttatcagagatgacaattatttgaatgccaattatatggattcctttcattttttgctggaggatgggagaagaaaccaaagtttatagaccttcacattgagaaagcttcagttttgaacttcagctatcagattcaaaaacaacagaaagaaccaagacattcttaagatgcctgtactttcagctgggtataaattcatgagttcaaagattgaaacctgaccaatttgctttatttcatggaagaagtgatctacaaaggtgtttgtgccatttggaaaacagcgtgcatgtgttcaagccttagattggcgatgtcgtattttcctcacgtgtggcaatgccaaaggctttactttacctgtgagtacacactatatgaattatttccaacgtacatttaatcaataagggtcacaaattcccaaatcaatctctggaataaatagagaggtaattaaattgctggagccaactatttcacaacttctgtaagc

SEQ ID NO: 66577 - DNA, 472 bp, Homo sapiens
ggtcgacctggaaaggcacagcaggtttggttttgaaatctgtagaattttagtgctctccattctcccaagtagatgactttagtgaaggtaaaaggaaagactgtttgctgtgtcaagggaagattcatatgcaaatcccaagactcagatgttatttcagaagagttggtgtccatagtaaagtagaactggcccgggttcatctgcctacaagggcaattgtctgaggcaaatatgaggagactggcagaacaggaggggtggaatcttcctgggagaaagagtaaagagagttctaggtggagaggggatcaatatgttgagcaaacacctggctgtcttcttagttcctatatgaaatcatggaaaagactttagaacaaagaataaatatgtcatagcaggaaaacaaagagcagtcttttggccagaaatagaaactgttaaaaagaaaaacaaaccaacaaca

SEQ ID NO: 66578 - DNA, 233 bp, Homo sapiens
ttgtactctgccttacaatcctctgtgagtggctgttccatttcctgaatagcgtgtgcatgtgtgtgtttgtatttgtgagggtggttaaagtaacaagtgttttattatttggtttataaatatttggtgagcccttagtatgcttgaggttatgatagagaaataaaatatctaagacaatatgtcatggttgaaggtgttgaaaattttgtggtttaaatacatggatg

SEQ ID NO: 66579 - DNA, 823 bp, Homo sapiens
aaactactcaatgatgtatttaatacataacattacctaatattgccaatagtaaagaacaatttacaggtttatgtttcagcttacagtaatgttcccaaagatcttttaatagggtcttagctgtgtgtgtcagtgatgtgtgtatgtttgcgagtgtgtatgtgtgtaattcctaggtatgtatggaataatgttttgagaaattcagataaatttatgatatctaaacaatttgttttattaatggatcttatcacaaattcagctcttattaaactagcaattaacttgcacactagaacacatttttcagtaaatccataacaaacttattaattagaattaggtttgagttatgcatatggttaaaaatatcttttctatgttggtgtaaactttttcgaatgtatttctagtttttttttaaaaaaagattaaattcaaaatgatcttgcaattctgcttcatgagatagaatagaaacatctttgaatgccaggtttctcaacggaggcttgtgtaagctcttctaaaagttaaatatctggttatttacaaatacaaagttatgtatattcattactgatttgtttcataccttactttttgaattggaatgattcagagtataattcttacagagagcccatcacatagtagtcaacgttctaagttttttatgcatattagttcattcagtcctcacagcagccatcatcactgtgtgattcttgaagctctggaaatctaggatttctatatagtacaccaacataccagtttacatatattataggaaaggtaaacgaaacaaacaaac

SEQ ID NO: 66580 - DNA, 617 bp, Homo sapiens
cacgtctacttacctacctgcatctacactcttgatattctgatgaccctcccattaaaatggatgaactgcatgtccatttatcttaagccaacacctctacttatgtactagatcccattctttcttctcccctttctctcttgtattagcaacatttccttcttttactgtaccgtataaagatgctatattttctcccatctttaaaaaagaaaaagtctcttttaaccctatatctccctccagctactaactgtatttctctcttgtgctttaaagaaaaaaaaatgtgtgtgtgtgtgttttctttttgtttgttttgtttgtttgtttttggtatggtcttaacggtcttgctttgtcacccagggtggagtgcagttgtgtgattgtggctcactgcagcctcagtctcctgggttcaccgggctcaagtgatcctctcacctcagctcctgaataccttggaatacaggcatgtgctgccatgcctggctagagaaaacgttcttgaaaacgtttcatatacttaatatttttaattccttgccttccattctttcttgaatccactccaatcagatttttattcttgccattcttctaaaactact

SEQ ID NO: 66581 - DNA, 365 bp, Homo sapiens
cagaacagcatgtgatggcagagagatcggagtgatttaaccaaggaattccaagacctgctagccaccattagaagccagatgtcggcaagaaatcattctttttcaaagtcttaaagagagagcaaagttctgctgacactttgatttcagacttctagccttcataacatgttttacttctggtgtagacaagaatcacagaagatttgcgtggaagagccagcaaagatcccttcaaaccactgtcaaggatttctgcttcaactaattagggaacaaaggctaagaattacttaaaagtcacagaccaaggacacagatccactgaaagatagagatttcatcgtaagattagagaaggc

SEQ ID NO: 66582 - DNA, 443 bp, Homo sapiens
caccttttcatatgcttatttaccatctgtatatcttctttggtgaggtgtccataaaggcctttggcttgtttgtttaattgggttttgttttcttattgttaaattttgggaattcttggtgtattttagacactagtcctttacctgataggccttttgaaaatattttcttccatttcatggcttgccttttcattcttctacagagcagaagtttttaattttaataaaatccagcttattgatttcctgttttatggattgtgactttggtattgtatcttaaaagtcaccaccaaacccaaggccagctagattttatagtttcaaattttacctttaagtctgtgatccgttttaagttaatttttgtgaaggaagtaaggtctgtgtcttgattcattttttatttttttgcctgcagatgtacagttgcttct

SEQ ID NO: 66583 - DNA, 451 bp, Homo sapiens
gtaagaatgcaattacgccccatcccatcccgtgactccattcccagaaggtcctgggactagaggcttctcaatgaactagatgcttccaaaaagcagagcagcgttcaagatgccccctgcccaccccacaataggtgaggcacacactctcagccaacaaatgtgagtgtgtgcctgctgtactgtgcttgtgttctggcagactcaaagacatctaagatgcagtccaggccaggtgcagtggctcacgcttgcaatcccaacactttgggagaccgagttgggcggatcacttgagattaggagttcgagaccagcctggccaacatggtgaaactacatctctactaaaaatacaaaaattagctgggcgtggtggcgggcgcctgtaatcccagctacttgggaagctgaggcaggagaattgcttgaacccaggaggtggagg

SEQ ID NO: 66584 - DNA, 445 bp, Homo sapiens
gaaatagtaatgtggaggaaagtctcagtaatttttattcatttggtcgatgacttctcacaaaatgatataaaatatgactttagacttcagcaaaagcacctggatcatagacactcaataaactgtagcagggtcattagaggtaattggatctatttgagccagaaaaagactgtgctgttttactcgaggcatttaaaattaaagctagaaccttatttgtatgaaatagcttgagtgtgggtatgcataacagctgcaacttctcaagactattacagttctatagtaagaattttcaatattcaaacagtaaacaataaactgaaaaaaagatatagatactctaacctgtaacactttatttatataattagacatctccaaattaatcaactaattttagttgcataaaataataaagctgctaaaattttgtatt

SEQ ID NO: 66585 - DNA, 749 bp, Homo sapiens
tgtccaaggctgcggtgtttcttagtggagaggctgtcagcatttgggcaggaaaattcttcatctcacaggatgtttagcacccctggctgctgcccatagctaccagtagagccccagtcattatgagaacccccaaaattctcccacgccttcctaaattcccctagggaagacagcaccttccccagctgggaataaaaaggttcaaaaaccactgatctcatccagccttcttactttagagacgaagaaactgtggcctagagagggcatgcgatttgtcccaggtcacacagtgagctggagacagagcgggcctaggcccaggtctcttgactttccttttactccagcatttccccatcttcatcgcgaaaaatcacccgggatgcagaaagcttgctgaaatacagacgcccaggccagttccctgggattccactttaggaggcccaggaatctgtgtttagtgcttttcatcccttacttatggtgtgcagaatcccctggggatcttgtgaaaatgccaagaatctgcatttctgcatttctacctggcatcgaggtgatgctgacgctctggtctagggacactaccctttgaataggggaaagtctgctttcaccctgcgagcccctgggtgaacccatatggtcagggcagttagggcattgcttcatcctgggggttggaatggggagtggtcaactgtgtctgcagattagacttacgtgaagagctaaaa

SEQ ID NO: 66586 - DNA, 368 bp, Homo sapiens
ctgggattacaggcatgcgccaccatgcccggctaattttgtatttttaatagagatggggtttctccacgttggctaggctggtctcgaactcctgacctcaggtgatccgcctgccttggcctcctaaagtgctgggattacaggcgtgagccacggcgcccatttgtctttttttcaaacacgttgctattgcttagtcacggctgccttactctgttttggggggagtgtgtctgtgtgtgtgtgtgtctcttctccatgtgcacacacttttttaccgtaagccaaattttggtaaaattgcatcttgtattttcttattactaaattacttgcctagaagtaatcttcaatctttttagaaa

SEQ ID NO: 66587 - DNA, 1244 bp, Homo sapiens
  misc_feature (3)..(3): n is a, c, g, or t
  misc_feature (5)..(6): n is a, c, g, or t
ggnannagggtgagccacggcgcccggcatccaggctagtcttgaactcctgacctcaagtgatccgtccgcctgggcctcccaaggtgctgggattacaggcgtgagccaccgcgcccggccaggttgtgggttttaatgggaccatctcactgcctaccgtttcctttttccgtccgaacagaaggggcctgagcagtgaactgacagtggcaacgccgggtgaggcgggatggaggagtttacgagcctgggtgacgccctgttccgcgtcctggccccgcccctcccggcagagccccttggcgcgtgacacaggccccgcccttgctgtacgccatcagccggcgccgcgccgccgggtgttactttgccccgccggcggggcggtcagcctcctgtcaccgcctgttccggctatggtcccgtccggtgttctgtaagttggcaacctaggctcctgacgcgaccctggtcctgatggcggcggcgacggccgcggcagccctggcggcggccgatccccctcccgcaatgccgcaggcggcaggggccggagggcccacaacccgcagagacttctactggctgcgctcctttctggccggaggtattgctggatgctgtgccaaaacaacagttgctccattggatcgagtaaaggttttattacaagactccatctcaaaaaaaaaaaaaaaaaaaaaagatacctcagttaggttatcagtaaaaggggattgcaaatatcttttaaataaaaatttgcattctatatgttatagaatacagaggatattaaaaataaattttatccatgttttgacaatttctttctttcaactgtttacatattgaagcacaaatgctaaacataagtcagaatggaagaatatttaaaataatgactgtgtttatatctgatttatttcagattgcccaaagtgcatcttgccaggttatcttccatttgaagactgacattttatttcttttttgatctttattgttcctctcttccacctctcagtgggtatagctctctggtctgtagaatgggacagtggtctggtttccagattgataagtgaggtatacctcctagttttcagtaattacctgtagaaggtggagaagttactggatatgtttaataatatctcattacattcttttttttttttttttaacgagagtcttaactctgtcacccaagctggagtgcagtggtgcaatctcggctc

SEQ ID NO: 66588 - DNA, 597 bp, Homo sapiens
ctgcattctaacctgggcgacagagcaagactccatctcaaaaaaaaaaaaaaaaaaaaaagatacctcagttaggttatcagtaaaaggggattgcaaatatcttttaaataaaaatttgcattctatatgttatagaatacagaggatattaaaaataaattttatccatgttttgacaatttctttctttcaactgtttacatattgaagcacaaatgctaaacataagtcagaatggaagaatatttaaaataatgactgtgtttatatctgatttatttcagattgcccaaagtgcatcttgccaggttatcttccatttgaagactgacattttatttcttttttgatctttattgttcctctcttccacctctcagtgggtatagctctctggtctgtagaatgggacagtggtctggtttccagattgataagtgaggtatacctcctagttttcagtaattacctgtagaaggtggagaagttactggatatgtttaataatatctcattacattcttttttttttttttttaacgagagtcttaactctgtcacccaagctggagtgcagtggtgcaatctcggctc

SEQ ID NO: 66589 - DNA, 2684 bp, Homo sapiens
  misc_feature (3)..(3): n is a, c, g, or t
  misc_feature (5)..(6): n is a, c, g, or t
ggnannagggtgagccacggcgcccggcatccaggctagtcttgaactcctgacctcaagtgatccgtccgcctgggcctcccaaggtgctgggattacaggcgtgagccaccgcgcccggccaggttgtgggttttaatgggaccatctcactgcctaccgtttcctttttccgtccgaacagaaggggcctgagcagtgaactgacagtggcaacgccgggtgaggcgggatggaggagtttacgagcctgggtgacgccctgttccgcgtcctggccccgcccctcccggcagagccccttggcgcgtgacacaggccccgcccttgctgtacgccatcagccggcgccgcgccgccgggtgttactttgccccgccggcggggcggtcagcctcctgtcaccgcctgttccggctatggtcccgtccggtgttctgtaagttggcaacctaggctcctgacgcgaccctggtcctgatggcggcggcgacggccgcggcagccctggcggcggccgatccccctcccgcaatgccgcaggcggcaggggccggagggcccacaacccgcagagacttctactggctgcgctcctttctggccggaggtattgctggatgctgtgccaaaacaacagttgctccattggatcgagtaaaggttttattacaagctcacaatcaccattacaagcatttaggagtattttctgcattgcgtgctgttcctcaaaaagaaggattccttggattgtataaaggaaatggtgcaatgatgattcgaatctttccctatggtgcaatccagtttatggcatttgagcattataaaacgttaattactacgaagctgggaatttcaggtcatgtgcacagattaatggctggatccatggcaggtatgacagcagttatctgtacttaccctcttgacatggttagggtccgcctagcattccaggtgaaaggggaacacagctatacaggaattattcatgctttcaaaacaatttatgcaaaggaaggtggtttctttggattttacagaggtctgatgcctactattttaggaatggctccatatgcaggtgtttcattttttacttttggtaccttgaagagtgttgggctttcccatgctcctacccttcttggcagaccttcatcagacaatcctaatgtcttagttttgaaaactcatgtaaacttactttgtggtggtgttgctggagcaatagcgcagacaatatcctacccatttgatgtgactcgtcggcgaatgcaattaggaactgttctgccggaatttgaaaagtgccttaccatgcgggatactatgaagtatgtctatggacaccatggaattcgaaaaggactctatcgtggtttatctcttaattacattcgctgtattccctctcaagcagtggcttttacaacatacgaacttatgaagcagttttttcacctcaactaaaaaaaaattatggttggtttttcttaatacattctcagagggagaaatgaaacattactataattgtggggggaacattacttgaatggggatatttaccctgtcacaagagccactggtattttagtacttgattattttttctttagtcacaaatcagaactgcttaccatactttttgatgccaaacattataccttagaacattgaagaaaatattcctaagctgatgctggctaaaccgctttaaagttttatttggaagtagaactagctttaaaacggggttcaagaggttgccattagctttgtcatgctgttcaaagtttttaattgttatcatggtttttaaaagactgacagtgtttattattattaaaataaacagggttggttatattgcaatagaataatgagaattgaatttttaagttctatgaaacagccagcattgacattttatttttgttatctctcttctcacaattatgctccactggataataggaaaaacacttctttccttcattttttaaataaaattaatgttgtatttaaaaagtagccatgtagagacacaaaaataaatgaagaagctggacatggtgggatgggcatgtggtcccagctactctggaagctgaggtgagaggatcacttgagccctggaattccatgccagcctatgcaacatcatgaaaccccacttaataaatgaatgaacgactaagtcttgctcaaatgttattatgaggtactatgagtgacttacatgtgttttaaaatgtcagtgtgtttcccagaggcagaaataaaaatactgaatatctttgctcttaaaaaaaaagtaacactatagatttgtttttgttagatgatttgctctatagtagaatatttaagtagactgtgaaatatttattaatatagatgtgaatatcaaaaaatgtttctaaggtattatgatgcatcaactagttcttccatgtaaaataattttagtgcaatatgaagacgtagaaatgtaaaatatgatttgaattgttatcctttatattaagaaaatgttttaaaatgtaagaattccatttattctgtttagagtactttttatgatttattataagcgtgtcataaatgggaagggaatatttaaagttctgtgttcagaaagagtaatttgtagaactgatgtgacttttttt

SEQ ID NO: 66590 - DNA, 2318 bp, Homo sapiens
  misc_feature (3)..(3): n is a, c, g, or t
  misc_feature (5)..(6): n is a, c, g, or t
ggnannagggtgagccacggcgcccggcatccaggctagtcttgaactcctgacctcaagtgatccgtccgcctgggcctcccaaggtgctgggattacaggcgtgagccaccgcgcccggccaggttgtgggttttaatgggaccatctcactgcctaccgtttcctttttccgtccgaacagaaggggcctgagcagtgaactgacagtggcaacgccgggtgaggcgggatggaggagtttacgagcctgggtgacgccctgttccgcgtcctggccccgcccctcccggcagagccccttggcgcgtgacacaggccccgcccttgctgtacgccatcagccggcgccgcgccgccgggtgttactttgccccgccggcggggcggtcagcctcctgtcaccgcctgttccggctatggtcccgtccggtgttctgtaagttggcaacctaggctcctgacgcgaccctggtcctgatggcggcggcgacggccgcggcagccctggcggcggccgatccccctcccgcaatgccgcaggcggcaggggccggagggcccacaacccgcagagacttctactggctgcgctcctttctggccggaggtattgctggatgctgtgccaaaacaacagttgctccattggatcgagtaaaggttttattacaagctcacaatcaccattacaagcatttaggagtattttctgcattgcgtgctgttcctcaaaaagaaggattccttggattgtataaaggaaatggtgcaatgatgattcgaatctttccctatggtgcaatccagtttatggcatttgagcattataaaacgttaattactacgaagctgggaatttcaggtcatgtgcacagattaatggctggatccatggcaggtatgacagcagttatctgtacttaccctcttgacatggttagggtccgcctagcattccaggtgaaaggggaacacagctatacaggaattattcatgctttcaaaacaatttatgcaaaggaaggtggtttctttggattttacagaggtctgatgcctactattttaggaatggctccatatgcaggtgtttcattttttacttttggtaccttgaagagtgttgggctttcccatgctcctacccttcttggcagaccttcatcagacaatcctaatgtcttagttttgaaaactcatgtaaacttactttgtggtggtgttgctggagcaatagcgcagacaatatcctacccatttgatgtgactcgtcggcgaatgcaattaggaactgttctgccggaatttgaaaagtgccttaccatgcgggatactatgaagtatgtctatggacaccatggaattcgaaaaggactctatcgtggtttatctcttaattacattcgctgtattccctctcaagcagtggcttttacaacatacgaacttatgaagcagttttttcacctcaactaaaaaaaaattatggttggtttttcttaatacattctcagagggagaaatgaaacattactataattgtggggggaacattacttgaatggggatatttaccctgtcacaagagccactggtattttagtacttgattattttttctttagtcacaaatcagaactgcttaccatactttttgatgccaaacattataccttagaacattgaagaaaatattcctaagctgatgctggctaaaccgctttaaagttttatttggaagtagaactagctttaaaacggggttcaagaggttgccattagctttgtcatgctgttcaaagtttttaattgttatcatggtttttaaaagactgacagtgtttattattattaaaataaacagggttggttatattgcaatagaataatgagaattgaatttttaagttctatgaaacagccagcattgacattttatttttgttatctctcttctcacaattatgctccactggataataggaaaaacacttctttccttcattttttaaataaaattaatgttgtatttaaaaagtagccatgtagagacacaaaaataaatgaagaagctggacatggtgggatgggcatgtggtcccagctactctggaagctgaggtgagaggatcacttgagccctggaattccatgccagcctatgcaacatcatgaaaccccacttaataaatgaatgaacgactaagtcttgctcaaatgttattatgaggtactatgagtgacttacatgtgttttaaaatgtcagtgtgtttcccagaggcagaaataaaaatactgaatatctttgctctta

SEQ ID NO: 66591 - DNA, 2333 bp, Homo sapiens
tacatatttgctgaatgtataaatggatgactaattttatgggtaaaagttggttgtttcaatgaaaaatgatccagaagaagaggagtttacttcaaacagaacctggcaatcggataaataccttcaagtgtctgtctccgtaaaaatgttccagaagaagaggaggttacttcaaacagaacctggcagttggattaataccttgaagtgtctgtctccataaccacattttagcaagattcccagccttcctcaggtattgctggatgctgtgccaaaacaacagttgctccattggatcgagtaaaggttttattacaagctcacaatcaccattacaagcatttaggagtattttctgcattgcgtgctgttcctcaaaaagaaggattccttggattgtataaaggaaatggtgcaatgatgattcgaatctttccctatggtgcaatccagtttatggcatttgagcattataaaacgttaattactacgaagctgggaatttcaggtcatgtgcacagattaatggctggatccatggcaggtatgacagcagttatctgtacttaccctcttgacatggttagggtccgcctagcattccaggtgaaaggggaacacagctatacaggaattattcatgctttcaaaacaatttatgcaaaggaaggtggtttctttggattttacagaggtctgatgcctactattttaggaatggctccatatgcaggtgtttcattttttacttttggtaccttgaagagtgttgggctttcccatgctcctacccttcttggcagaccttcatcagacaatcctaatgtcttagttttgaaaactcatgtaaacttactttgtggtggtgttgctggagcaatagcgcagacaatatcctacccatttgatgtgactcgtcggcgaatgcaattaggaactgttctgccggaatttgaaaagtgccttaccatgcgggatactatgaagtatgtctatggacaccatggaattcgaaaaggactctatcgtggtttatctcttaattacattcgctgtattccctctcaagcagtggcttttacaacatacgaacttatgaagcagttttttcacctcaactaaaaaaaaattatggttggtttttcttaatacattctcagagggagaaatgaaacattactataattgtggggggaacattacttgaatggggatatttaccctgtcacaagagccactggtattttagtacttgattattttttctttagtcacaaatcagaactgcttaccatactttttgatgccaaacattataccttagaacattgaagaaaatattcctaagctgatgctggctaaaccgctttaaagttttatttggaagtagaactagctttaaaacggggttcaagaggttgccattagctttgtcatgctgttcaaagtttttaattgttatcatggtttttaaaagactgacagtgtttattattattaaaataaacagggttggttatattgcaatagaataatgagaattgaatttttaagttctatgaaacagccagcattgacattttatttttgttatctctcttctcacaattatgctccactggataataggaaaaacacttctttccttcattttttaaataaaattaatgttgtatttaaaaagtagccatgtagagacacaaaaataaatgaagaagctggacatggtgggatgggcatgtggtcccagctactctggaagctgaggtgagaggatcacttgagccctggaattccatgccagcctatgcaacatcatgaaaccccacttaataaatgaatgaacgactaagtcttgctcaaatgttattatgaggtactatgagtgacttacatgtgttttaaaatgtcagtgtgtttcccagaggcagaaataaaaatactgaatatctttgctcttaaaaaaaaagtaacactatagatttgtttttgttagatgatttgctctatagtagaatatttaagtagactgtgaaatatttattaatatagatgtgaatatcaaaaaatgtttctaaggtattatgatgcatcaactagttcttccatgtaaaataattttagtgcaatatgaagacgtagaaatgtaaaatatgatttgaattgttatcctttatattaagaaaatgttttaaaatgtaagaattccatttattctgtttagagtactttttatgatttattataagcgtgtcataaatgggaagggaatatttaaagttctgtgttcagaaagagtaatttgtagaactgatgtgacttttttt

SEQ ID NO: 66592 - DNA, 1398 bp, Homo sapiens
  misc_feature (3)..(3): n is a, c, g, or t
  misc_feature (5)..(6): n is a, c, g, or t
ggnannagggtgagccacggcgcccggcatccaggctagtcttgaactcctgacctcaagtgatccgtccgcctgggcctcccaaggtgctgggattacaggcgtgagccaccgcgcccggccaggttgtgggttttaatgggaccatctcactgcctaccgtttcctttttccgtccgaacagaaggggcctgagcagtgaactgacagtggcaacgccgggtgaggcgggatggaggagtttacgagcctgggtgacgccctgttccgcgtcctggccccgcccctcccggcagagccccttggcgcgtgacacaggccccgcccttgctgtacgccatcagccggcgccgcgccgccgggtgttactttgccccgccggcggggcggtcagcctcctgtcaccgcctgttccggctatggtcccgtccggtgttctgtaagttggcaacctaggctcctgacgcgaccctggtcctgatggcggcggcgacggccgcggcagccctggcggcggccgatccccctcccgcaatgccgcaggcggcaggggccggagggcccacaacccgcagagacttctactggctgcgctcctttctggccggaggtattgctggatgctgtgccaaaacaacagttgctccattggatcgagtaaaggttttattacaagctcacaatcaccattacaagcatttaggagtattttctgcattgcgtgctgttcctcaaaaagaaggattccttggattgtataaaggaaatggtgcaatgatgattcgaatctttccctatggtgcaatccagtttatggcatttgagcattataaaacgttaattactacgaagctgggaatttcaggtcatgtgcacagattaatggctggatccatggcaggtatgacagcagttatctgtacttaccctcttgacatggttagggtccgcctagcattccaggtgaaaggggaacacagctatacaggaattattcatgctttcaaaacaatttatgcaaaggaaggtggtttctttggattttacagaggtctgatgcctactattttaggaatggctccatatgcaggtgtttcattttttacttttggtaccttgaagagtgttgggctttcccatgctcctacccttcttggcagaccttcatcagacaatcctaatgtcttagttttgaaaactcatgtaaacttactttgtggtggtgttgctggagcaatagcgcagacaatatcctacccatttgatgtgactcgtcggcgaatgcaattaggaactgttctgccggaatttgaaaagtgcctgtaagttcatcatatgtcattgttcattttctttaggaaatgtaacattaaactcagtaaggagataggaaaaaaa

SEQ ID NO: 66593 - DNA, 811 bp, Homo sapiens
gtcatacatccacagaagctggtattacagaagagatggttttacaccatgttggctaggctggtctcgaactcctgacctcagatgatctgcccacctcggcctcccaaagtgctgggaatacagaagaagaggaggttacttcaaacagaacctggcagttggattaataccttgaagtgtctgtctccataaccacattttagcaagattcccagccttcctcaggtattgctggatgctgtgccaaaacaacagttgctccattggatcgagtaaaggttttattacaagctcacaatcaccattacaagcatttaggagtattttctgcattgcgtgctgttcctcaaaaagaaggattccttggattgtataaaggaaatggtgcaatgatgattcgaatctttccctatggtgcaatccagtttatggcatttgagcattataaaacgttaattactacgaagctgggaatttcaggtcatgtgcacagattaatggctggatccatggcaggtaaacatattctactatttgtattggattgtagttgtaaactgagggaagaagaaagctgttaccaccactattcaaggtaagcagtttctgattgccttattgtacatcgagggcttttttggccttcttaaaagaagtgttaggtagaatagtaaggagtgtgtgaatggagaaaagaggcccaatgggagactgtagcttcatgaattgaaaacctcagtcaccctctgaatgattgttatggatgtcagtctgattactagcagcaggcaagctgaattcccacgtt

SEQ ID NO: 66594 - DNA, 2343 bp, Homo sapiens
  misc_feature (3)..(3): n is a, c, g, or t
  misc_feature (5)..(6): n is a, c, g, or t
ggnannagggtgagccacggcgcccggcatccaggctagtcttgaactcctgacctcaagtgatccgtccgcctgggcctcccaaggtgctgggattacaggcgtgagccaccgcgcccggccaggttgtgggttttaatgggaccatctcactgcctaccgtttcctttttccgtccgaacagaaggggcctgagcagtgaactgacagtggcaacgccgggtgaggcgggatggaggagtttacgagcctgggtgacgccctgttccgcgtcctggccccgcccctcccggcagagccccttggcgcgtgacacaggccccgcccttgctgtacgccatcagccggcgccgcgccgccgggtgttactttgccccgccggcggggcggtcagcctcctgtcaccgcctgttccggctatggtcccgtccggtgttctgtaagttggcaacctaggctcctgacgcgaccctggtcctgatggcggcggcgacggccgcggcagccctggcggcggccgatccccctcccgcaatgccgcaggcggcaggggccggagggcccacaacccgcagagacttctactggctgcgctcctttctggccggaggtgtgggtccatgccacgaagagccagccgcgctctgagtggcgggggcaggactgtgggcaagtgggatgcaagcggcctctatgacattcctggactctggctgcttcaatgttctgttagatgtctgccctgacctgctgtaacctctttctagtaatcacttgactaatgacagctaggttatggggagtgggacctttggcactccggcagaggctggggaggtggaaggtctgaatcaggcacccattcttcagggctggataacagggaaaagaggaggatcccttacagagaccctggggttttatgtagacttggattttgctgtttgcttaaaggaaaacaaatattggagatcagctttttaatgactactggaaaattgtgcaaactgtctacagccaaaactggttccagtgattctagtaaactgtgacacagtacttgacaagccctattattgatgtgactttgggatcaaaaagttcatattgtctcttaggaatttcctgggccttcaagctccacccttccttaattacttctctgggttgtgtaggggtgggttgcccctccacacctgtgggtgtttctcgtaaggtggaacgagagacttaggaaagaaaaagacacagagacaaagtatagagacagaaataaggggacccggggaaccagcgttcagcatatggaggatcccgccagcctctgagttcccttagtatttattgatcatttgtgggtgtttctcgaagagggggatgtgtcagggtcacaagacaattgtggggagagggtcagcagacaaacacgtgaacaaaggtctttgcgtcatagacaatgtaaaggattaagtgctgtgctcttagatatgcatacacataaacatctcaatgctttacaaagcagtattgctgcccgcaggtcccacctccagccctaaggcggtttttccctatctcagtagatggagcatacaatcgcgttttataccgagacattccattgcccagggacaggcaggagacagatgccttcctcttgtctcaactgcaagaggcatgccttcctcttatactaatcctcctcagcacagaccctttacgggtgtcgggctgggggacgttcaggtctttcccttcccacgaggccgtatttcagactatcacatggggagaaaccttggacaatacctggctttcctaggcagaggtccctgcggccttccgcagtttttgtgtccctgggtacttgagattagggagtggtgatgactcttaaggagcatgctgccttcaagcatctgtttaacaaagcacatcttgcaccgcccttaatccattcaactctgtgacacagcacatgtttcagagagcacggggttgggggtaaggttatagattaacagaatctcaaggcagaagaatttttcttagtacagaacaaaatggagtctcctatgtctacttctttctacacagacacagtaacaatctgatctctcttgcttttccccacaggttgtcattacttaattatttaagattcaaaaatttaaaaattccacattgaagttgtgtgcagtggctcactactgtagtcccagttactagggaagctgaggcaggaagactgcttgagtccaggagatcgaggctccagtgagccatgatcacaccactaccctccagcctgagctacagagagagaccctctcctaaaagaag

SEQ ID NO: 66595 - DNA, 2791 bp, Homo sapiens
  misc_feature (3)..(3): n is a, c, g, or t
  misc_feature (5)..(6): n is a, c, g, or t
ggnannagggtgagccacggcgcccggcatccaggctagtcttgaactcctgacctcaagtgatccgtccgcctgggcctcccaaggtgctgggattacaggcgtgagccaccgcgcccggccaggttgtgggttttaatgggaccatctcactgcctaccgtttcctttttccgtccgaacagaaggggcctgagcagtgaactgacagtggcaacgccgggtgaggcgggatggaggagtttacgagcctgggtgacgccctgttccgcgtcctggccccgcccctcccggcagagccccttggcgcgtgacacaggccccgcccttgctgtacgccatcagccggcgccgcgccgccgggtgttactttgccccgccggcggggcggtcagcctcctgtcaccgcctgttccggctatggtcccgtccggtgttctgtaagttggcaacctaggctcctgacgcgaccctggtcctgatggcggcggcgacggccgcggcagccctggcggcggccgatccccctcccgcaatgccgcaggcggcaggggccggagggcccacaacccgcagagacttctactggctgcgctcctttctggccggaggtcagaagaagaggaggttacttcaaacagaacctggcagttggattaataccttgaagtgtctgtctccataaccacattttagcaagattcccagccttcctcaggtattgctggatgctgtgccaaaacaacagttgctccattggatcgagtaaaggttttattacaagctcacaatcaccattacaagcatttaggagtattttctgcattgcgtgctgttcctcaaaaagaaggattccttggattgtataaaggaaatggtgcaatgatgattcgaatctttccctatggtgcaatccagtttatggcatttgagcattataaaacgttaattactacgaagctgggaatttcaggtcatgtgcacagattaatggctggatccatggcaggtatgacagcagttatctgtacttaccctcttgacatggttagggtccgcctagcattccaggtgaaaggggaacacagctatacaggaattattcatgctttcaaaacaatttatgcaaaggaaggtggtttctttggattttacagaggtctgatgcctactattttaggaatggctccatatgcaggtgtttcattttttacttttggtaccttgaagagtgttgggctttcccatgctcctacccttcttggcagaccttcatcagacaatcctaatgtcttagttttgaaaactcatgtaaacttactttgtggtggtgttgctggagcaatagcgcagacaatatcctacccatttgatgtgactcgtcggcgaatgcaattaggaactgttctgccggaatttgaaaagtgccttaccatgcgggatactatgaagtatgtctatggacaccatggaattcgaaaaggactctatcgtggtttatctcttaattacattcgctgtattccctctcaagcagtggcttttacaacatacgaacttatgaagcagttttttcacctcaactaaaaaaaaattatggttggtttttcttaatacattctcagagggagaaatgaaacattactataattgtggggggaacattacttgaatggggatatttaccctgtcacaagagccactggtattttagtacttgattattttttctttagtcacaaatcagaactgcttaccatactttttgatgccaaacattataccttagaacattgaagaaaatattcctaagctgatgctggctaaaccgctttaaagttttatttggaagtagaactagctttaaaacggggttcaagaggttgccattagctttgtcatgctgttcaaagtttttaattgttatcatggtttttaaaagactgacagtgtttattattattaaaataaacagggttggttatattgcaatagaataatgagaattgaatttttaagttctatgaaacagccagcattgacattttatttttgttatctctcttctcacaattatgctccactggataataggaaaaacacttctttccttcattttttaaataaaattaatgttgtatttaaaaagtagccatgtagagacacaaaaataaatgaagaagctggacatggtgggatgggcatgtggtcccagctactctggaagctgaggtgagaggatcacttgagccctggaattccatgccagcctatgcaacatcatgaaaccccacttaataaatgaatgaacgactaagtcttgctcaaatgttattatgaggtactatgagtgacttacatgtgttttaaaatgtcagtgtgtttcccagaggcagaaataaaaatactgaatatctttgctcttaaaaaaaaagtaacactatagatttgtttttgttagatgatttgctctatagtagaatatttaagtagactgtgaaatatttattaatatagatgtgaatatcaaaaaatgtttctaaggtattatgatgcatcaactagttcttccatgtaaaataattttagtgcaatatgaagacgtagaaatgtaaaatatgatttgaattgttatcctttatattaagaaaatgttttaaaatgtaagaattccatttattctgtttagagtactttttatgatttattataagcgtgtcataaatgggaagggaatatttaaagttctgtgttcagaaagagtaatttgtagaactgatgtgacttttttt

SEQ ID NO: 66596 - DNA, 2302 bp, Homo sapiens
gtcatacatccacagaagctggtattacagaagagatggttttacaccatgttggctaggctggtctcgaactcctgacctcagatgatctgcccacctcggcctcccaaagtgctgggaatacagaagaagaggaggttacttcaaacagaacctggcagttggattaataccttgaagtgtctgtctccataaccacattttagcaagattcccagccttcctcaggtattgctggatgctgtgccaaaacaacagttgctccattggatcgagtaaaggttttattacaagctcacaatcaccattacaagcatttaggagtattttctgcattgcgtgctgttcctcaaaaagaaggattccttggattgtataaaggaaatggtgcaatgatgattcgaatctttccctatggtgcaatccagtttatggcatttgagcattataaaacgttaattactacgaagctgggaatttcaggtcatgtgcacagattaatggctggatccatggcaggtatgacagcagttatctgtacttaccctcttgacatggttagggtccgcctagcattccaggtgaaaggggaacacagctatacaggaattattcatgctttcaaaacaatttatgcaaaggaaggtggtttctttggattttacagaggtctgatgcctactattttaggaatggctccatatgcaggtgtttcattttttacttttggtaccttgaagagtgttgggctttcccatgctcctacccttcttggcagaccttcatcagacaatcctaatgtcttagttttgaaaactcatgtaaacttactttgtggtggtgttgctggagcaatagcgcagacaatatcctacccatttgatgtgactcgtcggcgaatgcaattaggaactgttctgccggaatttgaaaagtgccttaccatgcgggatactatgaagtatgtctatggacaccatggaattcgaaaaggactctatcgtggtttatctcttaattacattcgctgtattccctctcaagcagtggcttttacaacatacgaacttatgaagcagttttttcacctcaactaaaaaaaaattatggttggtttttcttaatacattctcagagggagaaatgaaacattactataattgtggggggaacattacttgaatggggatatttaccctgtcacaagagccactggtattttagtacttgattattttttctttagtcacaaatcagaactgcttaccatactttttgatgccaaacattataccttagaacattgaagaaaatattcctaagctgatgctggctaaaccgctttaaagttttatttggaagtagaactagctttaaaacggggttcaagaggttgccattagctttgtcatgctgttcaaagtttttaattgttatcatggtttttaaaagactgacagtgtttattattattaaaataaacagggttggttatattgcaatagaataatgagaattgaatttttaagttctatgaaacagccagcattgacattttatttttgttatctctcttctcacaattatgctccactggataataggaaaaacacttctttccttcattttttaaataaaattaatgttgtatttaaaaagtagccatgtagagacacaaaaataaatgaagaagctggacatggtgggatgggcatgtggtcccagctactctggaagctgaggtgagaggatcacttgagccctggaattccatgccagcctatgcaacatcatgaaaccccacttaataaatgaatgaacgactaagtcttgctcaaatgttattatgaggtactatgagtgacttacatgtgttttaaaatgtcagtgtgtttcccagaggcagaaataaaaatactgaatatctttgctcttaaaaaaaaagtaacactatagatttgtttttgttagatgatttgctctatagtagaatatttaagtagactgtgaaatatttattaatatagatgtgaatatcaaaaaatgtttctaaggtattatgatgcatcaactagttcttccatgtaaaataattttagtgcaatatgaagacgtagaaatgtaaaatatgatttgaattgttatcctttatattaagaaaatgttttaaaatgtaagaattccatttattctgtttagagtactttttatgatttattataagcgtgtcataaatgggaagggaatatttaaagttctgtgttcagaaagagtaatttgtagaactgatgtgacttttttt

SEQ ID NO: 66597 - DNA, 2381 bp, Homo sapiens
gtcatacatccacagaagctggtattacagaagagatggttttacaccatgttggctaggctggtctcgaactcctgacctcagatgatctgcccacctcggcctcccaaagtgctgggaatacagaagaagaggaggttacttcaaacagaacctggcagttggattaataccttgaagtgtctgtctccataaccacattttagcaagattcccagccttcctcaggtattgctggatgctgtgccaaaacaacagttgctccattggatcgagtaaaggttttattacaagctcacaatcaccattacaagcatttaggagtattttctgcattgcgtgctgttcctcaaaaagaaggattccttggattgtataaaggaaatggtgcaatgatgattcgaatctttccctatggtgcaatccagtttatggcatttgagcattataaaacgttaattactacgaagctgggaatttcaggtcatgtgcacagattaatggctggatccatggcaggtaaacatattctactatttgtattggattgtagttgtaaactgagggaagaagaaagctgttaccaccactattcaaggtatgacagcagttatctgtacttaccctcttgacatggttagggtccgcctagcattccaggtgaaaggggaacacagctatacaggaattattcatgctttcaaaacaatttatgcaaaggaaggtggtttctttggattttacagaggtctgatgcctactattttaggaatggctccatatgcaggtgtttcattttttacttttggtaccttgaagagtgttgggctttcccatgctcctacccttcttggcagaccttcatcagacaatcctaatgtcttagttttgaaaactcatgtaaacttactttgtggtggtgttgctggagcaatagcgcagacaatatcctacccatttgatgtgactcgtcggcgaatgcaattaggaactgttctgccggaatttgaaaagtgccttaccatgcgggatactatgaagtatgtctatggacaccatggaattcgaaaaggactctatcgtggtttatctcttaattacattcgctgtattccctctcaagcagtggcttttacaacatacgaacttatgaagcagttttttcacctcaactaaaaaaaaattatggttggtttttcttaatacattctcagagggagaaatgaaacattactataattgtggggggaacattacttgaatggggatatttaccctgtcacaagagccactggtattttagtacttgattattttttctttagtcacaaatcagaactgcttaccatactttttgatgccaaacattataccttagaacattgaagaaaatattcctaagctgatgctggctaaaccgctttaaagttttatttggaagtagaactagctttaaaacggggttcaagaggttgccattagctttgtcatgctgttcaaagtttttaattgttatcatggtttttaaaagactgacagtgtttattattattaaaataaacagggttggttatattgcaatagaataatgagaattgaatttttaagttctatgaaacagccagcattgacattttatttttgttatctctcttctcacaattatgctccactggataataggaaaaacacttctttccttcattttttaaataaaattaatgttgtatttaaaaagtagccatgtagagacacaaaaataaatgaagaagctggacatggtgggatgggcatgtggtcccagctactctggaagctgaggtgagaggatcacttgagccctggaattccatgccagcctatgcaacatcatgaaaccccacttaataaatgaatgaacgactaagtcttgctcaaatgttattatgaggtactatgagtgacttacatgtgttttaaaatgtcagtgtgtttcccagaggcagaaataaaaatactgaatatctttgctcttaaaaaaaaagtaacactatagatttgtttttgttagatgatttgctctatagtagaatatttaagtagactgtgaaatatttattaatatagatgtgaatatcaaaaaatgtttctaaggtattatgatgcatcaactagttcttccatgtaaaataattttagtgcaatatgaagacgtagaaatgtaaaatatgatttgaattgttatcctttatattaagaaaatgttttaaaatgtaagaattccatttattctgtttagagtactttttatgatttattataagcgtgtcataaatgggaagggaatatttaaagttctgtgttcagaaagagtaatttgtagaactgatgtgacttttttt

SEQ ID NO: 66598 - DNA, 1150 bp, Homo sapiens
  misc_feature (3)..(3): n is a, c, g, or t
  misc_feature (5)..(6): n is a, c, g, or t
  misc_feature (1101)..(1101): n is a, c, g, or t
  misc_feature (1109)..(1109): n is a, c, g, or t
ggnannagggtgagccacggcgcccggcatccaggctagtcttgaactcctgacctcaagtgatccgtccgcctgggcctcccaaggtgctgggattacaggcgtgagccaccgcgcccggccaggttgtgggttttaatgggaccatctcactgcctaccgtttcctttttccgtccgaacagaaggggcctgagcagtgaactgacagtggcaacgccgggtgaggcgggatggaggagtttacgagcctgggtgacgccctgttccgcgtcctggccccgcccctcccggcagagccccttggcgcgtgacacaggccccgcccttgctgtacgccatcagccggcgccgcgccgccgggtgttactttgccccgccggcggggcggtcagcctcctgtcaccgcctgttccggctatggtcccgtccggtgttctgtaagttggcaacctaggctcctgacgcgaccctggtcctgatggcggcggcgacggccgcggcagccctggcggcggccgatccccctcccgcaatgccgcaggcggcaggggccggagggcccacaacccgcagagacttctactggctgcgctcctttctggccggaggtattgctggatgctgtgccaaaacaacagttgctccattggatcgagtaaaggttttattacaagctcacaatcaccattacaagcatttaggagtattttctgcattgcgtgctgttcctcaaaaagaaggattccttggattgtataaaggaaatggtgcaatgatgattcgaatctttccctatggtgcaatccagtttatggcatttgagcattataaaacgttaattactacgaagctgggaatttcaggtcatgtgcacagattaatggctggatccatggcaggtatgacagcagttatctgtacttaccctcttgacatggttagggtccgcctagcattccaggtgaaaggggaacacagctatacaggaattattcatgctttcaaaacaatttatgcaaaggaaggtggtttctttggattttacagaggtctgatgcctactattttaggaatggctccatatgcaggtgtttcattnttacttcngcaccaatcactagtgataggtgccaaaatttccaatattc

SEQ ID NO: 66599 - DNA, 892 bp, Homo sapiens
tcattatcctgtaatttttttaattaaaaaaagcagctttagttcatctaggagaaaaccgtctccagaatccattgtctacaagtatttgcacttatacagattttatccagagcatatttaaaaaataaagttgattttgattgtttttataaaaacaaacaggaaggtgatgcatgcaggccatttttgaaagtacattaatacatctataattcttgtcactcacaggccactactataaacattttatagtgctgaatttttccagtttttaagtaatatcttttgtattttatcttacaaatttcattgtatttacatgcagaggaaaaggtgtaaaatcattctgtacagaagaatctataaaaaagaatcttcctcctacgccgcacaccccaaaggactttggatacctattagaaaggattttaaaacacatttgaactgaattcatgacaatatctgttctggcatgtttcatcaatcatgacaaatgaccatggccttgtcaatacaataacatggggggagcagccaagtcagagatgaagtatgattatagttatcttaaaaataaggcaattgtgcaggttttgttaagtgaatccagtgataaattttcctaatggtttttcaggcccacctattttacttctattatgtagcatattattacttaaataaaagctaagtctcaagcttggccatactagagaaagcctctgacatacccctgtgctagaatttgacacagcagggcatcgatttttagaagccagtctgaaactcctgataaaatgactaaaatctaaataagcaccaacccaattaatgtggtctagactttctacaacagatattgatccaattatgtggggaaggttttttc

SEQ ID NO: 66600 - DNA, 2312 bp, Homo sapiens
  misc_feature (16)..(16): n is a, c, g, or t
  misc_feature (24)..(24): n is a, c, g, or t
ttcagtctgtaccccngggcgtantttatatcgtcgatccacgcctcggtagtgacgggggctggcgcatacgttactgagattgcgtgccgatgggccgcctgggcagaatgtcacgatggacgagggcggcacgcccctgctccccgacagcctggtctaccagatcttcctgagcctgggcccggccgacgtgctggccgccgggctggtgtgccgccaatggcaggccgtgtcgcgggacgagttcctgtggagggagcagttctaccgctactaccaggtggcccgcgacgtgccccgacacccagcggccatgtcctggtacgaggagttccagcggctgtatgacacggtgccctgcgtggaggtgcagacgctgcgggaacacacagaccaggtcctgcacctcagcttctcccattccgggtaccagttcgcgtcctgctccaaggactgcactgtgaagatctggagcaacgacctgaccatctcgctgctgcacagcgcggacatgcggccctacaactggagctacacccagttctcccagttcaacaaggacgactcgctactgctggcctcgggggtgttcctggggccgcacaactcctcatccggcgagattgctgtcatcagcctagactccttcgcgctgctgtcccgcgtgcggaacaagccctatgacgtgtttggctgttggctcaccgagaccagcctcatctcggggaacctgcaccgcatcggagatatcacctcctgctcggtgctgtggctcaacaatgccttccaggatgtggagtcagagaacgtcaacgtggtgaagcggctgttcaagatccagaacctcaatgccagcaccgtccgcacggtgatggtggccgactgcagccgcttcgacagccctgacctgctgctggaagccggtgacccggccacgtccccctgccgcatctttgacctgggcagcgacaacgaggaggtggtggctggcccggcccccgcccacgccaaggagggcttgcggcactttctggaccgcgtgctggaggggcgggcgcagccacagctgtcggagcgcatgctagagaccaaggtggccgagctgctggcccagggccacaccaagccacccgagcgcagtgccacaggcgccaagagcaagtacctcatcttcaccactggctgcctcacctactccccacaccagatcggcatcaagcagatcctgccacaccagatgaccacggcagggcccgtgctgggtgagggccggggctccgatgccttcttcgacgcgctggaccacgtcatagacatacacggacacatcatcggcatgggcctgtcgcccgacaacaggtacctgtacgtgaacagccgcgcctggcccaacggtgcggtggtggccgaccccatgcagccgccaccaatcgcggaggagattgacctgctggtgttcgacctcaagaccatgcgggaggtgaggcgggctctgcgtgcgcaccgcgcctacacgcccaacgacgagtgcttcttcatcttcctggacgtcagcagggacttcgtggccagcggggcggaggaccggcacggctacatctgggaccgccactacaacatctgtctggccaggctgcggcacgaggatgtggtcaactcagtggtcttcagtccccaggagcaggagctgctgctcacggccagcgacgacgccaccatcaaagcctggcgctccccacgcaccatgcgcgtcctccaggcacctcgcccacggcctcgcaccttcttctcctggcttgccagccagaggcgctgaggtgtgctgggtgcactggagccaccgggaccccttgaggacatcgccaggctctgtggctttttcccgagcgggagaggtggagatgcttatagcagttacgccttaggaaggggacaaccaggccccgccacacgctcacacacaaacctgctcacgcagctgtgatgcttggcacggggtggccagtgcagatggagcccaaggccccctcggcctcctgggcaacttggggtacacaggatactgggggtgccgctcctcactcaaccccaggctaggggtacacctgacccagctggcctcggcccggggcaccttcggctggtcctgtggggccctggacggtggcccagtggtggcaggggctgctcctggctgtggttgtgcgcccggggcttgggagcggccggtcacgctgctgtgggcccgagtgtgttgcatgtccacgcaccacccgttcagggccctgaataaacagttggcaacagca

SEQ ID NO: 66601 - DNA, 2260 bp, Homo sapiens
ctcggctaggtacgagctgggtttcagcgggcggaggcggcgtggccgcctgggcagaatgtcacgatggacgagggcggcacgcccctgctccccgacagcctggtctaccagatcttcctgagcctgggcccggccgacgtgctggccgccgggctggtgtgccgccaatggcaggccgtgtcgcgggacgagttcctgtggagggagcagttctaccgctactaccaggtggcccgcgacgtgccccgacacccagcggccatgtcctggtacgaggagttccagcggctgtatgacacggtgccctgcgtggaggtgcagacgctgcgggaacacacagaccaggtcctgcacctcagcttctcccattccgggtaccagttcgcgtcctgctccaaggactgcactgtgaagatctggagcaacgacctgaccatctcgctgctgcacagcgcggacatgcggccctacaactggagctacacccagttctcccagttcaacaaggacgactcgctactgctggcctcgggggtgttcctggggccgcacaactcctcatccggcgagattgctgtcatcagcctagactccttcgcgctgctgtcccgcgtgcggaacaagccctatgacgtgtttggctgttggctcaccgagaccagcctcatctcggggaacctgcaccgcatcggagatatcacctcctgctcggtgctgtggctcaacaatgccttccaggatgtggagtcagagaacgtcaacgtggtgaagcggctgttcaagatccagaacctcaatgccagcaccgtccgcacggtgatggtggccgactgcagccgcttcgacagccctgacctgctgctggaagccggtgacccggccacgtccccctgccgcatctttgacctgggcagcgacaacgaggaggtggtggctggcccggcccccgcccacgccaaggagggcttgcggcactttctggaccgcgtgctggaggggcgggcgcagccacagctgtcggagcgcatgctagagaccaaggtggccgagctgctggcccagggccacaccaagccacccgagcgcagtgccacaggcgccaagagcaagtacctcatcttcaccactggctgcctcacctactccccacaccagatcggcatcaagcagatcctgccacaccagatgaccacggcagggcccgtgctgggtgagggccggggctccgatgccttcttcgacgcgctggaccacgtcatagacatacacggacacatcatcggcatgggcctgtcgcccgacaacaggtacctgtacgtgaacagccgcgcctggcccaacggtgcggtggtggccgaccccatgcagccgccaccaatcgcggaggagattgacctgctggtgttcgacctcaagaccatgcgggaggtgaggcgggctctgcgtgcgcaccgcgcctacacgcccaacgacgagtgcttcttcatcttcctggacgtcagcagggacttcgtggccagcggggcggaggaccggcacggctacatctgggaccgccactacaacatctgtctggccaggctgcggcacgaggatgtggtcaactcagtggtcttcagtccccaggagcaggagctgctgctcacggccagcgacgacgccaccatcaaagcctggcgctccccacgcaccatgcgcgtcctccaggcacctcgcccacggcctcgcaccttcttctcctggcttgccagccagaggcgctgaggtgtgctgggtgcactggagccaccgggaccccttgaggacatcgccaggctctgtggctttttcccgagcgggagaggtggagatgcttatagcagttacgccttaggaaggggacaaccaggccccgccacacgctcacacacaaacctgctcacgcagctgtgatgcttggcacggggtggccagtgcagatggagcccaaggccccctcggcctcctgggcaacttggggtacacaggatactgggggtgccgctcctcactcaaccccaggctaggggtacacctgacccagctggcctcggcccggggcaccttcggctggtcctgtggggccctggacggtggcccagtggtggcaggggctgctcctggctgtggttgtgcgcccggggcttgggagcggccggtcacgctgctgtgggcccgagtgtgttgcatgtccacgcaccacccgttcagggccctgaataaacagttggcaacagca

SEQ ID NO: 66602 - DNA, 2211 bp, Homo sapiens
ctcggctaggtacgagctgggtttcagcgggcggaggcggcgtggccgcctgggcagaatgtcacgatggacgagggcggcacgcccctgctccccgacagcctggtctaccagatcttcctgagcctgggcccggccgacgtgctggccgccgggctggtgtgccgccaatggcaggccgtgtcgcgggacgagttcctgtggagggagcagttctaccgctactaccaggtggcccgcgacgtgccccgacacccagcggccatgtcctggtacgaggagttccagcggctgtatgacacggtgccctcagcttctcccattccgggtaccagttcgcgtcctgctccaaggactgcactgtgaagatctggagcaacgacctgaccatctcgctgctgcacagcgcggacatgcggccctacaactggagctacacccagttctcccagttcaacaaggacgactcgctactgctggcctcgggggtgttcctggggccgcacaactcctcatccggcgagattgctgtcatcagcctagactccttcgcgctgctgtcccgcgtgcggaacaagccctatgacgtgtttggctgttggctcaccgagaccagcctcatctcggggaacctgcaccgcatcggagatatcacctcctgctcggtgctgtggctcaacaatgccttccaggatgtggagtcagagaacgtcaacgtggtgaagcggctgttcaagatccagaacctcaatgccagcaccgtccgcacggtgatggtggccgactgcagccgcttcgacagccctgacctgctgctggaagccggtgacccggccacgtccccctgccgcatctttgacctgggcagcgacaacgaggaggtggtggctggcccggcccccgcccacgccaaggagggcttgcggcactttctggaccgcgtgctggaggggcgggcgcagccacagctgtcggagcgcatgctagagaccaaggtggccgagctgctggcccagggccacaccaagccacccgagcgcagtgccacaggcgccaagagcaagtacctcatcttcaccactggctgcctcacctactccccacaccagatcggcatcaagcagatcctgccacaccagatgaccacggcagggcccgtgctgggtgagggccggggctccgatgccttcttcgacgcgctggaccacgtcatagacatacacggacacatcatcggcatgggcctgtcgcccgacaacaggtacctgtacgtgaacagccgcgcctggcccaacggtgcggtggtggccgaccccatgcagccgccaccaatcgcggaggagattgacctgctggtgttcgacctcaagaccatgcgggaggtgaggcgggctctgcgtgcgcaccgcgcctacacgcccaacgacgagtgcttcttcatcttcctggacgtcagcagggacttcgtggccagcggggcggaggaccggcacggctacatctgggaccgccactacaacatctgtctggccaggctgcggcacgaggatgtggtcaactcagtggtcttcagtccccaggagcaggagctgctgctcacggccagcgacgacgccaccatcaaagcctggcgctccccacgcaccatgcgcgtcctccaggcacctcgcccacggcctcgcaccttcttctcctggcttgccagccagaggcgctgaggtgtgctgggtgcactggagccaccgggaccccttgaggacatcgccaggctctgtggctttttcccgagcgggagaggtggagatgcttatagcagttacgccttaggaaggggacaaccaggccccgccacacgctcacacacaaacctgctcacgcagctgtgatgcttggcacggggtggccagtgcagatggagcccaaggccccctcggcctcctgggcaacttggggtacacaggatactgggggtgccgctcctcactcaaccccaggctaggggtacacctgacccagctggcctcggcccggggcaccttcggctggtcctgtggggccctggacggtggcccagtggtggcaggggctgctcctggctgtggttgtgcgcccggggcttgggagcggccggtcacgctgctgtgggcccgagtgtgttgcatgtccacgcaccacccgttcagggccctgaataaacagttggcaacagca

SEQ ID NO: 66603 - DNA, 2666 bp, Homo sapiens
  misc_feature (16)..(16): n is a, c, g, or t
  misc_feature (24)..(24): n is a, c, g, or t
ttcagtctgtaccccngggcgtantttatatcgtcgatccacgcctcggtagtgacgggggctggcgcatacgttactgagattgcgtgccgatgggccgcctgggcagaatgtcacgatggacgagggcggcacgcccctgctccccgacagcctggtctaccagatcttcctgagcctgggcccggccgacgtgctggccgccgggctggtgtgccgccaatggcaggccgtgtcgcgggacgagttcctgtggagggagcagttctaccgctactaccaggtggcccgcgacgtgccccgacacccagcggccatgtcctggtacgaggagttccagcggctgtatgacacggtgccctgcgtggaggtgcagacgctgcgggaacacacagaccaggtcctgcacctcagcttctcccattccgggtaccagttcgcgtcctgctccaaggactgcactgtgaagatctggagcaacgacctgaccatctcgctgctgcacagcgcggacatgcggccctacaactggagctacacccagttctcccagttcaacaaggacgactcgctactgctggcctcgggggtgttcctggggccgcacaactcctcatccggcgagattgctgtcatcagcctagactccttcgcgctgctgtcccgcgtgcggaacaagccctatgacgtgtttggctgttggctcaccgagaccagcctcatctcggggaacctgcaccgcatcggagatatcacctcctgctcggtgctgtggctcaacaatgccttccaggatgtggagtcagagaacgtcaacgtggtgaagcggctgttcaagatccagaacctcaatgccagcaccgtccgcacggtgatggtggccgactgcagccgcttcgacagccctgacctgctgctggaagccggtgacccggccacgtccccctgccgcatctttgacctgggcagcgacaacgaggaggtggtggctggcccggcccccgcccacgccaaggagggcttgcggcactttctggaccgcgtgctggaggggcgggcgcagccacagctgtcggagcgcatgctagagaccaaggtggccgagctgctggcccagggccacaccaagccacccgagcgcagtgccacaggcgccaagagcaagtacctcatcttcaccactggctgcctcacctactccccacaccagatcggcatcaagcagatcctgccacaccagatgaccacggcagggcccgtgctgggtgagggccggggctccgatgccttcttcgacgcgctggaccacgtcatagacatacacggacacatcatcggcatgggcctgtcgcccgacaacaggtacctgtacgtgaacagccgcgcctggcccaacggtgcggtggtggccgaccccatgcagccgccaccaatcgcggaggagattgacctgctggtgttcgacctcaagaccatgcgggaggtgaggcgggctctgcgtgcgcaccgcgcctacacgcccaacgacgagtgcttcttcatcttcctggacgtcagcagggacttcgtggccagcggggcggaggaccggcacggctacatctgggaccgccactacaacatctgtctggccaggctgcggcacgaggatgtggtcaactcagtggtcttcagtccccaggagcaggagctgctgctcacggccagcgacgacgccaccatcaaagcctggcgctccccacgcaccatgcgcgtcctccaggcacctcgcccacggcctcgcaccttcttctcctggcttgccagccagaggcgctgaggtgtgctgggtgcactggagccaccgggaccccttgaggacatcgccaggctctgtggctttttcccgagcgggagaggtggagatgcttatagcagttacgccttaggaaggggacaaccaggccccgccacacgctcacacacaaacctgctcacgcagctgtgatgcttggcacggggtggccagtgcagatggagcccaaggccccctcggcctcctgggcaacttggggtacacaggatactgggggtgccgctcctcactcaaccccaggctaggggtacacctgacccagctggcctcggcccggggcaccttcggctggtcctgtggggccctggacggtggcccagtggtggcaggggctgctcctggctgtggttgtgcgcccggggcttgggagcggccggtcacgctgctgtgggcccgagtgtgttgcatgtccacgcaccacccgttcagggccctgaataaacagttggcaacagcaaaaaaaaaaaacacacaaacacaacaacaaaacggacagaccgcccaagaatataccaaagagggcaccacaaaaagggaacccagctacaggacacaaggtgccccaacagaaacacaaaaaaacaaggcccgaccaccgcatacaacacacccacacgggcaacatgcgcacacgggaacaccacggcgaaggaaaccccacatcagcaggacggcacacacagtgcgaacacaacacaaggcacacaaccgccccaggaaacacaaacccacaggcgcaaacaggcacaaggcgcaaacactgacagcaacaaacgcccacgcaacaaccaccaacactacgaaccaaaag

SEQ ID NO: 66604 - DNA, 2606 bp, Homo sapiens
  misc_feature (16)..(16): n is a, c, g, or t
  misc_feature (24)..(24): n is a, c, g, or t
ttcagtctgtaccccngggcgtantttatatcgtcgatccacgcctcggtagtgacgggggctggcgcatacgttactgagattgcgtgccgatgggccgcctgggcagaatgtcacgatggacgagggcggcacgcccctgctccccgacagcctggtctaccagatcttcctgagcctgggcccggccgacgtgctggccgccgggctggtgtgccgccaatggcaggccgtgtcgcgggacgagttcctgtggagggagcagttctaccgctactaccaggtggcccgcgacgtgccccgacacccagcggccatgtcctggtacgaggagttccagcggctgtatgacacggtgccctgcgtggaggtgcagacgctgcgggaacacacagaccaggtcctgcacctcagcttctcccattccgggtaccagttcgcgtcctgctccaaggactgcactgtgaagatctggagcaacgacctgaccatctcgctgctgcacagcgcggacatgcggccctacaactggagctacacccagttctcccagttcaacaaggacgactcgctactgctggcctcgggggtgttcctggggccgcacaactcctcatccggcgagattgctgtcatcagcctagactccttcgcgctgctgtcccgcgtgcggaacaagccctatgacgtgtttggctgttggctcaccgagaccagcctcatctcggggaacctgcaccgcatcggagatatcacctcctgctcggtgctgtggctcaacaatgccttccaggatgtggagtcagagaacgtcaacgtggtgaagcggctgttcaagatccagaacctcaatgccagcaccgtccgcacggtgatggtggccgactgcagccgcttcgacagccctgacctgctgctggaagccggtgacccggccacgtccccctgccgcatctttgacctgggcagcgacaacgaggaggtggtggctggcccggcccccgcccacgccaaggagggcttgcggcactttctggaccgcgtgctggaggggcgggcgcagccacagctgtcggagcgcatgctagagaccaaggtggccgagctgctggcccagggccacaccaagccacccgagcgcagtgccacaggcgccaagagcaagtacctcatcttcaccactggctgcctcacctactccccacaccagatcgtcggtacacccctgccgccatgctgcccgcctcggtcctaggagcttgggggaggccgggcaggggtcctgaggggcagacagcaagcaagtccacaggcaaagctgggatcgttcactcgcccctggggtcacaagctcagacctggggcctgtgggatgagcagtgaaaacaaacgcaggcagggccgctggccagcaagcaaccgacgggcctgattcaggtctggggcccccggagcaggcagtgcccacggacctctgtggtgctcacagccccagagacaccactgaggcatcaagcagatcctgccacaccagatgaccacggcagggcccgtgctgggtgagggccggggctccgatgccttcttcgacgcgctggaccacgtcatagacatacacggacacatcatcggcatgggcctgtcgcccgacaacaggtacctgtacgtgaacagccgcgcctggcccaacggtgcggtggtggccgaccccatgcagccgccaccaatcgcggaggagattgacctgctggtgttcgacctcaagaccatgcgggaggtgaggcgggctctgcgtgcgcaccgcgcctacacgcccaacgacgagtgcttcttcatcttcctggacgtcagcagggacttcgtggccagcggggcggaggaccggcacggctacatctgggaccgccactacaacatctgtctggccaggctgcggcacgaggatgtggtcaactcagtggtcttcagtccccaggagcaggagctgctgctcacggccagcgacgacgccaccatcaaagcctggcgctccccacgcaccatgcgcgtcctccaggcacctcgcccacggcctcgcaccttcttctcctggcttgccagccagaggcgctgaggtgtgctgggtgcactggagccaccgggaccccttgaggacatcgccaggctctgtggctttttcccgagcgggagaggtggagatgcttatagcagttacgccttaggaaggggacaaccaggccccgccacacgctcacacacaaacctgctcacgcagctgtgatgcttggcacggggtggccagtgcagatggagcccaaggccccctcggcctcctgggcaacttggggtacacaggatactgggggtgccgctcctcactcaaccccaggctaggggtacacctgacccagctggcctcggcccggggcaccttcggctggtcctgtggggccctggacggtggcccagtggtggcaggggctgctcctggctgtggttgtgcgcccggggcttgggagcggccggtcacgctgctgtgggcccgagtgtgttgcatgtccacgcaccacccgttcagggccctgaataaacagttggcaacagca

SEQ ID NO: 66605 - DNA, 2265 bp, Homo sapiens
  misc_feature (16)..(16): n is a, c, g, or t
  misc_feature (24)..(24): n is a, c, g, or t
ttcagtctgtaccccngggcgtantttatatcgtcgatccacgcctcggtagtgacgggggctggcgcatacgttactgagattgcgtgccgatgggccgcctgggcagaatgtcacgatggacgagggcggcacgcccctgctccccgacagcctggtctaccagatcttcctgagcctgggcccggccgacgtgctggccgccgggctggtgtgccgccaatggcaggccgtgtcgcgggacgagttcctgtggagggagcagttctaccgctactaccaggtggcccgcgacgtgccccgacacccagcggccatgtcctggtacgaggagttccagcggctgtatgacacggtgccctgcgtggaggtgcagacgctgcgggaacacacagaccaggtcctgcacctcagcttctcccattccgggtaccagttcgcgtcctgctccaaggactgcactgtgaagatctggagcaacgacctgaccatctcgctgctgcacagcgcggacatgcggccctacaactggagctacacccagttctcccagttcaacaaggacgactcgctactgctggcctcgggggtgttcctggggccgcacaactcctcatccggcgagattgctgtcatcagcctagactccttcgcgctgctgtcccgcgtgcggaacaagccctatgacgtgtttggctgttggctcaccgagaccagcctcatctcggggaacctgcaccgcatcggagatatcacctcctgctcggtgctgtggctcaacaatgccttccaggatgtggagtcagagaacgtcaacgtggtgaagcggctgttcaagatccagaacctcaatgccagcaccgtccgcacggtgatggtggccgactgcagccgcttcgacagccctgacctgctgctggaagccggtgacccggccacgtccccctgccgcatctttgacctgggcagcgacaacgaggaggtggtggctggcccggcccccgcccacgccaaggagggcttgcggcactttctggaccgcgtgctggaggggcgggcgcagccacagctgtcggagcgcatgctagagaccaaggtggccgagctgctggcccagggccacaccaagccacccgagcgcagtgccacaggcgccaagagcaagtagcatcaagcagatcctgccacaccagatgaccacggcagggcccgtgctgggtgagggccggggctccgatgccttcttcgacgcgctggaccacgtcatagacatacacggacacatcatcggcatgggcctgtcgcccgacaacaggtacctgtacgtgaacagccgcgcctggcccaacggtgcggtggtggccgaccccatgcagccgccaccaatcgcggaggagattgacctgctggtgttcgacctcaagaccatgcgggaggtgaggcgggctctgcgtgcgcaccgcgcctacacgcccaacgacgagtgcttcttcatcttcctggacgtcagcagggacttcgtggccagcggggcggaggaccggcacggctacatctgggaccgccactacaacatctgtctggccaggctgcggcacgaggatgtggtcaactcagtggtcttcagtccccaggagcaggagctgctgctcacggccagcgacgacgccaccatcaaagcctggcgctccccacgcaccatgcgcgtcctccaggcacctcgcccacggcctcgcaccttcttctcctggcttgccagccagaggcgctgaggtgtgctgggtgcactggagccaccgggaccccttgaggacatcgccaggctctgtggctttttcccgagcgggagaggtggagatgcttatagcagttacgccttaggaaggggacaaccaggccccgccacacgctcacacacaaacctgctcacgcagctgtgatgcttggcacggggtggccagtgcagatggagcccaaggccccctcggcctcctgggcaacttggggtacacaggatactgggggtgccgctcctcactcaaccccaggctaggggtacacctgacccagctggcctcggcccggggcaccttcggctggtcctgtggggccctggacggtggcccagtggtggcaggggctgctcctggctgtggttgtgcgcccggggcttgggagcggccggtcacgctgctgtgggcccgagtgtgttgcatgtccacgcaccacccgttcagggccctgaataaacagttggcaacagca

SEQ ID NO: 66606 - DNA, 2676 bp, Homo sapiens
  misc_feature (16)..(16): n is a, c, g, or t
  misc_feature (24)..(24): n is a, c, g, or t
ttcagtctgtaccccngggcgtantttatatcgtcgatccacgcctcggtagtgacgggggctggcgcatacgttactgagattgcgtgccgatgggccgcctgggcagaatgtcacgatggacgagggcggcacgcccctgctccccgacagcctggtctaccagatcttcctgagcctgggcccggccgacgtgctggccgccgggctggtgtgccgccaatggcaggccgtgtcgcgggacgagttcctgtggagggagcagttctaccgctactaccaggtggcccgcgacgtgccccgacacccagcggccatgtcctggtacgaggagttccagcggctgtatgacacggtgccctgcgtggaggtgcagacgctgcgggaacacacagaccaggtcctgcacctcagcttctcccattccgggtaccagttcgcgtcctgctccaaggactgcactgtgaagatctggagcaacgacctgaccatctcgctgctgcacagcgcggacatgcggccctacaactggagctacacccagttctcccagttcaacaaggacgactcgctactgctggcctcgggggtgttcctggggccgcacaactcctcatccggcgagattgctgtcatcagcctagactccttcgcgctgctgtcccgcgtgcggaacaagccctatgacgtgtttggctgttggctcaccgagaccagcctcatctcggggaacctgcaccgcatcggagatatcacctcctgctcggtgctgtggctcaacaatgccttccaggatgtggagtcagagaacgtcaacgtggtgaagcggctgttcaagatccagaacctcaatgccagcaccgtccgcacggtgatggtggccgactgcagccgcttcgacagccctgacctgctgctggaagccggtgacccggccacgtccccctgccgcatctttgacctgggcagcgacaacgaggaggtggtggctggcccggcccccgcccacgccaaggagggcttgcggcactttctggaccgcgtgctggaggggcgggcgcagccacagctgtcggagcgcatgctagagaccaaggtggccgagctgctggcccagggccacaccaagccacccgagcgcagtgccacaggcgccaagagcaagtacctcatcttcaccactggctgcctcacctactccccacaccagatcgtcggtacacccctgccgccatgctgcccgcctcggtcctaggagcttgggggaggccgggcaggggtcctgaggggcagacagcaagcaagtccacaggcaaagctgggatcgttcactcgcccctggggtcacaagctcagacctggggcctgtgggatgagcagtgaaaacaaacgcaggcagggccgctggccagcaagcaaccgacgggcctgattcaggtctggggcccccggagcaggcagtgcccacggacctctgtggtgctcacagccccagagacaccactgaggtaggaagctgccctggagtgatgtccttggggcattggacagggaccctcaccgtagccctccctgcaggcatcaagcagatcctgccacaccagatgaccacggcagggcccgtgctgggtgagggccggggctccgatgccttcttcgacgcgctggaccacgtcatagacatacacggacacatcatcggcatgggcctgtcgcccgacaacaggtacctgtacgtgaacagccgcgcctggcccaacggtgcggtggtggccgaccccatgcagccgccaccaatcgcggaggagattgacctgctggtgttcgacctcaagaccatgcgggaggtgaggcgggctctgcgtgcgcaccgcgcctacacgcccaacgacgagtgcttcttcatcttcctggacgtcagcagggacttcgtggccagcggggcggaggaccggcacggctacatctgggaccgccactacaacatctgtctggccaggctgcggcacgaggatgtggtcaactcagtggtcttcagtccccaggagcaggagctgctgctcacggccagcgacgacgccaccatcaaagcctggcgctccccacgcaccatgcgcgtcctccaggcacctcgcccacggcctcgcaccttcttctcctggcttgccagccagaggcgctgaggtgtgctgggtgcactggagccaccgggaccccttgaggacatcgccaggctctgtggctttttcccgagcgggagaggtggagatgcttatagcagttacgccttaggaaggggacaaccaggccccgccacacgctcacacacaaacctgctcacgcagctgtgatgcttggcacggggtggccagtgcagatggagcccaaggccccctcggcctcctgggcaacttggggtacacaggatactgggggtgccgctcctcactcaaccccaggctaggggtacacctgacccagctggcctcggcccggggcaccttcggctggtcctgtggggccctggacggtggcccagtggtggcaggggctgctcctggctgtggttgtgcgcccggggcttgggagcggccggtcacgctgctgtgggcccgagtgtgttgcatgtccacgcaccacccgttcagggccctgaataaacagttggcaacagca

SEQ ID NO: 66607 - DNA, 2179 bp, Homo sapiens
  misc_feature (16)..(16): n is a, c, g, or t
  misc_feature (24)..(24): n is a, c, g, or t
ttcagtctgtaccccngggcgtantttatatcgtcgatccacgcctcggtagtgacgggggctggcgcatacgttactgagattgcgtgccgatgggccgcctgggcagaatgtcacgatggacgagggcggcacgcccctgctccccgacagcctggtctaccagatcttcctgagcctgggcccggccgacgtgctggccgccgggctggtgtgccgccaatggcaggccgtgtcgcgggacgagttcctgtggagggagcagttctaccgctactaccaggtggcccgcgacgtgccccgacacccagcggccatgtcctggtacgaggagttccagcggctgtatgacacggtgccctgcgtggaggtgcagacgctgcgggaacacacagaccaggtcctgcacctcagcttctcccattccgggtaccagttcgcgtcctgctccaaggactgcactgtgaagatctggagcaacgacctgaccatctcgctgctgcacagcgcggacatgcggccctacaactggagctacacccagttctcccagttcaacaaggacgactcgctactgctggcctcgggggtgttcctggggccgcacaactcctcatccggcgagattgctgtcatcagcctagactccttcgcgctgctgtcccgcgtgcggaacaagccctatgacgtgtttggctgttggctcaccgagaccagcctcatctcggggaacctgcaccgcatcggagatatcacctcctgctcggtgctgtggctcaacaatgccttccaggatgtggagtcagagaacgtcaacgtggtgaagcggctgttcaagatccagaacctcaatgccagcaccgtccgcacggtgatggtggccgactgcagccgcttcgacagccctgacctgctgctggaagccggtgacccggccacgtccccctgccgcatctttgacctgggcagcgacaacgaggaggtggtggctggcccggcccccgcccacgccaaggagggcttgcggcactttctggaccgcgtgctggaggggcgggcgcagccacagctgtcggagcgcatgctagagaccaaggtggccgagctgctggcccagggccacaccaagccacccgagcgcagtgccacaggcgccaagagcaagtacctcatcttcaccactggctgcctcacctactccccacaccagatcggcatcaagcagatcctgccacaccagatgaccacggcagggcccgtgctgggtgagggccggggctccgatgccttcttcgacgcgctggaccacgtcatagacatacacggacacatcatcggcatgggcctgtcgcccgacaacaggtacctgtacgtgaacagccgcgcctggcccaacggtgcggtggtggccgaccccatgcagccgccaccaatcgcggaggagattgacctgctggtgttcgacctcaagaccatgcgggaggtgaggcgggctctgcgtgcgcaccgcgcctacacgcccaacgacgagtgcttcttcatcttcctggacgtcagcagggacttcgtggccagcggggcggaggaccggcacggctacatctgggaccgccactacaacatctgtctggccaggctgcggcacgaggatgtggtcaactcagtggtcttcagtccccaggagcaggagctgctgctcacggccagcgacgacgccaccatcaaagcctggcgctccccacgcaccatgcgcgtcctccaggcacctcgcccacggcctcgcaccttcttctcctggcttgccagccagaggcgctgaggtgtgctgggtgcactggagccaccgggaccccttgaggacatcgccaggctctgtggctttttcccgagcgggagaggtggagatgcttatagcagttacgccttaggaaggggacaaccaggccccgccacacgctcacacacaaacctgctcacgcagctgtgatgcttggcacggggtggccagtgcagatggagcccaaggccccctcggcctcctgggcaacttggggtacacaggatactgggggtgccgctcctcactcaaccccaggctaggggtacacctgacccagctggcctcggcccggggcaccttcggctggtcctgaataaacagttggcaacagcaaaaaaa

SEQ ID NO: 66608 - DNA, 2232 bp, Homo sapiens
  misc_feature (16)..(16): n is a, c, g, or t
  misc_feature (24)..(24): n is a, c, g, or t
ttcagtctgtaccccngggcgtantttatatcgtcgatccacgcctcggtagtgacgggggctggcgcatacgttactgagattgcgtgccgatgggccgcctgggcagaatgtcacgatggacgagggcggcacgcccctgctccccgacagcctggtctaccagatcttcctgagcctgggcccggccgacgtgctggccgccgggctggtgtgccgccaatggcaggccgtgtcgcgggacgagttcctgtggagggagcagttctaccgctactaccaggtggcccgcgacgtgccccgacacccagcggccatgtcctggtacgaggagttccagcggctgtatgacacggtgccctgcgtggaggtgcagacgctgcgggaacacacagaccaggtcctgcacctcagcttctcccattccgggtaccagttcgcgtcctgctccaaggactgcactgtgaagatctggagcaacgacctgaccatctcgctgctgcacagcgcggacatgcggccctacaactggagctacacccagttctcccagttcaacaaggacgactcgctactgctggcctcgggggtgttcctggggccgcacaactcctcatccggcgagattgctgtcatcagcctagactccttcgcgctgctgtcccgcgtgcggaacaagccctatgacgtgtttggctgttggctcaccgagaccagcctcatctcggggaacctgcaccgcatcggagatatcacctcctgctcggtgctgtggctcaacaatgccttccaggatgtggagtcagagaacgtcaacgtggtgaagcggctgttcaagatccagaacctcaatgccagcaccgtccgcacggtgatggtggccgactgcagccgcttcgacagccctgacctgctgctggaagccggtgacccggccacgtccccctgccgcatctttgacctgggcagcgacaacgaggaggtggtggctggcccggcccccgcccacgccaaggagggcttgcggcactttctggaccgcgtgctggaggggcgggcgcagccacagctgtcggagcgcatgctagagaccaaggtggccgagctgctggcccagggccacaccaagccacccgagcgcagtgccacaggcgccaagagcaagtacctcatcttcaccactggctgcctcacctactccccacaccagatcggcatcaagcagatcctgccacaccagatgaccacggcagggcccgtgctgggtgagggccggggctccgatgccttcttcgacgcgctggaccacgtcatagacatacacggacacatcatcggcatgggcctgtcgcccgacaacaggtacctgtacgtgaacagccgcgcctggcccaacggtgcggtggtggccgaccccatgcagccgccaccaatcgcggaggagattgacctgctggtgttcgacctcaagaccatgcgggaggtgaggcgggctctgcgtgcgcaccgcgcctacacgcccaacgacgagtgcttcttcatcttcctggacgtcagcagggacttcgtggccagcggggcggaggaccggcacggctacatctgggaccgccactacaacatctgtctggccaggctgcggcacgaggatgtggtcaactcagtggtcttcagtccccaggagcaggagctgctgctcacggccagcgacgacgccaccatcaaagcctggcgctccccacgcaccatgcgcgtcctccaggcacctcgcccacggcctcgcaccttcttctcctggcttgccagccagaggcgctgaggtgtgctgggtgcactggagccaccgggaccccttgaggacatcgccaggctctgtggctttttcccgagcgggagaggtggagatgcttatagcagttacgccttaggaaggggacaaccaggccccgccacacgctcacacacaaacctgctcacgcagctgtgatgcttggcacggggtggccagtgcagatggagcccaaggccccctcggcctcctgggcaacttggggtacacaggatactgggggtgccgctcctcactcaaccccagtggtggcaggggctgctcctggctgtggttgtgcgcccggggcttgggagcggccggtcacgctgctgtgggcccgagtgtgttgcatgtccacgcaccacccgttcagggccctgaataaacagttggcaacagca

SEQ ID NO: 66609 - DNA, 1445 bp, Homo sapiens
aagcagtggtatcaacgcagagtgcccattacggccgggtcaccggcttccagcagcaggtgacccggccacgtccccctgccgcatctttgacctgggcagcgacaacgaggaggtggtggctggcccggcccccgcccacgccaaggagggcttgcggcactttctggaccgcgtgctggaggggcgggcgcagccacagctgtcggagcgcatgctagagaccaaggtggccgagctgctggcccagggccacaccaagccacccgagcgcagtgccacaggcgccaagagcaagtacctcatcttcaccactggctgcctcacctactccccacaccagatcggcatcaagcagatcctgccacaccagatgaccacggcagggcccgtgctgggtgagggccggggctccgatgccttcttcgacgcgctggaccacgtcatagacatacacggacacatcatcggcatgggcctgtcgcccgacaacaggtacctgtacgtgaacagccgcgcctggcccaacggtgcggtggtggccgaccccatgcagccgccaccaatcgcggaggagattgacctgctggtgttcgacctcaagaccatgcgggaggtgaggcgggctctgcgtgcgcaccgcgcctacacgcccaacgacgagtgcttcttcatcttcctggacgtcagcagggacttcgtggccagcggggcggaggaccggcacggctacatctgggaccgccactacaacatctgtctggccaggctgcggcacgaggatgtggtcaactcagtggtcttcagtccccaggagcaggagctgctgctcacggccagcgacgacgccaccatcaaagcctggcgctccccacgcaccatgcgcgtcctccaggcacctcgcccacggcctcgcaccttcttctcctggcttgccagccagaggcgctgaggtgtgctgggtgcactggagccaccgggaccccttgaggacatcgccaggctctgtggctttttcccgagcgggagaggtggagatgcttatagcagttacgccttaggaaggggacaaccaggccccgccacacgctcacacacaaacctgctcacgcagctgtgatgcttggcacggggtggccagtgcagatggagcccaaggccccctcggcctcctgggcaacttggggtacacaggatactgggggtgccgctcctcactcaaccccaggctaggggtacacctgacccagctggcctcggcccggggcaccttcggctggtcctgtggggccctggacggtggcccagtggtggcaggggctgctcctggctgtggttgtgcgcccggggcttgggagcggccggtcacgctgctgtgggcccgagtgtgttgcatgtccacgcaccacccgttcagggccctgaataaacagttggcaacagca

SEQ ID NO: 66610 - DNA, 2756 bp, Homo sapiens
  misc_feature (16)..(16): n is a, c, g, or t
  misc_feature (24)..(24): n is a, c, g, or t
ttcagtctgtaccccngggcgtantttatatcgtcgatccacgcctcggtagtgacgggggctggcgcatacgttactgagattgcgtgccgatgggccgcctgggcagaatgtcacgatggacgagggcggcacgcccctgctccccgacagcctggtctaccagatcttcctgagcctgggcccggccgacgtgctggccgccgggctggtgtgccgccaatggcaggccgtgtcgcgggacgagttcctgtggagggagcagttctaccgctactaccaggtggcccgcgacgtgccccgacacccagcggccatgtcctggtacgaggagttccagcggctgtatgacacggtgccctgcgtggaggtgcagacgctgcgggaacacacagaccaggtcctgcacctcagcttctcccattccgggtaccagttcgcgtcctgctccaaggactgcactgtgaagatctggagcaacgacctgaccatctcgctgctgcacagcgcggacatgcggccctacaactggagctacacccagttctcccagttcaacaaggacgactcgctactgctggcctcgggggtgttcctggggccgcacaactcctcatccggcgagattgctgtcatcagcctagactccttcgcgctgctgtcccgcgtgcggaacaagccctatgacgtgtttggctgttggctcaccgagaccagcctcatctcggggaacctgcaccgcatcggagatatcacctcctgctcggtgctgtggctcaacaatgccttccaggtgcgtgcggggctaggggcggggctgccctcctggggcctggcgcccggcgcccacctggcacgtgcccccgcccccaggatgtggagtcagagaacgtcaacgtggtgaagcggctgttcaagatccagaacctcaatgccagcaccgtccgcacggtgatggtggccgactgcagccgcttcgacagccctgacctgctgctggaagccggtgacccggccacgtccccctgccgcatctttgacctgggcagcgacaacgaggaggtggtggctggcccggcccccgcccacgccaaggagggcttgcggcactttctggaccgcgtgctggaggggcgggcgcagccacagctgtcggagcgcatgctagagaccaaggtggccgagctgctggcccagggccacaccaagccacccgagcgcagtgccacaggcgccaagagcaagtacctcatcttcaccactggctgcctcacctactccccacaccagatcgtcggtacacccctgccgccatgctgcccgcctcggtcctaggagcttgggggaggccgggcaggggtcctgaggggcagacagcaagcaagtccacaggcaaagctgggatcgttcactcgcccctggggtcacaagctcagacctggggcctgtgggatgagcagtgaaaacaaacgcaggcagggccgctggccagcaagcaaccgacgggcctgattcaggtctggggcccccggagcaggcagtgcccacggacctctgtggtgctcacagccccagagacaccactgaggtaggaagctgccctggagtgatgtccttggggcattggacagggaccctcaccgtagccctccctgcaggcatcaagcagatcctgccacaccagatgaccacggcagggcccgtgctgggtgagggccggggctccgatgccttcttcgacgcgctggaccacgtcatagacatacacggacacatcatcggcatgggcctgtcgcccgacaacaggtacctgtacgtgaacagccgcgcctggcccaacggtgcggtggtggccgaccccatgcagccgccaccaatcgcggaggagattgacctgctggtgttcgacctcaagaccatgcgggaggtgaggcgggctctgcgtgcgcaccgcgcctacacgcccaacgacgagtgcttcttcatcttcctggacgtcagcagggacttcgtggccagcggggcggaggaccggcacggctacatctgggaccgccactacaacatctgtctggccaggctgcggcacgaggatgtggtcaactcagtggtcttcagtccccaggagcaggagctgctgctcacggccagcgacgacgccaccatcaaagcctggcgctccccacgcaccatgcgcgtcctccaggcacctcgcccacggcctcgcaccttcttctcctggcttgccagccagaggcgctgaggtgtgctgggtgcactggagccaccgggaccccttgaggacatcgccaggctctgtggctttttcccgagcgggagaggtggagatgcttatagcagttacgccttaggaaggggacaaccaggccccgccacacgctcacacacaaacctgctcacgcagctgtgatgcttggcacggggtggccagtgcagatggagcccaaggccccctcggcctcctgggcaacttggggtacacaggatactgggggtgccgctcctcactcaaccccaggctaggggtacacctgacccagctggcctcggcccggggcaccttcggctggtcctgtggggccctggacggtggcccagtggtggcaggggctgctcctggctgtggttgtgcgcccggggcttgggagcggccggtcacgctgctgtgggcccgagtgtgttgcatgtccacgcaccacccgttcagggccctgaataaacagttggcaacagca

SEQ ID NO: 66611 - DNA, 2343 bp, Homo sapiens
  misc_feature (16)..(16): n is a, c, g, or t
  misc_feature (24)..(24): n is a, c, g, or t
ttcagtctgtaccccngggcgtantttatatcgtcgatccacgcctcggtagtgacgggggctggcgcatacgttactgagattgcgtgccgatgggccgcctgggcagaatgtcacgatggacgagggcggcacgcccctgctccccgacagcctggtctaccagatcttcctgagcctgggcccggccgacgtgctggccgccgggctggtgtgccgccaatggcaggccgtgtcgcgggacgagttcctgtggagggagcagttctaccgctactaccaggtggcccgcgacgtgccccgacacccagcggccatgtcctggtacgaggagttccagcggctgtatgacacggtgccctgcgtggaggtgcagacgctgcgggaacacacagaccaggtcctgcacctcagcttctcccattccgggtaccagttcgcgtcctgctccaaggactgcactgtgaaggcgatcactacagccgcccctgccgaacagatctggagcaacgacctgaccatctcgctgctgcacagcgcggacatgcggccctacaactggagctacacccagttctcccagttcaacaaggacgactcgctactgctggcctcgggggtgttcctggggccgcacaactcctcatccggcgagattgctgtcatcagcctagactccttcgcgctgctgtcccgcgtgcggaacaagccctatgacgtgtttggctgttggctcaccgagaccagcctcatctcggggaacctgcaccgcatcggagatatcacctcctgctcggtgctgtggctcaacaatgccttccaggatgtggagtcagagaacgtcaacgtggtgaagcggctgttcaagatccagaacctcaatgccagcaccgtccgcacggtgatggtggccgactgcagccgcttcgacagccctgacctgctgctggaagccggtgacccggccacgtccccctgccgcatctttgacctgggcagcgacaacgaggaggtggtggctggcccggcccccgcccacgccaaggagggcttgcggcactttctggaccgcgtgctggaggggcgggcgcagccacagctgtcggagcgcatgctagagaccaaggtggccgagctgctggcccagggccacaccaagccacccgagcgcagtgccacaggcgccaagagcaagtacctcatctttcaccaaatggctgcttcacctaaacccaagcaagatcggcatcaagcagatcctgccacaccagatgaccacggcagggcccgtgctgggtgagggccggggctccgatgccttcttcgacgcgctggaccacgtcatagacatacacggacacatcatcggcatgggcctgtcgcccgacaacaggtacctgtacgtgaacagccgcgcctggcccaacggtgcggtggtggccgaccccatgcagccgccaccaatcgcggaggagattgacctgctggtgttcgacctcaagaccatgcgggaggtgaggcgggctctgcgtgcgcaccgcgcctacacgcccaacgacgagtgcttcttcatcttcctggacgtcagcagggacttcgtggccagcggggcggaggaccggcacggctacatctgggaccgccactacaacatctgtctggccaggctgcggcacgaggatgtggtcaactcagtggtcttcagtccccaggagcaggagctgctgctcacggccagcgacgacgccaccatcaaagcctggcgctccccacgcaccatgcgcgtcctccaggcacctcgcccacggcctcgcaccttcttctcctggcttgccagccagaggcgctgaggtgtgctgggtgcactggagccaccgggaccccttgaggacatcgccaggctctgtggctttttcccgagcgggagaggtggagatgcttatagcagttacgccttaggaaggggacaaccaggccccgccacacgctcacacacaaacctgctcacgcagctgtgatgcttggcacggggtggccagtgcagatggagcccaaggccccctcggcctcctgggcaacttggggtacacaggatactgggggtgccgctcctcactcaaccccaggctaggggtacacctgacccagctggcctcggcccggggcaccttcggctggtcctgtggggccctggacggtggcccagtggtggcaggggctgctcctggctgtggttgtgcgcccggggcttgggagcggccggtcacgctgctgtgggcccgagtgtgttgcatgtccacgcaccacccgttcagggccctgaataaacagttggcaacagca

SEQ ID NO: 66612 - DNA, 2067 bp, Homo sapiens
  misc_feature (16)..(16): n is a, c, g, or t
  misc_feature (24)..(24): n is a, c, g, or t
ttcagtctgtaccccngggcgtantttatatcgtcgatccacgcctcggtagtgacgggggctggcgcatacgttactgagattgcgtgccgatgggccgcctgggcagaatgtcacgatggacgagggcggcacgcccctgctccccgacagcctggtctaccagatcttcctgagcctgggcccggccgacgtgctggccgccgggctggtgtgccgccaatggcaggccgtgtcgcgggacgagttcctgtggagggagcagttctaccgctactaccaggtggcccgcgacgtgccccgacacccagcggccatgtcctggtacgaggagttccagcggctgtatgacacggtgccctgcgtggaggtgcagacgctgcgggaacacacagaccaggtcctgcacctcagcttctcccattccgggtaccagttcgcgtcctgctccaaggactgcactgtgaagatctggagcaacgacctgaccatctcgctgctgcacagcgcggacatgcggccctacaactggagctacacccagttctcccagttcaacaaggacgactcgctactgctggcctcgggggtgttcctggggccgcacaactcctcatccggcgagattgctgtcatcagcctaggtgagcacgggcggcgggttgaccctgcccccgccccacgccgacagcctgtccagccccggcctccccacactccttcgcgctgctgtcccgcgtgcggaacaagccctatgacgtgtttggctgttggctcaccgagaccagcctcatctcggggaacctgcaccgcatcggagatatcacctcctgctcggtgctgtggctcaacaatgccttccagttcaacaaggacgactcgctactgctggcctcgggggtgttcctggggccgcacaactcctcatcttcaccactggctgcctcacctactccccacaccagatcggcatcaagcagatcctgccacaccagatgaccacggcagggcccgtgctgggtgagggccggggctccgatgccttcttcgacgcgctggaccacgtcatagacatacacggacacatcatcggcatgggcctgtcgcccgacaacaggtacctgtacgtgaacagccgcgcctggcccaacggtgcggtggtggccgaccccatgcagccgccaccaatcgcggaggagattgacctgctggtgttcgacctcaagaccatgcgggaggtgaggcgggctctgcgtgcgcaccgcgcctacacgcccaacgacgagtgcttcttcatcttcctggacgtcagcagggacttcgtggccagcggggcggaggaccggcacggctacatctgggaccgccactacaacatctgtctggccaggctgcggcacgaggatgtggtcaactcagtggtcttcagtccccaggagcaggagctgctgctcacggccagcgacgacgccaccatcaaagcctggcgctccccacgcaccatgcgcgtcctccaggcacctcgcccacggcctcgcaccttcttctcctggcttgccagccagaggcgctgaggtgtgctgggtgcactggagccaccgggaccccttgaggacatcgccaggctctgtggctttttcccgagcgggagaggtggagatgcttatagcagttacgccttaggaaggggacaaccaggccccgccacacgctcacacacaaacctgctcacgcagctgtgatgcttggcacggggtggccagtgcagatggagcccaaggccccctcggcctcctgggcaacttggggtacacaggatactgggggtgccgctcctcactcaaccccaggctaggggtacacctgacccagctggcctcggcccggggcaccttcggctggtcctgtggggccctggacggtggcccagtggtggcaggggctgctcctggctgtggttgtgcgcccggggcttgggagcggccggtcacgctgctgtgggcccgagtgtgttgcatgtccacgcaccacccgttcagggccctgaataaacagttggcaacagca

SEQ ID NO: 66613 - DNA, 1401 bp, Homo sapiens
  misc_feature (16)..(16): n is a, c, g, or t
  misc_feature (24)..(24): n is a, c, g, or t
  misc_feature (1364)..(1365): n is a, c, g, or t
  misc_feature (1368)..(1369): n is a, c, g, or t
  misc_feature (1376)..(1376): n is a, c, g, or t
  misc_feature (1382)..(1382): n is a, c, g, or t
  misc_feature (1387)..(1387): n is a, c, g, or t
  misc_feature (1390)..(1390): n is a, c, g, or t
  misc_feature (1393)..(1393): n is a, c, g, or t
ttcagtctgtaccccngggcgtantttatatcgtcgatccacgcctcggtagtgacgggggctggcgcatacgttactgagattgcgtgccgatgggccgcctgggcagaatgtcacgatggacgagggcggcacgcccctgctccccgacagcctggtctaccagatcttcctgagcctgggcccggccgacgtgctggccgccgggctggtgtgccgccaatggcaggccgtgtcgcgggacgagttcctgtggagggagcagttctaccgctactaccaggtggcccgcgacgtgccccgacacccagcggccatgtcctggtacgaggagttccagcggctgtatgacacggtgccctgcgtggaggtgcagacgctgcgggaacacacagaccaggtcctgcacctcagcttctcccattccgggtaccagttcgcgtcctgctccaaggactgcactgtgaagatctggagcaacgacctgaccatctcgctgctgcacagcgcggacatgcggccctacaactggagctacacccagttctcccagttcaacaaggacgactcgctactgctggcctcgggggtgttcctggggccgcacaactcctcatccggcgagattgctgtcatcagcctagactccttcgcgctgctgtcccgcgtgcggaacaagccctatgacgtgtttggctgttggctcaccgagaccagcctcatctcggggaacctgcaccgcatcggagatatcacctcctgctcggtgctgtggctcaacaatgccttccaggatgtggagtcagagaacgtcaacgtggtgaagcggctgttcaagatccagaacctcaatgccagcaccgtccgcacggtgatggtggccgactgcagccgcttcgacagccctgacctgctgctggaagccggtgacccggccacgtccccctgccgcatctttgacctgggcagcgacaacgaggaggtggtggctggcccggcccccgcccacgccaaggagggcttgcggcactttctggaccgcgtgctggaggggcgggcgcagccacagctgtcggagcgcatgctagagaccaaggtggccgagctgctggcccagggccacaccaagccacccgagcgcagtgccacaggcgccaagagcaagtacctcatcttcaccactggctgcctcacctactccccacaccagatcggcatcaagcagatcctgccacaccagatgaccacggcagggcccgtgctgggtgagggccggggctccgatgccttcttcgacgcgctggaccacgtcatagacatacacggacacatcatcggcatgggcctgtcgcccgacaacaggnnctnncgtgganagcggncggcnaanggngggggggc

SEQ ID NO: 66614 - DNA, 359 bp, Homo sapiens
tggacagggaccctcaccgtagccctccctgcaggcatcaagcagatcctgccacaccagatgaccacggcagggcccgtgctgggtgagggccggggctccgatgccttcttcgacgcgctggaccacgtcatagacatacacggacacatcatcggcatgggcctgtcgcccgacaacaggtgggcctcttgccagtgtcccaggcggggtgcccgcaggcggcccacacctagcacagtgcccctcgcccaggtacctgtacgtgaacagccgcgcctggcccaacggtgcggtggtggccgaccccatgcagccgccaccaatcgcggaggagattgacctgctggtgttcgacc

SEQ ID NO: 66615 - DNA, 711 bp, Homo sapiens
  misc_feature (19)..(19): n is a, c, g, or t
  misc_feature (611)..(611): n is a, c, g, or t
  misc_feature (621)..(622): n is a, c, g, or t
cgcagtgctgtgggtgctngctgcagctgggctggagtgcggctgtgggccgcctgggcagaatgtcacgatggacgagggcggcacgcccctgctccccgacagcctggtctaccagatcttcctgagcctgggcccggccgacgtgctggccgccgggctggtgtgccgccaatggcaggccgtgtcgcgggacgagttcctgtggagggagcagttctaccgctactaccaggtggcccgcgacgtgccccgacacccagcggccatgtcctggtacgaggagttccagcggctgtatgacacggtgccctgcgtggaggtgcagacgctgcgggaacacacagaccaggtcctgcacctcagcttctcccattccgggtaccagttcgcgtcctgctccaaggactgcactgtgaagatctggagcaacgacctgaccatctcgctgctgcacagcgcggacatgcggccctacaactggagctacacccagttctcccagttcaacaaggacgactcgctactgctggcctcgggggtgttcctggggccgcacaactcctcatccggcgagattgctgtcatcagcctagactccattcgcgctncagcccgcgnncggacaagcctatgaggtgttggctgtggaacacgggaccgctcatatggggacctgtacgcatctggaaattaacccggccggggctg

SEQ ID NO: 66616 - DNA, 2342 bp, Homo sapiens
  misc_feature (16)..(16): n is a, c, g, or t
  misc_feature (24)..(24): n is a, c, g, or t
ttcagtctgtaccccngggcgtantttatatcgtcgatccacgcctcggtagtgacgggggctggcgcatacgttactgagattgcgtgccgatgggccgcctgggcagaatgtcacgatggacgagggcggcacgcccctgctccccgacagcctggtctaccagatcttcctgagcctgggcccggccgacgtgctggccgccgggctggtgtgccgccaatggcaggccgtgtcgcgggacgagttcctgtggagggagcagttctaccgctactaccaggtggcccgcgacgtgccccgacacccagcggccatgtcctggtacgaggagttccagcggctgtatgacacggtgccctgcgtggaggtgcagacgctgcgggaacacacagaccaggtcctgcacctcagcttctcccattccgggtaccagttcgcgtcctgctccaaggactgcactgtgaaggcgatcactacagccgcccctgccgaacagatctggagcaacgacctgaccatctcgctgctgcacagcgcggacatgcggccctacaactggagctacacccagttctcccagttcaacaaggacgactcgctactgctggcctcgggggtgttcctggggccgcacaactcctcatccggcgagattgctgtcatcagcctagactccttcgcgctgctgtcccgcgtgcggaacaagccctatgacgtgtttggctgttggctcaccgagaccagcctcatctcggggaacctgcaccgcatcggagatatcacctcctgctcggtgctgtggctcaacaatgccttccaggatgtggagtcagagaacgtcaacgtggtgaagcggctgttcaagatccagaacctcaatgccagcaccgtccgcacggtgatggtggccgactgcagccgcttcgacagccctgacctgctgctggaagccggtgacccggccacgtccccctgccgcatctttgacctgggcagcgacaacgaggaggtggtggctggcccggcccccgcccacgccaaggagggcttgcggcactttctggaccgcgtgctggaggggcgggcgcagccacagctgtcggagcgcatgctagagaccaaggtggccgagctgctggcccagggccacaccaagccacccgagcgcagtgccacaggcgccaagagcaagtacctcatcttcaccactggctgcctcacctactccccacaccagatcggcatcaagcagatcctgccacaccagatgaccacggcagggcccgtgctgggtgagggccggggctccgatgccttcttcgacgcgctggaccacgtcatagacatacacggacacatcatcggcatgggcctgtcgcccgacaacaggtacctgtacgtgaacagccgcgcctggcccaacggtgcggtggtggccgaccccatgcagccgccaccaatcgcggaggagattgacctgctggtgttcgacctcaagaccatgcgggaggtgaggcgggctctgcgtgcgcaccgcgcctacacgcccaacgacgagtgcttcttcatcttcctggacgtcagcagggacttcgtggccagcggggcggaggaccggcacggctacatctgggaccgccactacaacatctgtctggccaggctgcggcacgaggatgtggtcaactcagtggtcttcagtccccaggagcaggagctgctgctcacggccagcgacgacgccaccatcaaagcctggcgctccccacgcaccatgcgcgtcctccaggcacctcgcccacggcctcgcaccttcttctcctggcttgccagccagaggcgctgaggtgtgctgggtgcactggagccaccgggaccccttgaggacatcgccaggctctgtggctttttcccgagcgggagaggtggagatgcttatagcagttacgccttaggaaggggacaaccaggccccgccacacgctcacacacaaacctgctcacgcagctgtgatgcttggcacggggtggccagtgcagatggagcccaaggccccctcggcctcctgggcaacttggggtacacaggatactgggggtgccgctcctcactcaaccccaggctaggggtacacctgacccagctggcctcggcccggggcaccttcggctggtcctgtggggccctggacggtggcccagtggtggcaggggctgctcctggctgtggttgtgcgcccggggcttgggagcggccggtcacgctgctgtgggcccgagtgtgttgcatgtccacgcaccacccgttcagggccctgaataaacagttggcaacagca

SEQ ID NO: 66617 - DNA, 2383 bp, Homo sapiens
  misc_feature (16)..(16): n is a, c, g, or t
  misc_feature (24)..(24): n is a, c, g, or t
ttcagtctgtaccccngggcgtantttatatcgtcgatccacgcctcggtagtgacgggggctggcgcatacgttactgagattgcgtgccgatgggccgcctgggcagaatgtcacgatggacgagggcggcacgcccctgctccccgacagcctggtctaccagatcttcctgagcctgggcccggccgacgtgctggccgccgggctggtgtgccgccaatggcaggccgtgtcgcgggacgagttcctgtggagggagcagttctaccgctactaccaggtggcccgcgacgtgccccgacacccagcggccatgtcctggtacgaggagttccagcggctgtatgacacggtgccctgcgtggaggtgcagacgctgcgggaacacacagaccaggtcctgcacctcagcttctcccattccgggtaccagttcgcgtcctgctccaaggactgcactgtgaagatctggagcaacgacctgaccatctcgctgctgcacagcgcggacatgcggccctacaactggagctacacccagttctcccagttcaacaaggacgactcgctactgctggcctcgggggtgttcctggggccgcacaactcctcatccggcgagattgctgtcatcagcctaggtgagcacgggcggcgggttgaccctgcccccgccccacgccgacagcctgtccagccccggcctccccacactccttcgcgctgctgtcccgcgtgcggaacaagccctatgacgtgtttggctgttggctcaccgagaccagcctcatctcggggaacctgcaccgcatcggagatatcacctcctgctcggtgctgtggctcaacaatgccttccaggatgtggagtcagagaacgtcaacgtggtgaagcggctgttcaagatccagaacctcaatgccagcaccgtccgcacggtgatggtggccgactgcagccgcttcgacagccctgacctgctgctggaagccggtgacccggccacgtccccctgccgcatctttgacctgggcagcgacaacgaggaggtggtggctggcccggcccccgcccacgccaaggagggcttgcggcactttctggaccgcgtgctggaggggcgggcgcagccacagctgtcggagcgcatgctagagaccaaggtggccgagctgctggcccagggccacaccaagccacccgagcgcagtgccacaggcgccaagagcaagtacctcatcttcaccactggctgcctcacctactccccacaccagatcggcatcaagcagatcctgccacaccagatgaccacggcagggcccgtgctgggtgagggccggggctccgatgccttcttcgacgcgctggaccacgtcatagacatacacggacacatcatcggcatgggcctgtcgcccgacaacaggtacctgtacgtgaacagccgcgcctggcccaacggtgcggtggtggccgaccccatgcagccgccaccaatcgcggaggagattgacctgctggtgttcgacctcaagaccatgcgggaggtgaggcgggctctgcgtgcgcaccgcgcctacacgcccaacgacgagtgcttcttcatcttcctggacgtcagcagggacttcgtggccagcggggcggaggaccggcacggctacatctgggaccgccactacaacatctgtctggccaggctgcggcacgaggatgtggtcaactcagtggtcttcagtccccaggagcaggagctgctgctcacggccagcgacgacgccaccatcaaagcctggcgctccccacgcaccatgcgcgtcctccaggcacctcgcccacggcctcgcaccttcttctcctggcttgccagccagaggcgctgaggtgtgctgggtgcactggagccaccgggaccccttgaggacatcgccaggctctgtggctttttcccgagcgggagaggtggagatgcttatagcagttacgccttaggaaggggacaaccaggccccgccacacgctcacacacaaacctgctcacgcagctgtgatgcttggcacggggtggccagtgcagatggagcccaaggccccctcggcctcctgggcaacttggggtacacaggatactgggggtgccgctcctcactcaaccccaggctaggggtacacctgacccagctggcctcggcccggggcaccttcggctggtcctgtggggccctggacggtggcccagtggtggcaggggctgctcctggctgtggttgtgcgcccggggcttgggagcggccggtcacgctgctgtgggcccgagtgtgttgcatgtccacgcaccacccgttcagggccctgaataaacagttggcaacagca

SEQ ID NO: 66618 - DNA, 2606 bp, Homo sapiens
  misc_feature (16)..(16): n is a, c, g, or t
  misc_feature (24)..(24): n is a, c, g, or t
ttcagtctgtaccccngggcgtantttatatcgtcgatccacgcctcggtagtgacgggggctggcgcatacgttactgagattgcgtgccgatgggccgcctgggcagaatgtcacgatggacgagggcggcacgcccctgctccccgacagcctggtctaccagatcttcctgagcctgggcccggccgacgtgctggccgccgggctggtgtgccgccaatggcaggccgtgtcgcgggacgagttcctgtggagggagcagttctaccgctactaccaggtggcccgcgacgtgccccgacacccagcggccatgtcctggtacgaggagttccagcggctgtatgacacggtgccctgcgtggaggtgcagacgctgcgggaacacacagaccaggtcctgcacctcagcttctcccattccgggtaccagttcgcgtcctgctccaaggactgcactgtgaagatctggagcaacgacctgaccatctcgctgctgcacagcgcggacatgcggccctacaactggagctacacccagttctcccagttcaacaaggacgactcgctactgctggcctcgggggtgttcctggggccgcacaactcctcatccggcgagattgctgtcatcagcctagactccttcgcgctgctgtcccgcgtgcggaacaagccctatgacgtgtttggctgttggctcaccgagaccagcctcatctcggggaacctgcaccgcatcggagatatcacctcctgctcggtgctgtggctcaacaatgccttccaggatgtggagtcagagaacgtcaacgtggtgaagcggctgttcaagatccagaacctcaatgccagcaccgtccgcacggtgatggtggccgactgcagccgcttcgacagccctgacctgctgctggaagccggtgacccggccacgtccccctgccgcatctttgacctgggcagcgacaacgaggaggtggtggctggcccggcccccgcccacgccaaggagggcttgcggcactttctggaccgcgtgctggaggggcgggcgcagccacagctgtcggagcgcatgctagagaccaaggtggccgagctgctggcccagggccacaccaagccacccgagcgcagtgccacaggcgccaagagcaagtacctcatcttcaccactggctgcctcacctactccccacaccagatcggcatcaagcagatcctgccacaccagatgaccacggcagggcccgtgctgggtgagggccggggctccgatgccttcttcgacgcgctggaccacgtcatagacatacacggacacatcatcggcatgggcctgtcgcccgacaacaggtacctgtacgtgaacagccgcgcctggcccaacggtgcggtggtggccgaccccatgcagccgccaccaatcgcggaggagattgacctgctggtgttcgacctcaagaccatgcgggaggtgaggcgggctctgcgtgcgcaccgcgcctacacgcccaacgacgagtgcttcttcatcttcctggacgtcagcagggacttcgtggccaggctgcggcacgaggatgtggtcaactcagtggtcttcagtccccaggagcaggagctgctgctcacggccagcgacgacgccaccatcaaagcctggcgctccccacgcaccatgcgcgtcctccaggcacctcgcccacggcctcgcaccttcttctcctggcttgccagccagaggcgctgaggtgtgctgggtgcactggagccaccgggaccccttgaggacatcgccaggctctgtggctttttcccgagcgggagaggtggagatgcttatagcagttacgccttaggaaggggacaaccaggccccgccacacgctcacacacaaacctgctcacgcagctgtgatgcttggcacggggtggccagtgcagatggagcccaaggccccctcggcctcctgggcaacttggggtacacaggatactgggggtgccgctcctcactcaaccccaggctaggggtacacctgacccagctggcctcggcccggggcaccttcggctggtcctgtggggccctggacggtggcccagtggtggcaggggctgctcctggctgtggttgtgcgcccggggcttgggagcggccggtcacgctgctgtgggcccgagtgtgttgcatgtccacgcaccacccgttcagggccctgaataaacagttggcaacagcaaaaaaaaaaaacacacaaacacaacaacaaaacggacagaccgcccaagaatataccaaagagggcaccacaaaaagggaacccagctacaggacacaaggtgccccaacagaaacacaaaaaaacaaggcccgaccaccgcatacaacacacccacacgggcaacatgcgcacacgggaacaccacggcgaaggaaaccccacatcagcaggacggcacacacagtgcgaacacaacacaaggcacacaaccgccccaggaaacacaaacccacaggcgcaaacaggcacaaggcgcaaacactgacagcaacaaacgcccacgcaacaaccaccaacactacgaaccaaaag

SEQ ID NO: 66619 - DNA, 2279 bp, Homo sapiens
  misc_feature (16)..(16): n is a, c, g, or t
  misc_feature (24)..(24): n is a, c, g, or t
ttcagtctgtaccccngggcgtantttatatcgtcgatccacgcctcggtagtgacgggggctggcgcatacgttactgagattgcgtgccgatgggccgcctgggcagaatgtcacgatggacgagggcggcacgcccctgctccccgacagcctggtctaccagatcttcctgagcctgggcccggccgacgtgctggccgccgggctggtgtgccgccaatggcaggccgtgtcgcgggacgagttcctgtggagggagcagttctaccgctactaccaggtggcccgcgacgtgccccgacacccagcggccatgtcctggtacgaggagttccagcggctgtatgacacggtgccctgcgtggaggtgcagacgctgcgggaacacacagaccaggtcctgcacctcagcttctcccattccgggtaccagttcgcgtcctgctccaaggactgcactgtgaagatctggagcaacgacctgaccatctcgctgctgcacagcgcggacatgcggccctacaactggagctacacccagttctcccagttcaacaaggacgactcgctactgctggcctcgggggtgttcctggggccgcacaactcctcatccggcgagattgctgtcatcagcctagactccttcgcgctgctgtcccgcgtgcggaacaagccctatgacgtgtttggctgttggctcaccgagaccagcctcatctcggggaacctgcaccgcatcggagatatcacctcctgctcggtgctgtggctcaacaatgccttccaggatgtggagtcagagaacgtcaacgtggtgaagcggctgttcaagatccagaacctcaatgccagcaccgtccgcacggtgatggtggccgactgcagccgcttcgacagccctgacctgctgctggaagccggtgacccggccacgtccccctgccgcatctttgacctgggcagcgacaacgaggaggtggtggctggcccggcccccgcccacgccaaggagggcttgcggcactttctggaccgcgtgctggaggggcgggcgcagccacagctgtcggagcgcatgctagagaccaagccacccgagcgcagtgccacaggcgccaagagcaagtacctcatcttcaccactggctgcctcacctactccccacaccagatcggcatcaagcagatcctgccacaccagatgaccacggcagggcccgtgctgggtgagggccggggctccgatgccttcttcgacgcgctggaccacgtcatagacatacacggacacatcatcggcatgggcctgtcgcccgacaacaggtacctgtacgtgaacagccgcgcctggcccaacggtgcggtggtggccgaccccatgcagccgccaccaatcgcggaggagattgacctgctggtgttcgacctcaagaccatgcgggaggtgaggcgggctctgcgtgcgcaccgcgcctacacgcccaacgacgagtgcttcttcatcttcctggacgtcagcagggacttcgtggccagcggggcggaggaccggcacggctacatctgggaccgccactacaacatctgtctggccaggctgcggcacgaggatgtggtcaactcagtggtcttcagtccccaggagcaggagctgctgctcacggccagcgacgacgccaccatcaaagcctggcgctccccacgcaccatgcgcgtcctccaggcacctcgcccacggcctcgcaccttcttctcctggcttgccagccagaggcgctgaggtgtgctgggtgcactggagccaccgggaccccttgaggacatcgccaggctctgtggctttttcccgagcgggagaggtggagatgcttatagcagttacgccttaggaaggggacaaccaggccccgccacacgctcacacacaaacctgctcacgcagctgtgatgcttggcacggggtggccagtgcagatggagcccaaggccccctcggcctcctgggcaacttggggtacacaggatactgggggtgccgctcctcactcaaccccaggctaggggtacacctgacccagctggcctcggcccggggcaccttcggctggtcctgtggggccctggacggtggcccagtggtggcaggggctgctcctggctgtggttgtgcgcccggggcttgggagcggccggtcacgctgctgtgggcccgagtgtgttgcatgtccacgcaccacccgttcagggccctgaataaacagttggcaacagca

SEQ ID NO: 66620 - DNA, 537 bp, Homo sapiens
tggcctcaggtgatcctcctgcctcagcttcccaaggtgctgggattatatgcatgagccactgcacccagcttgagcagtaattcttaataaaaatgcatcattctttacaatcttcactgaaataaaccaataaaaagcagcttagattttttaaaaattagaaataagtctcaatacttgaccacatgaggattctcatgcaagtagggtacactgtcgcttctgtagggctggagaatggttttccaggggaggtccctgagctggagaaatgtgatttatttttacttacatgtgatatgagagggagaaaacgtaatactcattctgtaccatggagctgaagtgcctattatgtccctttcattaactggggcaatgttactgcatatatattactaattggagactatacctcaatgtcaacaactttagaaaagtggttttatattcaaaccctattcactatccttataatctatgctgtatctctaatgtatcttgcaaataagattatcttaaaattaagtccct

SEQ ID NO: 66621 - DNA, 1270 bp, Homo sapiens
caagattaaagacagagcgcatgagcagagtactgatggtgtgcgtgtttgtgtgtgtgtatatgtgtgtgtataagagagaaagagaaatcgaaaagagagagaaatttcaacttgttttcttttaccagagaatccaagaagcagtttaaggaacctgatattggagtttaatctagaaactggatgatctcatattgattcatgatgcttaatctttcattgaaactccacaattaaaataacaaatagagaaagaaaactaactttcctaaatatggcaaagaaactaacacctcatttatttttatttctttgtaaaaatataaatatctcaatcaaaagtacaggctcatttgtaattatgtactcatgattgtaacagcattgagatttcatataggcacatgtatagcagctgtttgacagtgatggctcttccatgtaacatagcagttatcgtgtaatttagtgccacttattgcaaagtgttaccaaggggaacatttcaaatgccttttgtttttctttggacatcaaggtaatttagtggacaacaaatattaaattttacattatgctttttaattgtggagaaaatgcaaaacctcatgtcttaccacaactttcccatggtattgctaattacttagagtctctaaaattgcccaatattatttccctttgcaaatggtaatttctgataaaacaatacaaaacaaaaaaaaagcagtaatcacagccaaataaatgaaacacctaatgagaattactgttgagtaatgctttttattaagtggcacaaagtacacactaaaaactatgcaaaatataggtaactacagtgtacgtacatgtaagtatcttgtacttgctgtgtatggatgttggaaacccatgtaattataatatgcattttgaatattgggaaagaggaaatcttagtgtagataatagaatttgttttgaaatatacactggcaatattgaaatatactcagtgcaatatctgcagttctattgctggatacttaatgcaaagggattttaaagaattcttcagcaagatccaagaggttgctaatcttcacctctcacatactaaagcattcattaaaaatacaactaattcaaggacaagttaagtttttcttattaatgtgacacagtaacatttttatttggattagtttttggtgttattgcagagaaagaaataacctgagttttaaatttcgattcatatctcattgaattgggaattcttcaa

SEQ ID NO: 66622 - DNA, 469 bp, Homo sapiens
gcaagctgactcctagcacatccaagaatgcaattaactgataagatactgtggcaagctatatccgcagttcccaggaattcgtccgattgataaacgcccaaagccccggatctatcaccttgtaatagtcttaaagcccctgcacctggaactgtttactttcctgtaaccatttgtccttttaactttttgactactttacttccgtaaaattgttttaactagaccccccctccccttcctaaaccaaggtataaaagttaatcaagccccttccttggggccgagagaattttgagcattagccgtctctaggtcgccggctaataaaagactcttaatttgtctcaaagtgtggcgtttttctaactcgcttgggtacaacaaggccaaggtggaaggatcacttgaagctaggagtttgagcaacctgtgcaacctagtgagacccccatctttttaatag

SEQ ID NO: 66623 - DNA, 317 bp, Homo sapiens
atagctgcaaaataataataataataataaaatacttaggaatatacctaaccaagtaggcgaaagacctctacaaggaaaacaacaaaacactgctgaaagaaatcatagatgactcaaacaaatggaaacacatcccatgctcatgaatgggtagaatcagcatcgtgaaaaaattgtagactgcaaaaagcgatctacaaattaaatgcaattctcatcaaaataccaccattattgttcacagaactagagaaaacaatcctaaaattcatatgaaatcaaacaagagcctgcatagccaaagtaatactaag

SEQ ID NO: 66624 - DNA, 444 bp, Homo sapiens
cttttttcagtgtacttctgtcaccttctggtccccagagacaaagtagaagccatcaaagcctccactaatacaggcaggaggacagaggttgatgctaacaccgtgtgaatgtatggataactttatcatatttacatgtgagtgattatgtatcccttttgcttttcagtgtcttctcggaaaaaagcagccttgaaggctacaagtgatgagaaagattctttttcaaatataaccagagaaagaaaggatggagaaacatctaggacaggtaactttgcaaaacacatttaatgtcatgttcagtccagataagaagttctcttccccgaataaatcagtggggggctggtcgaaactgcacattctgattcagtaggcctgagattcttcatttctaataagttcttgggttatgctgatgctgctggtctggaacat

SEQ ID NO: 66625 - DNA, 534 bp, Homo sapiens
cttttttcagtgtacttctgtcaccttctggtccccagagacaaagtagaagccatcaaagcctccactaatacaggcaggaggacagaggttgatgctaacaccgtgtgaatgtatggataactttatcatatttacatgtgagtgattatgtatcccttttgcttttcagtgtcttctcggaaaaaagcagccttgaaggtaataaaactctcatttatattgtgagctagtaaatgtaaagcctatgaaacataccttatttattattttgtttcaaattccattcaggctacaagtgatgagaaagattctttttcaaatataaccagagaaagaaaggatggagaaacatctaggacaggtaactttgcaaaacacatttaatgtcatgttcagtccagataagaagttctcttccccgaataaatcagtggggggctggtcgaaactgcacattctgattcagtaggcctgagattcttcatttctaataagttcttgggttatgctgatgctgctggtctggaacat

SEQ ID NO: 66626 - DNA, 251 bp, Homo sapiens
gttccagtcacagatgtttcattatcactattcaatattattaagcatctaataagtataaggatgcatgagtcaagggtccctaccttcaggtcggaagcaggaaagagaccagatcctagaacaataggacatggtacccgctgcctagacggaatttagaatccggctggggtgaagagattaatgagcgagtcatgccatcaatgtgctgtaactgagtcctaaaaccaccagccgcgacacaaact

SEQ ID NO: 66627 - DNA, 560 bp, Homo sapiens
ataaatagaaaataagttataaatagaaaataataactgccaaattgacatataagacatccggtggtactaagtgataaaaaatgaagaaaggagagtgggggtagggaattgggggtagggactacagagttgtagtcagatgtgctatttggtatagggtggtcaggctaacctcactgaagaggtgacctgcatgcagaggggagaaaatgaggctgatattcagtgaaggaacacaaaatgcagagtggaacacccagtaacacacctatagctgatttctttgccttctctatcctgggtttcttattttgtgtattacaccttgtaagaccctcccacttcaaatgcaggggcaactgatgacttcacaaagatagtggtggttactgtggacatttggtggataatctgtttcttatatgggatacgttcccaacataatcccctaggccactcttgttacaaaatttaaaaaaaaaaacaattttttaaagtcctttgagtttctaatatgccatggatagatatgttttcaattattgcatttggagttc

SEQ ID NO: 66628 - DNA, 511 bp, Homo sapiens
atgatgtgttgtaaaacaccaaatagacccgggctcataataggagttcagacagtgcgattttcctccctcctcctttcatggtggtctttaacttgtatttattctgaagtttgttaaggctgttgggaactcagaacacatttactcataaaaaccagtagccctgggctttgtgaggtctgacccccaacccctgcctaactcaccatccccattctcttcccatcaccctcattcagggacttgactttcaagacatggtgggttcttctgctgtcttccaaatacccccttgggttccccacccataagcttttgctccttcaccccagaatctcagacctttgcttagaactgtccatcaaatcaatatccaggtgaaatccaaattctagctcctccatctcccagtgttatgcagaactgctttctttctcgtctgaattcttattctactttatctgaccgagtagtaatatgagctttataataaaaatcacaacatatt

SEQ ID NO: 66629 - DNA, 340 bp, Homo sapiens
gaactccatttttctcagattgaaacatacatgcttatgtacaaacttcatagatgtagctttaaggtattgatggattttaaacagccttccaataaagcaacagtacccagacttgtatagcaacccaatatgtataattttaaatatgatagcactttcatgtcagagtaagttccatttagaatgtcagtcttattatatgtaattgatcttatgtttgtttatttcctcaactgtctgtatcttacctccttgtaattgcttacatagccaagaagccgatcattcagtttataagtgttaagaattaataaaaggatacttgtttccaaggact

SEQ ID NO: 66630 - DNA, 744 bp, Homo sapiens
acattgagtcagtcatgccagtgttagcttttgaaacatgaacactgcccgcacctgactggcatgcaactgacattttctttcacaattttctgctacttttgctaaaaataataatatccatgtcttgcttttaggcctaagatttttatagcatatgtgggaatatatgattgtttttctagatgtgtagaggaagatagtcttgaatgcagtgtgatattaaaggatcccatttaagatttttgtaatatgcttcaaagacctgtgggttgcaaagttaccacttttgagggcacatgctccatgaagcaccttatgtgacaatttacaattattgttttgttttgtcactctgtagaaacctcaaatgaaggtgtagttgggctcaagcatccagattatcttttctcttcttattttttcttcttttcccaagatggagtcttgctctgtcacccaggttggagtgcagtggcatgaccttggctcactgcaacctccgcctcctgggttcaagcaattctcttgtttcagcctcccgagtagttgggattacaggcacctgccaccacacacggctaatttttgtatttttagtagagagagtgtttcatcatgtcggccaggctggtctagaactcctgattttgtgatctgccagtctcggcctcccaaagtgctgggattacaggtgtgagcgatcgtgcccagcctgtcttgtcttttcaaaaccatccttgg

SEQ ID NO: 66631 - DNA, 294 bp, Homo sapiens
cggaggtgcgtttcctgcgtcctcccgagtggggttccctgaggtcacctgtcctgagggtggtgctcatgtggcctgggccacgcccccgttgggctggctttgtcacaggaggctggtctctggggtcaggaacagctgttttgggatcagattgcgctgagtcaccaggcggccaggctcaccagacctgtgggcctcaggccttgcaccttaagtgtgagcttattccgtgagagggttgcgcagaaagcacgctgtacaatccgaggcctcttgataccaggtttcgcc

SEQ ID NO: 66632 - DNA, 2477 bp, Homo sapiens
gctgaagtaccggtcagccagcctcctgctgcagagccagtgaactcaggtcgggcttctcagctgcgcacataggcagtactcatcttggccctgggaagaaactcaagaagaagcttttgaaacataaagcttggatggggtttgacctctgcagggcagcgcccagctataggagttcccctgctgagcagagaagatgactgcagaattgagagaagccatggccctagccccatggggcccagtgaaggtgaaaaaggaggaggaagaagaagaaaacttcccaggtcaggcatccagccaacaagtgcactccgagaacatcaaagtctgggccccagtgcagggtcttcagacaggccttgatggatcagaagaggaagaaaaggtgctgaaaccaagaacctacagttactggttccaaaaactgagatatgtgaggaagctgaaaaacccctcatcatatcagaaagaatccagaaagctgatcctcaaggacctgagttaggagaagcttgtgaaaagggaaacatgttaaagaggcagagaataaagagagaaaagaaagatttcagacaagtgatagtgaatgactgtcacttacctgaaagcttcaaagaagaggaaaaccagaaatgtaagaaatctggaggaaaatatagccttaattctggcgctgttaaaaatccaaaaacccagcttggacaaaagccttttacgtgtagcgtgtgtgggaaaggatttagtcagagtgcaaacctcgttgtgcatcagcgaatccacactggagagaaaccctttgaatgtcatgagtgtgggaaggccttcattcagagtgcaaacctcgttgtgcatcagagaatccacactggacagaaaccttatgtttgctcaaaatgtgggaaagccttcactcagagttcaaatctgactgtacatcaaaaaatccactccttagaaaaaacttttaagtgcaatgaatgtgagaaagcctttagttacagctcacaacttgctcggcaccagaaagtccacattacggaaaaatgctatgaatgtaatgaatgtgggaaaacatttactaggagctcaaacctcattgtccaccagaggatccacactggggagaagccctttgcctgtaacgactgtggcaaagcctttacccagagtgcaaatcttattgtacatcagcgaagccatactggtgagaagccatatgagtgtaaagagtgtgggaaagcctttagttgtttttcacaccttattgtgcaccagagaattcacactgcagagaaaccttacgactgcagcgaatgtgggaaagccttcagtcagctctcttgccttattgtccaccagagaattcacagtggagatcttccttacgtgtgtaatgaatgtgggaaggccttcacatgtagctcatacctacttattcatcagagaattcataatggagaaaaaccttacacatgtaatgagtgtgggaaggccttcagacagaggtcgagcctcaccgtgcaccagagaacccacactggggagaagccctatgaatgtgagaagtgtggtgcagctttcatttccaactcacacctcatgcgacaccatagaacccatcttgttgaataacaagtaaggaagaggaagacctccagcattggtcataaccttctgcctccctaatgagacacctctttgctgttttcttcctcctctataaaagtgagggctgtgtccttaaaagttatagttttcaggaatgcagcagaagacacaagaaaagcatttcagaggctaatttaaaacaaaaagtaagcacctaaaggcaaggactttgttttaactgtaccttaagcggtcatgttctctgaagtggaatgtggctttcctaggaatgggtcgtacaaagctaagtggtaatgatgctatttggggaaaggtcttttttgcttaattttgttttttaaaactctgatgattgcttgagcaacaggcaggttatctgcctggttgaattctggttgaaccgtgtattctaatatttctggttaagtggtgactgggtaaggaaaccacttggggtagcagttcaacaattcacttacgaatgtttataagctttccatttcctaggtaattttttaaaagccagtcaaaacaaaaactttactgaaaatggacagaaataggaaatggactttttccttactgtctatacctcctgaaccttggtattgtaaagatctggggacctctgggtctgttctgaccattccctagtctccatggccaagcactcaaggattgatggacaccacacaccagctatattcatttgccaagatcaacagctccttctccaaacaactcaagcccccaattcccatcgcattccatttgggtgagatgcaactaacagccccttcctggatgaaggagtcaaagaataaagcttgcctagaggcatg

SEQ ID NO: 66633 - DNA, 2622 bp, Homo sapiens
gctgaagtaccggtcagccagcctcctgctgcagagccagtgaactcaggtcgggcttctcagctgcgcacataggcagtactcatcttggccctgggaagaaactcaagaagaagcttttgaaacataaagcttggatggggtttgacctctgcagggcagcgcccagctataggagttcccctgctgagcagagaagatgactgcagaattgagagaagccatggccctagccccatggggcccagtgaaggtgaaaaaggaggaggaagaagaagaaaacttcccaggtcaggcatccagccaacaagtgcactccgagaacatcaaagtctgggccccagtgcagggtcttcagacaggccttgatggatcagaagaggaagaaaagggtcagaacatatcctgggatatggcggtagtcctgaaagcaactcaggaggcacctgctgcttcaacccttggcagctactcattaccagggactctggccaagagtgagatactggagactcatgggaccatgaactttctaggtgctgaaaccaagaacctacagttactggttccaaaaactgagatatgtgaggaagctgaaaaacccctcatcatatcagaaagaatccagaaagctgatcctcaaggacctgagttaggagaagcttgtgaaaagggaaacatgttaaagaggcagagaataaagagagaaaagaaagatttcagacaagtgatagtgaatgactgtcacttacctgaaagcttcaaagaagaggaaaaccagaaatgtaagaaatctggaggaaaatatagccttaattctggcgctgttaaaaatccaaaaacccagcttggacaaaagccttttacgtgtagcgtgtgtgggaaaggatttagtcagagtgcaaacctcgttgtgcatcagcgaatccacactggagagaaaccctttgaatgtcatgagtgtgggaaggccttcattcagagtgcaaacctcgttgtgcatcagagaatccacactggacagaaaccttatgtttgctcaaaatgtgggaaagccttcactcagagttcaaatctgactgtacatcaaaaaatccactccttagaaaaaacttttaagtgcaatgaatgtgagaaagcctttagttacagctcacaacttgctcggcaccagaaagtccacattacggaaaaatgctatgaatgtaatgaatgtgggaaaacatttactaggagctcaaacctcattgtccaccagaggatccacactggggagaagccctttgcctgtaacgactgtggcaaagcctttacccagagtgcaaatcttattgtacatcagcgaagccatactggtgagaagccatatgagtgtaaagagtgtgggaaagcctttagttgtttttcacaccttattgtgcaccagagaattcacactgcagagaaaccttacgactgcagcgaatgtgggaaagccttcagtcagctctcttgccttattgtccaccagagaattcacagtggagatcttccttacgtgtgtaatgaatgtgggaaggccttcacatgtagctcatacctacttattcatcagagaattcataatggagaaaaaccttacacatgtaatgagtgtgggaaggccttcagacagaggtcgagcctcaccgtgcaccagagaacccacactggggagaagccctatgaatgtgagaagtgtggtgcagctttcatttccaactcacacctcatgcgacaccatagaacccatcttgttgaataacaagtaaggaagaggaagacctccagcattggtcataaccttctgcctccctaatgagacacctctttgctgttttcttcctcctctataaaagtgagggctgtgtccttaaaagttatagttttcaggaatgcagcagaagacacaagaaaagcatttcagaggctaatttaaaacaaaaagtaagcacctaaaggcaaggactttgttttaactgtaccttaagcggtcatgttctctgaagtggaatgtggctttcctaggaatgggtcgtacaaagctaagtggtaatgatgctatttggggaaaggtcttttttgcttaattttgttttttaaaactctgatgattgcttgagcaacaggcaggttatctgcctggttgaattctggttgaaccgtgtattctaatatttctggttaagtggtgactgggtaaggaaaccacttggggtagcagttcaacaattcacttacgaatgtttataagctttccatttcctaggtaattttttaaaagccagtcaaaacaaaaactttactgaaaatggacagaaataggaaatggactttttccttactgtctatacctcctgaaccttggtattgtaaagatctggggacctctgggtctgttctgaccattccctagtctccatggccaagcactcaaggattgatggacaccacacaccagctatattcatttgccaagatcaacagctccttctccaaacaactcaagcccccaattcccatcgcattccatttgggtgagatgcaactaacagccccttcctggatgaaggagtcaaagaataaagcttgcctagaggcatg

SEQ ID NO: 66634 - DNA, 2539 bp, Homo sapiens
gctgaagtaccggtcagccagcctcctgctgcagagccagtgaactcaggtcgggcttctcagctgcgcacataggcagtactcatcttggccctgggaagaaactcaagaagaagcttttgaaacataaagcttggatggggtttgacctctgcagggcagcgcccagctataggagttcccctgctgagcagagaagatgactgcagaattgagagaagccatggccctagccccatggggcccagtgaaggtgaaaaaggaggaggaagaagaagaaaacttcccaggtcaggcatccagccaacaagtgcactccgagaacatcaaagtctgggccccagtgcagggtcttcagacaggccttgatggatcagaagaggaagaaaagggtcagaacatatcctgggatatggcggtagtcctgaaagcaactcaggaggcacctgctgcttcaacccttggcagctactcattaccagggactctggccaagagtgagatactggagactcatgggaccatgaactttctaggtgctgaaaccaagaacctacagttactggttccaaaaactgagatatgtgaggaagctgaaaaacccctcatcatatcagaaagaatccagaaagctgatcctcaaggacctgagttaggagaagcttgtgaaaagggaaacatgttaaagaggcagagaataaagagagaaaagaaagatttcagacaagtgatagtgaatgactgtcacttacctgaaagcttcaaagaagaggaaaaccagaaatgtaagaaatctggaggaaaatatagccttaattctggcgctgttaaaaatccaaaaacccagcttggacaaaagccttttacgtgtagcgtgtgtgggaaaggatttagtcagagtgcaaacctcgttgtgcatcagcgaatccacactggagagaaaccctttgaatgtcatgagtgtgggaaggccttcattcagagtgcaaacctcgttgtgcatcagagaatccacactggacagaaaccttatgtttgctcaaaatgtgggaaagccttcactcagagttcaaatctgactgtacatcaaaaaatccactccttagaaaaaacttttaagtgcaatgaatgtgagaaagcctttagttacagctcacaacttgctcggcaccagaaagtccacattacggaaaaatgctatgaatgtaatgaatgtgggaaaacatttactaggagctcaaacctcattgtccaccagaggatccacactggggagaagccctttgcctgtaacgactgtggcaaagcctttacccagagtgcaaatcttattgtacatcagcgaagccatactggtgagaagccatatgagtgtaaagagtgtgggaaagcctttagttgtttttcacaccttattgtgcaccagagaattcacaagtggagatcttccttacgtgtgtaatgaatgtgggaaggccttcacatgtagctcatacctacttattcatcagagaattcataatggagaaaaaccttacacatgtaatgagtgtgggaaggccttcagacagaggtcgagcctcaccgtgcaccagagaacccacactggggagaagccctatgaatgtgagaagtgtggtgcagctttcatttccaactcacacctcatgcgacaccatagaacccatcttgttgaataacaagtaaggaagaggaagacctccagcattggtcataaccttctgcctccctaatgagacacctctttgctgttttcttcctcctctataaaagtgagggctgtgtccttaaaagttatagttttcaggaatgcagcagaagacacaagaaaagcatttcagaggctaatttaaaacaaaaagtaagcacctaaaggcaaggactttgttttaactgtaccttaagcggtcatgttctctgaagtggaatgtggctttcctaggaatgggtcgtacaaagctaagtggtaatgatgctatttggggaaaggtcttttttgcttaattttgttttttaaaactctgatgattgcttgagcaacaggcaggttatctgcctggttgaattctggttgaaccgtgtattctaatatttctggttaagtggtgactgggtaaggaaaccacttggggtagcagttcaacaattcacttacgaatgtttataagctttccatttcctaggtaattttttaaaagccagtcaaaacaaaaactttactgaaaatggacagaaataggaaatggactttttccttactgtctatacctcctgaaccttggtattgtaaagatctggggacctctgggtctgttctgaccattccctagtctccatggccaagcactcaaggattgatggacaccacacaccagctatattcatttgccaagatcaacagctccttctccaaacaactcaagcccccaattcccatcgcattccatttgggtgagatgcaactaacagccccttcctggatgaaggagtcaaagaataaagcttgcctagaggcatg

SEQ ID NO: 66635 - DNA, 3171 bp, Homo sapiens
  misc_feature (314)..(314): n is a, c, g, or t
  misc_feature (2402)..(2402): n is a, c, g, or t
ccttgggcagtatggccattttcacgatattgattattcctatccatgagcatggaatgttcttccatttgtgtcctcttttatttcgttgagcagtggtttgtacttctccttgaagagttccttcacatcccttgtaaggtggattcctaggtattttattctctttgaagcaattgtgaatgggagttcactcatgatttggctctctgtttgtctgttattggtgtataagaatgcttgtgatttttgcacattgattttgtatcctgagattttgctgaagttgcttatcagcttaaggagattttggnctgagaagatggggtttcctagatatacaatcatgtcatctgcaaacagggacaatttgacttcctctttttctagttgaatacactttattcttatagctgtgtagtggtatctcattctgcttttaatttgcatttcctggtgattaatgatgttgaataacatgcttacttgttattatatctttggtgaagaagtttggtgaacttggtgaagtttctgtttgtatcttttgcccatatcattcatatatatatatatacacacacacacacacatacacatatatatatacatatatatatgacaaaagtcagatatttaatttgcgaataatttctcccagtatgtgacacatctttcctttttaaaacattttgttactgaaatgccaggggtttgatctagatctcattgtttacagcacagaaagccaatcactggaacaaagagtactgccagggaagaaggctttatttgggtgctgcagctgtggagatgggagatagtctcaaattgtctcactaactgactaaaattggagatttaaataccagggaaagaatgtagaaaacaggaattagggaggagtaaggaagaggaatctggtctctcactgtctggatgcggtgatctggtgagtttcagttcctttatactctctgggaggcccgagcgtcagttttctaagaaaggaactcagataagataaatataagtttcaggcttaagaccaagagggccaatttctgtttatttaaaaagaccataaacatcagttctgtgaggaaattgggctggtttcaattttcttcataatgtctttgaagtcaaaagttttgatgaagtctaatcttactaattttttcttttatgttttgtgtgatatctaaaaacctttggcctaacacaaggtaacaagattttcctcaatgtttctttctcagactttcatagctttgggtttcacatgtaggtctttgatgagttttgagttaatttttatgtatgacgtcaggcaagagttgaggtgtttttttttcataaggctgaatgttccaaccccatttgttaaagagactctcctccctccacttaccttggcacctttgtcaaaaatcagttgaccatgtatgtgtgaatacatgtttctgatttatcaatgtaacagaatattccagaaaaatatgaataatttttgtttctcaaatgaactaccagtcattttaacagcataaaatcgatttcttgataactttacagtgaattttgaaatctggtagtttgagtccttctactttgttcttatttttcaaaattgaattggcaacattggttcctttacctttccatacaaactttagaattaaaggttaacatctccaaaaatatctgctggcattttgattagatttcattggagtatagattaatttggggagaattggcatcttagcaatactgaatcttccaatttatgaacatggtatacctcctttgatttagtcctctttaatttctctcaatgatgttttataatttttaacatgcaacttttgcacatgttttgttagctctgtttttattttctgttttttgatgctattgtatatgatactgttttaaaattttcagtttccagttgttcattccttgtttcatacccaatcaaatgttaaacctcattcaaatgtcttggtggggagaactgtgttgtgtttgttgcaagcccctcctccttctttctgaacctcaagttctaagcaccaagagactttagcagatttcactctgtgtttcatcccacaatacctatggccagaatcacccccaaaatgatggcaggagattccccacaagggagtgccccaaactgtccagagatagggccggttgggattccaaaaaaagaaggaaagactaaatgccagagtggtcaatccaaagcatttattggggaaacttacagagtgctgcagcagtcctcaaaatgaacagtaagagaaaacaggtgttctacctaggtatgactgcagtgagggggtcagggtatgagagtttaaggaatttggctcagggccagggcnagtttctttttcagtgttgtgggcagcaacctagatacctttatcagtgcctaggaatgttccaggcccaggtttgggttcaagtctgctacgaaaaacctgcaactggatagatcacagagcagtcaggacacagaaagaaagtagtggggaacggagaaccctacactctttctcattcaacttcagagctctcatgctgttccacttctcagaaaatcacccataggggaatctggccctcgctttttaggttcctgttcgtcttgccagattttacaaccatcacctattctgttggtgcctcctcttaccttaagaatcctctgcctgagccaagctggattgtctccctgtgcctagaattagcaaatgtccccagagaaaaacatgaccagtaacttcaactcattgatgagaggccatttcccttctgaaattttagttcttctagtccattgttaaaagaaaaaccttaggccgggcgcggtggctcacgcctgtaatcccagcactttgggaggccgaggcgggcggatcacgaggtcaggagatcgagaccatcccggctaaaacggtgaaaccccgtctctactaaaaatacaaaaaattagccgggcgtagtggcgggcgcctgtagtcccagctacttgggaggctgaggcaggagaatggcgtgaacccgggaggcggagcttgcagtgagccgagatcccgccactgcactccagcctgggcgacagagcgagactccgtctcaaaaaaaaaa

SEQ ID NO: 66636 - DNA, 2855 bp, Homo sapiens
  misc_feature (1)..(1): n is a, c, g, or t
  misc_feature (820)..(820): n is a, c, g, or t
ncattttccatgtcgtctttcctggtgcagatgaagggtgctcagcagagcgtgagccaccagggaagccactcgcctactccagttcgaatattggggacttgaggccatcttgtcttttttgtgtgtgtgtggcgtctgatttacaacttcttggtcgggcagctctgtgggttgctgatggtccatgctgtcattcacatcgtccgtggtgtgcactggaagatctccatgctgtgaagcgtgcaggatgtgcttcacatcagtcacttggggaagttcaggaggctgctttttcatgcttttttcagaagctcgcctaggttaggtcctgatcggaagacctgctcatttccattagaaccttcaagcagagtgtttggagcaatcaaggactggccccagcatggataacaggtagctaccactggtgtgggctgctggctgcatcttggcgcaggcctttctgtgggcctcaccttagactgaagccctttgggccagcccttccctccttctcactgcgtgtcgtctcctgaccagagaggccatcacagcggtgcacgcccagctcacccatagtatccctagggtcactggcactggtcccaggattctgtacatcactacttactgctgcccacaggtgggccagcagcagttgaggaggcatttcgtggtgagcagcaggtccttcatggctcttgagggctccacagctcttcctcttttctctactggtatgtgggtcacaactgaccactcagaaccctgcagagtgttccacctctaacacaaacaagggctcgccaaccagggnaaaccatccattatgctgggggaggaaaggcaccgcaaattctagaaaactgtgtccctgattttgctgtgcaaatataaagtgacattacttaacacagtgccttggaagaggggaaagagttcacggcagcccccagctcaggccactgcaggtcccacctggccttacagcatagctagagggtcaaagccagtcaaagccccgtgtccacgcatgatcctctcagggcagcgtgatggcccgtccctggtggggctcattaccctgatttcaagtttccttctgctgcagggaagcctggtcccgcctacaaagagactgtctaccttgctagattgaactataggactatgttttcttcatctctgtaaccccagaagctctccagagacccttatacactagggacatggtcattgcttgtcttgttttcttgttgactctactctgacttagggcacatcgctttcccctctagatctccatattcagatctgtgaatgacagtaagtgggtgaaggcccctctagctttaaaacccctccaatacagagagtacactgaaaccggaagcagaagctgagtgtggtgagtggagcattttccctggcatgatggaggggacctatggatctggctatgagggtggcatctggccacttgaatggctctgcagagctggaccctagttttcaaatcagactcaagaatgatctttagtgtgggtggttttgtggggcatatattttttgagaccttgttattgacacaacagcttctgggaagtctttttgacagagagtatgcacaggtgcgggctccatctgctcggcagccgctgtctggtgacggtgagcgctgagagctggatggtcctgttagaaaggcagcatgccagcctccggtgatgagcagagtgacccgaccttgtctctccttccccatggagcactgcaggctctttccccagacctgcttctaggcttcccttcacccgctcccaccaggcagctgaggccactttaggattccatttttagttgtactttttttttaattgatcattttgtgagcatttttctctctaatgcaacagaactagcacaagtccttaaagatgtaggatctctcagctcccacaaaaacaaagataatggcctatgtaattctctacatatttaaattgttagctctaaaaatagattcagagaaagggtggacacatgttccaattttctcataacagtcctgggttgtgcctgttatcctggcatagttattaatcctgtcccctttcactctcagactctcctggtttggaggataatttcattctattcaaagaggaaatctacaaaaaggtgtcatcatctaacctgtattcatataaacattttccagtctcacggttctgtgtacctctccaaacccctcaatcttctaatcattttgtgtattatttataggaaaagagcaccagctaaaatatcttgcccttggatttcttcagccagctgctgaagtaatttgtcttagtctttactgaagactgaattgtatcattaagactttcttctaagtcctgttattttgactttttgactcactctgtgccctctgatacataaagtagcaataatttgtacaatgagccattgtatttgttcacgagaaattcttcctgttcctcacatttctattcattttcctaaaggtatgtatttgaaaacttgaaaaattgcctggcccggttatagtttaatgggagcatttaaacatacttttcctacaaagcttatcagttagttacttaacctttatgaataggttaaatattttccacagtatttatataaatatgatacttggtttcaagttaaatctaataaaaaggaagttattcttgacttaaattactcccatttcttttcatttgtttttatcttcctcttttttatgaccacttgactaagaaagaaattcacaaggcagatgtggaaatgtcgctttataaatacaagattcagccagt

SEQ ID NO: 66637 - DNA, 334 bp, Homo sapiens
cagctcttaaggggacagcctgggaaaacagacttagggacaatgatcttgagccatgaaatgatgtccaatgccccttgtgccacctgacatcagcctgattaatgaacaaacagaagaggaagcaggggacctgtgtgtccctctctctgcttttctgtctttctccgtgccccctctcttatgtctctcacgctgtctcttgtccttgtttttaactctgacacgccgtgggaactcggctcacttcctagggggaagctgtctggactggcccagagatgggcaccaccatttcccaataaacacaagataaaatcagaaactggcgtca

SEQ ID NO: 66638 - DNA, 358 bp, Homo sapiens
  misc_feature (349)..(349): n is a, c, g, or t
ccccaacacttctgttctcctttgcatcatgtttatggtgtcttatatttatggataatgctacttattaaaactgtctaagttttgtccgtttacacatttcacaattaaaggactactacaacaattttcctaagtcctcctgctttagtttctccttattccagtccattctgcagttaagacttaaaaagttttaaatactgctttcaaataatacttgcaacataattccctcaactccattagctcctcagagtaccatttctttatcttctttccttttactgccaaaaagacgtgaaaaccactagctcagctgctatttttctatctactgaaattttcntgtaaagtt

SEQ ID NO: 66639 - DNA, 399 bp, Homo sapiens
ggaaccacaaagactgctaatagccaaagctagtttgaacaagaagaacaaatctggaggcctcacactttctgatttcaaaatatattacaaagctacagtagtagcataaaaacagatgcataaaccaatgggtagaatagacagcccagaaataagcccacttacatgtggtcagctaagttttaacaagggtgctaagaatacataataggcaaatgatagtctcttcaatcaagtatggagaaaattggatatctacatgcaaaatgatgaaactggaccattttcttgcaccaaaaaatcaactaaaatgggctaaaggcttaattgtaagacctgcaatcataaaactcctagaaaaaagcataagggaaaagcttcttgatattggccttg

SEQ ID NO: 66640 - DNA, 545 bp, Homo sapiens
tacactttctatttaatgcatttgcaaactctatttttaagtattttcacagatattttgcagatatttgcagtgcagtggctctacctgagcttatttttaaatgcacaatttttatcgaccattataaatatatgtaagtatattaatttctaagaatatgcattaacttacaagatttctgtacactccaacattattttctcacagtataagcagactgcaagcaaaatctgaatgggataggttttttttccctctcacatatattaagaagttatccttatcattttcttttaggttagccttgtacaacatcttttaaagtaccatttactatttttagggatacattgaactatgttcctatttttttttctttaaatcaaattacgatccaaatgtacttcattcagaattgtgattggttacttaagcaagcctatgtacttctactatctttttaaaaatcttgatttcctgttgttatactcatatttcccctgtgaactttagacagtgaaataaatgctttgtccttactt

SEQ ID NO: 66641 - DNA, 447 bp, Homo sapiens
cccttgctatcatacccatcactgaatcttaaccaaaaacctaaaggtaataaatctaaggaatatttaaacgtggggtaaaataaatggcaaaaatcgatattgattttaagcctctgaggttaggcactatgcgaggagctgtggacaaatgccatttggttcagcctcatttctcttgagattaccaggtcttcaaagcttgtcaaggcacgtggcatgtcagtgtgtacaaggaacatgaattataaaatcaaggcagaaggttccttccgtcttttataaccttttctgcttttgaattccgaactaactttccatttcatctatagacaggtattttgctagtattaaagcaccacaagacatatcctgtgtagcagtgtggtccaatagaaaatcaagcaagccacatatgtaattttagatgcttttgctttccacatt

SEQ ID NO: 66642 - DNA, 1254 bp, Homo sapiens
atttagcttggaattttcctattggttcctaacaaactgtcccaatgtcatataaggaaacatgatctattacattcctttataacaatgtggagagactataaacctatgtaagtagtaaaactatatcagagactcaggagactgactaaaaggcctggatctgcagtgtattatctgtataaaaattggcagggggaagctaaaaggaaaggagattggagatctcaattctatcatggtgtatttcatacgcaaatcagagcatgcattgttttttgtttttggaaagagaagggaagtgtgttctgccccatgtttccttccgtgtttatagttcaaactctatatatacttcaggtattttttgtttagcccttcattataaatgggcaggaaattgtttatcaacctagccagtttattactagtgaccttgacttcagtatcttgagcattcttttatatttttcttttattatcctgagtctgtaactaaacaattttgtcttcaaatttttatccaatatccattgcaccacaccaaatcaagcttcttgattttcaaaaataaaaagggggaaatacttacaacttgtacatatatattcacagtttttatttataaaaaaaatttacagtacttatggagagccagcagaagacatcagagcactcacttcttcccatctttgttaaggttagcgaattacccatggacactgttaggtgaggctcattcggcagccctgaaaacaaacctggtcacactgtctttaccctctcccttcagataaagcacttcgattatctattgatctgcccagttttcaagtcatgcgaatactaaaaaggttacatcatctggatctgtaccttggctatataagcatgttttccccctattctatgtttctttttttggtgaacattgaaaaacaggaggtgacttattactgttaattaaaactaaatgaaaaatgtcaagtctttaaaacagtgagcttgtaactctttcatgtaattttattctctatgaatttggctatcctactgaatcttaaaataaaggaaataaacacttttttttaaaaaaaaaggaaaaatacaagtctaaaaatctcaatgaaatatttcacaagaaggaaaaatgtaagttagcctttgctttccactttggaataagcaggaggttagggaaggcattgagaagaaaaaagataaaaataatatgtgttgttcagtgcagtgcct

SEQ ID NO: 66643 - DNA, 205 bp, Homo sapiens
ccacagatgttcaagacaatccgttacagtccaaggagaaaatactagaatgtctgtctatatttgcttcctttcaaaatgagaacacaattaggctttcctagtatgtaatgctggattctcatgatgccctccctcagttcagacatgagacagtcagatgtcttatgtgactgcaattgctgtaggtagaccacatctgcaa

SEQ ID NO: 66644 - DNA, 2272 bp, Homo sapiens
  misc_feature (1)..(1): n is a, c, g, or t
  misc_feature (1421)..(1421): n is a, c, g, or t
  misc_feature (1572)..(1572): n is a, c, g, or t
ncttccatgctgtgaaagttttgttcttttgctcttcacaataaaccttgccgctgctcactctttgggtccacactacctttttgagctgtaacactgcgaaggcctgcagcttcactcctgaagtcagcaagaccacgaaaccaccaggaggaacaaacaactctggacgcaccacctttaagagctataacacacactgcaaaggtctgtggcttcactcctgaagttagcaagaccacgaacccaccggaaggaagaaactccagacacatctgaacatctgaaggaacaaactcaggacacaccatctttaagaacggtaacactcaccatgagggtctgtggcttcattcttgaagtcagcaagaccaagaacccactggaaggaaccaattccggacacactagcttaaattaagaaggaatttaaagcctctcaaaaatgaaaagtgtagactggtgacacctacagacatggattgaagcaggagcccatctattcaccgctactttatttttctccatctccagttacaattcccttggttcattcagaagcagattttccttcatggtggcaagatgtctgcaactgctccagaaattgtatttattcttgttgagtccagaaagaaagagagtctagaccagaatttcaagaaaaacttctattgggtctcaaagcatctgatagagccatgcatctacctttaaattaaaaactgaggtcagaggatataaagttccttaactgacttagcctggtaacgtttgtgaaaataagcgattcaaattaaagctgttggaactttcaattattttgagtcttaaagaaaatgtgattgtttctctaattatagattaactttttccttacctactttgttttgtaaaatgttgcaaaagattaaatgacaccagagataagctctcttccctcttacttgttgaccctcattataggttaacttcctccttttttctcttgcacctgacacagatcagatagcacaaagactctatgattatcaagttgctcaagatgaactgttaagtatacctttcccaaaaacgaacaagctgtaactaatcaaattgtaattcataaaccagctttatatgaaaatgttgtaatcctactaaatttctttgtttctacctataaaggtaaaatcctagttctccacttcagaacactgaccccattcatttggagtctgtgtttcctgggcagccatccttaaatttcacacttgagtaaattctttagaactggattctgatcattttgattatttcaggttcacacattcttattgggagtttgaatgagaatggggtggagaagggtacaaaggtccacggactgagaataaggggggaaaaaaagtggttttccagagaggaatcaggaattnttaccaaaaatgagacaatggatgtccagtggtataaaataacatgtccactaaagaggatggcaagtaaataattatcactaatgccatattacataataattttccatatttcactaaatacaatgagtgaggttatcaacatcatgcngtatcatttaatgtccatgtttcaaatgtaaatacaagacatattacataatacgatgtaaaacagtgaagttcacactaaagtcatatataataagatatattttgtgttaaggaaaatcttcattttcctatatcccggatatcattatcaaaaaataatattgatagtggtgttattaaatgtaatatttgggttatctacctattgtagtcccaagctatcaaattttcattttacttctatttctagcaacaaataggaaagtcaatcaatttagatctaatttatgttccataaactgtcttctagcttaaaaaatattaatttaataaatcactaggttttgacttttataaatacaatgagtattatagaatcttcaatttctcatctattttatattgctatggttgaagtagagaaaaggaagaaatctggtgatttgttgtattttggagatctttgcaaagaacaagtcaaatttgactttgagattctagctcaagcatcagattagatgtcaatgtcatttacaaggatagctaatatcacaaaaaaagtagctattcagtggtttttgattgtcgaagaaagtgagggaacaggtagaaaacgaccacaatggtagtattttcacagttatttgtagatttacgtaaagcaaataaaaaaaaaaatcagttgtctaaaaaaaaaa

SEQ ID NO: 66645 - DNA, 117 bp, Homo sapiens
gctctcttccaactacccttgggctaactgtgccttgttccgctggtcgttggcctgctggtgtctgctggtgcttgtcagtgtgttcttccactcctctcgaagtccagctgcgcg

SEQ ID NO: 66646 - DNA, 563 bp, Homo sapiens
gcggccagcctggggactgcgcgggtaaggagcgggagggcggaatgcaccgcgaagttggcgggggacggccacgcacgcctcgcctcggccttcctgcaccgtagggccgccctcccgccacccctgggcacctgtcgaccacgtctgggcgagggcgggtcggctcccgccctcgggccctcaccgcggcggggacgccgggtcagcgaagggttaagggactcgctccctcctctcggctccctcacccttggaaagtccccgaaatgacgtttcaacccgacaatttaaaaaagagtttaattatagagacaggctctgggagctggaacaaaccctcggtcggcggggccggtaaacaactcgggagcgagcgggctaggccagtcgcagccttgcggagcccgcgcccccggggagagggggaggggagggcctccgggattgggtttcacaaagttgaaaaacagccggtttctcaaacaattgtgatttggaaggtttcgctgggtttgcccagatgtttacgaataaataagaaacgcagttttaaaaaaaag

SEQ ID NO: 66647 - DNA, 1329 bp, Homo sapiens
gcggccagcctggggactgcgcgggtaaggagcgggagggcggaatgcaccgcgaagttggcgggggacggccacgcacgcctcgcctcggccttcctgcaccgtagggccgccctcccgccacccctgggcacctgtcgaccacgtctgggcgagggcgggtcggctcccgccctcgggccctcaccgcggcggggacgccgggtcagcgaagggttaagggactcgctccctcctctcggctccctcacccttggaaagtccccgaaatgacgtttcaacccgacaatttaaaaaagagtttaattatagagacaggctctgggagctggaacaaaccctcggtcggcggggccggtaaacaactcgggagcgagcgggctaggccagtcgcagccttgcggagcccgcgcccccggggagagggggaggggagggcctccgggagttggaaaagccgaggaaattcgaggaatcagctttctttggaaaaatccactttgtagccattctggggcgcctgatggtgctcctggccggtcccgcagccttggagggaaagcggcgccgcccgaagcaggggcatagccggtgccccgcggggacaggccctgggccgggaagggggccccgcccgctcccagtccccttcccctttgcttttttccagcccctcctccggtccccccagctgagcttcgcgaaccctcgggagttaaagaccagccggcctcttttttggggggggtggggggtgggggagcgggaatgggtggaggccgggggaataaaaaaccgaaatagcttcacatcagaactcagactaaccttgtggtttcaacgcgcactctgctctgtcctgaaatctggaactcattacctcatcaccaagaaactgcacgaaatctctcccccaccgccccaacacccacttgggaaaggaacgagcaaacatccctctaagaaagaaacctacacttgaatgatttaaattaaggtggatggaagttatttccctttctggcgcttgccagatttcaagaaaagctgaaaaatgggagcgggggagggaagcaacagacggctggagggcagcagcagaacaagcgaggggcagcagccgagttaaagtgggggccatccatttcgggcagaggagacaaatgaaagccgaccccgctgggatcacgtaggttcgtggctgcagcaaaagttgggtttcacaaagttgaaaaacagccggtttctcaaacaattgtgatttggaaggtttcgctgggtttgcccagatgtttacgaataaataagaaacgcagttttaaaaaaaag

SEQ ID NO: 66648 - DNA, 489 bp, Homo sapiens
cttcctgctctgctccccggaatcctcagaaacgggatttgtatttgccgtgactggttggcctgaacacgtagggctccgtgactgggacaggaatgggcaggagaagcaagagtcggagctccaaggggcccaggggtggcctggggaaggaagatggtcagcaggctgggggagaggctctaggtgatgaaatattacattcccgaccccaagagagcacccaccctcagacctgccctccacctggcagctggggagccctggcctgaacccccccctcccagcaggcccaccctctctctgacttccctgctctcacctccccgagaacagctagagccccctcctccgcctggccaggccaccagcttctcttctgcaaacgtttgtgcctctgaaatgctccgttgttattgtttcaagaccctaacttttttttaaaactttcttaataaagggaaaagaaacttgtaaatgcttcttgag

SEQ ID NO: 66649 - DNA, 535 bp, Homo sapiens
gtcacctataagccaaacagcctggcctaactccagggtcattgaccacttgttttccccaactgccaccacagcaaccaactgtatgggccctgcccagagactactgaagcaacagactttacattggcacatcccagtggttcccctccctttccccaagccacacacatctcacctcccaccccaagagggctgagatagtgcctaactgttgggcttctaacaaagtgtagccgtaagtgcagtggagttaatgtccttggggtaaatctaatcaaaacaagatgggtccagcatataaactcctctccttcctccacccagacagattgtcctgaaacacagtagtccatactacctctcaaaatatgaccctcatgatactgaccaatcacccgggcttgataccaagaggtagctagttcggtaatacactattttattattaatagtttctcttccttctttgcccagcccgttcgtcttcactccagtttctctcaaactacactcaggctctgttttctacaga

SEQ ID NO: 66650 - DNA, 324 bp, Homo sapiens
cataaagcctgagctgggaattgcacgagatccttctactgcattatgttggccaaaaccaagtcataagactgttacagggttgaagcaaaggtcaaggatactaggaagccaatgattaaggaaatcaataaaatcggtaatatattaagtgttttacaaaagcatagaaaaaattcagaaagatgcaagctaaacatataattggggttaccttgtgtcaaattaaagagtgtggataatccttttccactttacaaacttttctattgtttaattttagtggcaaacctatatttattattaaaaaatgatttaagtatc

SEQ ID NO: 66651 - DNA, 774 bp, Homo sapiens
cagacgagtggccaactctggagcccaggctattgcttcccagtctggtggtgaatcgtccatagtctgggacaggcaggggagcccagcggcatgctggatatgaatgtatcttcagccttcaagttaccattggccagagggaagagtggccccaaactctgaagagcgctggcaaggctccccatcttcctctccctagcctccacaggaacatcacagtatggctcggccttttttttttttttttgagacggagtctcactctgtcacccaggctggagtgcagtggtgtgatctcagctcactgcaagctctgcctcccgggttcatgccattctcctgcctcagcctcccgagtaactgggactacaggcgcccgccaccacgcccagctaattttttgtatttttagtagagacggggtttcactgtgttagccaggatggtttcgatctcctgaccttgtgatctgcccgcctcagcctcccaaagtgctgggatgacaggcgtgagccacgcgcccagcctggcttggcatctttagggcagatctcagtatgccttgcattccaattcacctccagaatcctacacttcctccaaggtcagtcctcatgcgagtctccaacctcatccccacttcattttcctcattgtacttaccatcttttattcatatcccaccaaattttggctttgttagctatactgcaaatagtagatgctcaataaactactagtgaatgaatgaacttggaaaaaaaaagctta

SEQ ID NO: 66652 - DNA, 527 bp, Homo sapiens
gccagccgaagctcctcaggctcccaccctctacaagctccttctgctccagccacactcaccaggcccgagttcccacctagcaccttccctgggaatgatctccccctggttggctctttctacttattcagcctcaaatgtcatctccactgagaggcctttcctgacctgctgagcttgattccctcccctccccagtcacattactccgtgttatggtacccatccctgtctccttagcttgtttttgtctgtattggctcttccactagactgtaagttgcatgagggcagggatgtctgtttaatcccagtgctcaggatagtgtatggctcgtgatagatgcctagtacattttaaaatgagaacgaatgaagtttgggagaggctcagagcagtgagtctcccccttgttgggggactggggagtgcctgggaggggctatctggtgccagcggtttggagtggctgggatgactctggaatcctgtgaggcccagtcagtttctttggttctcatgc

SEQ ID NO: 66653 - DNA, 522 bp, Homo sapiens
attaaggttgaagagcgagtggccatttgtaggtactggtatgagatgttcctagctacccgcatgtcagccccgggaaacggcaacatttcccacccttcttaccctgggtcctgagtaggaataaaagttagtgattcttaggggcatattgagagctggcaatgatacctctcacaaatccatcccccagagataaggggtcccccatgcctttgatgtatttgggagctgtgctgtatgtgttctctttggctccccagtggagaataataacaataacaacctcgtactaatacaacccagatgtcagcacagaccctctgttctctgtcttccctgagatatctgtatcttctcagggattactgtcggttcaggcctggctcctgctttcagcttgtgggaaaactcactccatcttcattccataacctcacatctcctatgccagttcccttctctgtgctccatgctgaaccaaatgccacactcatcccctttgctttgaattatatgaaa

SEQ ID NO: 66654 - DNA, 906 bp, Homo sapiens
cattaattcataagtacgaggccggtgttaatcggcagaggtgccgtcgccccgctggagggaggactcaggccccgctggccgcgggctcggtacccggtgggtcggtggagcgtctgttgggtccgggccgccggcttcgccctcgccatggcgccctggctgcagctcctgtcgctgctggggctgctcccgggcgcagtggccgcccccgcccagccccgagccgccagctttcaggcctgggggccgccgtccccggagctgctggcgcccacccgcttcgcgctggagatgttcaaccgcggccgggctgcggggacgcgggccgtgctgggccttgtgcgcggccgcgtccgccgggcgggccaggggtcgctgtactccctggaggccaccctggaggagccaccctgcaacgaccccatggtgtgccggctccccgtgtccaagaaaaccctgctctgcagcttccaagtcctggatgagctcggaagacacgtgctgctgcggaaggactgtggcccagtggacaccaaggttccaggtgctggggagcccaagtcagccttcactcagggctcagccatgatttcttctctgtcccaaaaccatccagacaacagaaacgagactttcagctcagtcatttccctgttgaatgaggatcccctgtcccaggacttgcctgtgaagatggcttcaatcttcaagaactttgtcattacctataaccggacatatgagtcaaaggaagaagcccggtggcgcctgtccgtctttgtcaataacatggtgcgagcacagaagatccaggccctggaccgtggcacagctcagtatggagccatccattcagtccattcaggtggggcgaggtcacccacagactgggtaccgagctcg

SEQ ID NO: 66655 - DNA, 1024 bp, Homo sapiens
cattaattcataagtacgaggccggtgttaatcggcagaggtgccgtcgccccgctggagggaggactcaggccccgctggccgcgggctcggtacccggtgggtcggtggagcgtctgttgggtccgggccgccggcttcgccctcgccatggcgccctggctgcagctcctgtcgctgctggggctgctcccgggcgcagtggccgcccccgcccagccccgagccgccagctttcaggcctgggggccgccgtccccggagctgctggcgcccacccgcttcgcgctggagatgttcaaccgcggccgggctgcggggacgcgggccgtgctgggccttgtgcgcggccgcgtccgccgggcgggccaggggtcgctgtactccctggaggccaccctggaggagccaccctgcaacgaccccatggtgtgccggctccccgtgtccaagaaaaccctgctctgcagcttccaagtcctggatgagctcggaagacacgtgctgctgcggaaggactgtggcccagtggacaccaaggttccaggtgctggggagcccaagtcagccttcactcagggctcagccatgatttcttctctgtcccaaaaccatccagacaacagaaacgagactttcagctcagtcatttccctgttgaatgaggatcccctgtcccaggacttgcctgtgaagatggcttcaatcttcaagaactttgtcattacctataaccggacatatgagtcaaaggaagaagcccggtggcgcctgtccgtctttgtcaataacatggtgcgagcacagaagatccaggccctggaccgtggcacagctcagtatggagtcaccaagttcagtgatctcacagaggaggagttccgcactatctacctgaatactctcctgagaaaagagcctggcaacaagatgaagcaagccaagtctgtgggtgacctcgccccacctgaatgggactggaggagtaagggggctgtcacaaaagtcaaagaccagggcatgt

SEQ ID NO: 66656 - DNA, 262 bp, Homo sapiens
aagaattttgggatctgtgaaagtctgtgtcctttgagtgtgtgcacaaatataaaatgtgtacaactgtactaaataatttcacaaatttagttttgaagtttagtttcttgaagtaatactaagtaacttctgtaaataaaacttctgggtttttagaatacgattgcttgaacctgcaaggttgagactacagtgagctgtgatcccactgctgtgccccagcctgggcaaccagagtgagaccctgtcttaaaaaaaa

SEQ ID NO: 66657 - DNA, 1969 bp, Homo sapiens
gaggcggccgccaaggggccgtccagtgccggccccggtgagcgcggcagcgccctgctggagttcgcgggcggcacaagcttcggctccgagcaccaggccgcgttcgccgggccctcgggcgcctaccgggagggcgtcctgtgaggggcccggggccgacagcagcgcagcctgcagggccaccggcccctcccttggacggccggccccccgctcctcgggccccgggaggctgagggtcccagtcctgggtgcggtgccttccctcagccctcgccctgcggccccgggtctcatgcccgccgggtccgtgtgctcagccggagacgtgggggagctctggggagaagagcagcgcggaggcagcgaggccaggacgtcacccccacggagactgcgatatcccctgggtgggcccgggctgtgaagcagggcggtagttggcgggcgatgctatttatttcactcggattccgacttgggtggtctggggagcaagggatttgtgtgtttgcaaccgggtgtggcggcgagggaggggcccggccacccaggtgggccagcgggatgcctgggaggccggtgggtttggctgaccacttcttcccattcctcagtgggagacttgggccctcccggtcatccgagtctgtcccgaaggtttaactgcgcgcggcgaggggaggccttgtaggtttccaaagggcggagctccagtgggaaaacttgaaacttgtcgtctgcggatatttatttccacttcttgtatggcctgaagaatctaggaggagaaaaagccagataccaaacttacggccaggcagacgggtcgcgggtgttgacagggtcctgagggagtttgaagccttattctcgagccgcctcctcttctctacccacacttgcaccgaggtcaccccggcaccctccgcaccggttcggttttggtctctgcttgtcctctcagtccttggtactttcgtctccctcagccggaggtggcaaactcagacatctacgggcgcccgaggccctcgcagccctgagccccagctttcacttccctgggctgcccctctccgggagcaggcagacgccccgttctcggagcccagcgctcacttagagcgactgaggttggtcgaaggatctttccccacatcccataatcagggccctaggacactcgcaggtccctttaactctgcttctgtcattacactagaacaagtagtgtttctgtttagagtcccatttcacaaattggttagtggaggcacccgtggcctggcagcttgcacagtggctgtccacctcggggggggtgtggacctgagccgtggctcagtgacaaaccaggcacccaactatgcaaggcccctgcctggtgggcatcctaccctctggactgggcccatggaagccactgggcgggcagctggggtgtagttcatgtgaagccccattcccctcacgcttttggggccactgtgaatggggccaggaaacggatttttggtgcagctgcattccctaatagacctagttccctccacgttagtgtagacatggccttgggggctgagcgcagcagccaggctgccagggctgggggcgggtaggaggcacggtagttggtgggtgggaagagggcctgggtggtggcggtcagttagcctggctgggtgaggttggtgaggttgcggggcggggtggtgaggagagcaggggtcccagggaggcattggggtgctgggtaatgacctcggccctgggtttctcctctccctgcgggacaggagcctcagaaagggccaagggcaaggtgggcttggggggctctgggaatctcagctctagccctgtatggccaggatctgctgtctccgtccctcctgggccccagcagctgtcctgcagctgtcagcaggagggcctggctttaataaagagtggacaaactgaa

SEQ ID NO: 66658 - DNA, 746 bp, Homo sapiens
acgcgtccgcccacgcgtccggtttagagtcccatttcacaaattggttagtggaggcacccgtggcctggcagcttgcacagtggctgtccacctcggggggggtgtggacctgagccgtggctcagtgacaaaccaggcacccaactatgcaaggcccctgcctggtgggcatcctaccctctggactgggcccatggaagccactgggcgggcagctggggtgtagttcatgtgaagccccattcccctcacgcttttggggccactgtgaatggggccaggaaacggatttttggtgcagctgcattccctaatagacctagttccctccacgttagtgtagacatggccttgggggctgagcgcagcagccaggctgccagggctgggggcgggtaggaggcacggtagttggtgggtgggaagagggcctgggtggtggcggtcagttagcctggctgggtgaggttggtgaggttgcggggcggggtggtgaggagagcaggggtcccagggaggcattggggtgctgggtaatgacctcggccctgggtttctcctctccctgcgggacaggagcctcagaaagggccaagggcaaggtgggcttggggggctctgggaatctcagctctagccctgtatggccaggatctgctgtctccgtccctcctgggccccagcagctgtcctgcagctgtcagcaggagggcctggctttaataaagagtggacaaactgaa

SEQ ID NO: 66659 - DNA, 1894 bp, Homo sapiens
gaggcggccgccaaggggccgtccagtgccggccccggtgagcgcggcagcgccctgctggagttcgcgggcggcacaagcttcggctccgagcaccaggccgcgttcgccgggccctcgggcgcctaccgggagggcgtcctgtgaggggcccggggccgacagcagcgcagcctgcagggccaccggcccctcccttggacggccggccccccgctcctcgggccccgggaggctgagggtcccagtcctgggtgcggtgccttccctcagccctcgccctgcggccccgggtctcatgcccgccgggtccgtgtgctcagccggagacgtgggggagctctggggagaagagcagcgcggaggcagcgaggccaggacgtcacccccacggagactgcgatatcccctgggtgggcccgggctgtgaagcagggcggtagttggcgggcgatgctatttatttcactcggattccgacttgggtggtctggggagcaagggatttgtgtgtttgcaaccgggtgtggcggcgagggaggggcccggccacccaggtgggccagcgggatgcctgggaggccggtgggtttggctgaccacttcttcccattcctcagtgggagacttgggccctcccggtcatccgagtctgtcccgaaggtttaactgcgcgcggcgaggggaggccttgtaggtttccaaagggcggagctccagtgggaaaacttgaaacttgtcgtctgcggatatttatttccacttcttgtatggcctgaagaatctaggaggagaaaaagccagataccaaacttacggccaggcagacgggtcgcgggtgttgacagggtcctgagggagtttgaagccttattctcgagccgcctcctcttctctacccacacttgcaccgaggtcaccccggcaccctccgcaccggttcggttttggtctctgcttgtcctctcagtccttggtactttcgtctccctcagccggaggtggcaaactcagacatctacgggcgcccgaggccctcgcagccctgagccccagctttcacttccctgggctgcccctctccgggagcaggcagacgccccgttctcggagcccagcgctcacttagagcgactgaggttggtcgaaggatctttccccacatcccataatcagggccctaggacactcgcaggtccctttaactctgcttctgtcattacactagaacaagtagtgtttctgtttagagtcccatttcacaaattggttagtggaggcacccgtggcctggcagcttgcacagtggctgtccacctcggggggggtgtggacctgagccgtggctcagtgacaaaccaggcacccaactatgcaaggcccctgcctggtgggcatcctaccctctggactgggcccatggaagccactgggcgggcagctggggtgtagttcatgtgaagccccattcccctcacgcttttggggccactgtgaatggggccaggaaacggatttttggtgcagctgcattccctaatagacctagttccctccacgttagtgtagacatggccttgggggctgagcgcagcagccaggctgccagggctgggggcgggtaggaggcacggtagttggtgggtgggaagagggcctgggtggtggcggtcagttagcctggctgggtgaggttggtgaggttgcggggcggggtggtgaggagagcaggggtcccagggaggcattggggtgctgggtaatgacctcggccctgggtttctcctctccctgcgggacaggatctgctgtctccgtccctcctgggccccagcagctgtcctgcagctgtcagcaggagggcctggctttaataaagagtggacaaactgaa

SEQ ID NO: 66660 - DNA, 1794 bp, Homo sapiens
gaggcggccgccaaggggccgtccagtgccggccccggtgagcgcggcagcgccctgctggagttcgcgggcggcacaagcttcggctccgagcaccaggccgcgttcgccgggccctcgggcgcctaccgggagggcgtcctgtgaggggcccggggccgacagcagcgcagcctgcagggccaccggcccctcccttggacggccggccccccgctcctcgggccccgggaggctgagggtcccagtcctgggtgcggtgccttccctcagccctcgccctgcggccccgggtctcatgcccgccgggtccgtgtgctcagccggagacgtgggggagctctggggagaagagcagcgcggaggcagcgaggccaggacgtcacccccacggagactgcgatatcccctgggtgggcccgggctgtgaagcagggcggtagttggcgggcgatgctatttatttcactcggattccgacttgggtggtctggggagcaagggatttgtgtgtttgcaaccgggtgtggcggcgagggaggggcccggccacccaggtgggccagcgggatgcctgggaggccggtgggtttggctgaccacttcttcccattcctcagtgggagacttgggccctcccggtcatccgagtctgtcccgaaggtttaactgcgcgcggcgaggggaggccttgtaggtttccaaagggcggagctccagtgggaaaacttgaaacttgtcgtctgcggatatttatttccacttcttgtatggcctgaagaatctaggaggagaaaaagccagataccaaacttacggccaggcagacgggtcgcgggtgttgacagggtcctgagggagtttgaagccttattctcgagccgcctcctcttctctacccacacttgcaccgaggtcaccccggcaccctccgcaccggttcggttttggtctctgcttgtcctctcagtccttggtactttcgtctccctcagccggaggtggcaaactcagacatctacgggcgcccgaggccctcgcagccctgagccccagctttcacttccctgggctgcccctctccgggagcaggcagacgccccgttctcggagcccagcgctcacttagagcgactgaggttggtcgaaggatctttccccacatcccataatcagggccctaggacactcgcaggtccctttaactctgcttctgtcattacactagaacaagtagtgtttctgtttagagtcccatttcacaaattggttagtggaggcacccgtggcctggcagcttgcacagtggctgtccacctcggggggggtgtggacctgagccgtggctcagtgacaaaccaggcacccaactatgcaaggcccctgcctggtgggcatcctaccctctggactgggcccatggaagccactgggcgggcagctggggtgtagttcatgtgaagccccattcccctcacgcttttggggccactgtgaatggggccaggaaacggatttttggtgcagctgcattccctaatagacctagttccctccacgttagtgtagacatggccttgggggctgagcgcagcagccaggctgccagggctgggggcgggtaggaggcacggtagttggtgggtgggaagagggcctgggtggtggcggtcagttagcctggctgggtgaggttggtgaggttgcggggcggggtggtgaggagagcaggggtcccagggaggcaactctacggtgttagtacgtctcggtttctccatctctgcgggacag

SEQ ID NO: 66661 - DNA, 1996 bp, Homo sapiens
gaggcggccgccaaggggccgtccagtgccggccccggtgagcgcggcagcgccctgctggagttcgcgggcggcacaagcttcggctccgagcaccaggccgcgttcgccgggccctcgggcgcctaccgggagggcgtcctgtgaggggcccggggccgacagcagcgcagcctgcagggccaccggcccctcccttggacggccggccccccgctcctcgggccccgggaggctgagggtcccagtcctgggtgcggtgccttccctcagccctcgccctgcggccccgggtctcatgcccgccgggtccgtgtgctcagccggagacgtgggggagctctggggagaagagcagcgcggaggcagcgaggccaggacgtcacccccacggagactgcgatatcccctgggtgggcccgggctgtgaagcagggcggtagttggcgggcgatgctatttatttcactcggattccgacttgggtggtctggggagcaagggatttgtgtgtttgcaaccgggtgtggcggcgagggaggggcccggccacccaggtgggccagcgggatgcctgggaggccggtgggtttggctgaccacttcttcccattcctcagtgggagacttgggccctcccggtcatccgagtctgtcccgaaggtttaactgcgcgcggcgaggggaggccttgtaggtttccaaagggcggagctccagtgggaaaacttgaaacttgtcgtctgcggatatttatttccacttcttgtatggcctgaagaatctaggaggagaaaaagccagataccaaacttacggccaggcagacgggtcgcgggtgttgacagggtcctgagggagtttgaagccttattctcgagccgcctcctcttctctacccacacttgcaccgaggtcaccccggcaccctccgcaccggttcggttttggtctctgcttgtcctctcagtccttggtactttcgtctccctcagccggaggtggcaaactcagacatctacgggcgcccgaggccctcgcagccctgagccccagctttcacttccctgggctgcccctctccgggagcaggcagacgccccgttctcggagcccagcgctcacttagagcgactgaggttggtcgaaggatctttccccacatcccataatcagggccctaggacactcgcaggtccctttaactctgcttctgtcattacactagaacaagtagtgtttctgtttagagtcccatttcacaaattggttagtggaggcacccgtggcctggcagcttgcacagtggctgtccacctcggggggggtgtggacctgagccgtggctcagtgacaaaccaggcacccaactatgcaaggcccctgcctggtgggcatcctaccctctggactgggcccatggaagccactgggcgggcagctggggtgtagttcatgtgaagccccattcccctcacgcttttggggccactgtgaatggggccaggaaacggatttttggtgcagctgcattccctaatagacctagttccctccacgttagtgtagacatggccttgggggctgagcgcagcagccaggctgccagggctgggggcgggtaggaggcacggtagttggtgggtgggaagagggcctgggtggtggcggtcagttagcctggctgggtgaggttggtgaggttgcggggcggggtggtgaggagagcaggggtcccagggaggcattggggtgctgggtaatgacctcggccctgggtttctcctctccctgcgggacaggagcctcagaaagggccaagggcaaggtgggcttggggggctctgggaatctcagctctagccctgtatggccaggatctgctgtctccgtccctcctgggccccagcagctgtcctgcagctgtcagcaggagggcctggctttaataaagagtggacaaactgaaaaaacatactcccttactttacaaaag

SEQ ID NO: 66662 - DNA, 405 bp, Homo sapiens
ccctgggccagagggatctgaagttggcgaggcggacggagaggcggaggccgcggccgaggagagagaggaggcggcggtggcggcgcccacccccagcggcaaggtggaccccgcgccggaacggcgcttcctggagctgggcaacggcctgggggagggcgaaggcccctcctcccacccttggggtgctgggtaatgacctcggccctgggtttctcctctccctgcgggacaggagcctcagaaagggccaagggcaaggtgggcttggggggctctgggaatctcagctctagccctgtatggccaggatctgctgtctccgtccctcctgggccccagcagctgtcctgcagctgtcagcaggagggcctggctttaataaagagtggacaaactgaa

SEQ ID NO: 66663 - DNA, 824 bp, Homo sapiens
gcaaaaagaaaatcagcaaatctcatttagaaaaaaaaaaatagttcctgaaataaagatgttgattttcttaaagaaaagataatattctcaagagaaaagggtattcctgaatctattttctaacatcagtctgtctctcagatgaatagagaattccatgtaattggggaatatttttgtgcttttagcaaagatggaaaacagcttcctttctcctcttcttttcatgtcatccttggagcattcctttaatgccccatttttctgttcaagagggtatgaaattaagcaggtggagtaagaacttcctggttatgcattaacactgattaaaatgcatagcccagaatggaatcccaccattatttcaaagtcaggatctctgcatttttccagtactatttttgggcaggaaaggatgagactagacaacttccaggatcctctcaaatactaacgttctattatggaaaaggattgtcaatgacagtacctgttctgagggaagataaggatcagcggtgtgcaaacctggcagagatgcagttccattcaaaagagacttgcggaaaacctaccatgtgctgggcatgagataaggcattgcagggcatagaaagaaaagcaaaaagtacttcctgtccttgaggttactatctcaaagtgaaaagagactactaaaaataaaagctttactactatgacaatactgaatagaacttttacatttgcagattattccagtatctcaaatggcaataaccctgtgattgaattattactgcctctacaacacagggaaagaaattcagcacatagag

SEQ ID NO: 66664 - DNA, 465 bp, Homo sapiens
gcagctcgccgtcgagtacttttcctttttccatattggaacaactattcattgtactttagaacacaaattaggcttttttaagaaaaacacatccttcatataagtttttcataccaaaaacatgtcttatattccctgaataagagttttttcccttatttctattttcaattacaatatgataattagaatttttaacttttaataatcttatcttctagtgaaaacccaggaagtgttgtgggctgtcctatatgagcattcaccagttcttaatttctagaaccgtgttttctcaactttttatatctattaatagactcaaatacatatagctttttatacaatacaaaaacaagatgccaaacatgtatatattctttaaacttatgttcagcaattaatgtttcagtattctaattttcttagaaatgactcagatgtttcgtgtctgttatttaa

SEQ ID NO: 66665 - DNA, 1375 bp, Homo sapiens
atgcagtgaggcggaaaggctctcgccggggcacagaaagatccccagggccgcaaggcgtgctgtcgcctgcaaaggcactgacccacgagcccactgcctccctccttcctgggtggagcaggggcctgccttcatctccaaggcccgggggctccggcatctcgacgcggcttctggcgacacgggcaaagagagacagaggctagtccgagccggagccagtgtgaccacacgtggcactgacgtcccccaagagcacatgcagtgagcctgtgtctctgaggccgtagtgggcgacgacgagacggacagtgatgtccaggcctgcgcccgggggccactggagacctgcccctcaaagcggaggaaacgccaagctcacctgaaaacctgcgagacagggcctgtgcacgagtccagtactcctacttcgccaagtctcagggacccatccccgagcaacggtggcggcgcagagaagagcacggcgccggcgcaggtgcagagagacaggaggctgatggggggaagttgaggcacctggggcagagaaaaaaatgcattgccaagaggtttctgggtcatctactgacgaaaatgtcttcccatcagcccttgcgctggtccccagggaccctggcatccgtcgttggcgcccagggtgcgcgtcgggccactaggggtaccccaactcggacagaaggcccatgagttgaatttgaagtttgtgggaatagaggtgaggcaccaggggcagaaaaaaaacaggagacctcgcctcagacaagcggggcctgggtcccccatggatgaaagtgccttcccattatgctgtaccctgggcagagtggacagtgacgaccctggttcgagcccagggtgcgcttcgggaccgcttgcggttaccagaaagtgaacaaatggtccatgagcggaaggtgaggcacctgaggcagagaaagtaaagaaacgcgccgccgagaagcagtgcctgggtccctcacggaggaaattgtcttctccttagcccgttcgcttggcagtgaggtccctggcgtccctggtttgatcccagggtacgcctcgggccactagtgttaccccaaggtgggcagaaagcccataaggggaaggcgaggcacctggggcagagaaaaaaaaaacttcgccgcagagaagcgcggcctgattccccacggacgaaagtgtcttcccatcagtccctgcactgggacccggggaccctggtgtccctggttcgagctcagggtgtgcctcagccgctacgtgcaccccaaggggagctttgggagcacaaagcccatgagggaaagtgagttttgagggaggagtggtgaggcacctgtcacag

SEQ ID NO: 66666 - DNA, 199 bp, Homo sapiens
gaatcttcactgtttataatgtatagcaaagtctttttttccaaagtgggaatacataataaggatgttactgaaattgggaaactctcatatattaaataccacttaacagctagtacttaagggaatgagtcaaaatttcctgaaaaccaggttagcatagtatagtatgagacatctaacataaaatatacagctg

SEQ ID NO: 66667 - DNA, 457 bp, Homo sapiens
cttccccaccctgaggagaggacaccatggcttactactcaggacaagtatgccccgctcagggtgtgatttcaggtggcttccaaacttatacgcagtttaaagatggtggggacagactttgcctctacctagtgaaccccacttaaagaataaggagcatttgaatctcttggaaaaggccatgaagaataaagcagtcaaaaagaagtcctccatgttggtgccaagggcttgcgaggggaaataaaaatgttatccagcctgaccaacatggagaaaccccgtctctattaaaaatacaaaattagcctggcatggtggtgcatgcctgtaatcccagctactctggaggctgaggcaggagaatcgcttgaacccaggaggcggaggtcgcagtgagccgagatcatgccagtgcactccagcctgggtaacaagagtgaaactccgtgtc

SEQ ID NO: 66668 - DNA, 354 bp, Homo sapiens
tcatagctgaagtattaatttaattaaataaatcatacaaaaaacatatgttaaaaattgatttgcctttatggatagcacttagaaaagttagtattgacaactaaaatgagtaactgaggcatatatctcaatcactgagttttattaagtcagctttacggtacatctgggaaaggtttagtatttataaatttcctacagggaccaaaggtatgtagcagaaggggcaggtaggtgataaggtgaatagttacattcctgtgagactttagttaatacccagtaaatgtacattttacataagttaagtgaatgtctgcagagaagagagtaaaggaagagtcaattata

SEQ ID NO: 66669 - DNA, 413 bp, Homo sapiens
tgtagtcaataaaacttgtattaaaattcttttttaaaaatttgtatagtaattacagtgtgaatattaatgaataattttctggatagagtcatgttttgcaactatgtgttaagcataacataaccttaatcttcaggttgtaaaaatattttagataaataacagaaagtgatctttattttggatggttatagacagacaaaataaatgatatttaatattatatgacggtgataaaaatacatatagtgatttttaaaataaatgccacctttgaccttactgtggttttttgttgttgtttgttttttaagagacaggttcttgcactgttgcccaggatggagtgcagtggtgtgatggtatcttgctgcagccttgaactcctgggtgcaagtgatcctcccacc

SEQ ID NO: 66670 - DNA, 634 bp, Homo sapiens
gtaacttacaactgaaactttggagtctgtaatctttctgtgtgttttttttttctttttaagacgattcacctggtcacttctatcactgggtgaagctgattgtatataagctagatctgccttctgcctacctttatgttagtactatttttacgtttaattttgcccaagttgaaagagattgcttggttcatggggccttaaacatttcaacatttgtccttcacaagataattatttcattaaaagtaaattacaatttattcagtagctctccacatgaaaataataatcagatggtaaatggatgccctaagatatgtggagaacaaattaccgtggtattttaaaggagagagttttctaagctaacttttatgcatgcagcatctccctggctaacatgagcattgatgataatttctaccattaatgagctcatttttttttttaatgagactttgtttttacttttaaaaaacagtaacctaaggcaggtgaagtcaaattgttattgctgggaagttgtgtttcaaatgagcactgtaaatgattttgttgagcaggagaatggcctgaacccaggagccagagcttgcagtgagcagagactcgcgccgctgcaccccag

SEQ ID NO: 66671 - DNA, 186 bp, Homo sapiens
cccttcatgtgtccctggcctcagactgtctccttgccagcctccaggagtgagtgattcctcggaccccttggaggaacacagctctggggactattcgcctagaaggtgggagggggatggaagatgctgtgaagtgtggggatgcagggagtggagtggttccagggaacagtttccccacag

SEQ ID NO: 66672 - DNA, 191 bp, Homo sapiens
gtgtctcttagaggatgactataattaaatatcacattttcttttttagcctaatagtcagtttggttaattttttgtgttctttttctgactttcctaattacctttcttttgtcctgcagagaaaaaaaaatgccttcaaaattaacaatttctagcttcttagtaattttatctttgagttaaatcaa

SEQ ID NO: 66673 - DNA, 455 bp, Homo sapiens
agagatcctcccacttcagcctcccaaagtgttgggattacaggcatgagccaccttgcccagctgtgaaacttttggagacagagtctcactctgtcacccaggctgaggtgcagtggcgcaatctcggcttactgcaacctctgcctcccatgttcaaacaattcttgtgcctcagcctcccaagtagctgagactgcaggtgcgcgccaccacatcccactaatttttttgtattttagtagagatggggttgcacaatgcccaggctggtctcaaactcttgagctcagacaatccacccgcctcggcctcccaaagtgctaggattacaggtgtaagccactgtgcctggctcagctgtgaaactttaaataacacatttaagttgcttaacataatgcctgacatatatagtgaccgctcaataaaaggtaaccatttttaacctctta

SEQ ID NO: 66674 - DNA, 400 bp, Homo sapiens
gctgtttcagtgttttgctgtttattttaaaaattcatcattaattcagcaaatattgattgagtgcctaataggttccaggcactgtactaggctttagggatggaaagaatgttgaaaaggtcaagtatggttcctgccttcatagggtcatgtagactaattggggattagacaagtaaacaatgatttgaaagcatttaaaaattctgcagtgagtcagggtcatttggtgaacatataagtggaataaaaattataatttgatagctgggtgtggtagtatgctcttgtagtagtcctaggaggtttgtttgagcctgggaagtggaggctacagtgagtggtgatgaagccactgcactccagcctaaaggacagagtgcagctctgtttgaaa

SEQ ID NO: 66675 - DNA, 424 bp, Homo sapiens
ctacaaagaacttaaaactaagtaaggacttcaaaaaagaaaggtggagagaggggaaaagatgactgctacacattttccctttgcttcccacgggaatggcttcattcttgccttgagtgtcttagatatgtctctcccccacccgcagcactggcttttctgtcttttaccattgaattaggcctggtctagacttcagtatttatacctgagagtacagaaaagaggcttttcaagaatacgtcagttctgttagaataagatcccatccgtcatcagatacctttctacagctttctgtcacagtatttgatcactgatcatagaacctggactagagatttcatgtggagaatgtactcccttcaaaaggaaaaccattcaacaatttaatatttaattgattaaatacatgtgattt

SEQ ID NO: 66676 - DNA, 418 bp, Homo sapiens
gagaagagaaaagtagaaaatgaagcgtatgagaggttgataagtgtcagagaggtaacaagggaaggtgggtagggagagtgttgggagtcagggataatgatggtgtggtggattgtccaaatttaggtagtgtgttctgagaaggcctctgaaaaggtgacataatatagcagagtcttgaagatgctttatgtggatatgatttgaggtagagcagtcaatttgttagagaatgtaagttgtcatttttggatctgggtcatgtggttcactgaaattaggagggctttggatacacaaggagaaatagaaattgtctatatgtgtttaccaggtagtgtgcttgaagtcatccagtaagataagatgtttcttcacacttgaagatgaccttatttcccacctttatttaaga

SEQ ID NO: 66677 - DNA, 500 bp, Homo sapiens
actctgtccctttatttctcaagccagccgacgcttaggaaaatagaaaagaacctacatgattatcggggcaggtcccccgatatctggcgcccacgtggtctttcttttttcctaagtgcatgagggaacccgattccctttggtaggtgcggtgaaacatcaatcggcttggtccacagataagcgtgttcaactccccgacgagtggacaaaatatgaaacaccaagaaaaagagaaggaaaaaaaggaggaaacaaccacatatgtcacctttccaagagggactgaaactgggctgacccttttgatttccaaactcagcgttttggtgtaaggcggccaaagaaggatgcggagcccagcactgtgaagcctacaaaaacattgatgcgctggcttggggatttgaatttgaacatctttcacactaagttcagactcatgaaaccaatcttcagatgctctgtaaaccacataataaagagtttggaaatta

SEQ ID NO: 66678 - DNA, 743 bp, Homo sapiens
  misc_feature (722)..(722): n is a, c, g, or t
tgtgacgttccctacgcggtcgggcgttgggtttcgcggcgctcgccgcactggttgttcagcaccttcggtccggttgaggttgtcaagtcggaccaaacaggttgtttctctgcagtttccaacatggcagggaggtttaatagacatggataagaagtccactcacagaaatcctgaagatgccaggctggcaaatatgaaggtaaacacaaacgaaagaaaagaagaaagcaaaaccaaaaccagcaccgatcccgacatagatcagtgacgtctttttcttcagatgatcctatgtttccttcttcctcatcatcgtcttcaggaagccagacagattcaagtattgaagatgctgccaagggaaaaattaagaagaagagaagagagaaaacaaataaatgggaaaaaagaaaggacaaaatatgaaacaccaagaaaaagagaaggaaaaaaaggaggaaacaaccacatatgtcacctttccaagagggactgaaactgggctgacccttttgatttccaaactcagcgttttggtgtaaggcggccaaagaaggatgcggagcccagcactgtgaagcctacaaaaacattgatgcgctggcttggggatttgaatttgaacatctttcacactaagttcagactcatgaaaccaatcttcagatgctctgtaaaccacataataaagagtttggaaattaaaaaaaaaaaanaaaagaattctccagacgcgt

SEQ ID NO: 66679 - DNA, 829 bp, Homo sapiens
tgtgacgttccctacgcggtcgggcgttgggtttcgcggcgctcgccgcactggttgttcagcaccttcggtccggttgaggttgtcaagtcggaccaaacaggttgtttctctgcagtttccaacatggcagggaggtttaatagacatggataagaagtccactcacagaaatcctgaagatgccaggctggcaaatatgaaggtaaacacaaacgaaagaaaagaagaaagcaaaaccaaaaccagcaccgatcccgacatagatcagtgacgtctttttcttcagatgatcctatgtttccttcttcctcatcatcgtcttcaggaagccagacagattcaagtattgaagatgctgccaagggaaaaattaagaagaagagaagagagaaaacaaataaatgggaaaaaagaaagagtcttgtcctgttgctcaggctggagtgcaatgatgcgacctcggctcactgcaacctctgcctcccggattcaagcaattctcctgccacagcctcctaagtagctaggactacacgcatgcaccaccacacctggctaatttttgtatttttagtagggacggggtttcacctggttggccaggctggtctcgaactcctgacctcatgtgatccgtccacttcagcgtcccaaagtgctgggattacaggcatgagccaccgtgccctgcctcttttagttatttttaaatgtacaataaattgttgttgactgtaatcaccctgttgtgctataaaatacgaaatcttatacattctagctatatttttatactcattaatcatcctcctttccccaccttcaa

SEQ ID NO: 66680 - DNA, 849 bp, Homo sapiens
tgtgacgttccctacgcggtcgggcgttgggtttcgcggcgctcgccgcactggttgttcagcaccttcggtccggttgaggttgtcaagtcggaccaaacaggttgtttctctgcagtttccaacatggcagggaggtttaatagacatggataagaagtccactcacagaaatcctgaagatgccaggctggcaaatatgaaggtaaacacaaacgaaagaaaagaagaaagcaaaaccaaaaccagcaccgatcccgacatagatcagtgacgtctttttcttcagatgatcctatgtttccttcttcctcatcatcgtcttcaggaagccagacagattcaagtattgaagatgctgccaagggaaaaattaagaagaagagaagagagaaaacaaataaatgggaaaaaagaaaggtgcggtgaaacatcaatcggcttggtccacagataagcgtgttcaactccccgacgagtggaaagggaattccctgaccccttgaacttcccgggttaggtgatgcctcgccctgcttcggctcaagctcagtgcactgaacccactgtcctgcaccaactgtccagcactcccctgtgagatgaacctcgtacctcagttggaaatgcagaaatcacctgtcttctgtgtcgctcacgctgggagctgtagactggagctgttcctattccaataaaattgttctttaatcaacacaattgataaacctttagctattctgagcaagggaaaaatatagagaaaagacacaaataccaaagttaagagtaaaagataggacatcactaccgactctatggaagttaaaagtattataagggaatatt

SEQ ID NO: 66681 - DNA, 319 bp, Homo sapiens
ccagcaccgatcccgacatagatcagtgacgtctttttcttcagatgatcctatgtttccttcttcctcatcatcgtcttcaggaagccagacagattcaagtattgaaggtatgtttatcatcctgttaaggtttcatatttataagttaggtgatttagaaaaaaaatactaaacatgttataatttttgtttattcaactaatatttattgagcatactcactatgtaccagacataatggtaaacatgccatggtcccttcagacaaggaacttttattatattaagcaatattaggaatgatagaggagttaaa

SEQ ID NO: 66682 - DNA, 710 bp, Homo sapiens
tgtgacgttccctacgcggtcgggcgttgggtttcgcggcgctcgccgcactggttgttcagcaccttcggtccggttgaggttgtcaagtcggaccaaacaggttgtttctctgcagtttccaacatggcagggaggtttaatagacatggataagaagtccactcacagaaatcctgaagatgccaggctggcaaatatgaaggtaaacacaaacgaaagaaaagaagaaagcaaaaccaaaaccagcaccgatcccgacatagatcagtgacgtctttttcttcagatgatcctatgtttccttcttcctcatcatcgtcttcaggaagccagacagattcaagtattgaagatgctgccaagggaaaaattaagaagaagagaagagagaaaacaaataaatgggaaaaaagaaaggacaaaatatgaaacaccaagaaaaagagaaggaaaaaaaggaggaaacaaccacatatgtcacctttccaagagggactgaaactgggctgacccttttgatttccaaactcagcgttttggtgtaaggcggccaaagaaggatgcggagcccagcactgtgaagcctacaaaaacattgatgcgctggcttggggatttgaatttgaacatctttcacactaagttcagactcatgaaaccaatcttcagatgctctgtaaaccacataataaagagtttggaaatta

SEQ ID NO: 66683 - DNA, 819 bp, Homo sapiens
tgtgacgttccctacgcggtcgggcgttgggtttcgcggcgctcgccgcactggttgttcagcaccttcggtccggttgaggttgtcaagtcggaccaaacaggttgtttctctgcagtttccaacatggcagggaggtttaatagacatggataagaagtccactcacagaaatcctgaagatgccaggctggcaaatatgaaggtaaacacaaacgaaagaaaagaagaaagcaaaaccaaaaccagcaccgatcccgacatagatcagtgacgtctttttcttcagatgatcctatgtttccttcttcctcatcatcgtcttcaggaagccagacagattcaagtattgaagatgctgccaagggaaaaattaagaagaagagaagagagaaaacaaataaatgggaaaaaagaaagagtcttgtcctgttgctcaggctggagtgcaatgttgcggtgagctgagatggaccactgcactccagcttgggtgacagagtgagagtccatctcaataagaaaaaaattctattgaagaactgagtgatttttgattgtggcataaagcaagcaaaagttaatgcatacttgcgagatttatgggtagacaacagtttggcgtatggataaatcttgcaccatatttgaatgtccttaggaaagaagggcagaagaattcaggctctggtgtgactcagggggatgggaatggatgccgccggtaggatggtcagaggtctttgggggtgaaggttagttgggggggcaaacagaaaaaatttgggcggcgaattaaattggggcgggaaggtgtga

SEQ ID NO: 66684 - DNA, 768 bp, Homo sapiens
tgtgacgttccctacgcggtcgggcgttgggtttcgcggcgctcgccgcactggttgttcagcaccttcggtccggttgaggttgtcaagtcggaccaaacaggttgtttctctgcagtttccaacatggcagggaggtttaatagacatggataagaagtccactcacagaaatcctgaagatgccaggctggcaaatatgaaggtaaacacaaacgaaagaaaagaagaaagcaaaaccaaaaccagcaccgatcccgacatagatcagtgacgtctttttcttcagatgatcctatgtttccttcttcctcatcatcgtcttcaggaagccagacagattcaagtattgaagatgctgccaagggaaaaattaagaagaagagaagagagaaaacaaataaatgggaaaaaagaaaggacaaaatatgaaacaccaagaaaaagagaaggaaaaaaaggaggaaacaaccacatatgtcacctttccaagagggactgaaactgggctgacccttttgatttccaaactcagcgttttggtgtaaggcggccaaagaaggatgcggagcccagcactgtgaagcctacaaaaacattgatgcgctggcttggggatttgaatttgaacatctttcacactaagttcagactcatgaaaccaatcttcagatgctctgtaaaccacataataaagagtttggaaattagatgcggccgaagccctttttcccgttccccgttttcatcggggcgggggaggtgagg

SEQ ID NO: 66685 - DNA, 333 bp, Homo sapiens
cagatatggggagccaactgaattgtttttcttgtttatctttcctatttattattctctttttaatttttgacttttttgaacttttctttttagaaatatgcttacccatgaatttattgaaaaccaaaatgtcattattttaaattagtcctattcttattggatctgattttttggggggaaaaaacttccttctttgataaatacatttcattcttctttctcatgtttttaaagaaaaaagtagtattgctatctctcgtggcctaaattgagagagatgtctttggcaatgaataacctctccttgtttgaatgacttttttttaa

SEQ ID NO: 66686 - DNA, 3549 bp, Homo sapiens
  misc_feature (467)..(467): n is a, c, g, or t
  misc_feature (974)..(974): n is a, c, g, or t
  misc_feature (2770)..(2770): n is a, c, g, or t
gaaggcagcatgaggtcagcacacataattcaattcaaagtcatcagacttcattttttccctaaaaagttgctgaaaacagaggaagaaggaagaatgcaaggaacaagaaagaaaaattgccagagctttaaatgtcaaagaataataaacacacaggagcagatcattccggcagccagccttggcttcgttttcttttctcctgtcttccgcatctctgctggtgctccactttgtcacatacagtttttgttcccagatcttagagttttatctttacagatgttcctgtttatttcaaagaagttatgtcacttttctcttccccccccaagatggtacccaccttattgtagaaggaatgttatcttcgaagcccttctcgcctcttagactcaggtgtgcctctattgtaagaggcaaaagtccacgttctcgtggcctccttctcttgctttccacangctgctcagctcactgtgcttcttctgggttagccttcttgctatttcttaaaaacctcctgtttcttacattaatggcaatcaccttgcatcaacctaatggattctgtctcaggagtctttgcacctgctcttcccactaactgggatgcatttctgaggactcacatgatctcctaacggtctctcgcacccgcacaggttatttgagaatctgctcagatgtcaccttgtcagaaaggccttctttgaccaacatctataaaatatcccttaatccaactcctttcctctccttttattctttctttttttcctctgaagatggggccttcctatgtttctctggctgctcttgagctcctggtctccagcaatcctcccaccttggcctcccattgtactgtgattgcaggcatgagccaccacacacagccccttttatttcttttgatagcgctactcattacctggcatgacagcacatattaatttgtgtacgtctanactttttataatgaaggtgtcacaaaatcctgaactgctagtgcaggggtctatgcattaggggctccagagagaacccttctgccattgtgacacgcccactgaagtcccagagtctatatagagtaggtgcccaataaatataactgaatgaatgaaggtttctcacttatttcattcatttcttcgcacttggattccacttcgttatagagacttctgttaagtacctgtaatcaaaggactttctttttggtttgaactatgtgatttgttgaaaggctgaggagggaatgagcttactaaaccgtactccctgtcaaaacatttattggctttaccacacacttagtgagaccctattgatgctgcattttgagggcactaaaaactaataagccagaagaagtggccggcatatgtggtctaatagattcaaggttgaagaatccgcagcgacggtaatttgcacaagtcaataagtacttcctagattgtctatattttttaagatacagagtttttatacctagttgagaaacaacaaaaatatgtacttagtgttctatcgtccatgcatgctttatttccaatgaaactcagaggaaataggtatttccaacagtgtttgccatagttacacccttttctagggctctgctcattttattccatttcacactcatctttttctgttgagaacctatagaaataatacaagtaagtaacatttattgtgcactttctatgtgcccggcattgtgccaaggccttttcatgtatttcctcacttaattcctctactcaattaggcaggtaaaataatatagttctcattttaaagatgagaaaaccgaggcttagaaaggctacacagtcaggatataaagccaggtctgtccaatttccaagcctccacttgtaactgcctggtagaccctctcctcgacttccttttccttttttttttttttttttttttgagatggagtctcactcttgtggcccaggctggagtgcaatggcatgatctcagcccactgcagcctccacctcccaagttcaagcgattctcctgcctcagcctcctgagtagctgggattataggtgcccaccaccatggctggctaatttttttatttttagtagagacaggtttcaccatgttggccaggctagtctccagctcctgacctcaggtgatccacccacctcagcctcccgaagtgctgggattacaggtgtgagccaccatgctcagccgaccctctcttctacttcctgaggcccatacaatcaaaatcctctggcacctggaaccaggtagaaatgataggtagaggtgtagaagtcttacagttaccccaaacccccacagaggcatgtccctaataatatatttgtaaaccgacaaaagaaaactagctttcagaataacacagaaaatgaattattggctgctacaaaaatttaggaatctggagatcttgggggcatagatgaggttaaccaagcagcacctgggtcccagcccaggctacaggccccaaaggaaggacatgaggacagaacaaggaggaatgaggtccaggaaagagctgctcatcagatcccaggattttaaagtatgctgagtgctttcttcctattaccctgtagttccagctttgatctgaagggaagaagttggttcccttctaaactagatttgttttatgacctaaggcatattcatttgggcaacatgagtatgacatttttctcccaaccatgttaagtctaattaatttatcangcacttgccagtttgcccattcttgcccataactaccctcaaatcttcaacttttaaggtgaatttggttttgaagttactgtcatttcttatggcctactggaaattttctggtgtgtgttttttttttttaatgtttgcattttctaagactactgtgcttttgtatgtattcatttaaattgtcaaaaaggatgttgtcaagatatgctgaatgagccccttcccccagaaatgttgccatattaatgggatattagccctttactgacttggaggttgcatcttctcaatccggtaattagctgaagtgctacattttaaaaaataatttaagctcttttttcattatttttttttcaatttttcagaaggcaagttcagacacataggtttatacaagatgaaaatattagataaaaagtgatacatctgaattatgtattttaaacatttttacttaaataccacacatgtccacatagcattatttatacacattttagtaaaactagctgagggtgcttgggggtagggtattcagttagtaacctgtatctaagttgatacatatcttccctaacctgtttacttgattgaattgattagggactattaaaaaataaaattatctttgagaagcaaagagtaaacacatatataacatggttctagttcttgtactggactcaattcagtctgtaatttttactgagtccctacaaaggccttatgctatgatgggtgctaccgaagatacatccgtagtttttgttttt

SEQ ID NO: 66687 - DNA, 393 bp, Homo sapiens
ccccacaggctcagaaggcaatagggaaaatgtttccagggcatgtcagagactttcatggcagctgctctcattacaggcccagggactaagataaaaaactagtattttggggctggcccagagcacccctagagactttgttccttgtgtcccagctgctccagccatggctaaaaaaggccaaggtacagttcaggccacggctctagagggtgcaagccccaagccttggtagcttccatccttcctgcaggtgcacagaagtgaagaattgaggtttgggaatctctgcctagatttcacaggatgtatggaaatgtctggatgtccatgctgaagtgtcctgcaggagtggagtccccatggagaacctctgccagggcactgcag

SEQ ID NO: 66688 - DNA, 3314 bp, Homo sapiens
  misc_feature (3308)..(3308): n is a, c, g, or t
  misc_feature (3310)..(3312): n is a, c, g, or t
  misc_feature (3314)..(3314): n is a, c, g, or t
ctgggacctgtccccaggggaattatttctaatacccttgataaaatgtacaaagctagggtaggaagtagcaaggtgacagcagtggttaggtggaaagtttctctaagagaaagaactaatgaattcgttcaattgaagctttttaaatatatttattcctgtcacctttcaagtcagcagctttttccaggtgacatggcaaaagggcctggcaagtgcacagggttaagccaaggactatcaatactgctccctaaaatattttcacctctggttttggggatctgcttcttctcggggtctctcctgctgctttcctggtaatagcacctaagagacccatgaaacaaatccccagttcaatacaaatttatagctgagtaaatatgagcataggctttaggaatccacagaattggagctttgcttaataccagccgggaaaatgtggttgtcagttaacctctcagagcctcttcgaggcttggttcgctcatctattaaatgagtctgaataagccctactcctccaggttgttgctagcatcagacgagaaatgtatgcaaagccccagtgccatggctgacacacaggaaacattcaacaagtggtagtgcattttcactaagtaaaaggagtaatgatttctttagtggtttcttttaacacaggggtttctatccatcccaaatagaggatagatattctaataaaacaatcatttatgtgatttgtgattacaccgtacaactcaagttcctgtggaatgtttagcgtaatcaatccgaagctctcagcaagctccctgggcctgattttcaaatccaatgttactgtagcaaagaactaaaggaggggaagaaaagcaccactgtattaaatacaccctcctcccctttttcctaaaggctgtttgtccccttctcttgataaatcttcagttcccagagagcagagactcttgggaaacaggaagtagcaaaatgccagtgagaaaatccccagatgaagagcagcaacaagtctccgggcaacagtgtggtcaaaagggggaaattcccccatcagcgctcaaaaacagtccctcaggaaagcttagtgaaggttaatttgggaaattccctcagaggccatagaacagaaacggaaaactgctgtttaagagaaatctgaacggagcaagccagttcgtggctgcctggggtgctctctgcgtgaaccgcgctgctgctccagcctgacttcccccttttcatcctgatcctgagggcaaccccgaaggggtccagttgccagagccacttgacacccaccctgcccaggctcccaacccaggagaattaatgccgcaacacccagcctcttgaaacgagctgctgctaaagcagatttgcctccccgttaggacctcctgtgacccaccctcattcctgtccccatggtagactagcaagccacagtcatcatactgtgagtgtccctcacagtcacttgctataacaagtccatcaggttttactgggttttaatctaaatgtgaccttaggatgacatttcttagtgctgctaagctccaagaggcagggaggaatcctccccacaaagaagaagaaaaaaaaaatcacataaacattgtcccatgaaaggcttagaatggaatatcctctgatcagctgaagcagagaaagcatataaacactgctggaaagggggctgggtcaggggcaagtactggctctacagagccctgatctccagatgcaagcgaggcccagttccctgctgcaaccagctctccgtgaatcatttccattcccataaaacttctatttgctgttttgttttgtttttttatgtgtgacttaaaatgaccatttcaagaagatgacaaaaaggagatttcagtagaagagagaggaaagtagactccatcatgacagcctaaatttgttttactgtacacttacgcaaaataggtatcaaattttggaaaagagattttaaaggagaaagtactctgggtttaaaattctattaaaaaatatgctctactagagcgtgtgtgccttttttatgtaatcaggacccactgctgtatgagtcacaattatagattctactttcaaatattttttgactcctagaaaacagccctgacaaaaaccacttttctgatgtcttcaaacaaacagctactttcaaagtctcctacacttgaaaattctagacagactgtcaacatactctcaagaagtattctttccatttttcttctgggaaaatagcaggaattttggcccctagggagaaatgcagaaggagtagcaaatgagcacactgactggaaagaatgctatttgtctttcactatgtggagttcagaagagcactggccattggcgaagtcccagaagtgaaggtcaagttacagcttaatctgggctcataccctgcaactgagtccaccttcagatggtgcttccactaagaaagctgtgggatgcctacgctgcattcattagaccctagcaatataaatattgctcgtttccactagggaggaaaacaactctgctgtcaaatttgctgagcacaaagtgaaaggaagtctgcaatctgttggctaattaagacccattaaatctgtacttggatcatggaagcttgtagggactagccatgtcagtcccaccttgaagacagagttccaggctggattgcattttctagaacaaatcctttaaatattttcattcaaagagaacagtaatgacagcttccaacaatcaaactgaatattttagtagaagcttttctagacatttgtgttgggataactaatggaactaatagatttaagaaatttcagaactcctaattaagccctggatactgcctcagattctgaatgactgaatatattgggcattttatgcctcatccttcatgtagtccaacaaacacctattctatatttattctaaaaaactttactaaaaactttactaatattaaattttctaaatactttctaaaactttactaatattaaattttttacttaagatcttcagaaaattttccaaattttataaattgtatacatttttgatgctgctattgctatagatgtcttctggaagttgagttgtgcctttaggaatattttcccactacatcactgtaatgagtgttacaaaaaaagtctctgtacattctgcatgccttgattaaatgtattaattttctaccaaatcactattcctataagtgtttaaaataaaaatgaatatggtcttcaaanannnan

SEQ ID NO: 66689 - DNA, 371 bp, Homo sapiens
ttcctgagtttcaccctagacttccagaattagaaattccagaggtggggactgggaatatgcattttaaatgtcctcagcaaattctgagacacaatcaagcaagacaattatttaataaccttagtgtctttcctctccaactgtacatacctgaagactccatcctacttgtagaaaaggagataacaaaggttcagtacctggcatttacaaggacctcaatcaatacttgttccctgaatcccttcttaaaggaactgtggacttcaggagccagaagacaccagaggtccctttccagtcccttgaagtaaaataagtctgaggctgtctctaatcacctccgcacaccgagggcctaatccatc

SEQ ID NO: 66690 - DNA, 893 bp, Homo sapiens
ctccctcagctgagacttctgtgacaaatgccacagatacacagattaaacaacagaaattgatttctcacagttctggagcctggaaattcaagatcaagctgctggtcagtgctgttcctagtgaggtctctcttcctggtttgcagacagctgccttctcattgtatcctcagacggtgaggagagagagagagtgagcaagctctcttctctcttcttataaaggcactaacctcattatagggccccatcctcataaccttattacctccgagtcctcacctcctaacaccataggaggttagggtttcaacattttaattttgataaatattcagttcataacaggtctgcacctggggtccatataggtcagttttatttccagcagaataatggtgatctgtaccaccattacacctgcctgtatgcaggcaacccatattcatggctttccataaatggctttattctttccgaaaatggcatttttatttcgcttactgtgtgtgtgattaataccttctcatggttcaaaataaaaataaccaaaaagtcccctgctggctctgtgctcagcctcctacaacctcaccaggagcagccagtgtgaccagtttcatgcgggccctagagatattttatgtagttacaagcaattgcatatgtatttcctgttttggcataaatgttagcacaccatacatacgttgttctccatgttatttttatgtaataagttggagatatttccatatctctagaaggaaggagatacgaaaacaaagaatttctttttgtgtgtgtgccacaatagcaaagaaatttcttcattttttaatggtaaaatacacgtaacataaaattcaccattttaaccattttactaa

SEQ ID NO: 66691 - DNA, 360 bp, Homo sapiens
tacttccaatttcatcacttgaaatattaaaaagacatattcaaggataaaaatgtagtaaaattttcactgattcatcatagacattctttttatttttgagacagggccttattctgtcacccaggctggagtgcagtagcatgatcacagctcactgtagcctccaccttctgggctcaatcaatcctcctgcctcagccttctaagtagctgggactacaggcatacaaccaccatgtccagctaaattttgtattttttgtaaagatagggtttcaccatgttggccaggctggtctcaaactcctgacctcaggtgatccacctgcctccacctcccaaagtgctgggattaca

SEQ ID NO: 66692 - DNA, 564 bp, Homo sapiens
ctaaaaataagggacaagcttaaaccctgcctctaccgaaaatacaaaacttagccaggcatggttgcatgtgcctgtagtcccagctactcaggaggctgaggcaggaggatagctagagttagggaggcagaggttgcagtgaaccaagatcatgaaactgtactccagcccagacaaaagactgagaccctgtctcaaaaataaatacataaataaaaataagggacatgcaaacataaaatgtggggcagagattactcttggcaggaccaggtggctgaggcctgtaatcgcacactttgggaggccatggtgggaggattccttgaacccaggagttcaagacttgccagggcaacataatgagacttcatctccacataaaaacattaaaaattagcttggaatggtggtaagtgcctatagtcccagctacaggctggggccagaggggtgaggcgggaggaacacttgaactcagtagatcaatgctgcagtgagctctgattgcaccactgcactacagacttagctacagagtgagatcccatctcaaaaaaa

SEQ ID NO: 66693 - DNA, 473 bp, Homo sapiens
caccccttacccttggcactttctggggtcttagaagccctggatagtggtgtaaccctcgggtggggtaacggtaccctttctctgaccctgggctggaggttacttccttggaggccatatcatctcttttaggacccccaaaatacaaattttccatggatttatatcatggggctaggggaacccagagggtcctgctcccactctaggggacagagaaccctaaccctgtgggtccctccctggtctgcccagccttactcttcttcctccacagtttcactggatagtggtttgtttcagggcattcccgggagacttaagcttgccactgcccctcagtcatgtgagagatcccctccttgggcctttgcagggaggcaggggtggagatgtatgggatgctacgtgctcagtcctgggagaccgtggaattccttcagatcacaatatctattggcaatgtcatc

SEQ ID NO: 66694 - DNA, 352 bp, Homo sapiens
tcagcctcccaagtggctgggattgcaggtgcccaccaccatgtccagctaatttttttgtattttgagtagagacggggtttcaccatgttgactaggctggttttaaactcctgacctcaaatgatccacccacctcagcctcccaaagtactaggataataggtgtgagccacagcaccccgccaatatttttgtttctaataaaacaagaactagtagtgcactccgtctagagcaagatagtgtggtggggacagggagcaagtaggtaggggataaataggtcaagaactgaattcacaattgaggctttaagcttgataagaaataaagcaagtttgaatcatct

SEQ ID NO: 66695 - DNA, 417 bp, Homo sapiens
atacccttttgaacaacgagatctgaaatgctaaggataaagcagccatctgctggccatgagaagagaggcaataggaaaaaaaaaactacattctaaagatgaagctgtgttacctgtaatctctagtactgctctgcccccttgtgctgctgcagtgaactcgacagaggaacagtgtgccttcgtctctgtacatgaactacagaaaaaccccactgtcacttctcacttttctgctgtattacaggaaccgttacataaacggagaaagtgaaaatcaatcctagctgacagtgacttcgggataatcagcgctcactggatgcctctgtcagttcgcctgcatcaaacaccgtgtgacttctgtcagatctttttaataaaactatattctcactttcagcaacctaaata

SEQ ID NO: 66696 - DNA, 112 bp, Homo sapiens
aaaacaaaagataatgcatggagaacaaaggagataagtaaggagtatgggggttccacagaagacattgatgtggagtgatgtaagaaatccatgtggaaatgcctagcag

SEQ ID NO: 66697 - DNA, 711 bp, Homo sapiens
acaccaccctgaattcaccagaactttggggagaagctgagaaaccccctaggtccacagaattgaaagaagccagaactggtaagagaaacaatcaattcggactgtgccaccactcccagctggcatagtgtcactcagagaatgtctctagatccatggtttccaaggtgacaggagagaattacaggtgagcattttatctccccactgatctggtcatcttcatgggacacccactctggccccgtcccacaggaaccactgggaatgccaggatagctgaatgacctggggtgaactggggacaaaaagccaagcactgattgcagcaactggtgtactggtgcactctgagctctgatcagtggggacaccatggtgaagggactggctggcacaatccacagggaggtccaaatccctggctgcattttccacgagcctaggtatactcgagagccctcccctggcctggaaacaacaaaaagctcaagattaagttctgatacccacttacatcttccctgaactgggaaatgttgacagagcagcaatatagttccagggcaatgtttaagttccagtgctcaccgcaagtctcactcagaacaggaagaaacaacagaccagagtttaagttccaatactaagtagcaaagctctgacaccaccaagaacccttaaaaaactgtcagaggtgactatctt

SEQ ID NO: 66698 - DNA, 466 bp, Homo sapiens
atgtgtatcaaacagcatgctgtaaaccttaaatatgtacaataaaaataaaacttaaaaataaatagaaaagagagaagaaactgaccacacccccgcccaccccactgactacctgtgatttttccatggttggtaggtggtcaatagattcatcattgatttggtacattttccgaagtatgtgctatggtatagataggtatttggtctcggtctctctccctctctctctctcttttttctttctttctctcaccttgaaaaatagagcggtatttggagaggaggaaaagccaggagaaagttctcaggtcattttgaagaatgccaagttaaaccaagcaagcaagttttgcacccgggacctcttcagagccttgactcttttaagaagcatcatgggccgggcgcggtggctcacgcctataatcccagcactttgggaggctgaggcaggtggatc

SEQ ID NO: 66699 - DNA, 495 bp, Homo sapiens
tctagagatggtagaagggaggtgggattccagggctaagtggttccaggtggtcccagcctaccagctttcagcttttcattagtgtccccttcaaggcaagccccatctctttcagagagcaaacatttacattgatctagggtcgctggaggccattttaccttggaagtatctgggagttgggagctgattaagggcaatacagaacaaatagctcagagatggtctgggaaagaatgaagaaagtaaaattgatatttggggtgaggggtgcagcttttcctgtggaagcagtgtgcagtaatccagggcactatcactgctgtgagtcatcaacttctgggtctctggctcagacaatcttagaaagccagagctggggggtaggggtgcctgttccaaggtcatctagtccaaccctcgcattcgagagatgtggaaactgttgcagagtccatttgtgcccactgaatatccatgtgcttccctgaa

SEQ ID NO: 66700 - DNA, 452 bp, Homo sapiens
caaatattttcagttcattttttatgaacgcattctgactgttccatcccacccacttaaattttcccatggctacatgattttttttttgccgatggaggtgagaagaaataacatgtgactttttcaggagaaatctccaagaaacagcgttctattccgcatgcttttttctcttttctatagcaatggggatcttattgatggtccctccttccttctggattcctgtgttaggatgacacagcacagagctacctctcacctgacccgtgatgagatgtaaataaatgaggaagaagatttttgagccactgaaatttggaggttgtttgtcaccacagtttaagctagcccccactgactgatgcacggctgaagaatgagtccgaactggctctggacaagacatgtgaagagcgctccaggctgagtaaaattcaagggttgcc

SEQ ID NO: 66701 - DNA, 504 bp, Homo sapiens
aactcctgatgtcaagtagtccacccaccttagcctcccaaagtgctgggattacaggcctgagccaccgcgctcagctgaggatcgtgatttttattgggctttccatctctttacaaaatcagtactattaattcagagacactcaccatgagaaaacctgctttcatcgaccttttacaagtgggtagacaataaagcccactggttagtaagtaaacacaaagtgctaattttagctaaaaaaaaaaaatgtgctgcccacactaatctcaagttcagttttttccttcttacatacagctggccaaaaaaaaaaaaaaaaaaaaagcccaggatgacagaaataaattttttcaaacaatatgaaaacagatggagtggctggagatacacaaggaggcagggacatgctgctctctgagccctagtacgtccagccctccttctggccccattcaatgggttacacagggcaccacttggccaggggtttcccaggcc

SEQ ID NO: 66702 - DNA, 389 bp, Homo sapiens
ggcaaactcaccctctttgcaccgctccaagccataagaaacaacccactctctaaaaaaatttttaaatttttatagagacggcacctctctatgttgcccaggctggtcttgaactcctggcctcaagcaatccgcccacctccgcctcccaaagtgctgggattaaaggcacgagctactgcacccagccacaaatgttttaaaaaagtttataataatatgggaaaggagaggactttggtattatattaaactagaaatccacaggacatgggaacagtatccaaaatagtgtgtttttgtacatacacacataactcagaatgtgtcaagaatttttgctcagaaaaaaaaaagtcgacgaaggaaatgcactagaatgttaa

SEQ ID NO: 66703 - DNA, 879 bp, Homo sapiens
tatcgagccctggctctccgggcagctggaggggtcgcgctgcgcctgttggggctgcacctcggaccagggcttctgctgcatctgcagccatgtcgggccgctcagtgccacatgcccacccggccaccgccgagtacgaatttgccaacccgagccgcctgggtgagcagcgcttcggagaaggcctcctgccagaagagatcctgacccccacactctaccatggctactatgtccggcctcgggccgccccagctggggagggcagcagggcaggggcctccgagcttaggctcagtgagggcaagttccaggcatttctggatgtgagccactttaccccagacgaggtgactgtgaggactgtggataacctgctggaggtgtctgcccggcacccccagcgcctggaccgccacggcttcgtgtcccgagagttctgccgcacctatgtcctgcctgctgatgtcgacccctggcgagtccgagctgctctctcccatgatggcatcttaaacctggaagcacctcggggtggccgacatttggacacagaggtcaatgaggtctacatctccctgctccctgcgcctcctgatccagaggaagaggaggaggcagccatagttgagccctgattgccacagacccagcacccagcaaatccctctctacctcccaaggtgatatgggcagctgcccaccactccagagcttgaagctcaagttcatggcttcatcaaaagacgcttcaaatcctgaagttgagatagctctcacctggagcccgtgtgttgttctaccctttggctgggaacacagtcacctgggaatcattccagcaggtggcttcaaaagtccaacctgctaggttga

SEQ ID NO: 66704 - DNA, 839 bp, Homo sapiens
tatcgagccctggctctccgggcagctggaggggtcgcgctgcgcctgttggggctgcacctcggaccagggcttctgctgcatctgcagccatgtcgggccgctcagtgccacatgcccacccggccaccgccgagtacgaatttgccaacccgagccgcctgggtgagcagcgcttcggagaaggcctcctgccagaagagatcctgacccccacactctaccatggctactatgtccggcctcgggccgccccagctggggagggcagcagggcaggggcctccgagcttaggctcagtgagggcaagttccaggcatttctggatgtgagccactttaccccagacgaggtgactgtgaggactgtggataacctgctggaggtgtctgcccggcacccccagcgcctggaccgccacggcttcgtgtcccgagagttctgccgcacctatgtcctgcctgctgatgtcgacccctggcgagtccgagctgctctctcccatgatggcatcttaaacctggaagcacctcggggtggccgacatttggacacagaggtcaatgaggtctacatctccctgctccctgcgcctcctgatccagaggaagaggaggaggcagccatagttgagccctgattgccacagacccagcacccagcaaatccctctctacctcccaaggtgatatgggcagctgcccaccactccagaggtagcagcatccttgggggaagggaaaggtgcatggtccacaatgtatggtttggtcccatgggacatgtcatagccttggtttagttttgggtggagctgaataaacccaaatctcagggc

SEQ ID NO: 66705 - DNA, 457 bp, Homo sapiens
actttaggcaaaccaaagtggaaggtaaacgttacccttattttatagcttccctgtctaattctcaaagtttttatgtatataaagttgcctactatgcaaataatttgaatatgttaatgttgcctaagtgatacatctcttcatctgtatgcatgtgattaatataacctgaccaccttacgcagggggctgaaaccattgcaacaatgattaatcatttctgaataatatatgccccactagaaatcgtttcctcccacgattaatcatttcagatatgaagttttcaggtggggcaacacattttgccccagtttccattcatattctgcattatagatcaagcaaatagaaaatcagcataaaagtttacattgatccagcagccttagtttaaattgtttaatatctagaactaactgtaaaactcttaatgcagtcacttaaaaaaaaa

SEQ ID NO: 66706 - DNA, 3917 bp, Homo sapiens
cccacgcgtccggatggtcctggtcacaaaatattaaagagaccgaccgctaagggaacaggaaaaacgtccgagacagccgttgcaattacgaatggaccagacttggtagcacggggcattgattgctggtgcccaaccggaccctcctcccctcttcccatcccttcccccacccaaagcaggctcccgctgcggccgggacctcgcatccctgcaacgtggccggggctgcatttttcatgagcctagggtgaacaggtgcgaagtgcgctgggagcatccggccagcggccgagcgcggggaacatggagagcgagcgcgacatgtaccgccagttccaggactggtgcctcaggacttacggggactcaggcaagaccaagacggtgacccgtaaaaaatacgaacggatcgtccagctcctcaatggctccgagtcgagctccacggacaacgccaaatttaaattctgggtcaaatcgaagggcttccagctgggccagccggacgaggtccgcgggggaggcggcggcgccaagcaagtgctctacgtgcctgtcaagaccacggatggcgtaggggtagatgagaagctatctttacgacgggtagctgtggttgaagatttctttgacattatttattcgatgcatgtggaaacggggccaaatggagaacaaattcggaaacacgctggacaaaagagaacttacaaagcaatttcagagagctatgccttcctaccaagagaagcggtgacacgatttctaatgagctgctcagagtgccagaaaagaatgcatttaaacccagatggaacagatcataaagataatggaaaacctcccactttggtgaccagcatgattgactacaacatgccaattaccatggcctacatgaaacacatgaagctgcagctgctaaactcacagcaagatgaggatgaaagttcaatagaaagtgatgaatttgacatgagtgattcaacacggatgtcagctgtgaactctgatcttagctccaatcttgaagaaagaatgcaaagtccccagaatcttcatggccagcaagatgatgattctgctgcagagagctttaatggcaatgagactctggggcacagttcaattgcttcagggggaacacacagcagggagatgggagactccaacagtgatggcaaaactgggctggagcaagatgaacagccactgaacctgagtgacagtcccctctctgcgcagctaacttcggaatacagaatagatgatcacaacagtaatgggaaaaacaagtataagaatcttctaatttctgacctcaagatggaacgagaggcgagagaaaatggaagcaagtctcctgcacatagttactccagctatgactctggcaaaaatgagagtgtagaccgaggagctgaggacctctcactaaacaggggagatgaggacgaagatgaccacgaggaccatgacgattcggagaaagttaatgagacagacggcgttgaagccgagcggctgaaagcttttaatgatgagtctgctccagctgacaaacagtgtaaaccagaggcgacccaggccacttactcaacatcagctgttccaggctcacaggacgtgctgtacatcaatggaaatgggacctatagttaccatagttacagagggctaggagggggtctgctaaatctgaatgatgcttccagcagtggacccactgatctcagcatgaagagacaattggcgactagctcaggatcctccagcagctcaaactccagaccccagctgagtccaactgaaatcaatgccgtgagacagcttgttgcaggatatcgagaatcagctgcatttttattgcgatctgcagatgaactggaaaatctcattttacaacagaactgagacagacgaccaccatattcactgaggtctaaatttgcagtttccactaatgacattttgatttcccaacagagatacttctggtcttactgcacagtcttttaagagaaatacttccattatgccacattgtccttgatccgtaagtgatgtgttaaggtgcttcaaaggaactctgacctctgaagtacttgagctactttagtatgtccagcctattgctttttgttttagtgtgtcaccataaatatcaggggcataaaaggctatctattcttaattcaaggataaaacagaagaagcttgtggtataaaacaatagttcaagatccagctgaaatattagtggaatttgctactgactcattggactgaaagctgaagtacctggcaaaaaaaaaaaaaagaaaaaaaaaagccaaatttcttgttgctacaggatataacaacaatgaaaaggatctcgtattttaaaaaaatatgtaatttttataaaaagaaaacttgtttttcattcaaacttgtcatttttactttggtaactttttcataggtcctaaaagaaaactgttttgagaaactactgtaagtaccttttccacatccctttgccttctcctctttccaaattctttctacaaaaataacacttgatgctggaaaaacccttgcctacgttctttcaatcgtcacatcaggaactacttccaagagaagcctgcatttctgctctcatgctgatctcaaaaaccccactcaacactgcaactttatcatagcagttttcatcccagaattttttttttaataatgacaagacatgttgttgaaaaaaaatcacaccttggtttcttagagctgctcgttcctgattgccgctgctgtctccaggcatccctctagcagcacctggatgtagatgactgaatgttaagaggttgcaagtgacaatctgaaaatttgcactcttgtgtgtagttttcttttcatttctttcagaaatagtttccaaaaagaccattacatctcctgatatgatttgtataattttcagttctagctaaaaataatgtaaggaactctcagcggatgcagctgcaacttacaatgaactgtgccctcctatcccccatactttacccttctttcttattttatagtgtgggatacacatgagtgatgttttctttgtgcactgagacaagcctattttttaaatatttagggagaagtactttagttcatgcttcttatacaacttttttctgttgtttagctttggttggattacaaattctttgtgcattcctgaatttgccttatttcatgtaaaatttatgtcattcagtttttgacaatgagtttgaggcatcagtgatatttcttatctacttgttacatatagtttttcaagtaatgactgtgattgtgaccgagtaatgtgcactttttcttgtaactgtggacattgctatgcttttttcttctagtgtttctagaattactgttccttacaattatgtaaacaaaaaacaaaaaaaaaacttttgtgatactgttggtgaatataatgtgaaaaatcttattgaaatatgagtattttggaaatacatagctgcacaaacatcttttaagatgtggatttagagtttgcttatttaaatgaaaattcaaaaattgagggctggtataattttctctgttttgtttggtttaataaacagatttctgtgttaaaagaatgattgtcaaaccttataaactttctgaagggtataatgcttaatttttagccatttacttttaaaatctaaaacgccattttctacctacgtttagcacaaaattggcacttcaaatttatttctcaagaatatcctaagatcccccagggtctcaacattcattctaataaagaatttattccaagaatgggtaaggaaattaggaagccaagactacttcatttgattattcaaatatgaatagagaatatt

SEQ ID NO: 66707 - DNA, 3172 bp, Homo sapiens
agttcgacggagactctctgcagcaagatgatgattctgctgcagagagctttaatggcaatgagactctggggcacagttcaattgcttcagggggaacacacagcagggagatgggagactccaacagtgatggcaaaactgggctggagcaagatgaacagccactgaacctgagtgacagtcccctctctgcgcagctaacttcggaatacagaatagatgatcacaacagtaatgggaaaaacaagtataagaatcttctaatttctgacctcaagatggaacgagaggcgagagaaaatggaagcaagtctcctgcacatagttactccagctatgactctggcaaaaatgagagtgtagaccgaggagctgaggacctctcactaaacaggggagatgaggacgaagatgaccacgaggaccatgacgattcggagaaagttaatgagacagacggcgttgaagccgagcggctgaaagcttttaatatgtttgtcaggctgtttgtagatgaaaacttggaccgaatggtcccaatctctaagcagcccaaagaaaagatccaggctatcattgactcatgcaggcgacaattccctgagtatcaagagcgtgccagaaaacgtatacgtacttacctcaagtcctgcaggcggatgaaaagaagtggttttgagatgtctcgacctattccttcccaccttacttcagcagttgcagagagtatcttggcttcagcttgtgagagtgagagtagaaatgccgccaagaggatgcgtctggagagacagcaggatgagtctgctccagctgacaaacagtgtaaaccagaggcgacccaggccacttactcaacatcagctgttccaggctcacaggacgtgctgtacatcaatggaaatgggacctatagttaccatagttacagagggctaggagggggtctgctaaatctgaatgatgcttccagcagtggacccactgatctcagcatgaagagacaattggcgactagctcaggatcctccagcagctcaaactccagaccccagctgagtccaactgaaatcaatgccgtgagacagcttgttgcaggatatcgagaatcagctgcatttttattgcgatctgcagatgaactggaaaatctcattttacaacagaactgagacagacgaccaccatattcactgaggtctaaatttgcagtttccactaatgacattttgatttcccaacagagatacttctggtcttactgcacagtcttttaagagaaatacttccattatgccacattgtccttgatccgtaagtgatgtgttaaggtgcttcaaaggaactctgacctctgaagtacttgagctactttagtatgtccagcctattgctttttgttttagtgtgtcaccataaatatcaggggcataaaaggctatctattcttaattcaaggataaaacagaagaagcttgtggtataaaacaatagttcaagatccagctgaaatattagtggaatttgctactgactcattggactgaaagctgaagtacctggcaaaaaaaaaaaaaagaaaaaaaaaagccaaatttcttgttgctacaggatataacaacaatgaaaaggatctcgtattttaaaaaaatatgtaatttttataaaaagaaaacttgtttttcattcaaacttgtcatttttactttggtaactttttcataggtcctaaaagaaaactgttttgagaaactactgtaagtaccttttccacatccctttgccttctcctctttccaaattctttctacaaaaataacacttgatgctggaaaaacccttgcctacgttctttcaatcgtcacatcaggaactacttccaagagaagcctgcatttctgctctcatgctgatctcaaaaaccccactcaacactgcaactttatcatagcagttttcatcccagaattttttttttaataatgacaagacatgttgttgaaaaaaaatcacaccttggtttcttagagctgctcgttcctgattgccgctgctgtctccaggcatccctctagcagcacctggatgtagatgactgaatgttaagaggttgcaagtgacaatctgaaaatttgcactcttgtgtgtagttttcttttcatttctttcagaaatagtttccaaaaagaccattacatctcctgatatgatttgtataattttcagttctagctaaaaataatgtaaggaactctcagcggatgcagctgcaacttacaatgaactgtgccctcctatcccccatactttacccttctttcttattttatagtgtgggatacacatgagtgatgttttctttgtgcactgagacaagcctattttttaaatatttagggagaagtactttagttcatgcttcttatacaacttttttctgttgtttagctttggttggattacaaattctttgtgcattcctgaatttgccttatttcatgtaaaatttatgtcattcagtttttgacaatgagtttgaggcatcagtgatatttcttatctacttgttacatatagtttttcaagtaatgactgtgattgtgaccgagtaatgtgcactttttcttgtaactgtggacattgctatgcttttttcttctagtgtttctagaattactgttccttacaattatgtaaacaaaaaacaaaaaaaaaacttttgtgatactgttggtgaatataatgtgaaaaatcttattgaaatatgagtattttggaaatacatagctgcacaaacatcttttaagatgtggatttagagtttgcttatttaaatgaaaattcaaaaattgagggctggtataattttctctgttttgtttggtttaataaacagatttctgtgttaaaagaatgattgtcaaaccttataaactttctgaagggtataatgcttaatttttagccatttacttttaaaatctaaaacgccattttctacctacgtttagcacaaaattggcacttcaaatttatttctcaagaatatcctaagatcccccagggtctcaacattcattctaataaagaatttattccaagaatgggtaaggaaattaggaagccaagactacttcatttgattattcaaatatgaatagagaatatt

SEQ ID NO: 66708 - DNA, 3282 bp, Homo sapiens
gagaatttaggggaagtcagactaatccctgggtgcacttcgagagaaaggttggacctcgcctgagggatgctggatctgcaatgatagaattggcctgccacagacattggtatttaagttgaagagcagaattcacaatgattctgctgcagagagctttaatggcaatgagactctggggcacagttcaattgcttcagggggaacacacagcagggagatgggagactccaacagtgatggcaaaactgggctggagcaagatgaacagccactgaacctgagtgacagtcccctctctgcgcagctaacttcggaatacagaatagatgatcacaacagtaatgggaaaaacaagtataagaatcttctaatttctgacctcaagatggaacgagaggcgagagaaaatggaagcaagtctcctgcacatagttactccagctatgactctggcaaaaatgagagtgtagaccgaggagctgaggacctctcactaaacaggggagatgaggacgaagatgaccacgaggaccatgacgattcggagaaagttaatgagacagacggcgttgaagccgagcggctgaaagcttttaatatgtttgtcaggctgtttgtagatgaaaacttggaccgaatggtcccaatctctaagcagcccaaagaaaagatccaggctatcattgactcatgcaggcgacaattccctgagtatcaagagcgtgccagaaaacgtatacgtacttacctcaagtcctgcaggcggatgaaaagaagtggttttgagatgtctcgacctattccttcccaccttacttcagcagttgcagagagtatcttggcttcagcttgtgagagtgagagtagaaatgccgccaagaggatgcgtctggagagacagcaggatgagtctgctccagctgacaaacagtgtaaaccagaggcgacccaggccacttactcaacatcagctgttccaggctcacaggacgtgctgtacatcaatggaaatgggacctatagttaccatagttacagagggctaggagggggtctgctaaatctgaatgatgcttccagcagtggacccactgatctcagcatgaagagacaattggcgactagctcaggatcctccagcagctcaaactccagaccccagctgagtccaactgaaatcaatgccgtgagacagcttgttgcaggatatcgagaatcagctgcatttttattgcgatctgcagatgaactggaaaatctcattttacaacagaactgagacagacgaccaccatattcactgaggtctaaatttgcagtttccactaatgacattttgatttcccaacagagatacttctggtcttactgcacagtcttttaagagaaatacttccattatgccacattgtccttgatccgtaagtgatgtgttaaggtgcttcaaaggaactctgacctctgaagtacttgagctactttagtatgtccagcctattgctttttgttttagtgtgtcaccataaatatcaggggcataaaaggctatctattcttaattcaaggataaaacagaagaagcttgtggtataaaacaatagttcaagatccagctgaaatattagtggaatttgctactgactcattggactgaaagctgaagtacctggcaaaaaaaaaaaaaagaaaaaaaaaagccaaatttcttgttgctacaggatataacaacaatgaaaaggatctcgtattttaaaaaaatatgtaatttttataaaaagaaaacttgtttttcattcaaacttgtcatttttactttggtaactttttcataggtcctaaaagaaaactgttttgagaaactactgtaagtaccttttccacatccctttgccttctcctctttccaaattctttctacaaaaataacacttgatgctggaaaaacccttgcctacgttctttcaatcgtcacatcaggaactacttccaagagaagcctgcatttctgctctcatgctgatctcaaaaaccccactcaacactgcaactttatcatagcagttttcatcccagaattttttttttaataatgacaagacatgttgttgaaaaaaaatcacaccttggtttcttagagctgctcgttcctgattgccgctgctgtctccaggcatccctctagcagcacctggatgtagatgactgaatgttaagaggttgcaagtgacaatctgaaaatttgcactcttgtgtgtagttttcttttcatttctttcagaaatagtttccaaaaagaccattacatctcctgatatgatttgtataattttcagttctagctaaaaataatgtaaggaactctcagcggatgcagctgcaacttacaatgaactgtgccctcctatcccccatactttacccttctttcttattttatagtgtgggatacacatgagtgatgttttctttgtgcactgagacaagcctattttttaaatatttagggagaagtactttagttcatgcttcttatacaacttttttctgttgtttagctttggttggattacaaattctttgtgcattcctgaatttgccttatttcatgtaaaatttatgtcattcagtttttgacaatgagtttgaggcatcagtgatatttcttatctacttgttacatatagtttttcaagtaatgactgtgattgtgaccgagtaatgtgcactttttcttgtaactgtggacattgctatgcttttttcttctagtgtttctagaattactgttccttacaattatgtaaacaaaaaacaaaaaaaaaacttttgtgatactgttggtgaatataatgtgaaaaatcttattgaaatatgagtattttggaaatacatagctgcacaaacatcttttaagatgtggatttagagtttgcttatttaaatgaaaattcaaaaattgagggctggtataattttctctgttttgtttggtttaataaacagatttctgtgttaaaagaatgattgtcaaaccttataaactttctgaagggtataatgcttaatttttagccatttacttttaaaatctaaaacgccattttctacctacgtttagcacaaaattggcacttcaaatttatttctcaagaatatcctaagatcccccagggtctcaacattcattctaataaagaatttattccaagaatgggtaaggaaattaggaagccaagactacttcatttgattattcaaatatgaatagagaatatt

SEQ ID NO: 66709 - DNA, 4170 bp, Homo sapiens
cccacgcgtccggatggtcctggtcacaaaatattaaagagaccgaccgctaagggaacaggaaaaacgtccgagacagccgttgcaattacgaatggaccagacttggtagcacggggcattgattgctggtgcccaaccggaccctcctcccctcttcccatcccttcccccacccaaagcaggctcccgctgcggccgggacctcgcatccctgcaacgtggccggggctgcatttttcatgagcctagggtgaacaggtgcgaagtgcgctgggagcatccggccagcggccgagcgcggggaacatggagagcgagcgcgacatgtaccgccagttccaggactggtgcctcaggacttacggggactcaggcaagaccaagacggtgacccgtaaaaaatacgaacggatcgtccagctcctcaatggctccgagtcgagctccacggacaacgccaaatttaaattctgggtcaaatcgaagggcttccagctgggccagccggacgaggtccgcgggggaggcggcggcgccaagcaagtgctctacgtgcctgtcaagaccacggatggcgtaggggtagatgagaagctatctttacgacgggtagctgtggttgaagatttctttgacattatttattcgatgcatgtggaaacggggccaaatggagaacaaattcggaaacacgctggacaaaagagaacttacaaagcaatttcagagagctatgccttcctaccaagagaagcggtgacacgatttctaatgagctgctcagagtgccagaaaagaatgcatttaaacccagatggaacagatcataaagataatggaaaacctcccactttggtgaccagcatgattgactacaacatgccaattaccatggcctacatgaaacacatgaagctgcagctgctaaactcacagcaagatgaggatgaaagttcaatagaaagtgatgaatttgacatgagtgattcaacacggatgtcagctgtgaactctgatcttagctccaatcttgaagaaagaatgcaaagtccccagaatcttcatggccagcaagatgatgattctgctgcagagagctttaatggcaatgagactctggggcacagttcaattgcttcagggggaacacacagcagggagatgggagactccaacagtgatggcaaaactgggctggagcaagatgaacagccactgaacctgagtgacagtcccctctctgcgcagctaacttcggaatacagaatagatgatcacaacagtaatgggaaaaacaagtataagaatcttctaatttctgacctcaagatggaacgagaggcgagagaaaatggaagcaagtctcctgcacatagttactccagctatgactctggcaaaaatgagagtgtagaccgaggagctgaggacctctcactaaacaggggagatgaggacgaagatgaccacgaggaccatgacgattcggagaaagttaatgagacagacggcgttgaagccgagcggctgaaagcttttaatatgtttgtcaggctgtttgtagatgaaaacttggaccgaatggtcccaatctctaagcagcccaaagaaaagatccaggctatcattgactcatgcaggcgacaattccctgagtatcaagagcgtgccagaaaacgtatacgtacttacctcaagtcctgcaggcggatgaaaagaagtggttttgagatgtctcgacctattccttcccaccttacttcagcagttgcagagagtatcttggcttcagcttgtgagagtgagagtagaaatgccgccaagaggatgcgtctggagagacagcaggatgagtctgctccagctgacaaacagtgtaaaccagaggcgacccaggccacttactcaacatcagctgttccaggctcacaggacgtgctgtacatcaatggaaatgggacctatagttaccatagttacagagggctaggagggggtctgctaaatctgaatgatgcttccagcagtggacccactgatctcagcatgaagagacaattggcgactagctcaggatcctccagcagctcaaactccagaccccagctgagtccaactgaaatcaatgccgtgagacagcttgttgcaggatatcgagaatcagctgcatttttattgcgatctgcagatgaactggtctaaatttgcagtttccactaatgacattttgatttcccaacagagatacttctggtcttactgcacagtcttttaagagaaatacttccattatgccacattgtccttgatccgtaagtgatgtgttaaggtgcttcaaaggaactctgacctctgaagtacttgagctactttagtatgtccagcctattgctttttgttttagtgtgtcaccataaatatcaggggcataaaaggctatctattcttaattcaaggataaaacagaagaagcttgtggtataaaacaatagttcaagatccagctgaaatattagtggaatttgctactgactcattggactgaaagctgaagtacctggcaaaaaaaaaaaaaagaaaaaaaaaagccaaatttcttgttgctacaggatataacaacaatgaaaaggatctcgtattttaaaaaaatatgtaatttttataaaaagaaaacttgtttttcattcaaacttgtcatttttactttggtaactttttcataggtcctaaaagaaaactgttttgagaaactactgtaagtaccttttccacatccctttgccttctcctctttccaaattctttctacaaaaataacacttgatgctggaaaaacccttgcctacgttctttcaatcgtcacatcaggaactacttccaagagaagcctgcatttctgctctcatgctgatctcaaaaaccccactcaacactgcaactttatcatagcagttttcatcccagaattttttttttaataatgacaagacatgttgttgaaaaaaaatcacaccttggtttcttagagctgctcgttcctgattgccgctgctgtctccaggcatccctctagcagcacctggatgtagatgactgaatgttaagaggttgcaagtgacaatctgaaaatttgcactcttgtgtgtagttttcttttcatttctttcagaaatagtttccaaaaagaccattacatctcctgatatgatttgtataattttcagttctagctaaaaataatgtaaggaactctcagcggatgcagctgcaacttacaatgaactgtgccctcctatcccccatactttacccttctttcttattttatagtgtgggatacacatgagtgatgttttctttgtgcactgagacaagcctattttttaaatatttagggagaagtactttagttcatgcttcttatacaacttttttctgttgtttagctttggttggattacaaattctttgtgcattcctgaatttgccttatttcatgtaaaatttatgtcattcagtttttgacaatgagtttgaggcatcagtgatatttcttatctacttgttacatatagtttttcaagtaatgactgtgattgtgaccgagtaatgtgcactttttcttgtaactgtggacattgctatgcttttttcttctagtgtttctagaattactgttccttacaattatgtaaacaaaaaacaaaaaaaaaacttttgtgatactgttggtgaatataatgtgaaaaatcttattgaaatatgagtattttggaaatacatagctgcacaaacatcttttaagatgtggatttagagtttgcttatttaaatgaaaattcaaaaattgagggctggtataattttctctgttttgtttggtttaataaacagatttctgtgttaaaagaatgattgtcaaaccttataaactttctgaagggtataatgcttaatttttagccatttacttttaaaatctaaaacgccattttctacctacgtttagcacaaaattggcacttcaaatttatttctcaagaatatcctaagatcccccagggtctcaacattcattctaataaagaatttattccaagaatgggtaaggaaattaggaagccaagactacttcatttgattattcaaatatgaatagagaatatt

SEQ ID NO: 66710 - DNA, 4223 bp, Homo sapiens
cccacgcgtccggatggtcctggtcacaaaatattaaagagaccgaccgctaagggaacaggaaaaacgtccgagacagccgttgcaattacgaatggaccagacttggtagcacggggcattgattgctggtgcccaaccggaccctcctcccctcttcccatcccttcccccacccaaagcaggctcccgctgcggccgggacctcgcatccctgcaacgtggccggggctgcatttttcatgagcctagggtgaacaggtgcgaagtgcgctgggagcatccggccagcggccgagcgcggggaacatggagagcgagcgcgacatgtaccgccagttccaggactggtgcctcaggacttacggggactcaggcaagaccaagacggtgacccgtaaaaaatacgaacggatcgtccagctcctcaatggctccgagtcgagctccacggacaacgccaaatttaaattctgggtcaaatcgaagggcttccagctgggccagccggacgaggtccgcgggggaggcggcggcgccaagcaagtgctctacgtgcctgtcaagaccacggatggcgtaggggtagatgagaagctatctttacgacgggtagctgtggttgaagatttctttgacattatttattcgatgcatgtggaaacggggccaaatggagaacaaattcggaaacacgctggacaaaagagaacttacaaagcaatttcagagagctatgccttcctaccaagagaagcggtgacacgatttctaatgagctgctcagagtgccagaaaagaatgcatttaaacccagatggaacagatcataaagataatggaaaacctcccactttggtgaccagcatgattgactacaacatgccaattaccatggcctacatgaaacacatgaagctgcagctgctaaactcacagcaagatgaggatgaaagttcaatagaaagtgatgaatttgacatgagtgattcaacacggatgtcagctgtgaactctgatcttagctccaatcttgaagaaagaatgcaaagtccccagaatcttcatggccagcaagatgatgattctgctgcagagagctttaatggcaatgagactctggggcacagttcaattgcttcagggggaacacacagcagggagatgggagactccaacagtgatggcaaaactgggctggagcaagatgaacagccactgaacctgagtgacagtcccctctctgcgcagctaacttcggaatacagaatagatgatcacaacagtaatgggaaaaacaagtataagaatcttctaatttctgacctcaagatggaacgagaggcgagagaaaatggaagcaagtctcctgcacatagttactccagctatgactctggcaaaaatgagagtgtagaccgaggagctgaggacctctcactaaacaggggagatgaggacgaagatgaccacgaggaccatgacgattcggagaaagttaatgagacagacggcgttgaagccgagcggctgaaagcttttaatatgtttgtcaggctgtttgtagatgaaaacttggaccgaatggtcccaatctctaagcagcccaaagaaaagatccaggctatcattgactcatgcaggcgacaattccctgagtatcaagagcgtgccagaaaacgtatacgtacttacctcaagtcctgcaggcggatgaaaagaagtggttttgagatgtctcgacctattccttcccaccttacttcagcagttgcagagagtatcttggcttcagcttgtgagagtgagagtagaaatgccgccaagaggatgcgtctggagagacagcaggatgagtctgctccagctgacaaacagtgtaaaccagaggcgacccaggccacttactcaacatcagctgttccaggctcacaggacgtgctgtacatcaatggaaatgggacctatagttaccatagttacagagggctaggagggggtctgctaaatctgaatgatgcttccagcagtggacccactgatctcagcatgaagagacaattggcgactagctcaggatcctccagcagctcaaactccagaccccagctgagtccaactgaaatcaatgccgtgagacagcttgttgcaggatatcgagaatcagctgcatttttattgcgatctgcagatgaactggaaaatctcattttacaacagaactgagacagacgaccaccatattcactgaggtctaaatttgcagtttccactaatgacattttgatttcccaacagagatacttctggtcttactgcacagtcttttaagagaaatacttccattatgccacattgtccttgatccgtaagtgatgtgttaaggtgcttcaaaggaactctgacctctgaagtacttgagctactttagtatgtccagcctattgctttttgttttagtgtgtcaccataaatatcaggggcataaaaggctatctattcttaattcaaggataaaacagaagaagcttgtggtataaaacaatagttcaagatccagctgaaatattagtggaatttgctactgactcattggactgaaagctgaagtacctggcaaaaaaaaaaaaaagaaaaaaaaaagccaaatttcttgttgctacaggatataacaacaatgaaaaggatctcgtattttaaaaaaatatgtaatttttataaaaagaaaacttgtttttcattcaaacttgtcatttttactttggtaactttttcataggtcctaaaagaaaactgttttgagaaactactgtaagtaccttttccacatccctttgccttctcctctttccaaattctttctacaaaaataacacttgatgctggaaaaacccttgcctacgttctttcaatcgtcacatcaggaactacttccaagagaagcctgcatttctgctctcatgctgatctcaaaaaccccactcaacactgcaactttatcatagcagttttcatcccagaattttttttttaataatgacaagacatgttgttgaaaaaaaatcacaccttggtttcttagagctgctcgttcctgattgccgctgctgtctccaggcatccctctagcagcacctggatgtagatgactgaatgttaagaggttgcaagtgacaatctgaaaatttgcactcttgtgtgtagttttcttttcatttctttcagaaatagtttccaaaaagaccattacatctcctgatatgatttgtataattttcagttctagctaaaaataatgtaaggaactctcagcggatgcagctgcaacttacaatgaactgtgccctcctatcccccatactttacccttctttcttattttatagtgtgggatacacatgagtgatgttttctttgtgcactgagacaagcctattttttaaatatttagggagaagtactttagttcatgcttcttatacaacttttttctgttgtttagctttggttggattacaaattctttgtgcattcctgaatttgccttatttcatgtaaaatttatgtcattcagtttttgacaatgagtttgaggcatcagtgatatttcttatctacttgttacatatagtttttcaagtaatgactgtgattgtgaccgagtaatgtgcactttttcttgtaactgtggacattgctatgcttttttcttctagtgtttctagaattactgttccttacaattatgtaaacaaaaaacaaaaaaaaaacttttgtgatactgttggtgaatataatgtgaaaaatcttattgaaatatgagtattttggaaatacatagctgcacaaacatcttttaagatgtggatttagagtttgcttatttaaatgaaaattcaaaaattgagggctggtataattttctctgttttgtttggtttaataaacagatttctgtgttaaaagaatgattgtcaaaccttataaactttctgaagggtataatgcttaatttttagccatttacttttaaaatctaaaacgccattttctacctacgtttagcacaaaattggcacttcaaatttatttctcaagaatatcctaagatcccccagggtctcaacattcattctaataaagaatttattccaagaatgggtaaggaaattaggaagccaagactacttcatttgattattcaaatatgaatagagaatatt

SEQ ID NO: 66711 - DNA, 4031 bp, Homo sapiens
cccacgcgtccggatggtcctggtcacaaaatattaaagagaccgaccgctaagggaacaggaaaaacgtccgagacagccgttgcaattacgaatggaccagacttggtagcacggggcattgattgctggtgcccaaccggaccctcctcccctcttcccatcccttcccccacccaaagcaggctcccgctgcggccgggacctcgcatccctgcaacgtggccggggctgcatttttcatgagcctagggtgaacaggtgcgaagtgcgctgggagcatccggccagcggccgagcgcggggaacatggagagcgagcgcgacatgtaccgccagttccaggactggtgcctcaggacttacggggactcaggcaagaccaagacggtgacccgtaaaaaatacgaacggatcgtccagctcctcaatggctccgagtcgagctccacggacaacgccaaatttaaattctgggtcaaatcgaagggcttccagctgggccagccggacgaggtccgcgggggaggcggcggcgccaagcaagtgctctacgtgcctgtcaagaccacggatggcgtaggggtagatgagaagctatctttacgacgggtagctgtggttgaagatttctttgacattatttattcgatgcatgtggaaacggggccaaatggagaacaaattcggaaacacgctggacaaaagagaacttacaaagcaatttcagagagctatgccttcctaccaagagaagcggtgacacgatttctaatgagctgctcagagtgccagaaaagaatgcatttaaacccagatggaacagatcataaagataatggaaaacctcccactttggtgaccagcatgattgactacaacatgccaattaccatggcctacatgaaacacatgaagctgcagctgctaaactcacagcaagatgaggatgaaagttcaatagaaagtgatgaatttgacatgagtgattcaacacggatgtcagctgtgaactctgatcttagctccaatcttgaagaaagaatgcaaagtccccagaatcttcatggccagcaagatgatgattctgctgcagagagctttaatggcaatgagactctggggcacagttcaattgcttcagggggaacacacagcagggagatgggagactccaacagtgatggcaaaactgggctggagcaagatgaacagccactgaacctgagtgacagtcccctctctgcgcagctaacttcggaatacagaatagatgatcacaacagtaatgggaaaaacaagtataagaatcttctaatttctgacctcaagatggaacgagaggcgagagaaaatggaagcaagtctcctgcacatagttactccagctatgactctggcaaaaatgagagtgtagaccgaggagctgaggacctctcactaaacaggggagatgaggacgaagatgaccacgaggaccatgacgattcggagaaagttaatgagacagacggcgttgaagccgagcggctgaaagcttttaattctcgacctattccttcccaccttacttcagcagttgcagagagtatcttggcttcagcttgtgagagtgagagtagaaatgccgccaagaggatgcgtctggagagacagcaggatgagtctgctccagctgacaaacagtgtaaaccagaggcgacccaggccacttactcaacatcagctgttccaggctcacaggacgtgctgtacatcaatggaaatgggacctatagttaccatagttacagagggctaggagggggtctgctaaatctgaatgatgcttccagcagtggacccactgatctcagcatgaagagacaattggcgactagctcaggatcctccagcagctcaaactccagaccccagctgagtccaactgaaatcaatgccgtgagacagcttgttgcaggatatcgagaatcagctgcatttttattgcgatctgcagatgaactggaaaatctcattttacaacagaactgagacagacgaccaccatattcactgaggtctaaatttgcagtttccactaatgacattttgatttcccaacagagatacttctggtcttactgcacagtcttttaagagaaatacttccattatgccacattgtccttgatccgtaagtgatgtgttaaggtgcttcaaaggaactctgacctctgaagtacttgagctactttagtatgtccagcctattgctttttgttttagtgtgtcaccataaatatcaggggcataaaaggctatctattcttaattcaaggataaaacagaagaagcttgtggtataaaacaatagttcaagatccagctgaaatattagtggaatttgctactgactcattggactgaaagctgaagtacctggcaaaaaaaaaaaaaagaaaaaaaaaagccaaatttcttgttgctacaggatataacaacaatgaaaaggatctcgtattttaaaaaaatatgtaatttttataaaaagaaaacttgtttttcattcaaacttgtcatttttactttggtaactttttcataggtcctaaaagaaaactgttttgagaaactactgtaagtaccttttccacatccctttgccttctcctctttccaaattctttctacaaaaataacacttgatgctggaaaaacccttgcctacgttctttcaatcgtcacatcaggaactacttccaagagaagcctgcatttctgctctcatgctgatctcaaaaaccccactcaacactgcaactttatcatagcagttttcatcccagaattttttttttaataatgacaagacatgttgttgaaaaaaaatcacaccttggtttcttagagctgctcgttcctgattgccgctgctgtctccaggcatccctctagcagcacctggatgtagatgactgaatgttaagaggttgcaagtgacaatctgaaaatttgcactcttgtgtgtagttttcttttcatttctttcagaaatagtttccaaaaagaccattacatctcctgatatgatttgtataattttcagttctagctaaaaataatgtaaggaactctcagcggatgcagctgcaacttacaatgaactgtgccctcctatcccccatactttacccttctttcttattttatagtgtgggatacacatgagtgatgttttctttgtgcactgagacaagcctattttttaaatatttagggagaagtactttagttcatgcttcttatacaacttttttctgttgtttagctttggttggattacaaattctttgtgcattcctgaatttgccttatttcatgtaaaatttatgtcattcagtttttgacaatgagtttgaggcatcagtgatatttcttatctacttgttacatatagtttttcaagtaatgactgtgattgtgaccgagtaatgtgcactttttcttgtaactgtggacattgctatgcttttttcttctagtgtttctagaattactgttccttacaattatgtaaacaaaaaacaaaaaaaaaacttttgtgatactgttggtgaatataatgtgaaaaatcttattgaaatatgagtattttggaaatacatagctgcacaaacatcttttaagatgtggatttagagtttgcttatttaaatgaaaattcaaaaattgagggctggtataattttctctgttttgtttggtttaataaacagatttctgtgttaaaagaatgattgtcaaaccttataaactttctgaagggtataatgcttaatttttagccatttacttttaaaatctaaaacgccattttctacctacgtttagcacaaaattggcacttcaaatttatttctcaagaatatcctaagatcccccagggtctcaacattcattctaataaagaatttattccaagaatgggtaaggaaattaggaagccaagactacttcatttgattattcaaatatgaatagagaatatt

SEQ ID NO: 66712 - DNA, 3150 bp, Homo sapiens
ctcttattttccaaagctccaggtgctgttttccttgggactcatatacagagtctttggttcaaatgctatggtacccaggctgaaaccttgagagaagaaccaccgccttggcccagtgaacctgaaggccatacccacagacctaaatactgcaccttctgtgtagcagctactcaggatggaccaaactatgttggatgattctgctgcagagagctttaatggcaatgagactctggggcacagttcaattgcttcagggggaacacacagcagggagatgggagactccaacagtgatggcaaaactgggctggagcaagatgaacagccactgaacctgagtgacagtcccctctctgcgcagctaacttcggaatacagaatagatgatcacaacagtaatgggaaaaacaagtataagaatcttctaatttctgacctcaagatggaacgagaggcgagagaaaatggaagcaagtctcctgcacatagttactccagctatgactctggcaaaaatgagagtgtagaccgaggagctgaggacctctcactaaacaggggagatgaggacgaagatgaccacgaggaccatgacgattcggagaaagttaatgagacagacggcgttgaagccgagcggctgaaagcttttaattctcgacctattccttcccaccttacttcagcagttgcagagagtatcttggcttcagcttgtgagagtgagagtagaaatgccgccaagaggatgcgtctggagagacagcaggatgagtctgctccagctgacaaacagtgtaaaccagaggcgacccaggccacttactcaacatcagctgttccaggctcacaggacgtgctgtacatcaatggaaatgggacctatagttaccatagttacagagggctaggagggggtctgctaaatctgaatgatgcttccagcagtggacccactgatctcagcatgaagagacaattggcgactagctcaggatcctccagcagctcaaactccagaccccagctgagtccaactgaaatcaatgccgtgagacagcttgttgcaggatatcgagaatcagctgcatttttattgcgatctgcagatgaactggaaaatctcattttacaacagaactgagacagacgaccaccatattcactgaggtctaaatttgcagtttccactaatgacattttgatttcccaacagagatacttctggtcttactgcacagtcttttaagagaaatacttccattatgccacattgtccttgatccgtaagtgatgtgttaaggtgcttcaaaggaactctgacctctgaagtacttgagctactttagtatgtccagcctattgctttttgttttagtgtgtcaccataaatatcaggggcataaaaggctatctattcttaattcaaggataaaacagaagaagcttgtggtataaaacaatagttcaagatccagctgaaatattagtggaatttgctactgactcattggactgaaagctgaagtacctggcaaaaaaaaaaaaaagaaaaaaaaaagccaaatttcttgttgctacaggatataacaacaatgaaaaggatctcgtattttaaaaaaatatgtaatttttataaaaagaaaacttgtttttcattcaaacttgtcatttttactttggtaactttttcataggtcctaaaagaaaactgttttgagaaactactgtaagtaccttttccacatccctttgccttctcctctttccaaattctttctacaaaaataacacttgatgctggaaaaacccttgcctacgttctttcaatcgtcacatcaggaactacttccaagagaagcctgcatttctgctctcatgctgatctcaaaaaccccactcaacactgcaactttatcatagcagttttcatcccagaattttttttttaataatgacaagacatgttgttgaaaaaaaatcacaccttggtttcttagagctgctcgttcctgattgccgctgctgtctccaggcatccctctagcagcacctggatgtagatgactgaatgttaagaggttgcaagtgacaatctgaaaatttgcactcttgtgtgtagttttcttttcatttctttcagaaatagtttccaaaaagaccattacatctcctgatatgatttgtataattttcagttctagctaaaaataatgtaaggaactctcagcggatgcagctgcaacttacaatgaactgtgccctcctatcccccatactttacccttctttcttattttatagtgtgggatacacatgagtgatgttttctttgtgcactgagacaagcctattttttaaatatttagggagaagtactttagttcatgcttcttatacaacttttttctgttgtttagctttggttggattacaaattctttgtgcattcctgaatttgccttatttcatgtaaaatttatgtcattcagtttttgacaatgagtttgaggcatcagtgatatttcttatctacttgttacatatagtttttcaagtaatgactgtgattgtgaccgagtaatgtgcactttttcttgtaactgtggacattgctatgcttttttcttctagtgtttctagaattactgttccttacaattatgtaaacaaaaaacaaaaaaaaaacttttgtgatactgttggtgaatataatgtgaaaaatcttattgaaatatgagtattttggaaatacatagctgcacaaacatcttttaagatgtggatttagagtttgcttatttaaatgaaaattcaaaaattgagggctggtataattttctctgttttgtttggtttaataaacagatttctgtgttaaaagaatgattgtcaaaccttataaactttctgaagggtataatgcttaatttttagccatttacttttaaaatctaaaacgccattttctacctacgtttagcacaaaattggcacttcaaatttatttctcaagaatatcctaagatcccccagggtctcaacattcattctaataaagaatttattccaagaatgggtaaggaaattaggaagccaagactacttcatttgattattcaaatatgaatagagaatatt

SEQ ID NO: 66713 - DNA, 854 bp, Homo sapiens
cttttttgaatagaaggtgtctttgtttgtttgattttattttttcttcaacttcgctgttctacaatgacaagagatagaacagagacattttctacctcaacattgggaggcagaaaattcacctttttatccaagaataccaaaccagaagctgaaatatctggatctgatagagaggatagtctattcccccttggactttggactggatgcaataatggtatgagaccctggggtaggaatgagtgtcttctatgtgtgggaaagagaggaaagcagatatttggcgacctaaaaagaaggccatggcagaacctcattagttgttcaacaatcctattttccttttctcctggacacacagctatgcattttccagccatccttgtggttagatgcccagtgacagttctgagaatggaatatggacagatgtgataggcacttctgggcctgggccacaaaaaccttccacatgatgtccagtgcctcttttaccccactgacagttttttattgtcatccagagagaccttggatggtttagaagccatgtgtagaagatggcaaccttcccttagcatggatccttgaatgactgtggagtgcaatgccttctaccaattacacctactgtgtttgagaatcaaatttcatttgtattaagctactgatttggggggtttatctccttcagcacccacattagtacaactcatgcagaatggagagttaatgtgaacacatatggcacagactggtgaaacctaggactttaagatgatagatgaatttctgattatactttcctttcccgcaaaaagtttttttcaaattaaatgttgtaatat

SEQ ID NO: 66714 - DNA, 407 bp, Homo sapiens
tagggagagggaggagacagctcacaggttgcttttaaaactttgcagttttaaaatagttgggaatattttaaaacgcagatcaatttctcatgaaactcaaagtttttgatttctttcaaaacattagtcaacactggacctacatttacacatggcaacaattggctcagggccagcagctgctgtctttaatcgaggcaaatttgcttgagttaactgcactccccactactccccattgcctcccaacactgagactaagtggcagccgtcttttatcatcttacacccaactcacttactaactttcatttcctgcccagtctgggtagacattggctttgcaaccccaaatctaagccaatagtctaaggcttctgggatccaaattctttggggccttt

SEQ ID NO: 66715 - DNA, 536 bp, Homo sapiens
accaaaaatacaaaaattagccaggcatggtggcacctgcctgtaatcgcagctactcaggtggctgaggtaggagactagcttaaacctgggaggtggggcttgcagtaatctgagattgtgccactgcactccagcctgggcaacatggcaagaccctgtctcaaaaaaaatttttttttaaattaaaaacaaaatgtcaagcatagctaggcacagtggcacacgcctgtaatcccagcactttgggaggcagaggcaggaggatcatttaagcccacaagttcaagaccagcctgggcaacacagtgagagcttcttgtctctacaaaaattttaaaaattagtgaggcgtgatgtcatgcacctgtagtctcacctactcaggaggctaaggtgggaggatcgcttgagccacagaggttgaggctgcagtgggttgtgattgtgccactgcactctggcctgggtgacagagagagaccctgtgtcaaaaaataaaataaatgaaataccaagcataatgcttgttatgt

SEQ ID NO: 66716 - DNA, 476 bp, Homo sapiens
aatcttcagtttccacatctgtaaaagtagtatgataagcataattatttcttaggtttgttgtgtgaaacaattcagacaaaatttgtgttccatcagtgttagctatttcataattgggttgctttgggttgcaagtaacaaaaaaaaactcgaactgacttaaattataaagggaatctattggatcctataaccagaaaatccagaggctaactcaatagctcaaccaaaagtcacaagaatctagtgtacttctgtctctccacccagcctccactattattagccttctaaattaccccattcttaaacccaagatggctgccaactcccacagctacctacctacatgttttctcattctcacccaggaggaaagattgagcccttgtgttccagcattctcaaccaagtcccaagatttaccctgattgaaagagcttaggtcacatacccaaccctgaatcagtcac

SEQ ID NO: 66717 - DNA, 160 bp, Homo sapiens
caaatttgaaaagaagaacatagagaagcctgaaatcagcaaaggaaataaaaacaaggacatcagaagcgtttgaaacatcctggcaacacagatacagcaaacattaaacacagcacaatgcctagccagattaaaataaaacctcaaattcaaggcc

SEQ ID NO: 66718 - DNA, 951 bp, Homo sapiens
ctttgttgcagggggaaataaagagaggcgccaagcctgcaaattctttcctgatcccattggttcaccaggagagaacaattttgttttccatggttgcggtctttcaaggttgcctttacttaggatttgattacctgtctccctcaaccaattagcctctcccacacactctcttgcctccaataatgatcaacctccttttctaagaccagcctcctctttatcatattgcattaaacacttgatgaaagaagacctagaaggctttaagaaagacagggtaatattttgctggtgtagagggcctgctcttcggagacaaatacttgcttttcattttgatcagccgtctgcacttaaaagcctcctagccagggacatgttaattaaacagtctggggctcagtgctgccatccgtaaattggaggattagagaaataatatacacaagtacctggtacataccaaatatgatagaagatatcttcaacctttagctataagaagaatggaaaatgaaaaagagacaggtggagagagggagggagatgagagctgcgtggagctggtatgctggttaggaggtaggaaataatgaggcctcgaccatctaagatacagaagtctccctgctgaatcgaaaggaagtgctacaatattctttcaaattcatcgcagttgagagaaaactggagcagagtgtgatatcaagaaagggcttcaccaggatgatcaatgcaaatggatatggagctttcttggaatgaaacattatcccgtaacaccaggtatacatacatgaagaagtggccttcaggactggaactgggaagataacagacctccacagagaaactggacgggaaattgctatatgcctctgcgtggtgatcattacgttgtaatagctcaactcatcactatgtacagacatccatattaaccca

SEQ ID NO: 66719 - DNA, 557 bp, Homo sapiens
acctctgatggaaaaatctggttgtctccctgcaggttgctaagaaagagtgatgtttcagggaggctgagtcttgaagcagcagcagcagatctgacacttgtccttcacagctcctttcctgtctcccatagtaagggctatgtaaacatttcatgatcagtgctggcacttgcagccgagaatgcggagaatgcttgcagtttccccttttcatgcagcagaatgataacagggacaatcttttgattgtcttattatgttttggcttttgttgcttttaaaattcccagtttgtgttgctgtaagggaggtaacatttctcaccctttctgtaaatgagtttcctgccaaaacctacctgtgagtttcaaatgtttagaccaatcaaccaaccaaagaccttgagataacctaagaaggtataacctaagaagggacagttacacagtaattgggaaaacttctgcaaggacagatgtgcatttctcattttctttaaacctatcaatttactgaaaatgaatatgatttttgttaataatgacagtgccaaa

SEQ ID NO: 66720 - DNA, 354 bp, Homo sapiens
ttttttctgagcaaatgctggtatagagaaaatggctgtagtgcatgcactggaaatgggagacaagagtccttgtgctgtgccttggaggtcattagagtggtcccattagagtgaaaaatagtccaagtgtgtccatttatttaaaatctattacataataccagttataacaatttgatggaaaaaataagcatgaaaattcgaagaggaggtaaggaggtaaaactaaagttcttttcagatgtgatgattttatgtctagaaaacccaaaataataaacgaaaaagctaataatgtaaattataaaagacaatttacaatttataaagtaactgggtttaacattagtg

SEQ ID NO: 66721 - DNA, 1318 bp, Homo sapiens
ccattgcactccagcctgggcaacaagagcaaaattctgcctcaaaaaaaaaaatagtaataatacaaaaattagctgggcgtggtggcacatgccagtaattccatctactcgggaggctgaggcaggagaatcgtctaagcccgggaggtggaggttgcagtgagcccagatggcgctgctgcactcaagcttggatgacagagcaagactccgtttcaaaaaaaaaaacctcctctcttccttcacaccttcctctgaatcccacccggtcccacctcctgaacctatccagacaccttctcctgacccaggcaccacctgctttcggggcgatggccgtagcctcctcccaggcacctgtctgcatccctctggccagtgcatgctgagcacgtgacctacccgtgttgggacacgtgaggatacagccttgacccccaggggctgacattctagggggagatagaaggagacaaacgtagaaggtagaataagtgggtggtggagtggcagggagtgctgagtgccacaggaagtcagacaaggaaggagagtgtggggcaggtgccgtttaaatggggggcgctggggtctcctcacagttgcttctcagctcagctgtgccaggatcttgttgagtcaggtcagctgcccacagccctcttgcctgacccctgaagcccagaactctgatcttcacagccctaggtatggccccagcaccccactgccctctctcctgccccagccgactgctgttcccagacttccctggccacgctccaagacgccagctctgccgcgggcactttgttctcacggtgtcctccatgcctgcagggcccatgcatgggaagttgcgttggcggcctgggtgttggcggttccgtgcctgctccaactctccgtgaggcccctctcccagagcctgacacactctgtggccgaactctaggcaggtgcccctgagtcctttcctcgacgaggcctgaccccatccccatcctcgctgggcccgccgaccccggtgttagcaagaatcctctaaatcagtttatggagaattacccaccctcgatatctgatcccattcctcatctcccacccttgatctcatcaccctgccggcctcctgcaagatcctcattgagccactccagtgagaatccccctaccctcgaaggccgccctaacaacttcccatccgctgacccctccaacgccatcaatctccagctgtggttgttgaactcggaggtgagctcctctcaccactctcttgaataaagcttttctcaccattttaaaaaatcct

SEQ ID NO: 66722 - DNA, 652 bp, Homo sapiens
ccattgcactccagcctgggcaacaagagcaaaattctgcctcaaaaaaaaaaatagtaataatacaaaaattagctgggcgtggtggcacatgccagtaattccatctactcgggaggctgaggcaggagaatcgtctaagcccgggaggtggaggttgcagtgagcccagatggcgctgctgcactcaagcttggatgacagagcaagactccgtttcaaaaaaaaaaacctcctctcttccttcacaccttcctctgaatcccacccggtcccacctcctgaacctatccagacaccttctcctgacccaggcaccacctgctttcggggcgatggccgtagcctcctcccaggcacctgtctgcatccctctggccagtgcatgctgagcacgtgacctacccgtgttgggacacgtgaggatacagccttgacccccaggggctgacattctagggggagatagaaggagacaaacgtagaaggtagaataagtgggtggtggagtggcaggaaccgcttttggctaccggaagcccaagattcttgggagagaagaatttgtaacaatcaccttctcgagaattgttatagtttaaaaattgttatcctcttttttgtgggaacacaccctgtggtgtcccccaag

SEQ ID NO: 66723 - DNA, 809 bp, Homo sapiens
cttaatagcttcaagtagctagcaaaatctttttctcaattacttgttatatggctttttgcttccactagcaacagaaatttccattagaaattttacctatccatgtgttctggccatctggaccagcacaagtgggatgagcaaactaggccaggtgctgaagttgctacctgttcatttggcagttcctctcagagtagtctttactcttccaattccatatgatcatatcctttggaagtggcaaaggctaaagtaattggaaggaagccatcaaggaaaactcatacatgagaacacatgtgtaaagtagttctcttacaatcatttggaaattggcagctttgttcatttctccctctttagtattcctgtatattctacttttgtgaatatttggttgtttttagtaatgtttcatttctgattactattttcttgtgttttgatgtaattttgtctagaaaaccactctataatacctataaggtaatcctaaagaaatattctttaagtgtttcttgtaattgccacttttttcctgtcaagtactttcagagaaactggatgaatctatatctgcttacgttttgctggcattgtatgaaggatacctgtacatatgatttagttaggtttgacaatttcatgaaaatagtgggttaaatgtattctctgttaattcacactattttaaatttatagcattcttttaaaagattctatacttaatataaaaataattataggattgggtttttcttctgctgaggtcttgatttgcaacatgtttttcaaattgttaa

SEQ ID NO: 66724 - DNA, 582 bp, Homo sapiens
cacgaggtttttttttaaatacccactctcagggatgcagctgtgatggagaggttgggtatttaaattaaaaagtagaaagacagcaggcaccaagaagagagagcccccaccccacacgagagggaaggcactgcctccctcctgctctgtccaggtggtctggaccataaactcaacttgagagggaaggcttggggttgaggacttgtgatcagaaaaactgaagatggaagttttggccggtgctcattagacatgagtcctcactctgtgtcctgagcccgtgtcattcttccaacctccctgcccccacacacttatcccagacacaacaccatgtggtctggaggtcccagcccccaccctaaaaaggttatccctgagaactccaccagacttgggagcccaagtgcagtgcctggtgctgctcccatctgccgccccccttctctcctgcaattggtttgtactcactgggctgtgctctcccctgtttacccgatgtatggaaataaaggcccttttcctcctgaaaaaaaaaaaaaaaacaaaaaaaaaaaaaaaaaaaaaaaaaaaaag

SEQ ID NO: 66725 - DNA, 6490 bp, Homo sapiens
  misc_feature (1671)..(1671): n is a, c, g, or t
atcagagcggagtctccttgctctgggctgctccaggccaggccatgcggaaagtgtgttgttatgaggattcaatgaggagacctgtatgaagtgccttcccctgtgcctggctcatagcgaaaacagaagaacagattgcagcagaagaggcctggaatgagacggagaaggtgtggctggtccatagggacggcttctcactggccagtcaactcaaatctgaggagctcaacttgcctgaggggaaggtgcgtgtgaagctggaccacgatggggccatcctggatgtggatgaggatgacgttgagaaggctaatgctccctcctgcgaccgtctggaggatctggcctcactggtgtacctcaatgagtccagcgtcctgcacaccttgcgccagcgctatggcgctagcctgctgcacacgtatgctggccccagcctgctggttcttggcccccgtggggcccctgctgtgtactctgagaaggtgatgcacatgttcaagggttgtcggcgggaggacatggcaccccacatctatgcagtggcccagaccgcatacagggcgatgctgatgagccgtcaggatcagtcaatcatcctcctgggcagtagtggcagtggcaagaccaccagctgccagcatctggtgcagtacctggccaccatcgcgggcatcagcgggaacaaggtgttttctgtggagaagtggcaggctctgtacaccctcctggaagcctttgggaacagccccaccatcattaatggcaatgccacccgcttctcccagatcctctccctggactttgaccaagctggccaggtggcctcagcctccattcagacaatgcttctggagaagctgcgtgtggctcggcgcccagccagtgaagccacattcaacgtcttctactacctgctggcctgtggggatggcaccctcaggacagagctccacctcaaccacttggcagagaacaatgtgtttgggattgtgccactggccaagcctgaggaaaagcagaaggcagctcagcagtttagtaagctgcaggcggccatgaaggtgctgggcatctcccccgatgaacagaaggcctgctggttcattctggctgccatctaccacctgggggctgcgggagccaccaaaggaagctgctgaagctgggcgcaagcagtttgcccgccatgagtgggcccagaaggctgcgtacctactgggctgcagcctggaggagctgtcctcagccatcttcaagcaccagcacaagggtggcaccctgcagcgctccacctccttccgccagggccccgaggagagtggcctgggagatgggacaggcccgaaactgagtgcactggagtgccttgagggcatggcggccggcctctacagcgagctcttcacccttctcgtctccctggtgaatagggctctcaagtccagccagcactcactctgctccatgatgattgtcgacaccccgggcttccagaaccctgagcagggtgggtcagcccgcggagcctcctttgaggagctgtgccacaactacacccaagaccggctgcagaggctcttccacgagcgcaccttcgtgcaggagttggaaagatacaaggaggagaacatcgagctggcgtttgacgacttggaacccccnacggatgactctgtggctgctgtggaccaggcctcccatcagtccctggtccgctcgctggcccgcacagacgaggcgaggggcctgctctggctattggaagaggaggctctggtgccaggggccagtgaggacaccctcctggagcgccttttctcctattatggcccccaggaaggtgacaaaaaaggccaaagcccccttctgcacagcagcaaaccacaccactttctcctgggccacagccatggcaccaactgggtagagtacaatgtgactggctggctgaactacaccaagcagaacccagccacccagaatgccccccggctcctgcaggactcccagaaaaaaatcatcagcaacctgtttctgggccgcgcaggcagtgccacggtgctctctggctccatcgcgggcctggagggcggctcgcagctggcactgcgccgggccaccagcatgcggaaaacctttaccacaggcatggcggctgtcaaaaagaagtcactgtgcatccagatgaagctacaggtggacgccctcatcgacaccatcaagaagtcaaagctgcattttgtgcactgcttcctgcctgtagctgagggctgggctggggagccccgttccgcctcctcccgccgagtcagcagcagcagtgagctggacctgccctcgggagaccactgcgaggctgggctcctgcagctcgacgtgcccctgctccgcacccagctccgcggctcccgcctgctcgatgccatgcgcatgtaccgccaaggttaccctgaccacatggtgttttccgagttccgccgccgctttgatgtcctggccccgcacctgaccaagaaacacgggcgtaactacatcgtggtggatgaaaggcgggcagtggaggagctgctggagtgcttggatctggagaagagcagctgctgcatgggcctgagccgggtgttcttccgggcgggcaccttggcacggctggaggagcagcgggatgaacaaaccagcaggaacctaaccctgttccaagcagcctgcaggggctacctggcccgccagcacttcaagaagagaaagatccaggacctggccattcgctgtgtacagaagaacatcaagaagaacaaaggggtgaaggactggccctggtggaagctttttaccacagtgaggcccctcatcgaagtacagctgtcagaggagcagatccggaacaaagacgaggagatccagcagctgcggagcaagctcgagaaggcggagaaggagaggaacgagctgcggctcaacagtgaccggctggagagccggatctcagagctgacatcggagctgacagatgagcgtaacacaggagagtccgcctcccagctgctggacgcggagacagcagagaggctccgggctgagaaggagatgaaggaactgcagacccagtacgatgcactgaagaagcagatggaggttatggaaatggaggtgatggaggcccgtctcatccgggcagcggagatcaacggggaagtggatgatgatgatgcaggtggcgagtggcggctgaagtatgagcgggctgtgcgggaggtggacttcaccaagaaacggctccagcaggagtttgaggacaagctggaggtggagcagcagaacaagaggcagctggaacggcggctcggggacctgcaggcagatagtgaggagagtcagcgggctctgcagcagctcaagaagaagtgccagcgactgacggctgagctgcaagacaccaagctgcacctggagggccagcaggtccgcaaccacgaactggagaagaagcagaggaggtttgacagtgagctctcgcaggcgcatgaggaggcccagcgggagaagctgcagcgggagaagctgcagcgggagaaggacatgctcctcgctgaggctttcagcctgaagcagcaactagaggaaaaagacatggacattgcagggttcacccagaaggttgtgtctctagaggcagagctccaggacatttcttcccaagagtccaaggatgaggcttctctggccaaggtcaagaaacagctccgggacctggaggccaaagtcaaggatcaggaagaagagctggatgagcaggcagggaccatccagatgctggaacaggccaagctgcgtctggagatggagatggagcggatgagacagacccattctaaggagatggagagtcgggatgaggaggtggaggaggcccggcagtcgtgtcagaagaagttaaaacagatggaggtgcagctagaggaagagtatgaggacaagcagaaggttctgcgagagaagcgggagctggagggcaagctcgccaccctcagcgaccaggtgaaccggcgggactttgagtcagagaagcggctgcggaaggacctgaagcgcaccaaggccctgctggcagatgcccagctcatgctggaccacctgaagaacagtgctcccagcaagcgagagattgcccagctcaagaaccagctggaggagtcagagttcacctgtgcggcagccgtgaaagcacggaaagcaatggaggtggagatcgaagacctgcacctgcagattgatgacatcgccaaagccaagacagcgctggaggagcagctgagccgccttcagcgtgagaagaatgagatccagaaccggctggaggaagatcaggaagacatgaacgaattgatgaagaagcacaaggctgccgtggctcaggcttcccgggacctggctcagataaatgatctccaagctcagctagaagaagccaacaaagagaagcaggagctgcaggagaagctacaagccctccagagccaggtggagttcctggagcagtccatggtggacaagtccctggtgagcaggcaggaagctaagatacgggagctggagacacgcctggagtttgaaaggacgcaagtgaaacggctggagagcctggctagccgtctcaaggaaaacatggagaagctgactgaggagcgggatcagcgcattgcagccgagaaccgggagaaggaacagaacaagcggctacagaggcagctccgggacaccaaggaggagatgggcgagcttgccaggaaggaggccgaggcgagccgcaagaagcacgaactggagatggatctagaaagcctggaggctgctaaccagagcctgcaggctgacctaaagttggcattcaagcgcatcggggacctgcaggctgccattgaggatgagatggagagtgatgagaatgaggacctcatcaacagtgagggagactctgatgtggactcggagctggaggaccgtgttgacggggtcaagtcctggttgtcaaaaaacaagggaccttccaaggcagcttctgatgatggcagcttaaagagttccagccccaccagctactggaagtcccttgcccctgatcggtcagatgatgagcacgaccctctcgacaacacctccagaccgcgatactcccacagttatctgagtgacagcgacacagaggccaagctgacggagactaacgcatagcccaggggagtggttggcagccctctcaccccagggcctgtggctgcctgggcacctctcccaggaagtggtggggcaccggtctcccccacccgactgctgatctgcatgggaaacaccctgaccttcttctgtcaggggcactttccaggctatgggtgtctgatgtctccacgtggaagaggtgggggaaagaggagtttctgaagagaactttttgctcctctgtctcaaaatgccagactcttggcttctaccctgtgtcaccgtgggcagtggcaggtggcctggcactgcatggagccagcacgttgacctccctctcagctccctgctcagggacggtggacaggttgcctactgggacactctaggttgctgggtccatggggaggattgggggaggagaagcagtgccttccctctcgtgtggggtgggggctctctcttcttggtgcctgctgtctttctactttttaatttaaatacccaacctctccatcacagctgcatccctgagagtgggagggggctgtagtggtagctggggctcccaagaacgactcgggaatgtcatctccatcttcacccttcagagagcagtcctttctctgtgcagctggagacgctggtgaggagagccgggtccaggttcttaagaatgaggtgcggaggggctctccggtgctgctgggctgggttgagcaagcctacgcagacaagtgtgtgtgtggaccatccgcacctccagcccccaccccaccctctttgtctcagcgtgttatgtgcaatgacctatttaaggtaaacccattccaactacagcagttcagggctgatccaagcactgcctccctcctgctctgtccaggtggtctggaccataaactcaacttgagagggaaggcttggggttgaggacttgtgatcagaaaaactgaagatggaagttttggccggtgctcattagacatgagtcctcactctgtgtcctgagcccgtgtcattcttccaacctccctgcccccacacacttatcccagacacaacaccatgtggtctggaggtcccagcccccaccctaaaaaggttatccctgagaactccaccagacttgggagcccaagtgcagtgcctggtgctgctcccatctgccgccccccttctctcctgcaattggtttgtactcactgggctgtgctctcccctgtttacccgatgtatggaaataaaggcccttttcctcctg

SEQ ID NO: 66726 - DNA, 535 bp, Homo sapiens
cacgaggtttttttttaaatacccactctcagggatgcagctgtgatggagaggttgggtatttaaattaaaaagtagaaagacagcaggcaccaagaagagagagcccccaccccacacgagagggaaggcactgcctccctcctgctctgtccaggtggtctggaccataaactcaacttgagagggaaggcttggggttgaggacttgtgatcagaaaaactgaagatggaagttttggccggtgctcattagacatgagtcctcactctgtgtcctgagcccgtgtcattcttccaacctccctgcccccacacacttatcccagacacaacaccatgtggtctggaggtcccagcccccaccctaaaaaggttatccctgagaactccaccagacttgggagcccaagtgcagtgcctggtgctgctcccatctgccgccccccttctctcctgcaattggtttgtactcactgggctgtgctctcccctgtttacccgatgtatggaaataaaggcccttttcctcctg

SEQ ID NO: 66727 - DNA, 292 bp, Homo sapiens
caacggtgctgggctagaccaagctctgcctgaaccttagtttcagccctggagcccttgagagagctctgctgttggttagtaattaccgtgaaagtattcagcttcttcattacaaggacagaaagtgtgttgttatgaggattcaatgaggagacctgtatgaagtgccttcccctgtgcctggctcataggcacaggttaccttcagcgccatggccttttcatcaaggttcgccttctgggagcaaaaggaaagttggattttaaaatctttatgtttttcctgtgt

SEQ ID NO: 66728 - DNA, 6495 bp, Homo sapiens
  misc_feature (1676)..(1676): n is a, c, g, or t
caacggtgctgggctagaccaagctctgcctgaaccttagtttcagccctggagcccttgagagagctctgctgttggttagtaattaccgtgaaagtattcagcttcttcattacaaggacaggcgaaaacagaagaacagattgcagcagaagaggcctggaatgagacggagaaggtgtggctggtccatagggacggcttctcactggccagtcaactcaaatctgaggagctcaacttgcctgaggggaaggtgcgtgtgaagctggaccacgatggggccatcctggatgtggatgaggatgacgttgagaaggctaatgctccctcctgcgaccgtctggaggatctggcctcactggtgtacctcaatgagtccagcgtcctgcacaccttgcgccagcgctatggcgctagcctgctgcacacgtatgctggccccagcctgctggttcttggcccccgtggggcccctgctgtgtactctgagaaggtgatgcacatgttcaagggttgtcggcgggaggacatggcaccccacatctatgcagtggcccagaccgcatacagggcgatgctgatgagccgtcaggatcagtcaatcatcctcctgggcagtagtggcagtggcaagaccaccagctgccagcatctggtgcagtacctggccaccatcgcgggcatcagcgggaacaaggtgttttctgtggagaagtggcaggctctgtacaccctcctggaagcctttgggaacagccccaccatcattaatggcaatgccacccgcttctcccagatcctctccctggactttgaccaagctggccaggtggcctcagcctccattcagacaatgcttctggagaagctgcgtgtggctcggcgcccagccagtgaagccacattcaacgtcttctactacctgctggcctgtggggatggcaccctcaggacagagctccacctcaaccacttggcagagaacaatgtgtttgggattgtgccactggccaagcctgaggaaaagcagaaggcagctcagcagtttagtaagctgcaggcggccatgaaggtgctgggcatctcccccgatgaacagaaggcctgctggttcattctggctgccatctaccacctgggggctgcgggagccaccaaaggaagctgctgaagctgggcgcaagcagtttgcccgccatgagtgggcccagaaggctgcgtacctactgggctgcagcctggaggagctgtcctcagccatcttcaagcaccagcacaagggtggcaccctgcagcgctccacctccttccgccagggccccgaggagagtggcctgggagatgggacaggcccgaaactgagtgcactggagtgccttgagggcatggcggccggcctctacagcgagctcttcacccttctcgtctccctggtgaatagggctctcaagtccagccagcactcactctgctccatgatgattgtcgacaccccgggcttccagaaccctgagcagggtgggtcagcccgcggagcctcctttgaggagctgtgccacaactacacccaagaccggctgcagaggctcttccacgagcgcaccttcgtgcaggagttggaaagatacaaggaggagaacatcgagctggcgtttgacgacttggaacccccnacggatgactctgtggctgctgtggaccaggcctcccatcagtccctggtccgctcgctggcccgcacagacgaggcgaggggcctgctctggctattggaagaggaggctctggtgccaggggccagtgaggacaccctcctggagcgccttttctcctattatggcccccaggaaggtgacaaaaaaggccaaagcccccttctgcacagcagcaaaccacaccactttctcctgggccacagccatggcaccaactgggtagagtacaatgtgactggctggctgaactacaccaagcagaacccagccacccagaatgccccccggctcctgcaggactcccagaaaaaaatcatcagcaacctgtttctgggccgcgcaggcagtgccacggtgctctctggctccatcgcgggcctggagggcggctcgcagctggcactgcgccgggccaccagcatgcggaaaacctttaccacaggcatggcggctgtcaaaaagaagtcactgtgcatccagatgaagctacaggtggacgccctcatcgacaccatcaagaagtcaaagctgcattttgtgcactgcttcctgcctgtagctgagggctgggctggggagccccgttccgcctcctcccgccgagtcagcagcagcagtgagctggacctgccctcgggagaccactgcgaggctgggctcctgcagctcgacgtgcccctgctccgcacccagctccgcggctcccgcctgctcgatgccatgcgcatgtaccgccaaggttaccctgaccacatggtgttttccgagttccgccgccgctttgatgtcctggccccgcacctgaccaagaaacacgggcgtaactacatcgtggtggatgaaaggcgggcagtggaggagctgctggagtgcttggatctggagaagagcagctgctgcatgggcctgagccgggtgttcttccgggcgggcaccttggcacggctggaggagcagcgggatgaacaaaccagcaggaacctaaccctgttccaagcagcctgcaggggctacctggcccgccagcacttcaagaagagaaagatccaggacctggccattcgctgtgtacagaagaacatcaagaagaacaaaggggtgaaggactggccctggtggaagctttttaccacagtgaggcccctcatcgaagtacagctgtcagaggagcagatccggaacaaagacgaggagatccagcagctgcggagcaagctcgagaaggcggagaaggagaggaacgagctgcggctcaacagtgaccggctggagagccggatctcagagctgacatcggagctgacagatgagcgtaacacaggagagtccgcctcccagctgctggacgcggagacagcagagaggctccgggctgagaaggagatgaaggaactgcagacccagtacgatgcactgaagaagcagatggaggttatggaaatggaggtgatggaggcccgtctcatccgggcagcggagatcaacggggaagtggatgatgatgatgcaggtggcgagtggcggctgaagtatgagcgggctgtgcgggaggtggacttcaccaagaaacggctccagcaggagtttgaggacaagctggaggtggagcagcagaacaagaggcagctggaacggcggctcggggacctgcaggcagatagtgaggagagtcagcgggctctgcagcagctcaagaagaagtgccagcgactgacggctgagctgcaagacaccaagctgcacctggagggccagcaggtccgcaaccacgaactggagaagaagcagaggaggtttgacagtgagctctcgcaggcgcatgaggaggcccagcgggagaagctgcagcgggagaagctgcagcgggagaaggacatgctcctcgctgaggctttcagcctgaagcagcaactagaggaaaaagacatggacattgcagggttcacccagaaggttgtgtctctagaggcagagctccaggacatttcttcccaagagtccaaggatgaggcttctctggccaaggtcaagaaacagctccgggacctggaggccaaagtcaaggatcaggaagaagagctggatgagcaggcagggaccatccagatgctggaacaggccaagctgcgtctggagatggagatggagcggatgagacagacccattctaaggagatggagagtcgggatgaggaggtggaggaggcccggcagtcgtgtcagaagaagttaaaacagatggaggtgcagctagaggaagagtatgaggacaagcagaaggttctgcgagagaagcgggagctggagggcaagctcgccaccctcagcgaccaggtgaaccggcgggactttgagtcagagaagcggctgcggaaggacctgaagcgcaccaaggccctgctggcagatgcccagctcatgctggaccacctgaagaacagtgctcccagcaagcgagagattgcccagctcaagaaccagctggaggagtcagagttcacctgtgcggcagccgtgaaagcacggaaagcaatggaggtggagatcgaagacctgcacctgcagattgatgacatcgccaaagccaagacagcgctggaggagcagctgagccgccttcagcgtgagaagaatgagatccagaaccggctggaggaagatcaggaagacatgaacgaattgatgaagaagcacaaggctgccgtggctcaggcttcccgggacctggctcagataaatgatctccaagctcagctagaagaagccaacaaagagaagcaggagctgcaggagaagctacaagccctccagagccaggtggagttcctggagcagtccatggtggacaagtccctggtgagcaggcaggaagctaagatacgggagctggagacacgcctggagtttgaaaggacgcaagtgaaacggctggagagcctggctagccgtctcaaggaaaacatggagaagctgactgaggagcgggatcagcgcattgcagccgagaaccgggagaaggaacagaacaagcggctacagaggcagctccgggacaccaaggaggagatgggcgagcttgccaggaaggaggccgaggcgagccgcaagaagcacgaactggagatggatctagaaagcctggaggctgctaaccagagcctgcaggctgacctaaagttggcattcaagcgcatcggggacctgcaggctgccattgaggatgagatggagagtgatgagaatgaggacctcatcaacagtgagggagactctgatgtggactcggagctggaggaccgtgttgacggggtcaagtcctggttgtcaaaaaacaagggaccttccaaggcagcttctgatgatggcagcttaaagagttccagccccaccagctactggaagtcccttgcccctgatcggtcagatgatgagcacgaccctctcgacaacacctccagaccgcgatactcccacagttatctgagtgacagcgacacagaggccaagctgacggagactaacgcatagcccaggggagtggttggcagccctctcaccccagggcctgtggctgcctgggcacctctcccaggaagtggtggggcaccggtctcccccacccgactgctgatctgcatgggaaacaccctgaccttcttctgtcaggggcactttccaggctatgggtgtctgatgtctccacgtggaagaggtgggggaaagaggagtttctgaagagaactttttgctcctctgtctcaaaatgccagactcttggcttctaccctgtgtcaccgtgggcagtggcaggtggcctggcactgcatggagccagcacgttgacctccctctcagctccctgctcagggacggtggacaggttgcctactgggacactctaggttgctgggtccatggggaggattgggggaggagaagcagtgccttccctctcgtgtggggtgggggctctctcttcttggtgcctgctgtctttctactttttaatttaaatacccaacctctccatcacagctgcatccctgagagtgggagggggctgtagtggtagctggggctcccaagaacgactcgggaatgtcatctccatcttcacccttcagagagcagtcctttctctgtgcagctggagacgctggtgaggagagccgggtccaggttcttaagaatgaggtgcggaggggctctccggtgctgctgggctgggttgagcaagcctacgcagacaagtgtgtgtgtggaccatccgcacctccagcccccaccccaccctctttgtctcagcgtgttatgtgcaatgacctatttaaggtaaacccattccaactacagcagttcagggctgatccaagcactgcctccctcctgctctgtccaggtggtctggaccataaactcaacttgagagggaaggcttggggttgaggacttgtgatcagaaaaactgaagatggaagttttggccggtgctcattagacatgagtcctcactctgtgtcctgagcccgtgtcattcttccaacctccctgcccccacacacttatcccagacacaacaccatgtggtctggaggtcccagcccccaccctaaaaaggttatccctgagaactccaccagacttgggagcccaagtgcagtgcctggtgctgctcccatctgccgccccccttctctcctgcaattggtttgtactcactgggctgtgctctcccctgtttacccgatgtatggaaataaaggcccttttcctcctg

SEQ ID NO: 66729 - DNA, 6512 bp, Homo sapiens
  misc_feature (1693)..(1693): n is a, c, g, or t
ccagccaagcctgaagccccaaagaagcagcgctccccagccccaccggaagagctggtgaccccaggctccaccggcccgaagtcagacctcactggagagcagcagtccaagtcaccagtccctggtgtgaagcaggaggcgaaaacagaagaacagattgcagcagaagaggcctggaatgagacggagaaggtgtggctggtccatagggacggcttctcactggccagtcaactcaaatctgaggagctcaacttgcctgaggggaaggtgcgtgtgaagctggaccacgatggggccatcctggatgtggatgaggatgacgttgagaaggctaatgctccctcctgcgaccgtctggaggatctggcctcactggtgtacctcaatgagtccagcgtcctgcacaccttgcgccagcgctatggcgctagcctgctgcacacgtatgctggccccagcctgctggttcttggcccccgtggggcccctgctgtgtactctgagaaggtgatgcacatgttcaagggttgtcggcgggaggacatggcaccccacatctatgcagtggcccagaccgcatacagggcgatgctgatgagccgtcaggatcagtcaatcatcctcctgggcagtagtggcagtggcaagaccaccagctgccagcatctggtgcagtacctggccaccatcgcgggcatcagcgggaacaaggtgttttctgtggagaagtggcaggctctgtacaccctcctggaagcctttgggaacagccccaccatcattaatggcaatgccacccgcttctcccagatcctctccctggactttgaccaagctggccaggtggcctcagcctccattcagacaatgcttctggagaagctgcgtgtggctcggcgcccagccagtgaagccacattcaacgtcttctactacctgctggcctgtggggatggcaccctcaggacagagctccacctcaaccacttggcagagaacaatgtgtttgggattgtgccactggccaagcctgaggaaaagcagaaggcagctcagcagtttagtaagctgcaggcggccatgaaggtgctgggcatctcccccgatgaacagaaggcctgctggttcattctggctgccatctaccacctgggggctgcgggagccaccaaaggaagctgctgaagctgggcgcaagcagtttgcccgccatgagtgggcccagaaggctgcgtacctactgggctgcagcctggaggagctgtcctcagccatcttcaagcaccagcacaagggtggcaccctgcagcgctccacctccttccgccagggccccgaggagagtggcctgggagatgggacaggcccgaaactgagtgcactggagtgccttgagggcatggcggccggcctctacagcgagctcttcacccttctcgtctccctggtgaatagggctctcaagtccagccagcactcactctgctccatgatgattgtcgacaccccgggcttccagaaccctgagcagggtgggtcagcccgcggagcctcctttgaggagctgtgccacaactacacccaagaccggctgcagaggctcttccacgagcgcaccttcgtgcaggagttggaaagatacaaggaggagaacatcgagctggcgtttgacgacttggaacccccnacggatgactctgtggctgctgtggaccaggcctcccatcagtccctggtccgctcgctggcccgcacagacgaggcgaggggcctgctctggctattggaagaggaggctctggtgccaggggccagtgaggacaccctcctggagcgccttttctcctattatggcccccaggaaggtgacaaaaaaggccaaagcccccttctgcacagcagcaaaccacaccactttctcctgggccacagccatggcaccaactgggtagagtacaatgtgactggctggctgaactacaccaagcagaacccagccacccagaatgccccccggctcctgcaggactcccagaaaaaaatcatcagcaacctgtttctgggccgcgcaggcagtgccacggtgctctctggctccatcgcgggcctggagggcggctcgcagctggcactgcgccgggccaccagcatgcggaaaacctttaccacaggcatggcggctgtcaaaaagaagtcactgtgcatccagatgaagctacaggtggacgccctcatcgacaccatcaagaagtcaaagctgcattttgtgcactgcttcctgcctgtagctgagggctgggctggggagccccgttccgcctcctcccgccgagtcagcagcagcagtgagctggacctgccctcgggagaccactgcgaggctgggctcctgcagctcgacgtgcccctgctccgcacccagctccgcggctcccgcctgctcgatgccatgcgcatgtaccgccaaggttaccctgaccacatggtgttttccgagttccgccgccgctttgatgtcctggccccgcacctgaccaagaaacacgggcgtaactacatcgtggtggatgaaaggcgggcagtggaggagctgctggagtgcttggatctggagaagagcagctgctgcatgggcctgagccgggtgttcttccgggcgggcaccttggcacggctggaggagcagcgggatgaacaaaccagcaggaacctaaccctgttccaagcagcctgcaggggctacctggcccgccagcacttcaagaagagaaagatccaggacctggccattcgctgtgtacagaagaacatcaagaagaacaaaggggtgaaggactggccctggtggaagctttttaccacagtgaggcccctcatcgaagtacagctgtcagaggagcagatccggaacaaagacgaggagatccagcagctgcggagcaagctcgagaaggcggagaaggagaggaacgagctgcggctcaacagtgaccggctggagagccggatctcagagctgacatcggagctgacagatgagcgtaacacaggagagtccgcctcccagctgctggacgcggagacagcagagaggctccgggctgagaaggagatgaaggaactgcagacccagtacgatgcactgaagaagcagatggaggttatggaaatggaggtgatggaggcccgtctcatccgggcagcggagatcaacggggaagtggatgatgatgatgcaggtggcgagtggcggctgaagtatgagcgggctgtgcgggaggtggacttcaccaagaaacggctccagcaggagtttgaggacaagctggaggtggagcagcagaacaagaggcagctggaacggcggctcggggacctgcaggcagatagtgaggagagtcagcgggctctgcagcagctcaagaagaagtgccagcgactgacggctgagctgcaagacaccaagctgcacctggagggccagcaggtccgcaaccacgaactggagaagaagcagaggaggtttgacagtgagctctcgcaggcgcatgaggaggcccagcgggagaagctgcagcgggagaagctgcagcgggagaaggacatgctcctcgctgaggctttcagcctgaagcagcaactagaggaaaaagacatggacattgcagggttcacccagaaggttgtgtctctagaggcagagctccaggacatttcttcccaagagtccaaggatgaggcttctctggccaaggtcaagaaacagctccgggacctggaggccaaagtcaaggatcaggaagaagagctggatgagcaggcagggaccatccagatgctggaacaggccaagctgcgtctggagatggagatggagcggatgagacagacccattctaaggagatggagagtcgggatgaggaggtggaggaggcccggcagtcgtgtcagaagaagttaaaacagatggaggtgcagctagaggaagagtatgaggacaagcagaaggttctgcgagagaagcgggagctggagggcaagctcgccaccctcagcgaccaggtgaaccggcgggactttgagtcagagaagcggctgcggaaggacctgaagcgcaccaaggccctgctggcagatgcccagctcatgctggaccacctgaagaacagtgctcccagcaagcgagagattgcccagctcaagaaccagctggaggagtcagagttcacctgtgcggcagccgtgaaagcacggaaagcaatggaggtggagatcgaagacctgcacctgcagattgatgacatcgccaaagccaagacagcgctggaggagcagctgagccgccttcagcgtgagaagaatgagatccagaaccggctggaggaagatcaggaagacatgaacgaattgatgaagaagcacaaggctgccgtggctcaggcttcccgggacctggctcagataaatgatctccaagctcagctagaagaagccaacaaagagaagcaggagctgcaggagaagctacaagccctccagagccaggtggagttcctggagcagtccatggtggacaagtccctggtgagcaggcaggaagctaagatacgggagctggagacacgcctggagtttgaaaggacgcaagtgaaacggctggagagcctggctagccgtctcaaggaaaacatggagaagctgactgaggagcgggatcagcgcattgcagccgagaaccgggagaaggaacagaacaagcggctacagaggcagctccgggacaccaaggaggagatgggcgagcttgccaggaaggaggccgaggcgagccgcaagaagcacgaactggagatggatctagaaagcctggaggctgctaaccagagcctgcaggctgacctaaagttggcattcaagcgcatcggggacctgcaggctgccattgaggatgagatggagagtgatgagaatgaggacctcatcaacagtgagggagactctgatgtggactcggagctggaggaccgtgttgacggggtcaagtcctggttgtcaaaaaacaagggaccttccaaggcagcttctgatgatggcagcttaaagagttccagccccaccagctactggaagtcccttgcccctgatcggtcagatgatgagcacgaccctctcgacaacacctccagaccgcgatactcccacagttatctgagtgacagcgacacagaggccaagctgacggagactaacgcatagcccaggggagtggttggcagccctctcaccccagggcctgtggctgcctgggcacctctcccaggaagtggtggggcaccggtctcccccacccgactgctgatctgcatgggaaacaccctgaccttcttctgtcaggggcactttccaggctatgggtgtctgatgtctccacgtggaagaggtgggggaaagaggagtttctgaagagaactttttgctcctctgtctcaaaatgccagactcttggcttctaccctgtgtcaccgtgggcagtggcaggtggcctggcactgcatggagccagcacgttgacctccctctcagctccctgctcagggacggtggacaggttgcctactgggacactctaggttgctgggtccatggggaggattgggggaggagaagcagtgccttccctctcgtgtggggtgggggctctctcttcttggtgcctgctgtctttctactttttaatttaaatacccaacctctccatcacagctgcatccctgagagtgggagggggctgtagtggtagctggggctcccaagaacgactcgggaatgtcatctccatcttcacccttcagagagcagtcctttctctgtgcagctggagacgctggtgaggagagccgggtccaggttcttaagaatgaggtgcggaggggctctccggtgctgctgggctgggttgagcaagcctacgcagacaagtgtgtgtgtggaccatccgcacctccagcccccaccccaccctctttgtctcagcgtgttatgtgcaatgacctatttaaggtaaacccattccaactacagcagttcagggctgatccaagcactgcctccctcctgctctgtccaggtggtctggaccataaactcaacttgagagggaaggcttggggttgaggacttgtgatcagaaaaactgaagatggaagttttggccggtgctcattagacatgagtcctcactctgtgtcctgagcccgtgtcattcttccaacctccctgcccccacacacttatcccagacacaacaccatgtggtctggaggtcccagcccccaccctaaaaaggttatccctgagaactccaccagacttgggagcccaagtgcagtgcctggtgctgctcccatctgccgccccccttctctcctgcaattggtttgtactcactgggctgtgctctcccctgtttacccgatgtatggaaataaaggcccttttcctcctg

SEQ ID NO: 66730 - DNA, 5354 bp, Homo sapiens
  misc_feature (535)..(535): n is a, c, g, or t
agaggccccgaggagcaagcggaagctgctgaaagctgggcgcaagcagtttgcccgccatgagtgggcccagaaggctgcgtacctactgggctgcagcctggaggagctgtcctcagccatcttcaagcaccagcacaagggtggcaccctgcagcgctccacctccttccgccagggccccgaggagagtggcctgggagatgggacaggcccgaaactgagtgcactggagtgccttgagggcatggcggccggcctctacagcgagctcttcacccttctcgtctccctggtgaatagggctctcaagtccagccagcactcactctgctccatgatgattgtcgacaccccgggcttccagaaccctgagcagggtgggtcagcccgcggagcctcctttgaggagctgtgccacaactacacccaagaccggctgcagaggctcttccacgagcgcaccttcgtgcaggagttggaaagatacaaggaggagaacatcgagctggcgtttgacgacttggaacccccnacggatgactctgtggctgctgtggaccaggcctcccatcagtccctggtccgctcgctggcccgcacagacgaggcgaggggcctgctctggctattggaagaggaggctctggtgccaggggccagtgaggacaccctcctggagcgccttttctcctattatggcccccaggaaggtgacaaaaaaggccaaagcccccttctgcacagcagcaaaccacaccactttctcctgggccacagccatggcaccaactgggtagagtacaatgtgactggctggctgaactacaccaagcagaacccagccacccagaatgccccccggctcctgcaggactcccagaaaaaaatcatcagcaacctgtttctgggccgcgcaggcagtgccacggtgctctctggctccatcgcgggcctggagggcggctcgcagctggcactgcgccgggccaccagcatgcggaaaacctttaccacaggcatggcggctgtcaaaaagaagtcactgtgcatccagatgaagctacaggtggacgccctcatcgacaccatcaagaagtcaaagctgcattttgtgcactgcttcctgcctgtagctgagggctgggctggggagccccgttccgcctcctcccgccgagtcagcagcagcagtgagctggacctgccctcgggagaccactgcgaggctgggctcctgcagctcgacgtgcccctgctccgcacccagctccgcggctcccgcctgctcgatgccatgcgcatgtaccgccaaggttaccctgaccacatggtgttttccgagttccgccgccgctttgatgtcctggccccgcacctgaccaagaaacacgggcgtaactacatcgtggtggatgaaaggcgggcagtggaggagctgctggagtgcttggatctggagaagagcagctgctgcatgggcctgagccgggtgttcttccgggcgggcaccttggcacggctggaggagcagcgggatgaacaaaccagcaggaacctaaccctgttccaagcagcctgcaggggctacctggcccgccagcacttcaagaagagaaagatccaggacctggccattcgctgtgtacagaagaacatcaagaagaacaaaggggtgaaggactggccctggtggaagctttttaccacagtgaggcccctcatcgaagtacagctgtcagaggagcagatccggaacaaagacgaggagatccagcagctgcggagcaagctcgagaaggcggagaaggagaggaacgagctgcggctcaacagtgaccggctggagagccggatctcagagctgacatcggagctgacagatgagcgtaacacaggagagtccgcctcccagctgctggacgcggagacagcagagaggctccgggctgagaaggagatgaaggaactgcagacccagtacgatgcactgaagaagcagatggaggttatggaaatggaggtgatggaggcccgtctcatccgggcagcggagatcaacggggaagtggatgatgatgatgcaggtggcgagtggcggctgaagtatgagcgggctgtgcgggaggtggacttcaccaagaaacggctccagcaggagtttgaggacaagctggaggtggagcagcagaacaagaggcagctggaacggcggctcggggacctgcaggcagatagtgaggagagtcagcgggctctgcagcagctcaagaagaagtgccagcgactgacggctgagctgcaagacaccaagctgcacctggagggccagcaggtccgcaaccacgaactggagaagaagcagaggaggtttgacagtgagctctcgcaggcgcatgaggaggcccagcgggagaagctgcagcgggagaagctgcagcgggagaaggacatgctcctcgctgaggctttcagcctgaagcagcaactagaggaaaaagacatggacattgcagggttcacccagaaggttgtgtctctagaggcagagctccaggacatttcttcccaagagtccaaggatgaggcttctctggccaaggtcaagaaacagctccgggacctggaggccaaagtcaaggatcaggaagaagagctggatgagcaggcagggaccatccagatgctggaacaggccaagctgcgtctggagatggagatggagcggatgagacagacccattctaaggagatggagagtcgggatgaggaggtggaggaggcccggcagtcgtgtcagaagaagttaaaacagatggaggtgcagctagaggaagagtatgaggacaagcagaaggttctgcgagagaagcgggagctggagggcaagctcgccaccctcagcgaccaggtgaaccggcgggactttgagtcagagaagcggctgcggaaggacctgaagcgcaccaaggccctgctggcagatgcccagctcatgctggaccacctgaagaacagtgctcccagcaagcgagagattgcccagctcaagaaccagctggaggagtcagagttcacctgtgcggcagccgtgaaagcacggaaagcaatggaggtggagatcgaagacctgcacctgcagattgatgacatcgccaaagccaagacagcgctggaggagcagctgagccgccttcagcgtgagaagaatgagatccagaaccggctggaggaagatcaggaagacatgaacgaattgatgaagaagcacaaggctgccgtggctcaggcttcccgggacctggctcagataaatgatctccaagctcagctagaagaagccaacaaagagaagcaggagctgcaggagaagctacaagccctccagagccaggtggagttcctggagcagtccatggtggacaagtccctggtgagcaggcaggaagctaagatacgggagctggagacacgcctggagtttgaaaggacgcaagtgaaacggctggagagcctggctagccgtctcaaggaaaacatggagaagctgactgaggagcgggatcagcgcattgcagccgagaaccgggagaaggaacagaacaagcggctacagaggcagctccgggacaccaaggaggagatgggcgagcttgccaggaaggaggccgaggcgagccgcaagaagcacgaactggagatggatctagaaagcctggaggctgctaaccagagcctgcaggctgacctaaagttggcattcaagcgcatcggggacctgcaggctgccattgaggatgagatggagagtgatgagaatgaggacctcatcaacagtgagggagactctgatgtggactcggagctggaggaccgtgttgacggggtcaagtcctggttgtcaaaaaacaagggaccttccaaggcagcttctgatgatggcagcttaaagagttccagccccaccagctactggaagtcccttgcccctgatcggtcagatgatgagcacgaccctctcgacaacacctccagaccgcgatactcccacagttatctgagtgacagcgacacagaggccaagctgacggagactaacgcatagcccaggggagtggttggcagccctctcaccccagggcctgtggctgcctgggcacctctcccaggaagtggtggggcaccggtctcccccacccgactgctgatctgcatgggaaacaccctgaccttcttctgtcaggggcactttccaggctatgggtgtctgatgtctccacgtggaagaggtgggggaaagaggagtttctgaagagaactttttgctcctctgtctcaaaatgccagactcttggcttctaccctgtgtcaccgtgggcagtggcaggtggcctggcactgcatggagccagcacgttgacctccctctcagctccctgctcagggacggtggacaggttgcctactgggacactctaggttgctgggtccatggggaggattgggggaggagaagcagtgccttccctctcgtgtggggtgggggctctctcttcttggtgcctgctgtctttctactttttaatttaaatacccaacctctccatcacagctgcatccctgagagtgggagggggctgtagtggtagctggggctcccaagaacgactcgggaatgtcatctccatcttcacccttcagagagcagtcctttctctgtgcagctggagacgctggtgaggagagccgggtccaggttcttaagaatgaggtgcggaggggctctccggtgctgctgggctgggttgagcaagcctacgcagacaagtgtgtgtgtggaccatccgcacctccagcccccaccccaccctctttgtctcagcgtgttatgtgcaatgacctatttaaggtaaacccattccaactacagcagttcagggctgatccaagcactgcctccctcctgctctgtccaggtggtctggaccataaactcaacttgagagggaaggcttggggttgaggacttgtgatcagaaaaactgaagatggaagttttggccggtgctcattagacatgagtcctcactctgtgtcctgagcccgtgtcattcttccaacctccctgcccccacacacttatcccagacacaacaccatgtggtctggaggtcccagcccccaccctaaaaaggttatccctgagaactccaccagacttgggagcccaagtgcagtgcctggtgctgctcccatctgccgccccccttctctcctgcaattggtttgtactcactgggctgtgctctcccctgtttacccgatgtatggaaataaaggcccttttcctcctg

SEQ ID NO: 66731 - DNA, 5570 bp, Homo sapiens
  misc_feature (751)..(751): n is a, c, g, or t
ttgcaggctctctaccttccaggttctacgacagagctccacctcaaccacttggcagagaacaatgtgtttgggattgtgccactggccaagcctgaggaaaagcagaaggcagctcagcagtttagtaagctgcaggcggccatgaaggtgctgggcatctcccccgatgaacagaaggcctgctggttcattctggctgccatctaccacctgggggctgcgggagccaccaaaggaagctgctgaagctgggcgcaagcagtttgcccgccatgagtgggcccagaaggctgcgtacctactgggctgcagcctggaggagctgtcctcagccatcttcaagcaccagcacaagggtggcaccctgcagcgctccacctccttccgccagggccccgaggagagtggcctgggagatgggacaggcccgaaactgagtgcactggagtgccttgagggcatggcggccggcctctacagcgagctcttcacccttctcgtctccctggtgaatagggctctcaagtccagccagcactcactctgctccatgatgattgtcgacaccccgggcttccagaaccctgagcagggtgggtcagcccgcggagcctcctttgaggagctgtgccacaactacacccaagaccggctgcagaggctcttccacgagcgcaccttcgtgcaggagttggaaagatacaaggaggagaacatcgagctggcgtttgacgacttggaacccccnacggatgactctgtggctgctgtggaccaggcctcccatcagtccctggtccgctcgctggcccgcacagacgaggcgaggggcctgctctggctattggaagaggaggctctggtgccaggggccagtgaggacaccctcctggagcgccttttctcctattatggcccccaggaaggtgacaaaaaaggccaaagcccccttctgcacagcagcaaaccacaccactttctcctgggccacagccatggcaccaactgggtagagtacaatgtgactggctggctgaactacaccaagcagaacccagccacccagaatgccccccggctcctgcaggactcccagaaaaaaatcatcagcaacctgtttctgggccgcgcaggcagtgccacggtgctctctggctccatcgcgggcctggagggcggctcgcagctggcactgcgccgggccaccagcatgcggaaaacctttaccacaggcatggcggctgtcaaaaagaagtcactgtgcatccagatgaagctacaggtggacgccctcatcgacaccatcaagaagtcaaagctgcattttgtgcactgcttcctgcctgtagctgagggctgggctggggagccccgttccgcctcctcccgccgagtcagcagcagcagtgagctggacctgccctcgggagaccactgcgaggctgggctcctgcagctcgacgtgcccctgctccgcacccagctccgcggctcccgcctgctcgatgccatgcgcatgtaccgccaaggttaccctgaccacatggtgttttccgagttccgccgccgctttgatgtcctggccccgcacctgaccaagaaacacgggcgtaactacatcgtggtggatgaaaggcgggcagtggaggagctgctggagtgcttggatctggagaagagcagctgctgcatgggcctgagccgggtgttcttccgggcgggcaccttggcacggctggaggagcagcgggatgaacaaaccagcaggaacctaaccctgttccaagcagcctgcaggggctacctggcccgccagcacttcaagaagagaaagatccaggacctggccattcgctgtgtacagaagaacatcaagaagaacaaaggggtgaaggactggccctggtggaagctttttaccacagtgaggcccctcatcgaagtacagctgtcagaggagcagatccggaacaaagacgaggagatccagcagctgcggagcaagctcgagaaggcggagaaggagaggaacgagctgcggctcaacagtgaccggctggagagccggatctcagagctgacatcggagctgacagatgagcgtaacacaggagagtccgcctcccagctgctggacgcggagacagcagagaggctccgggctgagaaggagatgaaggaactgcagacccagtacgatgcactgaagaagcagatggaggttatggaaatggaggtgatggaggcccgtctcatccgggcagcggagatcaacggggaagtggatgatgatgatgcaggtggcgagtggcggctgaagtatgagcgggctgtgcgggaggtggacttcaccaagaaacggctccagcaggagtttgaggacaagctggaggtggagcagcagaacaagaggcagctggaacggcggctcggggacctgcaggcagatagtgaggagagtcagcgggctctgcagcagctcaagaagaagtgccagcgactgacggctgagctgcaagacaccaagctgcacctggagggccagcaggtccgcaaccacgaactggagaagaagcagaggaggtttgacagtgagctctcgcaggcgcatgaggaggcccagcgggagaagctgcagcgggagaagctgcagcgggagaaggacatgctcctcgctgaggctttcagcctgaagcagcaactagaggaaaaagacatggacattgcagggttcacccagaaggttgtgtctctagaggcagagctccaggacatttcttcccaagagtccaaggatgaggcttctctggccaaggtcaagaaacagctccgggacctggaggccaaagtcaaggatcaggaagaagagctggatgagcaggcagggaccatccagatgctggaacaggccaagctgcgtctggagatggagatggagcggatgagacagacccattctaaggagatggagagtcgggatgaggaggtggaggaggcccggcagtcgtgtcagaagaagttaaaacagatggaggtgcagctagaggaagagtatgaggacaagcagaaggttctgcgagagaagcgggagctggagggcaagctcgccaccctcagcgaccaggtgaaccggcgggactttgagtcagagaagcggctgcggaaggacctgaagcgcaccaaggccctgctggcagatgcccagctcatgctggaccacctgaagaacagtgctcccagcaagcgagagattgcccagctcaagaaccagctggaggagtcagagttcacctgtgcggcagccgtgaaagcacggaaagcaatggaggtggagatcgaagacctgcacctgcagattgatgacatcgccaaagccaagacagcgctggaggagcagctgagccgccttcagcgtgagaagaatgagatccagaaccggctggaggaagatcaggaagacatgaacgaattgatgaagaagcacaaggctgccgtggctcaggcttcccgggacctggctcagataaatgatctccaagctcagctagaagaagccaacaaagagaagcaggagctgcaggagaagctacaagccctccagagccaggtggagttcctggagcagtccatggtggacaagtccctggtgagcaggcaggaagctaagatacgggagctggagacacgcctggagtttgaaaggacgcaagtgaaacggctggagagcctggctagccgtctcaaggaaaacatggagaagctgactgaggagcgggatcagcgcattgcagccgagaaccgggagaaggaacagaacaagcggctacagaggcagctccgggacaccaaggaggagatgggcgagcttgccaggaaggaggccgaggcgagccgcaagaagcacgaactggagatggatctagaaagcctggaggctgctaaccagagcctgcaggctgacctaaagttggcattcaagcgcatcggggacctgcaggctgccattgaggatgagatggagagtgatgagaatgaggacctcatcaacagtgagggagactctgatgtggactcggagctggaggaccgtgttgacggggtcaagtcctggttgtcaaaaaacaagggaccttccaaggcagcttctgatgatggcagcttaaagagttccagccccaccagctactggaagtcccttgcccctgatcggtcagatgatgagcacgaccctctcgacaacacctccagaccgcgatactcccacagttatctgagtgacagcgacacagaggccaagctgacggagactaacgcatagcccaggggagtggttggcagccctctcaccccagggcctgtggctgcctgggcacctctcccaggaagtggtggggcaccggtctcccccacccgactgctgatctgcatgggaaacaccctgaccttcttctgtcaggggcactttccaggctatgggtgtctgatgtctccacgtggaagaggtgggggaaagaggagtttctgaagagaactttttgctcctctgtctcaaaatgccagactcttggcttctaccctgtgtcaccgtgggcagtggcaggtggcctggcactgcatggagccagcacgttgacctccctctcagctccctgctcagggacggtggacaggttgcctactgggacactctaggttgctgggtccatggggaggattgggggaggagaagcagtgccttccctctcgtgtggggtgggggctctctcttcttggtgcctgctgtctttctactttttaatttaaatacccaacctctccatcacagctgcatccctgagagtgggagggggctgtagtggtagctggggctcccaagaacgactcgggaatgtcatctccatcttcacccttcagagagcagtcctttctctgtgcagctggagacgctggtgaggagagccgggtccaggttcttaagaatgaggtgcggaggggctctccggtgctgctgggctgggttgagcaagcctacgcagacaagtgtgtgtgtggaccatccgcacctccagcccccaccccaccctctttgtctcagcgtgttatgtgcaatgacctatttaaggtaaacccattccaactacagcagttcagggctgatccaagcactgcctccctcctgctctgtccaggtggtctggaccataaactcaacttgagagggaaggcttggggttgaggacttgtgatcagaaaaactgaagatggaagttttggccggtgctcattagacatgagtcctcactctgtgtcctgagcccgtgtcattcttccaacctccctgcccccacacacttatcccagacacaacaccatgtggtctggaggtcccagcccccaccctaaaaaggttatccctgagaactccaccagacttgggagcccaagtgcagtgcctggtgctgctcccatctgccgccccccttctctcctgcaattggtttgtactcactgggctgtgctctcccctgtttacccgatgtatggaaataaaggcccttttcctcctg

SEQ ID NO: 66732 - DNA, 5988 bp, Homo sapiens
  misc_feature (1169)..(1169): n is a, c, g, or t
cgtccttatcgtggcttagctcctcaaggaggctccgcgggctgacccaccctgctcagcggttctggaagcccggggtgtcgacaatcatcatggagcagagtgagtgctggctggacttgagagccctattcaccaggcagacgagaagggtgaagagctcgctgtagaggccggccgccatgccctcaaggcactcctagtggagaagtggcaggctctgtacaccctcctggaagcctttgggaacagccccaccatcattaatggcaatgccacccgcttctcccagatcctctccctggactttgaccaagctggccaggtggcctcagcctccattcagacaatgcttctggagaagctgcgtgtggctcggcgcccagccagtgaagccacattcaacgtcttctactacctgctggcctgtggggatggcaccctcaggacagagctccacctcaaccacttggcagagaacaatgtgtttgggattgtgccactggccaagcctgaggaaaagcagaaggcagctcagcagtttagtaagctgcaggcggccatgaaggtgctgggcatctcccccgatgaacagaaggcctgctggttcattctggctgccatctaccacctgggggctgcgggagccaccaaaggaagctgctgaagctgggcgcaagcagtttgcccgccatgagtgggcccagaaggctgcgtacctactgggctgcagcctggaggagctgtcctcagccatcttcaagcaccagcacaagggtggcaccctgcagcgctccacctccttccgccagggccccgaggagagtggcctgggagatgggacaggcccgaaactgagtgcactggagtgccttgagggcatggcggccggcctctacagcgagctcttcacccttctcgtctccctggtgaatagggctctcaagtccagccagcactcactctgctccatgatgattgtcgacaccccgggcttccagaaccctgagcagggtgggtcagcccgcggagcctcctttgaggagctgtgccacaactacacccaagaccggctgcagaggctcttccacgagcgcaccttcgtgcaggagttggaaagatacaaggaggagaacatcgagctggcgtttgacgacttggaacccccnacggatgactctgtggctgctgtggaccaggcctcccatcagtccctggtccgctcgctggcccgcacagacgaggcgaggggcctgctctggctattggaagaggaggctctggtgccaggggccagtgaggacaccctcctggagcgccttttctcctattatggcccccaggaaggtgacaaaaaaggccaaagcccccttctgcacagcagcaaaccacaccactttctcctgggccacagccatggcaccaactgggtagagtacaatgtgactggctggctgaactacaccaagcagaacccagccacccagaatgccccccggctcctgcaggactcccagaaaaaaatcatcagcaacctgtttctgggccgcgcaggcagtgccacggtgctctctggctccatcgcgggcctggagggcggctcgcagctggcactgcgccgggccaccagcatgcggaaaacctttaccacaggcatggcggctgtcaaaaagaagtcactgtgcatccagatgaagctacaggtggacgccctcatcgacaccatcaagaagtcaaagctgcattttgtgcactgcttcctgcctgtagctgagggctgggctggggagccccgttccgcctcctcccgccgagtcagcagcagcagtgagctggacctgccctcgggagaccactgcgaggctgggctcctgcagctcgacgtgcccctgctccgcacccagctccgcggctcccgcctgctcgatgccatgcgcatgtaccgccaaggttaccctgaccacatggtgttttccgagttccgccgccgctttgatgtcctggccccgcacctgaccaagaaacacgggcgtaactacatcgtggtggatgaaaggcgggcagtggaggagctgctggagtgcttggatctggagaagagcagctgctgcatgggcctgagccgggtgttcttccgggcgggcaccttggcacggctggaggagcagcgggatgaacaaaccagcaggaacctaaccctgttccaagcagcctgcaggggctacctggcccgccagcacttcaagaagagaaagatccaggacctggccattcgctgtgtacagaagaacatcaagaagaacaaaggggtgaaggactggccctggtggaagctttttaccacagtgaggcccctcatcgaagtacagctgtcagaggagcagatccggaacaaagacgaggagatccagcagctgcggagcaagctcgagaaggcggagaaggagaggaacgagctgcggctcaacagtgaccggctggagagccggatctcagagctgacatcggagctgacagatgagcgtaacacaggagagtccgcctcccagctgctggacgcggagacagcagagaggctccgggctgagaaggagatgaaggaactgcagacccagtacgatgcactgaagaagcagatggaggttatggaaatggaggtgatggaggcccgtctcatccgggcagcggagatcaacggggaagtggatgatgatgatgcaggtggcgagtggcggctgaagtatgagcgggctgtgcgggaggtggacttcaccaagaaacggctccagcaggagtttgaggacaagctggaggtggagcagcagaacaagaggcagctggaacggcggctcggggacctgcaggcagatagtgaggagagtcagcgggctctgcagcagctcaagaagaagtgccagcgactgacggctgagctgcaagacaccaagctgcacctggagggccagcaggtccgcaaccacgaactggagaagaagcagaggaggtttgacagtgagctctcgcaggcgcatgaggaggcccagcgggagaagctgcagcgggagaagctgcagcgggagaaggacatgctcctcgctgaggctttcagcctgaagcagcaactagaggaaaaagacatggacattgcagggttcacccagaaggttgtgtctctagaggcagagctccaggacatttcttcccaagagtccaaggatgaggcttctctggccaaggtcaagaaacagctccgggacctggaggccaaagtcaaggatcaggaagaagagctggatgagcaggcagggaccatccagatgctggaacaggccaagctgcgtctggagatggagatggagcggatgagacagacccattctaaggagatggagagtcgggatgaggaggtggaggaggcccggcagtcgtgtcagaagaagttaaaacagatggaggtgcagctagaggaagagtatgaggacaagcagaaggttctgcgagagaagcgggagctggagggcaagctcgccaccctcagcgaccaggtgaaccggcgggactttgagtcagagaagcggctgcggaaggacctgaagcgcaccaaggccctgctggcagatgcccagctcatgctggaccacctgaagaacagtgctcccagcaagcgagagattgcccagctcaagaaccagctggaggagtcagagttcacctgtgcggcagccgtgaaagcacggaaagcaatggaggtggagatcgaagacctgcacctgcagattgatgacatcgccaaagccaagacagcgctggaggagcagctgagccgccttcagcgtgagaagaatgagatccagaaccggctggaggaagatcaggaagacatgaacgaattgatgaagaagcacaaggctgccgtggctcaggcttcccgggacctggctcagataaatgatctccaagctcagctagaagaagccaacaaagagaagcaggagctgcaggagaagctacaagccctccagagccaggtggagttcctggagcagtccatggtggacaagtccctggtgagcaggcaggaagctaagatacgggagctggagacacgcctggagtttgaaaggacgcaagtgaaacggctggagagcctggctagccgtctcaaggaaaacatggagaagctgactgaggagcgggatcagcgcattgcagccgagaaccgggagaaggaacagaacaagcggctacagaggcagctccgggacaccaaggaggagatgggcgagcttgccaggaaggaggccgaggcgagccgcaagaagcacgaactggagatggatctagaaagcctggaggctgctaaccagagcctgcaggctgacctaaagttggcattcaagcgcatcggggacctgcaggctgccattgaggatgagatggagagtgatgagaatgaggacctcatcaacagtgagggagactctgatgtggactcggagctggaggaccgtgttgacggggtcaagtcctggttgtcaaaaaacaagggaccttccaaggcagcttctgatgatggcagcttaaagagttccagccccaccagctactggaagtcccttgcccctgatcggtcagatgatgagcacgaccctctcgacaacacctccagaccgcgatactcccacagttatctgagtgacagcgacacagaggccaagctgacggagactaacgcatagcccaggggagtggttggcagccctctcaccccagggcctgtggctgcctgggcacctctcccaggaagtggtggggcaccggtctcccccacccgactgctgatctgcatgggaaacaccctgaccttcttctgtcaggggcactttccaggctatgggtgtctgatgtctccacgtggaagaggtgggggaaagaggagtttctgaagagaactttttgctcctctgtctcaaaatgccagactcttggcttctaccctgtgtcaccgtgggcagtggcaggtggcctggcactgcatggagccagcacgttgacctccctctcagctccctgctcagggacggtggacaggttgcctactgggacactctaggttgctgggtccatggggaggattgggggaggagaagcagtgccttccctctcgtgtggggtgggggctctctcttcttggtgcctgctgtctttctactttttaatttaaatacccaacctctccatcacagctgcatccctgagagtgggagggggctgtagtggtagctggggctcccaagaacgactcgggaatgtcatctccatcttcacccttcagagagcagtcctttctctgtgcagctggagacgctggtgaggagagccgggtccaggttcttaagaatgaggtgcggaggggctctccggtgctgctgggctgggttgagcaagcctacgcagacaagtgtgtgtgtggaccatccgcacctccagcccccaccccaccctctttgtctcagcgtgttatgtgcaatgacctatttaaggtaaacccattccaactacagcagttcagggctgatccaagcactgcctccctcctgctctgtccaggtggtctggaccataaactcaacttgagagggaaggcttggggttgaggacttgtgatcagaaaaactgaagatggaagttttggccggtgctcattagacatgagtcctcactctgtgtcctgagcccgtgtcattcttccaacctccctgcccccacacacttatcccagacacaacaccatgtggtctggaggtcccagcccccaccctaaaaaggttatccctgagaactccaccagacttgggagcccaagtgcagtgcctggtgctgctcccatctgccgccccccttctctcctgcaattggtttgtactcactgggctgtgctctcccctgtttacccgatgtatggaaataaaggcccttttcctcctg

SEQ ID NO: 66733 - DNA, 6802 bp, Homo sapiens
  misc_feature (1676)..(1676): n is a, c, g, or t
caacggtgctgggctagaccaagctctgcctgaaccttagtttcagccctggagcccttgagagagctctgctgttggttagtaattaccgtgaaagtattcagcttcttcattacaaggacaggcgaaaacagaagaacagattgcagcagaagaggcctggaatgagacggagaaggtgtggctggtccatagggacggcttctcactggccagtcaactcaaatctgaggagctcaacttgcctgaggggaaggtgcgtgtgaagctggaccacgatggggccatcctggatgtggatgaggatgacgttgagaaggctaatgctccctcctgcgaccgtctggaggatctggcctcactggtgtacctcaatgagtccagcgtcctgcacaccttgcgccagcgctatggcgctagcctgctgcacacgtatgctggccccagcctgctggttcttggcccccgtggggcccctgctgtgtactctgagaaggtgatgcacatgttcaagggttgtcggcgggaggacatggcaccccacatctatgcagtggcccagaccgcatacagggcgatgctgatgagccgtcaggatcagtcaatcatcctcctgggcagtagtggcagtggcaagaccaccagctgccagcatctggtgcagtacctggccaccatcgcgggcatcagcgggaacaaggtgttttctgtggagaagtggcaggctctgtacaccctcctggaagcctttgggaacagccccaccatcattaatggcaatgccacccgcttctcccagatcctctccctggactttgaccaagctggccaggtggcctcagcctccattcagacaatgcttctggagaagctgcgtgtggctcggcgcccagccagtgaagccacattcaacgtcttctactacctgctggcctgtggggatggcaccctcaggacagagctccacctcaaccacttggcagagaacaatgtgtttgggattgtgccactggccaagcctgaggaaaagcagaaggcagctcagcagtttagtaagctgcaggcggccatgaaggtgctgggcatctcccccgatgaacagaaggcctgctggttcattctggctgccatctaccacctgggggctgcgggagccaccaaaggaagctgctgaagctgggcgcaagcagtttgcccgccatgagtgggcccagaaggctgcgtacctactgggctgcagcctggaggagctgtcctcagccatcttcaagcaccagcacaagggtggcaccctgcagcgctccacctccttccgccagggccccgaggagagtggcctgggagatgggacaggcccgaaactgagtgcactggagtgccttgagggcatggcggccggcctctacagcgagctcttcacccttctcgtctccctggtgaatagggctctcaagtccagccagcactcactctgctccatgatgattgtcgacaccccgggcttccagaaccctgagcagggtgggtcagcccgcggagcctcctttgaggagctgtgccacaactacacccaagaccggctgcagaggctcttccacgagcgcaccttcgtgcaggagttggaaagatacaaggaggagaacatcgagctggcgtttgacgacttggaacccccnacggatgactctgtggctgctgtggaccaggcctcccatcagtccctggtccgctcgctggcccgcacagacgaggcgaggggcctgctctggctattggaagaggaggctctggtgccaggggccagtgaggacaccctcctggagcgccttttctcctattatggcccccaggaaggtgacaaaaaaggccaaagcccccttctgcacagcagcaaaccacaccactttctcctgggccacagccatggcaccaactgggtagagtacaatgtgactggctggctgaactacaccaagcagaacccagccacccagaatgccccccggctcctgcaggactcccagaaaaaaatcatcagcaacctgtttctgggccgcgcaggcagtgccacggtgctctctggctccatcgcgggcctggagggcggctcgcagctggcactgcgccgggccaccagcatgcggaaaacctttaccacaggcatggcggctgtcaaaaagaagtcactgtgcatccagatgaagctacaggtggacgccctcatcgacaccatcaagaagtcaaagctgcattttgtgcactgcttcctgcctgtagctgagggctgggctggggagccccgttccgcctcctcccgccgagtcagcagcagcagtgagctggacctgccctcgggagaccactgcgaggctgggctcctgcagctcgacgtgcccctgctccgcacccagctccgcggctcccgcctgctcgatgccatgcgcatgtaccgccaaggttaccctgaccacatggtgttttccgagttccgccgccgctttgatgtcctggccccgcacctgaccaagaaacacgggcgtaactacatcgtggtggatgaaaggcgggcagtggaggagctgctggagtgcttggatctggagaagagcagctgctgcatgggcctgagccgggtgttcttccgggcgggcaccttggcacggctggaggagcagcgggatgaacaaaccagcaggaacctaaccctgttccaagcagcctgcaggggctacctggcccgccagcacttcaagaagagaaagatccaggacctggccattcgctgtgtacagaagaacatcaagaagaacaaaggggtgaaggactggccctggtggaagctttttaccacagtgaggcccctcatcgaagtacagctgtcagaggagcagatccggaacaaagacgaggagatccagcagctgcggagcaagctcgagaaggcggagaaggagaggaacgagctgcggctcaacagtgaccggctggagagccggatctcagagctgacatcggagctgacagatgagcgtaacacaggagagtccgcctcccagctgctggacgcggagacagcagagaggctccgggctgagaaggagatgaaggaactgcagacccagtacgatgcactgaagaagcagatggaggttatggaaatggaggtgatggaggc[433 bp omitted]ttctccacctatgcttctgggtctctctgtatatgcaccccatcttggcccctagctcggggacctgcaggcagatagtgaggagagtcagcgggctctgcagcagctcaagaagaagtgccagcgactgacggctgagctgcaagacaccaagctgcacctggagggccagcaggtccgcaaccacgaactggagaagaagcagaggaggtttgacagtgagctctcgcaggcgcatgaggaggcccagcgggagaagctgcagcgggagaagctgcagcgggagaaggacatgctcctcgctgaggctttcagcctgaagcagcaactagaggaaaaagacatggacattgcagggttcacccagaaggttgtgtctctagaggcagagctccaggacatttcttcccaagagtccaaggatgaggcttctctggccaaggtcaagaaacagctccgggacctggaggccaaagtcaaggatcaggaagaagagctggatgagcaggcagggaccatccagatgctggaacaggccaagctgcgtctggagatggagatggagcggatgagacagacccattctaaggagatggagagtcgggatgaggaggtggaggaggcccggcagtcgtgtcagaagaagttaaaacagatggaggtgcagctagaggaagagtatgaggacaagcagaaggttctgcgagagaagcgggagctggagggcaagctcgccaccctcagcgaccaggtgaaccggcgggactttgagtcagagaagcggctgcggaaggacctgaagcgcaccaaggccctgctggcagatgcccagctcatgctggaccacctgaagaacagtgctcccagcaagcgagagattgcccagctcaagaaccagctggaggagtcagagttcacctgtgcggcagccgtgaaagcacggaaagcaatggaggtggagatcgaagacctgcacctgcagattgatgacatcgccaaagccaagacagcgctggaggagcagctgagccgccttcagcgtgagaagaatgagatccagaaccggctggaggaagatcaggaagacatgaacgaattgatgaagaagcacaaggctgccgtggctcaggcttcccgggacctggctcagataaatgatctccaagctcagctagaagaagccaacaaagagaagcaggagctgcaggagaagctacaagccctccagagccaggtggagttcctggagcagtccatggtggacaagtccctggtgagcaggcaggaagctaagatacgggagctggagacacgcctggagtttgaaaggacgcaagtgaaacggctggagagcctggctagccgtctcaaggaaaacatggagaagctgactgaggagcgggatcagcgcattgcagccgagaaccgggagaaggaacagaacaagcggctacagaggcagctccgggacaccaaggaggagatgggcgagcttgccaggaaggaggccgaggcgagccgcaagaagcacgaactggagatggatctagaaagcctggaggctgctaaccagagcctgcaggctgacctaaagttggcattcaagcgcatcggggacctgcaggctgccattgaggatgagatggagagtgatgagaatgaggacctcatcaacagtgagggagactctgatgtggactcggagctggaggaccgtgttgacggggtcaagtcctggttgtcaaaaaacaagggaccttccaaggcagcttctgatgatggcagcttaaagagttccagccccaccagctactggaagtcccttgcccctgatcggtcagatgatgagcacgaccctctcgacaacacctccagaccgcgatactcccacagttatctgagtgacagcgacacagaggccaagctgacggagactaacgcatagcccaggggagtggttggcagccctctcaccccagggcctgtggctgcctgggcacctctcccaggaagtggtggggcaccggtctcccccacccgactgctgatctgcatgggaaacaccctgaccttcttctgtcaggggcactttccaggctatgggtgtctgatgtctccacgtggaagaggtgggggaaagaggagtttctgaagagaactttttgctcctctgtctcaaaatgccagactcttggcttctaccctgtgtcaccgtgggcagtggcaggtggcctggcactgcatggagccagcacgttgacctccctctcagctccctgctcagggacggtggacaggttgcctactgggacactctaggttgctgggtccatggggaggattgggggaggagaagcagtgccttccctctcgtgtggggtgggggctctctcttcttggtgcctgctgtctttctactttttaatttaaatacccaacctctccatcacagctgcatccctgagagtgggagggggctgtagtggtagctggggctcccaagaacgactcgggaatgtcatctccatcttcacccttcagagagcagtcctttctctgtgcagctggagacgctggtgaggagagccgggtccaggttcttaagaatgaggtgcggaggggctctccggtgctgctgggctgggttgagcaagcctacgcagacaagtgtgtgtgtggaccatccgcacctccagcccccaccccaccctctttgtctcagcgtgttatgtgcaatgacctatttaaggtaaacccattccaactacagcagttcagggctgatccaagcactgcctccctcctgctctgtccaggtggtctggaccataaactcaacttgagagggaaggcttggggttgaggacttgtgatcagaaaaactgaagatggaagttttggccggtgctcattagacatgagtcctcactctgtgtcctgagcccgtgtcattcttccaacctccctgcccccacacacttatcccagacacaacaccatgtggtctggaggtcccagcccccaccctaaaaaggttatccctgagaactccaccagacttgggagcccaagtgcagtgcctggtgctgctcccatctgccgccccccttctctcctgcaattggtttgtactcactgggctgtgctctcccctgtttacccgatgtatggaaataaaggcccttttcctcctg

SEQ ID NO: 66734 - DNA, 3584 bp, Homo sapiens
aagggaattcgtgctggtgctaagggaattcctgctggtgctagggttcgtgctggtgctcaacagtgaccggctggagagccggatctcagagctgacatcggagctgacagatgagcgtaacacaggagagtccgcctcccagctgctggacgcggagacagcagagaggctccgggctgagaaggagatgaaggaactgcagacccagtacgatgcactgaagaagcagatggaggttatggaaatggaggtgatggaggcccgtctcatccgggcagcggagatcaacggggaagtggatgatgatgatgcaggtggcgagtggcggctgaagtatgagcgggctgtgcgggaggtggacttcaccaagaaacggctccagcaggagtttgaggacaagctggaggtggagcagcagaacaagaggcagctggaacggcggctcggggacctgcaggcagatagtgaggagagtcagcgggctctgcagcagctcaagaagaagtgccagcgactgacggctgagctgcaagacaccaagctgcacctggagggccagcaggtccgcaaccacgaactggagaagaagcagaggaggtttgacagtgagctctcgcaggcgcatgaggaggcccagcgggagaagctgcagcgggagaagctgcagcgggagaaggacatgctcctcgctgaggctttcagcctgaagcagcaactagaggaaaaagacatggacattgcagggttcacccagaaggttgtgtctctagaggcagagctccaggacatttcttcccaagagtccaaggatgaggcttctctggccaaggtcaagaaacagctccgggacctggaggccaaagtcaaggatcaggaagaagagctggatgagcaggcagggaccatccagatgctggaacaggccaagctgcgtctggagatggagatggagcggatgagacagacccattctaaggagatggagagtcgggatgaggaggtggaggaggcccggcagtcgtgtcagaagaagttaaaacagatggaggtgcagctagaggaagagtatgaggacaagcagaaggttctgcgagagaagcgggagctggagggcaagctcgccaccctcagcgaccaggtgaaccggcgggactttgagtcagagaagcggctgcggaaggacctgaagcgcaccaaggccctgctggcagatgcccagctcatgctggaccacctgaagaacagtgctcccagcaagcgagagattgcccagctcaagaaccagctggaggagtcagagttcacctgtgcggcagccgtgaaagcacggaaagcaatggaggtggagatcgaagacctgcacctgcagattgatgacatcgccaaagccaagacagcgctggaggagcagctgagccgccttcagcgtgagaagaatgagatccagaaccggctggaggaagatcaggaagacatgaacgaattgatgaagaagcacaaggctgccgtggctcaggcttcccgggacctggctcagataaatgatctccaagctcagctagaagaagccaacaaagagaagcaggagctgcaggagaagctacaagccctccagagccaggtggagttcctggagcagtccatggtggacaagtccctggtgagcaggcaggaagctaagatacgggagctggagacacgcctggagtttgaaaggacgcaagtgaaacggctggagagcctggctagccgtctcaaggaaaacatggagaagctgactgaggagcgggatcagcgcattgcagccgagaaccgggagaaggaacagaacaagcggctacagaggcagctccgggacaccaaggaggagatgggcgagcttgccaggaaggaggccgaggcgagccgcaagaagcacgaactggagatggatctagaaagcctggaggctgctaaccagagcctgcaggctgacctaaagttggcattcaagcgcatcggggacctgcaggctgccattgaggatgagatggagagtgatgagaatgaggacctcatcaacagtgagggagactctgatgtggactcggagctggaggaccgtgttgacggggtcaagtcctggttgtcaaaaaacaagggaccttccaaggcagcttctgatgatggcagcttaaagagttccagccccaccagctactggaagtcccttgcccctgatcggtcagatgatgagcacgaccctctcgacaacacctccagaccgcgatactcccacagttatctgagtgacagcgacacagaggccaagctgacggagactaacgcatagcccaggggagtggttggcagccctctcaccccagggcctgtggctgcctgggcacctctcccaggaagtggtggggcaccggtctcccccacccgactgctgatctgcatgggaaacaccctgaccttcttctgtcaggggcactttccaggctatgggtgtctgatgtctccacgtggaagaggtgggggaaagaggagtttctgaagagaactttttgctcctctgtctcaaaatgccagactcttggcttctaccctgtgtcaccgtgggcagtggcaggtggcctggcactgcatggagccagcacgttgacctccctctcagctccctgctcagggacggtggacaggttgcctactgggacactctaggttgctgggtccatggggaggattgggggaggagaagcagtgccttccctctcgtgtggggtgggggctctctcttcttggtgcctgctgtctttctactttttaatttaaatacccaacctctccatcacagctgcatccctgagagtgggagggggctgtagtggtagctggggctcccaagaacgactcgggaatgtcatctccatcttcacccttcagagagcagtcctttctctgtgcagctggagacgctggtgaggagagccgggtccaggttcttaagaatgaggtgcggaggggctctccggtgctgctgggctgggttgagcaagcctacgcagacaagtgtgtgtgtggaccatccgcacctccagcccccaccccaccctctttgtctcagcgtgttatgtgcaatgacctatttaaggtaaacccattccaactacagcagttcagggctgatccaagcactgcctccctcctgctctgtccaggtggtctggaccataaactcaacttgagagggaaggcttggggttgaggacttgtgatcagaaaaactgaagatggaagttttggccggtgctcattagacatgagtcctcactctgtgtcctgagcccgtgtcattcttccaacctccctgcccccacacacttatcccagacacaacaccatgtggtctggaggtcccagcccccaccctaaaaaggttatccctgagaactccaccagacttgggagcccaagtgcagtgcctggtgctgctcccatctgccgccccccttctctcctgcaattggtttgtactcactgggctgtgctctcccctgtttacccgatgtatggaaataaaggcccttttcctcctg

SEQ ID NO: 66735 - DNA, 6540 bp, Homo sapiens
  misc_feature (1676)..(1676): n is a, c, g, or t
caacggtgctgggctagaccaagctctgcctgaaccttagtttcagccctggagcccttgagagagctctgctgttggttagtaattaccgtgaaagtattcagcttcttcattacaaggacaggcgaaaacagaagaacagattgcagcagaagaggcctggaatgagacggagaaggtgtggctggtccatagggacggcttctcactggccagtcaactcaaatctgaggagctcaacttgcctgaggggaaggtgcgtgtgaagctggaccacgatggggccatcctggatgtggatgaggatgacgttgagaaggctaatgctccctcctgcgaccgtctggaggatctggcctcactggtgtacctcaatgagtccagcgtcctgcacaccttgcgccagcgctatggcgctagcctgctgcacacgtatgctggccccagcctgctggttcttggcccccgtggggcccctgctgtgtactctgagaaggtgatgcacatgttcaagggttgtcggcgggaggacatggcaccccacatctatgcagtggcccagaccgcatacagggcgatgctgatgagccgtcaggatcagtcaatcatcctcctgggcagtagtggcagtggcaagaccaccagctgccagcatctggtgcagtacctggccaccatcgcgggcatcagcgggaacaaggtgttttctgtggagaagtggcaggctctgtacaccctcctggaagcctttgggaacagccccaccatcattaatggcaatgccacccgcttctcccagatcctctccctggactttgaccaagctggccaggtggcctcagcctccattcagacaatgcttctggagaagctgcgtgtggctcggcgcccagccagtgaagccacattcaacgtcttctactacctgctggcctgtggggatggcaccctcaggacagagctccacctcaaccacttggcagagaacaatgtgtttgggattgtgccactggccaagcctgaggaaaagcagaaggcagctcagcagtttagtaagctgcaggcggccatgaaggtgctgggcatctcccccgatgaacagaaggcctgctggttcattctggctgccatctaccacctgggggctgcgggagccaccaaaggaagctgctgaagctgggcgcaagcagtttgcccgccatgagtgggcccagaaggctgcgtacctactgggctgcagcctggaggagctgtcctcagccatcttcaagcaccagcacaagggtggcaccctgcagcgctccacctccttccgccagggccccgaggagagtggcctgggagatgggacaggcccgaaactgagtgcactggagtgccttgagggcatggcggccggcctctacagcgagctcttcacccttctcgtctccctggtgaatagggctctcaagtccagccagcactcactctgctccatgatgattgtcgacaccccgggcttccagaaccctgagcagggtgggtcagcccgcggagcctcctttgaggagctgtgccacaactacacccaagaccggctgcagaggctcttccacgagcgcaccttcgtgcaggagttggaaagatacaaggaggagaacatcgagctggcgtttgacgacttggaacccccnacggatgactctgtggctgctgtggaccaggcctcccatcagtccctggtccgctcgctggcccgcacagacgaggcgaggggcctgctctggctattggaagaggaggctctggtgccaggggccagtgaggacaccctcctggagcgccttttctcctattatggcccccaggaaggtgacaaaaaaggccaaagcccccttctgcacagcagcaaaccacaccactttctcctgggccacagccatggcaccaactgggtagagtacaatgtgactggctggctgaactacaccaagcagaacccagccacccagaatgccccccggctcctgcaggactcccagaaaaaaatcatcagcaacctgtttctgggccgcgcaggcagtgccacggtgctctctggctccatcgcgggcctggagggcggctcgcagctggcactgcgccgggccaccagcatgcggaaaacctttaccacaggcatggcggctgtcaaaaagaagtcactgtgcatccagatgaagctacaggtggacgccctcatcgacaccatcaagaagtcaaagctgcattttgtgcactgcttcctgcctgtagctgagggctgggctggggagccccgttccgcctcctcccgccgagtcagcagcagcagtgagctggacctgccctcgggagaccactgcgaggctgggctcctgcagctcgacgtgcccctgctccgcacccagctccgcggctcccgcctgctcgatgccatgcgcatgtaccgccaaggttaccctgaccacatggtgttttccgagttccgccgccgctttgatgtcctggccccgcacctgaccaagaaacacgggcgtaactacatcgtggtggatgaaaggcgggcagtggaggagctgctggagtgcttggatctggagaagagcagctgctgcatgggcctgagccgggtgttcttccgggcgggcaccttggcacggctggaggagcagcgggatgaacaaaccagcaggaacctaaccctgttccaagcagcctgcaggggctacctggcccgccagcacttcaagaagagaaagatccaggacctggccattcgctgtgtacagaagaacatcaagaagaacaaaggggtgaaggactggccctggtggaagctttttaccacagtgaggcccctcatcgaagtacagctgtcagaggagcagatccggaacaaagacgaggagatccagcagctgcggagcaagctcgagaaggcggagaaggagaggaacgagctgcggctcaacagtgaccggctggagagccggatctcagagctgacatcggagctgacagatgagcgtaacacaggagagtccgcctcccagctgctggacgcggagacagcagagaggctccgggctgagaaggagatgaaggaactgcagacccagtacgatgcactgaagaagcagatggaggttatggaaatggaggtgatggaggcccgtctcatccgggcagcggagatcaacggggaagtggatgatgatgatgcaggtggcgagtggcggctgaagtatgagcgggctgtgcgggaggtggacttcaccaagaaacggctccagcaggagtttgaggacaagctggaggtggagcagcagaacaagaggcagctggaacggcggctcggggacctgcaggcagatagtgaggagagtcagcgggctctgcagcagctcaagaagaagtgccagcgactgacggctgagctgcaagacaccaagctgcacctggagggccagcaggtccgcaaccacgaactggagaagaagcagaggaggtttgacagtgagctctcgcaggcgcatgaggaggcccagcgggagaagctgcagcgggagaagctgcagcgggagaaggacatgctcctcgctgaggctttcagcctgaagcagcaactagaggaaaaagacatggacattgcagggttcacccagaaggttgtgtctctagaggcagagctccaggacatttcttcccaagagtccaaggatgaggcttctctggccaaggtcaagaaacagctccgggacctggaggccaaagtcaaggatcaggaagaagagctggatgagcaggcagggaccatccagatgctggaacaggccaagctgcgtctggagatggagatggagcggatgagacagacccattctaaggagatggagagtcgggatgaggaggtggaggaggcccggcagtcgtgtcagaagaagttaaaacagatggaggtgcagctagaggaagagtatgaggacaagcagaaggttctgcgagagaagcgggagctggagggcaagctcgccaccctcagcgaccaggtgaaccggcgggactttgagtcagagaagcggctgcggaaggacctgaagcgcaccaaggccctgctggcagatgcccagctcatgctggaccacctgaagaacagtgctcccagcaagcgagagattgcccagctcaagaaccagctggaggagtcagagttcacctgtgcggcagccgtgaaagcacggaaagcaatggaggtggagatcgaagacctgcacctgcagattgatgacatcgccaaagccaagacagcgctggaggagcagctgagccgccttcagcgtgagaagaatgagatccagaaccggctggaggaagatcaggaagacatgaacgaattgatgaagaagcacaaggctgccgtggctcaggcttcccgggacctggctcagataaatgatctccaagctcagctagaagaagccaacaaagagaagcaggagctgcaggagaagctacaagccctccagagccaggtggagttcctggagcagtccatggtggacaagtccctggtgagcaggcaggaagctaagatacgggagctggagacacgcctggagtttgaaaggacgcaagtgaaacggctggagagcctggctagccgtctcaaggaaaacatggagaagctgactgaggagcgggatcagcgcattgcagccgagaaccgggagaaggaacagaacaagcggctacagaggcagctccgggacaccaaggaggagatgggcgagcttgccaggaaggaggccgaggcgagccgcaagaagcacgaactggagatggatctagaaagcctggaggctgctaaccagagcctgcaggctgacctaaagttggcattcaagcgcatcggggacctgcaggctgccattgaggatgagatggagagtgatgagaatgaggacctcatcaacagtttgcaggacatggtgacaaagtatcagaaaagaaagaataaacttgagggagactctgatgtggactcggagctggaggaccgtgttgacggggtcaagtcctggttgtcaaaaaacaagggaccttccaaggcagcttctgatgatggcagcttaaagagttccagccccaccagctactggaagtcccttgcccctgatcggtcagatgatgagcacgaccctctcgacaacacctccagaccgcgatactcccacagttatctgagtgacagcgacacagaggccaagctgacggagactaacgcatagcccaggggagtggttggcagccctctcaccccagggcctgtggctgcctgggcacctctcccaggaagtggtggggcaccggtctcccccacccgactgctgatctgcatgggaaacaccctgaccttcttctgtcaggggcactttccaggctatgggtgtctgatgtctccacgtggaagaggtgggggaaagaggagtttctgaagagaactttttgctcctctgtctcaaaatgccagactcttggcttctaccctgtgtcaccgtgggcagtggcaggtggcctggcactgcatggagccagcacgttgacctccctctcagctccctgctcagggacggtggacaggttgcctactgggacactctaggttgctgggtccatggggaggattgggggaggagaagcagtgccttccctctcgtgtggggtgggggctctctcttcttggtgcctgctgtctttctactttttaatttaaatacccaacctctccatcacagctgcatccctgagagtgggagggggctgtagtggtagctggggctcccaagaacgactcgggaatgtcatctccatcttcacccttcagagagcagtcctttctctgtgcagctggagacgctggtgaggagagccgggtccaggttcttaagaatgaggtgcggaggggctctccggtgctgctgggctgggttgagcaagcctacgcagacaagtgtgtgtgtggaccatccgcacctccagcccccaccccaccctctttgtctcagcgtgttatgtgcaatgacctatttaaggtaaacccattccaactacagcagttcagggctgatccaagcactgcctccctcctgctctgtccaggtggtctggaccataaactcaacttgagagggaaggcttggggttgaggacttgtgatcagaaaaactgaagatggaagttttggccggtgctcattagacatgagtcctcactctgtgtcctgagcccgtgtcattcttccaacctccctgcccccacacacttatcccagacacaacaccatgtggtctggaggtcccagcccccaccctaaaaaggttatccctgagaactccaccagacttgggagcccaagtgcagtgcctggtgctgctcccatctgccgccccccttctctcctgcaattggtttgtactcactgggctgtgctctcccctgtttacccgatgtatggaaataaaggcccttttcctcctg

SEQ ID NO: 66736 - DNA, 6587 bp, Homo sapiens
  misc_feature (1676)..(1676): n is a, c, g, or t
caacggtgctgggctagaccaagctctgcctgaaccttagtttcagccctggagcccttgagagagctctgctgttggttagtaattaccgtgaaagtattcagcttcttcattacaaggacaggcgaaaacagaagaacagattgcagcagaagaggcctggaatgagacggagaaggtgtggctggtccatagggacggcttctcactggccagtcaactcaaatctgaggagctcaacttgcctgaggggaaggtgcgtgtgaagctggaccacgatggggccatcctggatgtggatgaggatgacgttgagaaggctaatgctccctcctgcgaccgtctggaggatctggcctcactggtgtacctcaatgagtccagcgtcctgcacaccttgcgccagcgctatggcgctagcctgctgcacacgtatgctggccccagcctgctggttcttggcccccgtggggcccctgctgtgtactctgagaaggtgatgcacatgttcaagggttgtcggcgggaggacatggcaccccacatctatgcagtggcccagaccgcatacagggcgatgctgatgagccgtcaggatcagtcaatcatcctcctgggcagtagtggcagtggcaagaccaccagctgccagcatctggtgcagtacctggccaccatcgcgggcatcagcgggaacaaggtgttttctgtggagaagtggcaggctctgtacaccctcctggaagcctttgggaacagccccaccatcattaatggcaatgccacccgcttctcccagatcctctccctggactttgaccaagctggccaggtggcctcagcctccattcagacaatgcttctggagaagctgcgtgtggctcggcgcccagccagtgaagccacattcaacgtcttctactacctgctggcctgtggggatggcaccctcaggacagagctccacctcaaccacttggcagagaacaatgtgtttgggattgtgccactggccaagcctgaggaaaagcagaaggcagctcagcagtttagtaagctgcaggcggccatgaaggtgctgggcatctcccccgatgaacagaaggcctgctggttcattctggctgccatctaccacctgggggctgcgggagccaccaaaggaagctgctgaagctgggcgcaagcagtttgcccgccatgagtgggcccagaaggctgcgtacctactgggctgcagcctggaggagctgtcctcagccatcttcaagcaccagcacaagggtggcaccctgcagcgctccacctccttccgccagggccccgaggagagtggcctgggagatgggacaggcccgaaactgagtgcactggagtgccttgagggcatggcggccggcctctacagcgagctcttcacccttctcgtctccctggtgaatagggctctcaagtccagccagcactcactctgctccatgatgattgtcgacaccccgggcttccagaaccctgagcagggtgggtcagcccgcggagcctcctttgaggagctgtgccacaactacacccaagaccggctgcagaggctcttccacgagcgcaccttcgtgcaggagttggaaagatacaaggaggagaacatcgagctggcgtttgacgacttggaacccccnacggatgactctgtggctgctgtggaccaggcctcccatcagtccctggtccgctcgctggcccgcacagacgaggcgaggggcctgctctggctattggaagaggaggctctggtgccaggggccagtgaggacaccctcctggagcgccttttctcctattatggcccccaggaaggtgacaaaaaaggccaaagcccccttctgcacagcagcaaaccacaccactttctcctgggccacagccatggcaccaactgggtagagtacaatgtgactggctggctgaactacaccaagcagaacccagccacccagaatgccccccggctcctgcaggactcccagaaaaaaatcatcagcaacctgtttctgggccgcgcaggcagtgccacggtgctctctggctccatcgcgggcctggagggcggctcgcagctggcactgcgccgggccaccagcatgcggaaaacctttaccacaggcatggcggctgtcaaaaagaagtcactgtgcatccagatgaagctacaggtggacgccctcatcgacaccatcaagaagtcaaagctgcattttgtgcactgcttcctgcctgtagctgagggctgggctggggagccccgttccgcctcctcccgccgagtcagcagcagcagtgagctggacctgccctcgggagaccactgcgaggctgggctcctgcagctcgacgtgcccctgctccgcacccagctccgcggctcccgcctgctcgatgccatgcgcatgtaccgccaaggttaccctgaccacatggtgttttccgagttccgccgccgctttgatgtcctggccccgcacctgaccaagaaacacgggcgtaactacatcgtggtggatgaaaggcgggcagtggaggagctgctggagtgcttggatctggagaagagcagctgctgcatgggcctgagccgggtgttcttccgggcgggcaccttggcacggctggaggagcagcgggatgaacaaaccagcaggaacctaaccctgttccaagcagcctgcaggggctacctggcccgccagcacttcaagaagagaaagatccaggacctggccattcgctgtgtacagaagaacatcaagaagaacaaaggggtgaaggactggccctggtggaagctttttaccacagtgaggcccctcatcgaagtacagctgtcagaggagcagatccggaacaaagacgaggagatccagcagctgcggagcaagctcgagaaggcggagaaggagaggaacgagctgcggctcaacagtgaccggctggagagccggatctcagagctgacatcggagctgacagatgagcgtaacacaggagagtccgcctcccagctgctggacgcggagacagcagagaggctccgggctgagaaggagatgaaggaactgcagacccagtacgatgcactgaagaagcagatggaggttatggaaatggaggtgatggaggcccgtctcatccgggcagcggagatcaacggggaagtggatgatgatgatgcaggtggcgagtggcggctgaagtatgagcgggctgtgcgggaggtggacttcaccaagaaacggctccagcaggagtttgaggacaagctggaggtggagcagcagaacaagaggcagctggaacggcggctcggggacctgcaggcagatagtgaggagagtcagcgggctctgcagcagctcaagaagaagtgccagcgactgacggctgagctgcaagacaccaagctgcacctggagggccagcaggtccgcaaccacgaactggagaagaagcagaggaggtttgacagtgagctctcgcaggcgcatgaggaggcccagcgggagaagctgcagcgggagaagctgcagcgggagaaggacatgctcctcgctgaggctttcagcctgaagcagcaactagaggaaaaagacatggacattgcagggttcacccagaaggttgtgtctctagaggcagagctccaggacatttcttcccaagagtccaaggatgaggcttctctggccaaggtcaagaaacagctccgggacctggaggccaaagtcaaggatcaggaagaagagctggatgagcaggcagggaccatccagatgctggaacaggccaagctgcgtctggagatggagatggagcggatgagacagacccattctaaggagatggagagtcgggatgaggaggtggaggaggcccggcagtcgtgtcagaagaagttaaaacagatggaggtgcagctagaggaagagtatgaggacaagcagaaggttctgcgagagaagcgggagctggagggcaagctcgccaccctcagcgaccaggtgaaccggcgggactttgagtcagagaagcggctgcggaaggacctgaagcgcaccaaggccctgctggcagatgcccagctcatgctggaccacctgaagaacagtgctcccagcaagcgagagattgcccagctcaagaaccagctggaggagtcagagttcacctgtgcggcagccgtgaaagcacggaaagcaatggaggtggagatcgaagacctgcacctgcagattgatgacatcgccaaagccaagacagcgctggaggagcagctgagccgccttcagcgtgagaagaatgagatccagaaccggctggaggaagatcaggaagacatgaacgaattgatgaagaagcacaaggctgccgtggctcaggcttcccgggacctggctcagataaatgatctccaagctcagctagaagaagccaacaaagagaagcaggagctgcaggagaagctacaagccctccagagccaggtggagttcctggagcagtccatggtggacaagtccctggtgagcaggcaggaagctaagatacgggagctggagacacgcctggagtttgaaaggacgcaagtgaaacggctggagagcctggctagccgtctcaaggaaaacatggagaagctgactgaggagcgggatcagcgcattgcagccgagaaccgggagaaggaacagaacaagcggctacagaggcagctccgggacaccaaggaggagatgggcgagcttgccaggaaggaggccgaggcgagccgcaagaagcacgaactggagatggatctagaaagcctggaggctgctaaccagagcctgcaggctgacctaaagttggcattcaagcgcatcggggacctgcaggctgccattgaggatgagatggagagtgatgagaatgaggacctcatcaacagtttgcaggacatggtgacaaagtatcagaaaagaaagaataaacttgagggagactctgatgtggactcggagctggaggaccgtgttgacggggtcaagtcctggttgtcaaaaaacaagggaccttccaaggcagcttctgatgatggcagcttaaagagttccagccccaccagctactggaagtcccttgcccctgatcggtcagatgatgagcacgaccctctcgacaacacctccagaccgcgatactcccacagttatctgagtgacagcgacacagaggccaagctgacggagactaacgcatagcccaggggagtggttggcagccctctcaccccagggcctgtggctgcctgggcacctctcccaggaagtggtggggcaccggtctcccccacccgactgctgatctgcatgggaaacaccctgaccttcttctgtcaggggcactttccaggctatgggtgtctgatgtctccacgtggaagaggtgggggaaagaggagtttctgaagagaactttttgctcctctgtctcaaaatgccagactcttggcttctaccctgtgtcaccgtgggcagtggcaggtggcctggcactgcatggagccagcacgttgacctccctctcagctccctgctcagggacggtggacaggttgcctactgggacactctaggttgctgggtccatggggaggattgggggaggagaagcagtgccttccctctcgtgtggggtgggggctctctcttcttggtgcctgctgtctttctactttttaatttaaatacccaacctctccatcacagctgcatccctgagagtgggagggggctgtagtggtagctggggctcccaagaacgactcgggaatgtcatctccatcttcacccttcagagagcagtcctttctctgtgcagctggagacgctggtgaggagagccgggtccaggttcttaagaatgaggtgcggaggggctctccggtgctgctgggctgggttgagcaagcctacgcagacaagtgtgtgtgtggaccatccgcacctccagcccccaccccaccctctttgtctcagcgtgttatgtgcaatgacctatttaaggtaaacccattccaactacagcagttcagggctgatccaagcactgcctccctcctgctctgtccaggtggtctggaccataaactcaacttgagagggaaggcttggggttgaggacttgtgatcagaaaaactgaagatggaagttttggccggtgctcattagacatgagtcctcactctgtgtcctgagcccgtgtcattcttccaacctccctgcccccacacacttatcccagacacaacaccatgtggtctggaggtcccagcccccaccctaaaaaggttatccctgagaactccaccagacttgggagcccaagtgcagtgcctggtgctgctcccatctgccgccccccttctctcctgcaattggtttgtactcactgggctgtgctctcccctgtttacccgatgtatggaaataaaggcccttttcctcctgaaaaaaaaaaaaaaaacaaaaaaaaaaaaaaaaaaaaaaaaaaaaag

SEQ ID NO: 66737 - DNA, 6633 bp, Homo sapiens
  misc_feature (1676)..(1676): n is a, c, g, or t
caacggtgctgggctagaccaagctctgcctgaaccttagtttcagccctggagcccttgagagagctctgctgttggttagtaattaccgtgaaagtattcagcttcttcattacaaggacaggcgaaaacagaagaacagattgcagcagaagaggcctggaatgagacggagaaggtgtggctggtccatagggacggcttctcactggccagtcaactcaaatctgaggagctcaacttgcctgaggggaaggtgcgtgtgaagctggaccacgatggggccatcctggatgtggatgaggatgacgttgagaaggctaatgctccctcctgcgaccgtctggaggatctggcctcactggtgtacctcaatgagtccagcgtcctgcacaccttgcgccagcgctatggcgctagcctgctgcacacgtatgctggccccagcctgctggttcttggcccccgtggggcccctgctgtgtactctgagaaggtgatgcacatgttcaagggttgtcggcgggaggacatggcaccccacatctatgcagtggcccagaccgcatacagggcgatgctgatgagccgtcaggatcagtcaatcatcctcctgggcagtagtggcagtggcaagaccaccagctgccagcatctggtgcagtacctggccaccatcgcgggcatcagcgggaacaaggtgttttctgtggagaagtggcaggctctgtacaccctcctggaagcctttgggaacagccccaccatcattaatggcaatgccacccgcttctcccagatcctctccctggactttgaccaagctggccaggtggcctcagcctccattcagacaatgcttctggagaagctgcgtgtggctcggcgcccagccagtgaagccacattcaacgtcttctactacctgctggcctgtggggatggcaccctcaggacagagctccacctcaaccacttggcagagaacaatgtgtttgggattgtgccactggccaagcctgaggaaaagcagaaggcagctcagcagtttagtaagctgcaggcggccatgaaggtgctgggcatctcccccgatgaacagaaggcctgctggttcattctggctgccatctaccacctgggggctgcgggagccaccaaaggaagctgctgaagctgggcgcaagcagtttgcccgccatgagtgggcccagaaggctgcgtacctactgggctgcagcctggaggagctgtcctcagccatcttcaagcaccagcacaagggtggcaccctgcagcgctccacctccttccgccagggccccgaggagagtggcctgggagatgggacaggcccgaaactgagtgcactggagtgccttgagggcatggcggccggcctctacagcgagctcttcacccttctcgtctccctggtgaatagggctctcaagtccagccagcactcactctgctccatgatgattgtcgacaccccgggcttccagaaccctgagcagggtgggtcagcccgcggagcctcctttgaggagctgtgccacaactacacccaagaccggctgcagaggctcttccacgagcgcaccttcgtgcaggagttggaaagatacaaggaggagaacatcgagctggcgtttgacgacttggaacccccnacggatgactctgtggctgctgtggaccaggcctcccatcagtccctggtccgctcgctggcccgcacagacgaggcgaggggcctgctctggctattggaagaggaggctctggtgccaggggccagtgaggacaccctcctggagcgccttttctcctattatggcccccaggaaggtgacaaaaaaggccaaagcccccttctgcacagcagcaaaccacaccactttctcctgggccacagccatggcaccaactgggtagagtacaatgtgactggctggctgaactacaccaagcagaacccagccacccagaatgccccccggctcctgcaggactcccagaaaaaaatcatcagcaacctgtttctgggccgcgcaggcagtgccacggtgctctctggctccatcgcgggcctggagggcggctcgcagctggcactgcgccgggccaccagcatgcggaaaacctttaccacaggcatggcggctgtcaaaaagaagtcactgtgcatccagatgaagctacaggtggacgccctcatcgacaccatcaagaagtcaaagctgcattttgtgcactgcttcctgcctgtagctgagggctgggctggggagccccgttccgcctcctcccgccgagtcagcagcagcagtgagctggacctgccctcgggagaccactgcgaggctgggctcctgcagctcgacgtgcccctgctccgcacccagctccgcggctcccgcctgctcgatgccatgcgcatgtaccgccaaggttaccctgaccacatggtgttttccgagttccgccgccgctttgatgtcctggccccgcacctgaccaagaaacacgggcgtaactacatcgtggtggatgaaaggcgggcagtggaggagctgctggagtgcttggatctggagaagagcagctgctgcatgggcctgagccgggtgttcttccgggcgggcaccttggcacggctggaggagcagcgggatgaacaaaccagcaggaacctaaccctgttccaagcagcctgcaggggctacctggcccgccagcacttcaagaagagaaagatccaggacctggccattcgctgtgtacagaagaacatcaagaagaacaaaggggtgaaggactggccctggtggaagctttttaccacagtgaggcccctcatcgaagtacagctgtcagaggagcagatccggaacaaagacgaggagatccagcagctgcggagcaagctcgagaaggcggagaaggagaggaacgagctgcggctcaacagtgaccggctggagagccggatctcagagctgacatcggagctgacagatgagcgtaacacaggagagtccgcctcccagctgctggacgcggagacagcagagaggctccgggctgagaaggagatgaaggaactgcagacccagtacgatgcactgaagaagcagatggaggttatggaaatggaggtgatggaggcccgtctcatccgggcagcggagatcaacggggaagtggatgatgatgatgcaggtggcgagtggcggctgaagtatgagcgggctgtgcgggaggtggacttcaccaagaaacggctccagcaggagtttgaggacaagctggaggtggagcagcagaacaagaggcagctggaacggcggctcggggacctgcaggcagatagtgaggagagtcagcgggctctgcagcagctcaagaagaagtgccagcgactgacggctgagctgcaagacaccaagctgcacctggagggccagcaggtccgcaaccacgaactggagaagaagcagaggaggtttgacagtgagctctcgcaggcgcatgaggaggcccagcgggagaagctgcagcgggagaagctgcagcgggagaaggacatgctcctcgctgaggctttcagcctgaagcagcaactagaggaaaaagacatggacattgcagggttcacccagaaggttgtgtctctagaggcagagctccaggacatttcttcccaagagtccaaggatgaggcttctctggccaaggtcaagaaacagctccgggacctggaggccaaagtcaaggatcaggaagaagagctggatgagcaggcagggaccatccagatgctggaacaggccaagctgcgtctggagatggagatggagcggatgagacagacccattctaaggagatggagagtcgggatgaggaggtggaggaggcccggcagtcgtgtcagaagaagttaaaacagatggaggtgcagctagaggaagagtatgaggacaagcagaaggttctgcgagagaagcgggagctggagggcaagctcgccaccctcagcgaccaggtgaaccggcgggactttgagtcagagaagcggctgcggaaggacctgaagcgcaccaaggccctgctggcagatgcccagctcatgctggaccacctgaagaacagtgctcccagcaagcgagagattgcccagctcaagaaccagctggaggagtcagagttcacctgtgcggcagccgtgaaagcacggaaagcaatggaggtggagatcgaagacctgcacctgcagattgatgacatcgccaaagccaagacagcgctggaggagcagctgagccgccttcagcgtgagaagaatgagatccagaaccggctggaggaagatcaggaagacatgaacgaattgatgaagaagcacaaggctgccgtggctcaggcttcccgggacctggctcagataaatgatctccaagctcagctagaagaagccaacaaagagaagcaggagctgcaggagaagctacaagccctccagagccaggtggagttcctggagcagtccatggtggacaagtccctggtgagcaggcaggaagctaagatacgggagctggagacacgcctggagtttgaaaggacgcaagtgaaacggctggagagcctggctagccgtctcaaggaaaacatggagaagctgactgaggagcgggatcagcgcattgcagccgagaaccgggagaaggaacagaacaagcggctacagaggcagctccgggacaccaaggaggagatgggcgagcttgccaggaaggaggccgaggcgagccgcaagaagcacgaactggagatggatctagaaagcctggaggctgctaaccagagcctgcaggctgacctaaagttggcattcaagcgcatcggggacctgcaggctgccattgaggatgagatggagagtgatgagaatgaggacctcatcaacagtttgcaggacatggtgacaaagtatcagaaaagaaagaataaacttgagggagactctgatgtggactcggagctggaggaccgtgttgacggggtcaagtcctggttgtcaaaaaacaagggaccttccaaggcagcttctgatgatggcagcttaaagagttccagccccaccagctactggaagtcccttgcccctgatcggtcagatgatgagcacgaccctctcgacaacacctccagaccgcgatactcccacagttatctgagtgacagcgacacagaggccaagctgacggagactaacgcatagcccaggggagtggttggcagccctctcaccccagggcctgtggctgcctgggcacctctcccaggaagtggtggggcaccggtctcccccacccgactgctgatctgcatgggaaacaccctgaccttcttctgtcaggggcactttccaggctatgggtgtctgatgtctccacgtggaagaggtgggggaaagaggagtttctgaagagaactttttgctcctctgtctcaaaatgccagactcttggcttctaccctgtgtcaccgtgggcagtggcaggtggcctggcactgcatggagccagcacgttgacctccctctcagctccctgctcagggacggtggacaggttgcctactgggacactctaggttgctgggtccatggggaggattgggggaggagaagcagtgccttccctctcgtgtggggtgggggctctctcttcttggtgcctgctgtctttctactttttaatttaaatacccaacctctccatcacagctgcatccctgagagtgggagggggctgtagtggtagctggggctcccaagaacgactcgggaatgtcatctccatcttcacccttcagagagcagtcctttctctgtgcagctggagacgctggtgaggagagccgggtccaggttcttaagaatgaggtgcggaggggctctccggtgctgctgggctgggttgagcaagcctacgcagacaagtgtgtgtgtggaccatccgcacctccagcccccaccccaccctctttgtctcagcgtgttatgtgcaatgacctatttaaggtaaacccattccaactacagcagttcagggctgatccaagcactgcctccctcctgctctgtccaggtggtctggaccataaactcaacttgagagggaaggcttggggttgaggacttgtgatcagaaaaactgaagatggaagttttggccggtgctcattagacatgagtcctcactctgtgtcctgagcccgtgtcattcttccaacctccctgcccccacacacttatcccagacacaacaccatgtggtctggaggtcccagcccccaccctaaaaaggttatccctgagaactccaccagacttgggagcccaagtgcagtgcctggtgctgctcccatctgccgccccccttctctcctgcaattggtttgtactcactgggctgtgctctcccctgtttacccgatgtatggaaataaaggcccttttcctcctgaaaaaaaaaaaaaaaaaaaaaaaaaaaaaaaaaaaaaaaaaaaaaaaaaaaaaaaaaaaaaacaaaaaaaaaaaaaaaaaaaaaaaaaaaaag

SEQ ID NO: 66738 - DNA, 1799 bp, Homo sapiens
gtgactctagagatcctgctagttatcggcacgggagaaggaacagaacaagcggctacagaggcagctccgggacaccaaggaggagatgggcgagcttgccaggaaggaggccgaggcgagccgcaagaagcacgaactggagatggatctagaaagcctggaggctgctaaccagagcctgcaggctgacctaaagttggcattcaagcgcatcggggacctgcaggctgccattgaggatgagatggagagtgatgagaatgaggacctcatcaacagtgagggagactctgatgtggactcggagctggaggaccgtgttgacggggtcaagtcctggttgtcaaaaaacaagggaccttccaaggcagcttctgatgatggcagcttaaagagttccagccccaccagctactggaagtcccttgcccctgatcggtcagatgatgagcacgaccctctcgacaacacctccagaccgcgatactcccacagttatctgagtgacagcgacacagaggccaagctgacggagactaacgcatagcccaggggagtggttggcagccctctcaccccagggcctgtggctgcctgggcacctctcccaggaagtggtggggcaccggtctcccccacccgactgctgatctgcatgggaaacaccctgaccttcttctgtcaggggcactttccaggctatgggtgtctgatgtctccacgtggaagaggtgggggaaagaggagtttctgaagagaactttttgctcctctgtctcaaaatgccagactcttggcttctaccctgtgtcaccgtgggcagtggcaggtggcctggcactgcatggagccagcacgttgacctccctctcagctccctgctcagggacggtggacaggttgcctactgggacactctaggttgctgggtccatggggaggattgggggaggagaagcagtgccttccctctcgtgtggggtgggggctctctcttcttggtgcctgctgtctttctactttttaatttaaatacccaacctctccatcacagctgcatccctgagagtgggagggggctgtagtggtagctggggctcccaagaacgactcgggaatgtcatctccatcttcacccttcagagagcagtcctttctctgtgcagctggagacgctggtgaggagagccgggtccaggttcttaagaatgaggtgcggaggggctctccggtgctgctgggctgggttgagcaagcctacgcagacaagtgtgtgtgtggaccatccgcacctccagcccccaccccaccctctttgtctcagcgtgttatgtgcaatgacctatttaaggtaaacccattccaactacagcagttcagggctgatccaagcactgcctccctcctgctctgtccaggtggtctggaccataaactcaacttgagagggaaggcttggggttgaggacttgtgatcagaaaaactgaagatggaagttttggccggtgctcattagacatgagtcctcactctgtgtcctgagcccgtgtcattcttccaacctccctgcccccacacacttatcccagacacaacaccatgtggtctggaggtcccagcccccaccctaaaaaggttatccctgagaactccaccagacttgggagcccaagtgcagtgcctggtgctgctcccatctgccgccccccttctctcctgcaattggtttgtactcactgggctgtgctctcccctgtttacccgatgtatggaaataaaggcccttttcctcctg

SEQ ID NO: 66739 - DNA, 6462 bp, Homo sapiens
  misc_feature (1676)..(1676): n is a, c, g, or t
caacggtgctgggctagaccaagctctgcctgaaccttagtttcagccctggagcccttgagagagctctgctgttggttagtaattaccgtgaaagtattcagcttcttcattacaaggacaggcgaaaacagaagaacagattgcagcagaagaggcctggaatgagacggagaaggtgtggctggtccatagggacggcttctcactggccagtcaactcaaatctgaggagctcaacttgcctgaggggaaggtgcgtgtgaagctggaccacgatggggccatcctggatgtggatgaggatgacgttgagaaggctaatgctccctcctgcgaccgtctggaggatctggcctcactggtgtacctcaatgagtccagcgtcctgcacaccttgcgccagcgctatggcgctagcctgctgcacacgtatgctggccccagcctgctggttcttggcccccgtggggcccctgctgtgtactctgagaaggtgatgcacatgttcaagggttgtcggcgggaggacatggcaccccacatctatgcagtggcccagaccgcatacagggcgatgctgatgagccgtcaggatcagtcaatcatcctcctgggcagtagtggcagtggcaagaccaccagctgccagcatctggtgcagtacctggccaccatcgcgggcatcagcgggaacaaggtgttttctgtggagaagtggcaggctctgtacaccctcctggaagcctttgggaacagccccaccatcattaatggcaatgccacccgcttctcccagatcctctccctggactttgaccaagctggccaggtggcctcagcctccattcagacaatgcttctggagaagctgcgtgtggctcggcgcccagccagtgaagccacattcaacgtcttctactacctgctggcctgtggggatggcaccctcaggacagagctccacctcaaccacttggcagagaacaatgtgtttgggattgtgccactggccaagcctgaggaaaagcagaaggcagctcagcagtttagtaagctgcaggcggccatgaaggtgctgggcatctcccccgatgaacagaaggcctgctggttcattctggctgccatctaccacctgggggctgcgggagccaccaaaggaagctgctgaagctgggcgcaagcagtttgcccgccatgagtgggcccagaaggctgcgtacctactgggctgcagcctggaggagctgtcctcagccatcttcaagcaccagcacaagggtggcaccctgcagcgctccacctccttccgccagggccccgaggagagtggcctgggagatgggacaggcccgaaactgagtgcactggagtgccttgagggcatggcggccggcctctacagcgagctcttcacccttctcgtctccctggtgaatagggctctcaagtccagccagcactcactctgctccatgatgattgtcgacaccccgggcttccagaaccctgagcagggtgggtcagcccgcggagcctcctttgaggagctgtgccacaactacacccaagaccggctgcagaggctcttccacgagcgcaccttcgtgcaggagttggaaagatacaaggaggagaacatcgagctggcgtttgacgacttggaacccccnacggatgactctgtggctgctgtggaccaggcctcccatcagtccctggtccgctcgctggcccgcacagacgaggcgaggggcctgctctggctattggaagaggaggctctggtgccaggggccagtgaggacaccctcctggagcgccttttctcctattatggcccccaggaaggtgacaaaaaaggccaaagcccccttctgcacagcagcaaaccacaccactttctcctgggccacagccatggcaccaactgggtagagtacaatgtgactggctggctgaactacaccaagcagaacccagccacccagaatgccccccggctcctgcaggactcccagaaaaaaatcatcagcaacctgtttctgggccgcgcaggcagtgccacggtgctctctggctccatcgcgggcctggagggcggctcgcagctggcactgcgccgggccaccagcatgcggaaaacctttaccacaggcatggcggctgtcaaaaagaagtcactgtgcatccagatgaagctacaggtggacgccctcatcgacaccatcaagaagtcaaagctgcattttgtgcactgcttcctgcctgtagctgagggctgggctggggagccccgttccgcctcctcccgccgagtcagcagcagcagtgagctggacctgccctcgggagaccactgcgaggctgggctcctgcagctcgacgtgcccctgctccgcacccagctccgcggctcccgcctgctcgatgccatgcgcatgtaccgccaaggttaccctgaccacatggtgttttccgagttccgccgccgctttgatgtcctggccccgcacctgaccaagaaacacgggcgtaactacatcgtggtggatgaaaggcgggcagtggaggagctgctggagtgcttggatctggagaagagcagctgctgcatgggcctgagccgggtgttcttccgggcgggcaccttggcacggctggaggagcagcgggatgaacaaaccagcaggaacctaaccctgttccaagcagcctgcaggggctacctggcccgccagcacttcaagaagagaaagatccaggacctggccattcgctgtgtacagaagaacatcaagaagaacaaaggggtgaaggactggccctggtggaagctttttaccacagtgaggcccctcatcgaagtacagctgtcagaggagcagatccggaacaaagacgaggagatccagcagctgcggagcaagctcgagaaggcggagaaggagaggaacgagctgcggctcaacagtgaccggctggagagccggatctcagagctgacatcggagctgacagatgagcgtaacacaggagagtccgcctcccagctgctggacgcggagacagcagagaggctccgggctgagaaggagatgaaggaactgcagacccagtacgatgcactgaagaagcagatggaggttatggaaatggaggtgatggaggcccgtctcatccgggcagcggagatcaacggggaagtggatgatgatgatgcaggtggcgagtggcggctgaagtatgagcgggctgtgcgggaggtggacttcaccaagaaacggctccagcaggagtttgaggacaagctggaggtggagcagcagaacaagaggcagctggaacggcggctcggggacctgcaggcagatagtgaggagagtcagcgggctctgcagcagctcaagaagaagtgccagcgactgacggctgagctgcaagacaccaagctgcacctggagggccagcaggtccgcaaccacgaactggagaagaagcagaggaggtttgacagtgagctctcgcaggcgcatgaggaggcccagcgggagaagctgcagcgggagaagctgcagcgggagaaggacatgctcctcgctgaggctttcagcctgaagcagcaactagaggaaaaagacatggacattgcagggttcacccagaaggttgtgtctctagaggcagagctccaggacatttcttcccaagagtccaaggatgaggcttctctggccaaggtcaagaaacagctccgggacctggaggccaaagtcaaggatcaggaagaagagctggatgagcaggcagggaccatccagatgctggaacaggccaagctgcgtctggagatggagatggagcggatgagacagacccattctaaggagatggagagtcgggatgaggaggtggaggaggcccggcagtcgtgtcagaagaagttaaaacagatggaggtgcagctagaggaagagtatgaggacaagcagaaggttctgcgagagaagcgggagctggagggcaagctcgccaccctcagcgaccaggtgaaccggcgggactttgagtcagagaagcggctgcggaaggacctgaagcgcaccaaggccctgctggcagatgcccagctcatgctggaccacctgaagaacagtgctcccagcaagcgagagattgcccagctcaagaaccagctggaggagtcagagttcacctgtgcggcagccgtgaaagcacggaaagcaatggaggtggagatcgaagacctgcacctgcagattgatgacatcgccaaagccaagacagcgctggaggagcagctgagccgccttcagcgtgagaagaatgagatccagaaccggctggaggaagatcaggaagacatgaacgaattgatgaagaagcacaaggctgccgtggctcaggcttcccgggacctggctcagataaatgatctccaagctcagctagaagaagccaacaaagagaagcaggagctgcaggagaagctacaagccctccagagccaggtggagttcctggagcagtccatggtggacaagtccctggtgagcaggcaggaagctaagatacgggagctggagacacgcctggagtttgaaaggacgcaagtgaaacggctggagagcctggctagccgtctcaaggaaaacatggagaagctgactgaggagcgggatcagcgcattgcagccgagaaccgggagaaggaacagaacaagcggctacagaggcagctccgggacaccaaggaggagatgggcgagcttgccaggaaggaggccgaggcgagccgcaagaagcacgaactggagatggatctagaaagcctggaggctgctaaccagagcctgcaggctgacctaaagttggcattcaagcgcatcggggacctgcaggctgccattgaggatgagatggagagtgatgagaatgaggacctcatcaacagtttgcaggacatggtgacaaagtatcagaaaagaaagaataaacttgagggagactctgatgtggactcggagctggaggaccgtgttgacggggtcaagtcctggttgtcaaaaaacaagggaccttccaaggcagcttctgatgatggcagcttaaagagttccagccccaccagctactggaagtcccttgcccctgatcggtcagatgatgagcacgaccctctcgacaacacctccagaccgcgatactcccacagttatctgagtgacagcgacacagaggccaagctgacggagactaacgcatagcccaggggagtggttggcagccctctcaccccagggcctgtggctgcctgggcacctctcccaggaagtggtggggcaccggtctcccccacccgactgctgatctgcatgggaaacaccctgaccttcttctgtcaggggcactttccaggctatgggtgtctgatgtctccacgtggaagaggtgggggaaagaggagtttctgaagagaactttttgctcctctgtctcaaaatgccagactcttggcttctaccctgtgtcaccgtgggcagtggcaggtggcctggcactgcatggagccagcacgttgacctccctctcagctccctgctcagggacggtggacaggttgcctactgggacactctaggttgctgggtccatggggaggattgggggaggagaagcagtgccttccctctcgtgtggggtgggggctctctcttcttggtgcctgctgtctttctactttttaatttaaatacccaacctctccatcacagctgcatccctgagagtgggagggggctgtagtggtagctggggctcccaagaacgactcgggaatgtcatctccatcttcacccttcagagagcagtcctttctctgtgcagctggagacgctggtgaggagagccgggtccaggttcttaagaatgaggtgcggaggggctctccggtgctgctgggctgggttgagcaagcctacgcagacaagtgtgtgtgtggaccatccgcacctccagcccccaccccaccctctttgtctcagcgtgttatgtgcaatgacctatttaaggtaaacccattccaactacagcagttcagggctgatccaagcactgcctccctcctgctctgtccaggtggtctggaccataaactcaacttgagagggaaggcttggggttgaggacttgtgatcagaaaaactgaagatggaagttttggccggtgctcattagacatgagtcctcactctgtgtcctgagcccgtgtcattcttccaacctccctgaactccaccagacttgggagcccaagtgcagtgcctggtgctgctcccatctgccgccccccttctctcctgcaattggtttgtactcactgggctgtgctctcccctgtttacccgatgtatggaaataaaggcccttttcctcctg

SEQ ID NO: 66740 - DNA, 1708 bp, Homo sapiens
cagctccagctccagctccggctccgaagcttcctcagagcacaagaggcggaagaaggggcgctctcggaagagcaagaagtccaagtcgagaagaaagagaacggagacggagtctgagtcctcctcgtcgtcatccagcggctcgaccgtctccagccacagctgctccagtgtgaagaagggcccagctgcagaaagtgaagaaactgggcagacgcaccggccgtcgaggaaggaggaaaagaagcgcaagaaagaggtggacagcctgatgatgcggtacctgtaccggcccgagagcgactagtgcaccccaccagctactggaagtcccttgcccctgatcggtcagatgatgagcacgaccctctcgacaacacctccagaccgcgatactcccacagttatctgagtgacagcgacacagaggccaagctgacggagactaacgcatagcccaggggagtggttggcagccctctcaccccagggcctgtggctgcctgggcacctctcccaggaagtggtggggcaccggtctcccccacccgactgctgatctgcatgggaaacaccctgaccttcttctgtcaggggcactttccaggctatgggtgtctgatgtctccacgtggaagaggtgggggaaagaggagtttctgaagagaactttttgctcctctgtctcaaaatgccagactcttggcttctaccctgtgtcaccgtgggcagtggcaggtggcctggcactgcatggagccagcacgttgacctccctctcagctccctgctcagggacggtggacaggttgcctactgggacactctaggttgctgggtccatggggaggattgggggaggagaagcagtgccttccctctcgtgtggggtgggggctctctcttcttggtgcctgctgtctttctactttttaatttaaatacccaacctctccatcacagctgcatccctgagagtgggagggggctgtagtggtagctggggctcccaagaacgactcgggaatgtcatctccatcttcacccttcagagagcagtcctttctctgtgcagctggagacgctggtgaggagagccgggtccaggttcttaagaatgaggtgcggaggggctctccggtgctgctgggctgggttgagcaagcctacgcagacaagtgtgtgtgtggaccatccgcacctccagcccccaccccaccctctttgtctcagcgtgttatgtgcaatgacctatttaaggtaaacccattccaactacagcagttcagggctgatccaagcactgcctccctcctgctctgtccaggtggtctggaccataaactcaacttgagagggaaggcttggggttgaggacttgtgatcagaaaaactgaagatggaagttttggccggtgctcattagacatgagtcctcactctgtgtcctgagcccgtgtcattcttccaacctccctgcccccacacacttatcccagacacaacaccatgtggtctggaggtcccagcccccaccctaaaaaggttatccctgagaactccaccagacttgggagcccaagtgcagtgcctggtgctgctcccatctgccgccccccttctctcctgcaattggtttgtactcactgggctgtgctctcccctgtttacccgatgtatggaaataaaggcccttttcctcctg

SEQ ID NO: 66741 - DNA, 6340 bp, Homo sapiens
  misc_feature (1676)..(1676): n is a, c, g, or t
caacggtgctgggctagaccaagctctgcctgaaccttagtttcagccctggagcccttgagagagctctgctgttggttagtaattaccgtgaaagtattcagcttcttcattacaaggacaggcgaaaacagaagaacagattgcagcagaagaggcctggaatgagacggagaaggtgtggctggtccatagggacggcttctcactggccagtcaactcaaatctgaggagctcaacttgcctgaggggaaggtgcgtgtgaagctggaccacgatggggccatcctggatgtggatgaggatgacgttgagaaggctaatgctccctcctgcgaccgtctggaggatctggcctcactggtgtacctcaatgagtccagcgtcctgcacaccttgcgccagcgctatggcgctagcctgctgcacacgtatgctggccccagcctgctggttcttggcccccgtggggcccctgctgtgtactctgagaaggtgatgcacatgttcaagggttgtcggcgggaggacatggcaccccacatctatgcagtggcccagaccgcatacagggcgatgctgatgagccgtcaggatcagtcaatcatcctcctgggcagtagtggcagtggcaagaccaccagctgccagcatctggtgcagtacctggccaccatcgcgggcatcagcgggaacaaggtgttttctgtggagaagtggcaggctctgtacaccctcctggaagcctttgggaacagccccaccatcattaatggcaatgccacccgcttctcccagatcctctccctggactttgaccaagctggccaggtggcctcagcctccattcagacaatgcttctggagaagctgcgtgtggctcggcgcccagccagtgaagccacattcaacgtcttctactacctgctggcctgtggggatggcaccctcaggacagagctccacctcaaccacttggcagagaacaatgtgtttgggattgtgccactggccaagcctgaggaaaagcagaaggcagctcagcagtttagtaagctgcaggcggccatgaaggtgctgggcatctcccccgatgaacagaaggcctgctggttcattctggctgccatctaccacctgggggctgcgggagccaccaaaggaagctgctgaagctgggcgcaagcagtttgcccgccatgagtgggcccagaaggctgcgtacctactgggctgcagcctggaggagctgtcctcagccatcttcaagcaccagcacaagggtggcaccctgcagcgctccacctccttccgccagggccccgaggagagtggcctgggagatgggacaggcccgaaactgagtgcactggagtgccttgagggcatggcggccggcctctacagcgagctcttcacccttctcgtctccctggtgaatagggctctcaagtccagccagcactcactctgctccatgatgattgtcgacaccccgggcttccagaaccctgagcagggtgggtcagcccgcggagcctcctttgaggagctgtgccacaactacacccaagaccggctgcagaggctcttccacgagcgcaccttcgtgcaggagttggaaagatacaaggaggagaacatcgagctggcgtttgacgacttggaacccccnacggatgactctgtggctgctgtggaccaggcctcccatcagtccctggtccgctcgctggcccgcacagacgaggcgaggggcctgctctggctattggaagaggaggctctggtgccaggggccagtgaggacaccctcctggagcgccttttctcctattatggcccccaggaaggtgacaaaaaaggccaaagcccccttctgcacagcagcaaaccacaccactttctcctgggccacagccatggcaccaactgggtagagtacaatgtgactggctggctgaactacaccaagcagaacccagccacccagaatgccccccggctcctgcaggactcccagaaaaaaatcatcagcaacctgtttctgggccgcgcaggcagtgccacggtgctctctggctccatcgcgggcctggagggcggctcgcagctggcactgcgccgggccaccagcatgcggaaaacctttaccacaggcatggcggctgtcaaaaagaagtcactgtgcatccagatgaagctacaggtggacgccctcatcgacaccatcaagaagtcaaagctgcattttgtgcactgcttcctgcctgtagctgagggctgggctggggagccccgttccgcctcctcccgccgagtcagcagcagcagtgagctggacctgccctcgggagaccactgcgaggctgggctcctgcagctcgacgtgcccctgctccgcacccagctccgcggctcccgcctgctcgatgccatgcgcatgtaccgccaaggttaccctgaccacatggtgttttccgagttccgccgccgctttgatgtcctggccccgcacctgaccaagaaacacgggcgtaactacatcgtggtggatgaaaggcgggcagtggaggagctgctggagtgcttggatctggagaagagcagctgctgcatgggcctgagccgggtgttcttccgggcgggcaccttggcacggctggaggagcagcgggatgaacaaaccagcaggaacctaaccctgttccaagcagcctgcaggggctacctggcccgccagcacttcaagaagagaaagatccaggacctggccattcgctgtgtacagaagaacatcaagaagaacaaaggggtgaaggactggccctggtggaagctttttaccacagtgaggcccctcatcgaagtacagctgtcagaggagcagatccggaacaaagacgaggagatccagcagctgcggagcaagctcgagaaggcggagaaggagaggaacgagctgcggctcaacagtgaccggctggagagccggatctcagagctgacatcggagctgacagatgagcgtaacacaggagagtccgcctcccagctgctggacgcggagacagcagagaggctccgggctgagaaggagatgaaggaactgcagacccagtacgatgcactgaagaagcagatggaggttatggaaatggaggtgatggaggcccgtctcatccgggcagcggagatcaacggggaagtggatgatgatgatgcaggtggcgagtggcggctgaagtatgagcgggctgtgcgggaggtggacttcaccaagaaacggctccagcaggagtttgaggacaagctggaggtggagcagcagaacaagaggcagctggaacggcggctcggggacctgcaggcagatagtgaggagagtcagcgggctctgcagcagctcaagaagaagtgccagcgactgacggctgagctgcaagacaccaagctgcacctggagggccagcaggtccgcaaccacgaactggagaagaagcagaggaggtttgacagtgagctctcgcaggcgcatgaggaggcccagcgggagaagctgcagcgggagaagctgcagcgggagaaggacatgctcctcgctgaggctttcagcctgaagcagcaactagaggaaaaagacatggacattgcagggttcacccagaaggttgtgtctctagaggcagagctccaggacatttcttcccaagagtccaaggatgaggcttctctggccaaggtcaagaaacagctccgggacctggaggccaaagtcaaggatcaggaagaagagctggatgagcaggcagggaccatccagatgctggaacaggccaagctgcgtctggagatggagatggagcggatgagacagacccattctaaggagatggagagtcgggatgaggaggtggaggaggcccggcagtcgtgtcagaagaagttaaaacagatggaggtgcagctagaggaagagtatgaggacaagcagaaggttctgcgagagaagcgggagctggagggcaagctcgccaccctcagcgaccaggtgaaccggcgggactttgagtcagagaagcggctgcggaaggacctgaagcgcaccaaggccctgctggcagatgcccagctcatgctggaccacctgaagaacagtgctcccagcaagcgagagattgcccagctcaagaaccagctggaggagtcagagttcacctgtgcggcagccgtgaaagcacggaaagcaatggaggtggagatcgaagacctgcacctgcagattgatgacatcgccaaagccaagacagcgctggaggagcagctgagccgccttcagcgtgagaagaatgagatccagaaccggctggaggaagatcaggaagacatgaacgaattgatgaagaagcacaaggctgccgtggctcaggcttcccgggacctggctcagataaatgatctccaagctcagctagaagaagccaacaaagagaagcaggagctgcaggagaagctacaagccctccagagccaggtggagttcctggagcagtccatggtggacaagtccctggtgagcaggcaggaagctaagatacgggagctggagacacgcctggagtttgaaaggacgcaagtgaaacggctggagagcctggctagccgtctcaaggaaaacatggagaagctgactgaggagcgggatcagcgcattgcagccgagaaccgggagaaggaacagaacaagcggctacagaggcagctccgggacaccaaggaggagatgggcgagcttgccaggaaggaggccgaggcgagccgcaagaagcacgaactggagatggatctagaaagcctggaggctgctaaccagagcctgcaggctgacctaaagttggcattcaagcgcatcggggacctgcaggctgccattgaggatgagatggagagtgatgagaatgaggacctcatcaacagtttgcaggacatggtgacaaagtatcagaaaagaaagaataaacttgagggagactctgatgtggactcggagctggaggaccgtgttgacggggtcaagtcctggttgtcaaaaaacaagggaccttccaaggcagcttctgatgatggcagcttaaagagttccagccccaccagctactggaagtcccttgcccctgatcggtcagatgatgagcacgaccctctcgacaacacctccagaccgcgatactcccacagttatctgagtgacagcgacacagaggccaagctgacggagactaacgcatagcccaggggagtggttggcagccctctcaccccagggcctgtggctgcctgggcacctctcccaggaagtggtggggcaccggtctcccccacccgactgctgatctgcatgggaaacaccctgaccttcttctgtcaggggcactttccaggctatgggtgtctgatgtctccacgtggaagaggtgggggaaagaggagtttctgaagagaactttttgctcctctgtctcaaaatgccagactcttggcttctaccctgtgtcaccgtgggcagtggcaggtggcctggcactgcatggagccagcacgttgacctccctctcagctccctgctcagggacggtggacaggttgcctactgggacactctaggttgctgggtccatggggaggattgggggaggagaagcagtgccttccctctcgtgtggggtgggggctctctcttcttggtgcctgctgtctttctactttttaatttaaatacccaacctctccatcacagctgcatccctgagagtgggagggggctgtagtggtagctggggctcccaagaacgactcgggaatgtcatctccatcttcacccttcagagagcagtcctttctctgtgcagctggagacgctggttgaggacttgtgatcagaaaaactgaagatggaagttttggccggtgctcattagacatgagtcctcactctgtgtcctgagcccgtgtcattcttccaacctccctgcccccacacacttatcccagacacaacaccatgtggtctggaggtcccagcccccaccctaaaaaggttatccctgagaactccaccagacttgggagcccaagtgcagtgcctggtgctgctcccatctgccgccccccttctctcctgcaattggtttgtactcactgggctgtgctctcccctgtttacccgatgtatggaaataaaggcccttttcctcctgaaaaaaaaaaaaaaaaaaaaaagaagaaaacaaagaaaaaaaaaaaaaaaacaaaaaaaaaaaaaaaaaaaaaaaaaaaaag

SEQ ID NO: 66742 - DNA, 4673 bp, Homo sapiens
  misc_feature (1676)..(1676): n is a, c, g, or t
caacggtgctgggctagaccaagctctgcctgaaccttagtttcagccctggagcccttgagagagctctgctgttggttagtaattaccgtgaaagtattcagcttcttcattacaaggacaggcgaaaacagaagaacagattgcagcagaagaggcctggaatgagacggagaaggtgtggctggtccatagggacggcttctcactggccagtcaactcaaatctgaggagctcaacttgcctgaggggaaggtgcgtgtgaagctggaccacgatggggccatcctggatgtggatgaggatgacgttgagaaggctaatgctccctcctgcgaccgtctggaggatctggcctcactggtgtacctcaatgagtccagcgtcctgcacaccttgcgccagcgctatggcgctagcctgctgcacacgtatgctggccccagcctgctggttcttggcccccgtggggcccctgctgtgtactctgagaaggtgatgcacatgttcaagggttgtcggcgggaggacatggcaccccacatctatgcagtggcccagaccgcatacagggcgatgctgatgagccgtcaggatcagtcaatcatcctcctgggcagtagtggcagtggcaagaccaccagctgccagcatctggtgcagtacctggccaccatcgcgggcatcagcgggaacaaggtgttttctgtggagaagtggcaggctctgtacaccctcctggaagcctttgggaacagccccaccatcattaatggcaatgccacccgcttctcccagatcctctccctggactttgaccaagctggccaggtggcctcagcctccattcagacaatgcttctggagaagctgcgtgtggctcggcgcccagccagtgaagccacattcaacgtcttctactacctgctggcctgtggggatggcaccctcaggacagagctccacctcaaccacttggcagagaacaatgtgtttgggattgtgccactggccaagcctgaggaaaagcagaaggcagctcagcagtttagtaagctgcaggcggccatgaaggtgctgggcatctcccccgatgaacagaaggcctgctggttcattctggctgccatctaccacctgggggctgcgggagccaccaaaggaagctgctgaagctgggcgcaagcagtttgcccgccatgagtgggcccagaaggctgcgtacctactgggctgcagcctggaggagctgtcctcagccatcttcaagcaccagcacaagggtggcaccctgcagcgctccacctccttccgccagggccccgaggagagtggcctgggagatgggacaggcccgaaactgagtgcactggagtgccttgagggcatggcggccggcctctacagcgagctcttcacccttctcgtctccctggtgaatagggctctcaagtccagccagcactcactctgctccatgatgattgtcgacaccccgggcttccagaaccctgagcagggtgggtcagcccgcggagcctcctttgaggagctgtgccacaactacacccaagaccggctgcagaggctcttccacgagcgcaccttcgtgcaggagttggaaagatacaaggaggagaacatcgagctggcgtttgacgacttggaacccccnacggatgactctgtggctgctgtggaccaggcctcccatcagtccctggtccgctcgctggcccgcacagacgaggcgaggggcctgctctggctattggaagaggaggctctggtgccaggggccagtgaggacaccctcctggagcgccttttctcctattatggcccccaggaaggtgacaaaaaaggccaaagcccccttctgcacagcagcaaaccacaccactttctcctgggccacagccatggcaccaactgggtagagtacaatgtgactggctggctgaactacaccaagcagaacccagccacccagaatgccccccggctcctgcaggactcccagaaaaaaatcatcagcaacctgtttctgggccgcgcaggcagtgccacggtgctctctggctccatcgcgggcctggagggcggctcgcagctggcactgcgccgggccaccagcatgcggaaaacctttaccacaggcatggcggctgtcaaaaagaagtcactgtgcatccagatgaagctacaggtggacgccctcatcgacaccatcaagaagtcaaagctgcattttgtgcactgcttcctgcctgtagctgagggctgggctggggagccccgttccgcctcctcccgccgagtcagcagcagcagtgagctggacctgccctcgggagaccactgcgaggctgggctcctgcagctcgacgtgcccctgctccgcacccagctccgcggctcccgcctgctcgatgccatgcgcatgtaccgccaaggttaccctgaccacatggtgttttccgagttccgccgccgctttgatgtcctggccccgcacctgaccaagaaacacgggcgtaactacatcgtggtggatgaaaggcgggcagtggaggagctgctggagtgcttggatctggagaagagcagctgctgcatgggcctgagccgggtgttcttccgggcgggcaccttggcacggctggaggagcagcgggatgaacaaaccagcaggaacctaaccctgttccaagcagcctgcaggggctacctggcccgccagcacttcaagaagagaaagatccaggacctggccattcgctgtgtacagaagaacatcaagaagaacaaaggggtgaaggactggccctggtggaagctttttaccacagtgaggcccctcatcgaagtacagctgtcagaggagcagatccggaacaaagacgaggagatccagcagctgcggagcaagctcgagaaggcggagaaggagaggaacgagctgcggctcaacagtgaccggctggagagccggatctcagagctgacatcggagctgacagatgagcgtaacacaggagagtccgcctcccagctgctggacgcggagacagcagagaggctccgggctgagaaggagatgaaggaactgcagacccagtacgatgcactgaagaagcagatggaggttatggaaatggaggtgatggaggcccgtctcatccgggcagcggagatcaacggggaagtggatgatgatgatgcaggtggcgagtggcggctgaagtatgagcgggctgtgcgggaggtggacttcaccaagaaacggctccagcaggagtttgaggacaagctggaggtggagcagcagaacaagaggcagctggaacggcggctcggggacctgcaggcagatagtgaggagagtcagcgggctctgcagcagctcaagaagaagtgccagcgactgacggctgagctgcaagacaccaagctgcacctggagggccagcaggtccgcaaccacgaactggagaagaagcagaggaggtttgacagtgagctctcgcaggcgcatgaggaggcccagcgggagaagctgcagcgggagaagctgcagcgggagaaggacatgctcctcgctgaggctttcagcctgaagcagcaactagaggaaaaagacatggacattgcagggttcacccagaaggttgtgtctctagaggcagagctccaggacatttcttcccaagagtccaaggatgaggcttctctggccaaggtcaagaaacagctccgggacctggaggccaaagtcaaggatcaggaagaagagctggatgagcaggcagggaccatccagatgctggaacaggccaagctgcgtctggagatggagatggagcggatgagacagacccattctaaggagatggagagtcgggatgaggaggtggaggaggcccggcagtcgtgtcagaagaagttaaaacagatggaggtgcagctagaggaagagtatgaggacaagcagaaggttctgcgagagaagcgggagctggagggcaagctcgccaccctcagcgaccaggtgaaccggcgggactttgagtcagagaagcggctgcggaaggacctgaagcgcaccaaggccctgctggcagatgcccagctcatgctggaccacctgaagaacagtgctcccagcaagcgagagattgcccagctcaagaaccagctggaggagtcagagttcacctgtgcggcagccgtgaaagcacggaaagcaatggaggtggagatcgaagacctgcacctgcagattgatgacatcgccaaagccaagacagcgctggaggagcagctgagccgccttcagcgtgagaagaatgagatccagaaccggctggaggaagatcaggaagacatgaacgaattgatgaagaagcacaaggctgccgtggctcaggcttcccgggacctggctcagataaatgatctccaagctcagctagaagaagccaacaaagagaagcaggagctgcaggagaagctacaagccctccagagccaggtggagttcctggagcagtccatggtggacaagtccctggtgagcaggcaggaagctaagatacgggagctggagacacgcctggagtttgaaaggacgcaagtgaaacggctggaggtgggttcacacttctcccgg

SEQ ID NO: 66743 - DNA, 4500 bp, Homo sapiens
  misc_feature (1676)..(1676): n is a, c, g, or t
caacggtgctgggctagaccaagctctgcctgaaccttagtttcagccctggagcccttgagagagctctgctgttggttagtaattaccgtgaaagtattcagcttcttcattacaaggacaggcgaaaacagaagaacagattgcagcagaagaggcctggaatgagacggagaaggtgtggctggtccatagggacggcttctcactggccagtcaactcaaatctgaggagctcaacttgcctgaggggaaggtgcgtgtgaagctggaccacgatggggccatcctggatgtggatgaggatgacgttgagaaggctaatgctccctcctgcgaccgtctggaggatctggcctcactggtgtacctcaatgagtccagcgtcctgcacaccttgcgccagcgctatggcgctagcctgctgcacacgtatgctggccccagcctgctggttcttggcccccgtggggcccctgctgtgtactctgagaaggtgatgcacatgttcaagggttgtcggcgggaggacatggcaccccacatctatgcagtggcccagaccgcatacagggcgatgctgatgagccgtcaggatcagtcaatcatcctcctgggcagtagtggcagtggcaagaccaccagctgccagcatctggtgcagtacctggccaccatcgcgggcatcagcgggaacaaggtgttttctgtggagaagtggcaggctctgtacaccctcctggaagcctttgggaacagccccaccatcattaatggcaatgccacccgcttctcccagatcctctccctggactttgaccaagctggccaggtggcctcagcctccattcagacaatgcttctggagaagctgcgtgtggctcggcgcccagccagtgaagccacattcaacgtcttctactacctgctggcctgtggggatggcaccctcaggacagagctccacctcaaccacttggcagagaacaatgtgtttgggattgtgccactggccaagcctgaggaaaagcagaaggcagctcagcagtttagtaagctgcaggcggccatgaaggtgctgggcatctcccccgatgaacagaaggcctgctggttcattctggctgccatctaccacctgggggctgcgggagccaccaaaggaagctgctgaagctgggcgcaagcagtttgcccgccatgagtgggcccagaaggctgcgtacctactgggctgcagcctggaggagctgtcctcagccatcttcaagcaccagcacaagggtggcaccctgcagcgctccacctccttccgccagggccccgaggagagtggcctgggagatgggacaggcccgaaactgagtgcactggagtgccttgagggcatggcggccggcctctacagcgagctcttcacccttctcgtctccctggtgaatagggctctcaagtccagccagcactcactctgctccatgatgattgtcgacaccccgggcttccagaaccctgagcagggtgggtcagcccgcggagcctcctttgaggagctgtgccacaactacacccaagaccggctgcagaggctcttccacgagcgcaccttcgtgcaggagttggaaagatacaaggaggagaacatcgagctggcgtttgacgacttggaacccccnacggatgactctgtggctgctgtggaccaggcctcccatcagtccctggtccgctcgctggcccgcacagacgaggcgaggggcctgctctggctattggaagaggaggctctggtgccaggggccagtgaggacaccctcctggagcgccttttctcctattatggcccccaggaaggtgacaaaaaaggccaaagcccccttctgcacagcagcaaaccacaccactttctcctgggccacagccatggcaccaactgggtagagtacaatgtgactggctggctgaactacaccaagcagaacccagccacccagaatgccccccggctcctgcaggactcccagaaaaaaatcatcagcaacctgtttctgggccgcgcaggcagtgccacggtgctctctggctccatcgcgggcctggagggcggctcgcagctggcactgcgccgggccaccagcatgcggaaaacctttaccacaggcatggcggctgtcaaaaagaagtcactgtgcatccagatgaagctacaggtggacgccctcatcgacaccatcaagaagtcaaagctgcattttgtgcactgcttcctgcctgtagctgagggctgggctggggagccccgttccgcctcctcccgccgagtcagcagcagcagtgagctggacctgccctcgggagaccactgcgaggctgggctcctgcagctcgacgtgcccctgctccgcacccagctccgcggctcccgcctgctcgatgccatgcgcatgtaccgccaaggttaccctgaccacatggtgttttccgagttccgccgccgctttgatgtcctggccccgcacctgaccaagaaacacgggcgtaactacatcgtggtggatgaaaggcgggcagtggaggagctgctggagtgcttggatctggagaagagcagctgctgcatgggcctgagccgggtgttcttccgggcgggcaccttggcacggctggaggagcagcgggatgaacaaaccagcaggaacctaaccctgttccaagcagcctgcaggggctacctggcccgccagcacttcaagaagagaaagatccaggacctggccattcgctgtgtacagaagaacatcaagaagaacaaaggggtgaaggactggccctggtggaagctttttaccacagtgaggcccctcatcgaagtacagctgtcagaggagcagatccggaacaaagacgaggagatccagcagctgcggagcaagctcgagaaggcggagaaggagaggaacgagctgcggctcaacagtgaccggctggagagccggatctcagagctgacatcggagctgacagatgagcgtaacacaggagagtccgcctcccagctgctggacgcggagacagcagagaggctccgggctgagaaggagatgaaggaactgcagacccagtacgatgcactgaagaagcagatggaggttatggaaatggaggtgatggaggcccgtctcatccgggcagcggagatcaacggggaagtggatgatgatgatgcaggtggcgagtggcggctgaagtatgagcgggctgtgcgggaggtggacttcaccaagaaacggctccagcaggagtttgaggacaagctggaggtggagcagcagaacaagaggcagctggaacggcggctcggggacctgcaggcagatagtgaggagagtcagcgggctctgcagcagctcaagaagaagtgccagcgactgacggctgagctgcaagacaccaagctgcacctggagggccagcaggtccgcaaccacgaactggagaagaagcagaggaggtttgacagtgagctctcgcaggcgcatgaggaggcccagcgggagaagctgcagcgggagaagctgcagcgggagaaggacatgctcctcgctgaggctttcagcctgaagcagcaactagaggaaaaagacatggacattgcagggttcacccagaaggttgtgtctctagaggcagagctccaggacatttcttcccaagagtccaaggatgaggcttctctggccaaggtcaagaaacagctccgggacctggaggccaaagtcaaggatcaggaagaagagctggatgagcaggcagggaccatccagatgctggaacaggccaagctgcgtctggagatggagatggagcggatgagacagacccattctaaggagatggagagtcgggatgaggaggtggaggaggcccggcagtcgtgtcagaagaagttaaaacagatggaggtgcagctagaggaagagtatgaggacaagcagaaggttctgcgagagaagcgggagctggagggcaagctcgccaccctcagcgaccaggtgaaccggcgggactttgagtcagagaagcggctgcggaaggacctgaagcgcaccaaggccctgctggcagatgcccagctcatgctggaccacctgaagaacagtgctcccagcaagcgagagattgcccagctcaagaaccaggtatccacagagagcacacggctgatccaggcacaacagagcttacctttccattctctttctctctctcgctcctctcagtggttcttgagtccttgggaaggaaagtgacaggaaagaggggagagccacgtgtagcagctagactccccaggctctgcgtgtgccttactgtctcaccgcccagcctgggatggtgtggatggggcctggtgcccaccagccatgtcacgggaggagatccccacgcgtgcaccaccacacagccatggccctggggtctgaagtgaatggaggagga

SEQ ID NO: 66744 - DNA, 4296 bp, Homo sapiens
  misc_feature (1676)..(1676): n is a, c, g, or t
caacggtgctgggctagaccaagctctgcctgaaccttagtttcagccctggagcccttgagagagctctgctgttggttagtaattaccgtgaaagtattcagcttcttcattacaaggacaggcgaaaacagaagaacagattgcagcagaagaggcctggaatgagacggagaaggtgtggctggtccatagggacggcttctcactggccagtcaactcaaatctgaggagctcaacttgcctgaggggaaggtgcgtgtgaagctggaccacgatggggccatcctggatgtggatgaggatgacgttgagaaggctaatgctccctcctgcgaccgtctggaggatctggcctcactggtgtacctcaatgagtccagcgtcctgcacaccttgcgccagcgctatggcgctagcctgctgcacacgtatgctggccccagcctgctggttcttggcccccgtggggcccctgctgtgtactctgagaaggtgatgcacatgttcaagggttgtcggcgggaggacatggcaccccacatctatgcagtggcccagaccgcatacagggcgatgctgatgagccgtcaggatcagtcaatcatcctcctgggcagtagtggcagtggcaagaccaccagctgccagcatctggtgcagtacctggccaccatcgcgggcatcagcgggaacaaggtgttttctgtggagaagtggcaggctctgtacaccctcctggaagcctttgggaacagccccaccatcattaatggcaatgccacccgcttctcccagatcctctccctggactttgaccaagctggccaggtggcctcagcctccattcagacaatgcttctggagaagctgcgtgtggctcggcgcccagccagtgaagccacattcaacgtcttctactacctgctggcctgtggggatggcaccctcaggacagagctccacctcaaccacttggcagagaacaatgtgtttgggattgtgccactggccaagcctgaggaaaagcagaaggcagctcagcagtttagtaagctgcaggcggccatgaaggtgctgggcatctcccccgatgaacagaaggcctgctggttcattctggctgccatctaccacctgggggctgcgggagccaccaaaggaagctgctgaagctgggcgcaagcagtttgcccgccatgagtgggcccagaaggctgcgtacctactgggctgcagcctggaggagctgtcctcagccatcttcaagcaccagcacaagggtggcaccctgcagcgctccacctccttccgccagggccccgaggagagtggcctgggagatgggacaggcccgaaactgagtgcactggagtgccttgagggcatggcggccggcctctacagcgagctcttcacccttctcgtctccctggtgaatagggctctcaagtccagccagcactcactctgctccatgatgattgtcgacaccccgggcttccagaaccctgagcagggtgggtcagcccgcggagcctcctttgaggagctgtgccacaactacacccaagaccggctgcagaggctcttccacgagcgcaccttcgtgcaggagttggaaagatacaaggaggagaacatcgagctggcgtttgacgacttggaacccccnacggatgactctgtggctgctgtggaccaggcctcccatcagtccctggtccgctcgctggcccgcacagacgaggcgaggggcctgctctggctattggaagaggaggctctggtgccaggggccagtgaggacaccctcctggagcgccttttctcctattatggcccccaggaaggtgacaaaaaaggccaaagcccccttctgcacagcagcaaaccacaccactttctcctgggccacagccatggcaccaactgggtagagtacaatgtgactggctggctgaactacaccaagcagaacccagccacccagaatgccccccggctcctgcaggactcccagaaaaaaatcatcagcaacctgtttctgggccgcgcaggcagtgccacggtgctctctggctccatcgcgggcctggagggcggctcgcagctggcactgcgccgggccaccagcatgcggaaaacctttaccacaggcatggcggctgtcaaaaagaagtcactgtgcatccagatgaagctacaggtggacgccctcatcgacaccatcaagaagtcaaagctgcattttgtgcactgcttcctgcctgtagctgagggctgggctggggagccccgttccgcctcctcccgccgagtcagcagcagcagtgagctggacctgccctcgggagaccactgcgaggctgggctcctgcagctcgacgtgcccctgctccgcacccagctccgcggctcccgcctgctcgatgccatgcgcatgtaccgccaaggttaccctgaccacatggtgttttccgagttccgccgccgctttgatgtcctggccccgcacctgaccaagaaacacgggcgtaactacatcgtggtggatgaaaggcgggcagtggaggagctgctggagtgcttggatctggagaagagcagctgctgcatgggcctgagccgggtgttcttccgggcgggcaccttggcacggctggaggagcagcgggatgaacaaaccagcaggaacctaaccctgttccaagcagcctgcaggggctacctggcccgccagcacttcaagaagagaaagatccaggacctggccattcgctgtgtacagaagaacatcaagaagaacaaaggggtgaaggactggccctggtggaagctttttaccacagtgaggcccctcatcgaagtacagctgtcagaggagcagatccggaacaaagacgaggagatccagcagctgcggagcaagctcgagaaggcggagaaggagaggaacgagctgcggctcaacagtgaccggctggagagccggatctcagagctgacatcggagctgacagatgagcgtaacacaggagagtccgcctcccagctgctggacgcggagacagcagagaggctccgggctgagaaggagatgaaggaactgcagacccagtacgatgcactgaagaagcagatggaggttatggaaatggaggtgatggaggcccgtctcatccgggcagcggagatcaacggggaagtggatgatgatgatgcaggtggcgagtggcggctgaagtatgagcgggctgtgcgggaggtggacttcaccaagaaacggctccagcaggagtttgaggacaagctggaggtggagcagcagaacaagaggcagctggaacggcggctcggggacctgcaggcagatagtgaggagagtcagcgggctctgcagcagctcaagaagaagtgccagcgactgacggctgagctgcaagacaccaagctgcacctggagggccagcaggtccgcaaccacgaactggagaagaagcagaggaggtttgacagtgagctctcgcaggcgcatgaggaggcccagcgggagaagctgcagcgggagaagctgcagcgggagaaggacatgctcctcgctgaggctttcagcctgaagcagcaactagaggaaaaagacatggacattgcagggttcacccagaaggttgtgtctctagaggcagagctccaggacatttcttcccaagagtccaaggatgaggcttctctggccaaggtcaagaaacagctccgggacctggaggccaaagtcaaggatcaggaagaagagctggatgagcaggcagggaccatccagatgctggaacaggccaagctgccgtcggagacggcgatggagcggatgccaccgaccatctaaggagactggcgagcgggatgacgaaggggccgaaggccggcagcgcgtccgaaaacgctccacccgaggcgcgccccacagcccagcatacggcacccaaacggcccgcccgcacacgcaccttcggcaacccccaccccagacccagggaccaccggcctgagcacaaaagcgccccacgccgtactccccgccccggaaatgccgccctggcgcccgactaacgcccaccacgacagaagcgcccccacccagcgcgcccacacacacctcgcacccccgacacagcggccaacccccgcagacaaaccaaccaaccacacgccaccacaccccgccggccaccacacagcacctcggcacaagcccaccgccgaacacacaacgccccgcccgccgggagcaacag

SEQ ID NO: 66745 - DNA, 356 bp, Homo sapiens
tcgaattcaagcttctaacgatgtacggggacatgagtcctcactctgtgtcctgagcccgtgtcattcttccaacctccctgcccccacacacttatcccagacacaacaccatgtggtctggaggtcccagcccccaccctaaaaaggttatccctgagaactccaccagacttgggagcccaagtgcagtgcctggtgctgctcccatctgccgccccccttctctcctgcaattggtttgtactcactgggctgtgctctcccctgtttacccgatgtatggaaataaaggcccttttcctcctgaaaaaaaaaaaaaaaacaaaaaaaaaaaaaaaaaaaaaaaaaaaaag

SEQ ID NO: 66746 - DNA, 291 bp, Homo sapiens
cggctcatgtgtggctcttcgcggggctcatggggtggcgcattgtgtggctcctggtggagttctcaggcataacctttttagggtgggggctggaactccaccagacttgggagcccaagtgcagtgcctggtgctgctcccatctgccgccccccttctctcctgcaattggtttgtactcactgggctgtgctctcccctgtttacccgatgtatggaaataaaggcccttttcctcctgaaaaaaaaaaaaaaaacaaaaaaaaaaaaaaaaaaaaaaaaaaaaag

SEQ ID NO: 66747 - DNA, 378 bp, Homo sapiens
cagctccagctccagctccggctccgaagcttcctcagagcacaagaggcggaagaaggggcgctctcggaagagcaagaagtccaagtcgagaagaaagagaacggagacggagtctgagtcctcctcgtcgtcatccagcggctcgaccgtctccagccacagctgctccagtgtgaagaagggcccagctgcagaaagtgaagaaactgggcagacgcaccggccgtcgaggaaggaggaaaagaagcgcaagaaagaggtggacagcctgatgatgcggtacctgtaccggcccgagagcgactagtgcagtaggtggcacctggcctgggttcagcatggtgtgtcccacccggtgtgaactaacgtcctccc

SEQ ID NO: 66748 - DNA, 6457 bp, Homo sapiens
  misc_feature (1638)..(1638): n is a, c, g, or t
atcagagcggagtctccttgctctgggctgctccaggccaggccatgcggctggactctgaggccgcctctcatgcccacagccaggcgaaaacagaagaacagattgcagcagaagaggcctggaatgagacggagaaggtgtggctggtccatagggacggcttctcactggccagtcaactcaaatctgaggagctcaacttgcctgaggggaaggtgcgtgtgaagctggaccacgatggggccatcctggatgtggatgaggatgacgttgagaaggctaatgctccctcctgcgaccgtctggaggatctggcctcactggtgtacctcaatgagtccagcgtcctgcacaccttgcgccagcgctatggcgctagcctgctgcacacgtatgctggccccagcctgctggttcttggcccccgtggggcccctgctgtgtactctgagaaggtgatgcacatgttcaagggttgtcggcgggaggacatggcaccccacatctatgcagtggcccagaccgcatacagggcgatgctgatgagccgtcaggatcagtcaatcatcctcctgggcagtagtggcagtggcaagaccaccagctgccagcatctggtgcagtacctggccaccatcgcgggcatcagcgggaacaaggtgttttctgtggagaagtggcaggctctgtacaccctcctggaagcctttgggaacagccccaccatcattaatggcaatgccacccgcttctcccagatcctctccctggactttgaccaagctggccaggtggcctcagcctccattcagacaatgcttctggagaagctgcgtgtggctcggcgcccagccagtgaagccacattcaacgtcttctactacctgctggcctgtggggatggcaccctcaggacagagctccacctcaaccacttggcagagaacaatgtgtttgggattgtgccactggccaagcctgaggaaaagcagaaggcagctcagcagtttagtaagctgcaggcggccatgaaggtgctgggcatctcccccgatgaacagaaggcctgctggttcattctggctgccatctaccacctgggggctgcgggagccaccaaaggaagctgctgaagctgggcgcaagcagtttgcccgccatgagtgggcccagaaggctgcgtacctactgggctgcagcctggaggagctgtcctcagccatcttcaagcaccagcacaagggtggcaccctgcagcgctccacctccttccgccagggccccgaggagagtggcctgggagatgggacaggcccgaaactgagtgcactggagtgccttgagggcatggcggccggcctctacagcgagctcttcacccttctcgtctccctggtgaatagggctctcaagtccagccagcactcactctgctccatgatgattgtcgacaccccgggcttccagaaccctgagcagggtgggtcagcccgcggagcctcctttgaggagctgtgccacaactacacccaagaccggctgcagaggctcttccacgagcgcaccttcgtgcaggagttggaaagatacaaggaggagaacatcgagctggcgtttgacgacttggaacccccnacggatgactctgtggctgctgtggaccaggcctcccatcagtccctggtccgctcgctggcccgcacagacgaggcgaggggcctgctctggctattggaagaggaggctctggtgccaggggccagtgaggacaccctcctggagcgccttttctcctattatggcccccaggaaggtgacaaaaaaggccaaagcccccttctgcacagcagcaaaccacaccactttctcctgggccacagccatggcaccaactgggtagagtacaatgtgactggctggctgaactacaccaagcagaacccagccacccagaatgccccccggctcctgcaggactcccagaaaaaaatcatcagcaacctgtttctgggccgcgcaggcagtgccacggtgctctctggctccatcgcgggcctggagggcggctcgcagctggcactgcgccgggccaccagcatgcggaaaacctttaccacaggcatggcggctgtcaaaaagaagtcactgtgcatccagatgaagctacaggtggacgccctcatcgacaccatcaagaagtcaaagctgcattttgtgcactgcttcctgcctgtagctgagggctgggctggggagccccgttccgcctcctcccgccgagtcagcagcagcagtgagctggacctgccctcgggagaccactgcgaggctgggctcctgcagctcgacgtgcccctgctccgcacccagctccgcggctcccgcctgctcgatgccatgcgcatgtaccgccaaggttaccctgaccacatggtgttttccgagttccgccgccgctttgatgtcctggccccgcacctgaccaagaaacacgggcgtaactacatcgtggtggatgaaaggcgggcagtggaggagctgctggagtgcttggatctggagaagagcagctgctgcatgggcctgagccgggtgttcttccgggcgggcaccttggcacggctggaggagcagcgggatgaacaaaccagcaggaacctaaccctgttccaagcagcctgcaggggctacctggcccgccagcacttcaagaagagaaagatccaggacctggccattcgctgtgtacagaagaacatcaagaagaacaaaggggtgaaggactggccctggtggaagctttttaccacagtgaggcccctcatcgaagtacagctgtcagaggagcagatccggaacaaagacgaggagatccagcagctgcggagcaagctcgagaaggcggagaaggagaggaacgagctgcggctcaacagtgaccggctggagagccggatctcagagctgacatcggagctgacagatgagcgtaacacaggagagtccgcctcccagctgctggacgcggagacagcagagaggctccgggctgagaaggagatgaaggaactgcagacccagtacgatgcactgaagaagcagatggaggttatggaaatggaggtgatggaggcccgtctcatccgggcagcggagatcaacggggaagtggatgatgatgatgcaggtggcgagtggcggctgaagtatgagcgggctgtgcgggaggtggacttcaccaagaaacggctccagcaggagtttgaggacaagctggaggtggagcagcagaacaagaggcagctggaacggcggctcggggacctgcaggcagatagtgaggagagtcagcgggctctgcagcagctcaagaagaagtgccagcgactgacggctgagctgcaagacaccaagctgcacctggagggccagcaggtccgcaaccacgaactggagaagaagcagaggaggtttgacagtgagctctcgcaggcgcatgaggaggcccagcgggagaagctgcagcgggagaagctgcagcgggagaaggacatgctcctcgctgaggctttcagcctgaagcagcaactagaggaaaaagacatggacattgcagggttcacccagaaggttgtgtctctagaggcagagctccaggacatttcttcccaagagtccaaggatgaggcttctctggccaaggtcaagaaacagctccgggacctggaggccaaagtcaaggatcaggaagaagagctggatgagcaggcagggaccatccagatgctggaacaggccaagctgcgtctggagatggagatggagcggatgagacagacccattctaaggagatggagagtcgggatgaggaggtggaggaggcccggcagtcgtgtcagaagaagttaaaacagatggaggtgcagctagaggaagagtatgaggacaagcagaaggttctgcgagagaagcgggagctggagggcaagctcgccaccctcagcgaccaggtgaaccggcgggactttgagtcagagaagcggctgcggaaggacctgaagcgcaccaaggccctgctggcagatgcccagctcatgctggaccacctgaagaacagtgctcccagcaagcgagagattgcccagctcaagaaccagctggaggagtcagagttcacctgtgcggcagccgtgaaagcacggaaagcaatggaggtggagatcgaagacctgcacctgcagattgatgacatcgccaaagccaagacagcgctggaggagcagctgagccgccttcagcgtgagaagaatgagatccagaaccggctggaggaagatcaggaagacatgaacgaattgatgaagaagcacaaggctgccgtggctcaggcttcccgggacctggctcagataaatgatctccaagctcagctagaagaagccaacaaagagaagcaggagctgcaggagaagctacaagccctccagagccaggtggagttcctggagcagtccatggtggacaagtccctggtgagcaggcaggaagctaagatacgggagctggagacacgcctggagtttgaaaggacgcaagtgaaacggctggagagcctggctagccgtctcaaggaaaacatggagaagctgactgaggagcgggatcagcgcattgcagccgagaaccgggagaaggaacagaacaagcggctacagaggcagctccgggacaccaaggaggagatgggcgagcttgccaggaaggaggccgaggcgagccgcaagaagcacgaactggagatggatctagaaagcctggaggctgctaaccagagcctgcaggctgacctaaagttggcattcaagcgcatcggggacctgcaggctgccattgaggatgagatggagagtgatgagaatgaggacctcatcaacagtgagggagactctgatgtggactcggagctggaggaccgtgttgacggggtcaagtcctggttgtcaaaaaacaagggaccttccaaggcagcttctgatgatggcagcttaaagagttccagccccaccagctactggaagtcccttgcccctgatcggtcagatgatgagcacgaccctctcgacaacacctccagaccgcgatactcccacagttatctgagtgacagcgacacagaggccaagctgacggagactaacgcatagcccaggggagtggttggcagccctctcaccccagggcctgtggctgcctgggcacctctcccaggaagtggtggggcaccggtctcccccacccgactgctgatctgcatgggaaacaccctgaccttcttctgtcaggggcactttccaggctatgggtgtctgatgtctccacgtggaagaggtgggggaaagaggagtttctgaagagaactttttgctcctctgtctcaaaatgccagactcttggcttctaccctgtgtcaccgtgggcagtggcaggtggcctggcactgcatggagccagcacgttgacctccctctcagctccctgctcagggacggtggacaggttgcctactgggacactctaggttgctgggtccatggggaggattgggggaggagaagcagtgccttccctctcgtgtggggtgggggctctctcttcttggtgcctgctgtctttctactttttaatttaaatacccaacctctccatcacagctgcatccctgagagtgggagggggctgtagtggtagctggggctcccaagaacgactcgggaatgtcatctccatcttcacccttcagagagcagtcctttctctgtgcagctggagacgctggtgaggagagccgggtccaggttcttaagaatgaggtgcggaggggctctccggtgctgctgggctgggttgagcaagcctacgcagacaagtgtgtgtgtggaccatccgcacctccagcccccaccccaccctctttgtctcagcgtgttatgtgcaatgacctatttaaggtaaacccattccaactacagcagttcagggctgatccaagcactgcctccctcctgctctgtccaggtggtctggaccataaactcaacttgagagggaaggcttggggttgaggacttgtgatcagaaaaactgaagatggaagttttggccggtgctcattagacatgagtcctcactctgtgtcctgagcccgtgtcattcttccaacctccctgcccccacacacttatcccagacacaacaccatgtggtctggaggtcccagcccccaccctaaaaaggttatccctgagaactccaccagacttgggagcccaagtgcagtgcctggtgctgctcccatctgccgccccccttctctcctgcaattggtttgtactcactgggctgtgctctcccctgtttacccgatgtatggaaataaaggcccttttcctcctg

SEQ ID NO: 66749 - DNA, 6269 bp, Homo sapiens
  misc_feature (1676)..(1676): n is a, c, g, or t
caacggtgctgggctagaccaagctctgcctgaaccttagtttcagccctggagcccttgagagagctctgctgttggttagtaattaccgtgaaagtattcagcttcttcattacaaggacaggcgaaaacagaagaacagattgcagcagaagaggcctggaatgagacggagaaggtgtggctggtccatagggacggcttctcactggccagtcaactcaaatctgaggagctcaacttgcctgaggggaaggtgcgtgtgaagctggaccacgatggggccatcctggatgtggatgaggatgacgttgagaaggctaatgctccctcctgcgaccgtctggaggatctggcctcactggtgtacctcaatgagtccagcgtcctgcacaccttgcgccagcgctatggcgctagcctgctgcacacgtatgctggccccagcctgctggttcttggcccccgtggggcccctgctgtgtactctgagaaggtgatgcacatgttcaagggttgtcggcgggaggacatggcaccccacatctatgcagtggcccagaccgcatacagggcgatgctgatgagccgtcaggatcagtcaatcatcctcctgggcagtagtggcagtggcaagaccaccagctgccagcatctggtgcagtacctggccaccatcgcgggcatcagcgggaacaaggtgttttctgtggagaagtggcaggctctgtacaccctcctggaagcctttgggaacagccccaccatcattaatggcaatgccacccgcttctcccagatcctctccctggactttgaccaagctggccaggtggcctcagcctccattcagacaatgcttctggagaagctgcgtgtggctcggcgcccagccagtgaagccacattcaacgtcttctactacctgctggcctgtggggatggcaccctcaggacagagctccacctcaaccacttggcagagaacaatgtgtttgggattgtgccactggccaagcctgaggaaaagcagaaggcagctcagcagtttagtaagctgcaggcggccatgaaggtgctgggcatctcccccgatgaacagaaggcctgctggttcattctggctgccatctaccacctgggggctgcgggagccaccaaaggaagctgctgaagctgggcgcaagcagtttgcccgccatgagtgggcccagaaggctgcgtacctactgggctgcagcctggaggagctgtcctcagccatcttcaagcaccagcacaagggtggcaccctgcagcgctccacctccttccgccagggccccgaggagagtggcctgggagatgggacaggcccgaaactgagtgcactggagtgccttgagggcatggcggccggcctctacagcgagctcttcacccttctcgtctccctggtgaatagggctctcaagtccagccagcactcactctgctccatgatgattgtcgacaccccgggcttccagaaccctgagcagggtgggtcagcccgcggagcctcctttgaggagctgtgccacaactacacccaagaccggctgcagaggctcttccacgagcgcaccttcgtgcaggagttggaaagatacaaggaggagaacatcgagctggcgtttgacgacttggaacccccnacggatgactctgtggctgctgtggaccaggcctcccatcagtccctggtccgctcgctggcccgcacagacgaggcgaggggcctgctctggctattggaagaggaggctctggtgccaggggccagtgaggacaccctcctggagcgccttttctcctattatggcccccaggaaggtgacaaaaaaggccaaagcccccttctgcacagcagcaaaccacaccactttctcctgggccacagccatggcaccaactgggtagagtacaatgtgactggctggctgaactacaccaagcagaacccagccacccagaatgccccccggctcctgcaggactcccagaaaaaaatcatcagcaacctgtttctgggccgcgcaggcagtgccacggtgctctctggctccatcgcgggcctggagggcggctcgcagctggcactgcgccgggccaccagcatgcggaaaacctttaccacaggcatggcggctgtcaaaaagaagtcactgtgcatccagatgaagctacaggtggacgccctcatcgacaccatcaagaagtcaaagctgcattttgtgcactgcttcctgcctgtagctgagggctgggctggggagccccgttccgcctcctcccgccgagtcagcagcagcagtgagctggacctgccctcgggagaccactgcgaggctgggctcctgcagctcgacgtgcccctgctccgcacccagctccgcggctcccgcctgctcgatgccatgcgcatgtaccgccaaggttaccctgaccacatggtgttttccgagttccgccgccgctttgatgtcctggccccgcacctgaccaagaaacacggatccaggacctggccattcgctgtgtacagaagaacatcaagaagaacaaaggggtgaaggactggccctggtggaagctttttaccacagtgaggcccctcatcgaagtacagctgtcagaggagcagatccggaacaaagacgaggagatccagcagctgcggagcaagctcgagaaggcggagaaggagaggaacgagctgcggctcaacagtgaccggctggagagccggatctcagagctgacatcggagctgacagatgagcgtaacacaggagagtccgcctcccagctgctggacgcggagacagcagagaggctccgggctgagaaggagatgaaggaactgcagacccagtacgatgcactgaagaagcagatggaggttatggaaatggaggtgatggaggcccgtctcatccgggcagcggagatcaacggggaagtggatgatgatgatgcaggtggcgagtggcggctgaagtatgagcgggctgtgcgggaggtggacttcaccaagaaacggctccagcaggagtttgaggacaagctggaggtggagcagcagaacaagaggcagctggaacggcggctcggggacctgcaggcagatagtgaggagagtcagcgggctctgcagcagctcaagaagaagtgccagcgactgacggctgagctgcaagacaccaagctgcacctggagggccagcaggtccgcaaccacgaactggagaagaagcagaggaggtttgacagtgagctctcgcaggcgcatgaggaggcccagcgggagaagctgcagcgggagaagctgcagcgggagaaggacatgctcctcgctgaggctttcagcctgaagcagcaactagaggaaaaagacatggacattgcagggttcacccagaaggttgtgtctctagaggcagagctccaggacatttcttcccaagagtccaaggatgaggcttctctggccaaggtcaagaaacagctccgggacctggaggccaaagtcaaggatcaggaagaagagctggatgagcaggcagggaccatccagatgctggaacaggccaagctgcgtctggagatggagatggagcggatgagacagacccattctaaggagatggagagtcgggatgaggaggtggaggaggcccggcagtcgtgtcagaagaagttaaaacagatggaggtgcagctagaggaagagtatgaggacaagcagaaggttctgcgagagaagcgggagctggagggcaagctcgccaccctcagcgaccaggtgaaccggcgggactttgagtcagagaagcggctgcggaaggacctgaagcgcaccaaggccctgctggcagatgcccagctcatgctggaccacctgaagaacagtgctcccagcaagcgagagattgcccagctcaagaaccagctggaggagtcagagttcacctgtgcggcagccgtgaaagcacggaaagcaatggaggtggagatcgaagacctgcacctgcagattgatgacatcgccaaagccaagacagcgctggaggagcagctgagccgccttcagcgtgagaagaatgagatccagaaccggctggaggaagatcaggaagacatgaacgaattgatgaagaagcacaaggctgccgtggctcaggcttcccgggacctggctcagataaatgatctccaagctcagctagaagaagccaacaaagagaagcaggagctgcaggagaagctacaagccctccagagccaggtggagttcctggagcagtccatggtggacaagtccctggtgagcaggcaggaagctaagatacgggagctggagacacgcctggagtttgaaaggacgcaagtgaaacggctggagagcctggctagccgtctcaaggaaaacatggagaagctgactgaggagcgggatcagcgcattgcagccgagaaccgggagaaggaacagaacaagcggctacagaggcagctccgggacaccaaggaggagatgggcgagcttgccaggaaggaggccgaggcgagccgcaagaagcacgaactggagatggatctagaaagcctggaggctgctaaccagagcctgcaggctgacctaaagttggcattcaagcgcatcggggacctgcaggctgccattgaggatgagatggagagtgatgagaatgaggacctcatcaacagtgagggagactctgatgtggactcggagctggaggaccgtgttgacggggtcaagtcctggttgtcaaaaaacaagggaccttccaaggcagcttctgatgatggcagcttaaagagttccagccccaccagctactggaagtcccttgcccctgatcggtcagatgatgagcacgaccctctcgacaacacctccagaccgcgatactcccacagttatctgagtgacagcgacacagaggccaagctgacggagactaacgcatagcccaggggagtggttggcagccctctcaccccagggcctgtggctgcctgggcacctctcccaggaagtggtggggcaccggtctcccccacccgactgctgatctgcatgggaaacaccctgaccttcttctgtcaggggcactttccaggctatgggtgtctgatgtctccacgtggaagaggtgggggaaagaggagtttctgaagagaactttttgctcctctgtctcaaaatgccagactcttggcttctaccctgtgtcaccgtgggcagtggcaggtggcctggcactgcatggagccagcacgttgacctccctctcagctccctgctcagggacggtggacaggttgcctactgggacactctaggttgctgggtccatggggaggattgggggaggagaagcagtgccttccctctcgtgtggggtgggggctctctcttcttggtgcctgctgtctttctactttttaatttaaatacccaacctctccatcacagctgcatccctgagagtgggagggggctgtagtggtagctggggctcccaagaacgactcgggaatgtcatctccatcttcacccttcagagagcagtcctttctctgtgcagctggagacgctggtgaggagagccgggtccaggttcttaagaatgaggtgcggaggggctctccggtgctgctgggctgggttgagcaagcctacgcagacaagtgtgtgtgtggaccatccgcacctccagcccccaccccaccctctttgtctcagcgtgttatgtgcaatgacctatttaaggtaaacccattccaactacagcagttcagggctgatccaagcactgcctccctcctgctctgtccaggtggtctggaccataaactcaacttgagagggaaggcttggggttgaggacttgtgatcagaaaaactgaagatggaagttttggccggtgctcattagacatgagtcctcactctgtgtcctgagcccgtgtcattcttccaacctccctgcccccacacacttatcccagacacaacaccatgtggtctggaggtcccagcccccaccctaaaaaggttatccctgagaactccaccagacttgggagcccaagtgcagtgcctggtgctgctcccatctgccgccccccttctctcctgcaattggtttgtactcactgggctgtgctctcccctgtttacccgatgtatggaaataaaggcccttttcctcctg

SEQ ID NO: 66750 - DNA, 5032 bp, Homo sapiens
  misc_feature (213)..(213): n is a, c, g, or t
aaaatacagtgtgtttccttgggagctgtttcatttgggatgatggagggagctcctgcacggcacagaaggaggttggccttgctgatctcagagccccttcccagcctactcacaaggctgttccccacaatgtgacccccatgctcactaccgctcggccttctttcccaggagaacatcgagctggcgtttgacgacttggaacccccnacggatgactctgtggctgctgtggaccaggcctcccatcagtccctggtccgctcgctggcccgcacagacgaggcgaggggcctgctctggctattggaagaggaggctctggtgccaggggccagtgaggacaccctcctggagcgccttttctcctattatggcccccaggaaggtgacaaaaaaggccaaagcccccttctgcacagcagcaaaccacaccactttctcctgggccacagccatggcaccaactgggtagagtacaatgtgactggctggctgaactacaccaagcagaacccagccacccagaatgccccccggctcctgcaggactcccagaaaaaaatcatcagcaacctgtttctgggccgcgcaggcagtgccacggtgctctctggctccatcgcgggcctggagggcggctcgcagctggcactgcgccgggccaccagcatgcggaaaacctttaccacaggcatggcggctgtcaaaaagaagtcactgtgcatccagatgaagctacaggtggacgccctcatcgacaccatcaagaagtcaaagctgcattttgtgcactgcttcctgcctgtagctgagggctgggctggggagccccgttccgcctcctcccgccgagtcagcagcagcagtgagctggacctgccctcgggagaccactgcgaggctgggctcctgcagctcgacgtgcccctgctccgcacccagctccgcggctcccgcctgctcgatgccatgcgcatgtaccgccaaggttaccctgaccacatggtgttttccgagttccgccgccgctttgatgtcctggccccgcacctgaccaagaaacacgggcgtaactacatcgtggtggatgaaaggcgggcagtggaggagctgctggagtgcttggatctggagaagagcagctgctgcatgggcctgagccgggtgttcttccgggcgggcaccttggcacggctggaggagcagcgggatgaacaaaccagcaggaacctaaccctgttccaagcagcctgcaggggctacctggcccgccagcacttcaagaagagaaagatccaggacctggccattcgctgtgtacagaagaacatcaagaagaacaaaggggtgaaggactggccctggtggaagctttttaccacagtgaggcccctcatcgaagtacagctgtcagaggagcagatccggaacaaagacgaggagatccagcagctgcggagcaagctcgagaaggcggagaaggagaggaacgagctgcggctcaacagtgaccggctggagagccggatctcagagctgacatcggagctgacagatgagcgtaacacaggagagtccgcctcccagctgctggacgcggagacagcagagaggctccgggctgagaaggagatgaaggaactgcagacccagtacgatgcactgaagaagcagatggaggttatggaaatggaggtgatggaggcccgtctcatccgggcagcggagatcaacggggaagtggatgatgatgatgcaggtggcgagtggcggctgaagtatgagcgggctgtgcgggaggtggacttcaccaagaaacggctccagcaggagtttgaggacaagctggaggtggagcagcagaacaagaggcagctggaacggcggctcggggacctgcaggcagatagtgaggagagtcagcgggctctgcagcagctcaagaagaagtgccagcgactgacggctgagctgcaagacaccaagctgcacctggagggccagcaggtccgcaaccacgaactggagaagaagcagaggaggtttgacagtgagctctcgcaggcgcatgaggaggcccagcgggagaagctgcagcgggagaagctgcagcgggagaaggacatgctcctcgctgaggctttcagcctgaagcagcaactagaggaaaaagacatggacattgcagggttcacccagaaggttgtgtctctagaggcagagctccaggacatttcttcccaagagtccaaggatgaggcttctctggccaaggtcaagaaacagctccgggacctggaggccaaagtcaaggatcaggaagaagagctggatgagcaggcagggaccatccagatgctggaacaggccaagctgcgtctggagatggagatggagcggatgagacagacccattctaaggagatggagagtcgggatgaggaggtggaggaggcccggcagtcgtgtcagaagaagttaaaacagatggaggtgcagctagaggaagagtatgaggacaagcagaaggttctgcgagagaagcgggagctggagggcaagctcgccaccctcagcgaccaggtgaaccggcgggactttgagtcagagaagcggctgcggaaggacctgaagcgcaccaaggccctgctggcagatgcccagctcatgctggaccacctgaagaacagtgctcccagcaagcgagagattgcccagctcaagaaccagctggaggagtcagagttcacctgtgcggcagccgtgaaagcacggaaagcaatggaggtggagatcgaagacctgcacctgcagattgatgacatcgccaaagccaagacagcgctggaggagcagctgagccgccttcagcgtgagaagaatgagatccagaaccggctggaggaagatcaggaagacatgaacgaattgatgaagaagcacaaggctgccgtggctcaggcttcccgggacctggctcagataaatgatctccaagctcagctagaagaagccaacaaagagaagcaggagctgcaggagaagctacaagccctccagagccaggtggagttcctggagcagtccatggtggacaagtccctggtgagcaggcaggaagctaagatacgggagctggagacacgcctggagtttgaaaggacgcaagtgaaacggctggagagcctggctagccgtctcaaggaaaacatggagaagctgactgaggagcgggatcagcgcattgcagccgagaaccgggagaaggaacagaacaagcggctacagaggcagctccgggacaccaaggaggagatgggcgagcttgccaggaaggaggccgaggcgagccgcaagaagcacgaactggagatggatctagaaagcctggaggctgctaaccagagcctgcaggctgacctaaagttggcattcaagcgcatcggggacctgcaggctgccattgaggatgagatggagagtgatgagaatgaggacctcatcaacagtgagggagactctgatgtggactcggagctggaggaccgtgttgacggggtcaagtcctggttgtcaaaaaacaagggaccttccaaggcagcttctgatgatggcagcttaaagagttccagccccaccagctactggaagtcccttgcccctgatcggtcagatgatgagcacgaccctctcgacaacacctccagaccgcgatactcccacagttatctgagtgacagcgacacagaggccaagctgacggagactaacgcatagcccaggggagtggttggcagccctctcaccccagggcctgtggctgcctgggcacctctcccaggaagtggtggggcaccggtctcccccacccgactgctgatctgcatgggaaacaccctgaccttcttctgtcaggggcactttccaggctatgggtgtctgatgtctccacgtggaagaggtgggggaaagaggagtttctgaagagaactttttgctcctctgtctcaaaatgccagactcttggcttctaccctgtgtcaccgtgggcagtggcaggtggcctggcactgcatggagccagcacgttgacctccctctcagctccctgctcagggacggtggacaggttgcctactgggacactctaggttgctgggtccatggggaggattgggggaggagaagcagtgccttccctctcgtgtggggtgggggctctctcttcttggtgcctgctgtctttctactttttaatttaaatacccaacctctccatcacagctgcatccctgagagtgggagggggctgtagtggtagctggggctcccaagaacgactcgggaatgtcatctccatcttcacccttcagagagcagtcctttctctgtgcagctggagacgctggtgaggagagccgggtccaggttcttaagaatgaggtgcggaggggctctccggtgctgctgggctgggttgagcaagcctacgcagacaagtgtgtgtgtggaccatccgcacctccagcccccaccccaccctctttgtctcagcgtgttatgtgcaatgacctatttaaggtaaacccattccaactacagcagttcagggctgatccaagcactgcctccctcctgctctgtccaggtggtctggaccataaactcaacttgagagggaaggcttggggttgaggacttgtgatcagaaaaactgaagatggaagttttggccggtgctcattagacatgagtcctcactctgtgtcctgagcccgtgtcattcttccaacctccctgcccccacacacttatcccagacacaacaccatgtggtctggaggtcccagcccccaccctaaaaaggttatccctgagaactccaccagacttgggagcccaagtgcagtgcctggtgctgctcccatctgccgccccccttctctcctgcaattggtttgtactcactgggctgtgctctcccctgtttacccgatgtatggaaataaaggcccttttcctcctg

SEQ ID NO: 66751 - DNA, 3062 bp, Homo sapiens
tgggtttgctcgaatctaagaaggatcccctatcatgtatggtacgaaaccacgaactggtagaagaagcagagagaggtttgacagtgagctctcgcaggcgcatgaggaggcccagcgggagaagctgcagcgggagaagctgcagcgggagaaggacatgctcctcgctgaggctttcagcctgaagcagcaactagaggaaaaagacatggacattgcagggttcacccagaaggttgtgtctctagaggcagagctccaggacatttcttcccaagagtccaaggatgaggcttctctggccaaggtcaagaaacagctccgggacctggaggccaaagtcaaggatcaggaagaagagctggatgagcaggcagggaccatccagatgctggaacaggccaagctgcgtctggagatggagatggagcggatgagacagacccattctaaggagatggagagtcgggatgaggaggtggaggaggcccggcagtcgtgtcagaagaagttaaaacagatggaggtgcagctagaggaagagtatgaggacaagcagaaggttctgcgagagaagcgggagctggagggcaagctcgccaccctcagcgaccaggtgaaccggcgggactttgagtcagagaagcggctgcggaaggacctgaagcgcaccaaggccctgctggcagatgcccagctcatgctggaccacctgaagaacagtgctcccagcaagcgagagattgcccagctcaagaaccagctggaggagtcagagttcacctgtgcggcagccgtgaaagcacggaaagcaatggaggtggagatcgaagacctgcacctgcagattgatgacatcgccaaagccaagacagcgctggaggagcagctgagccgccttcagcgtgagaagaatgagatccagaaccggctggaggaagatcaggaagacatgaacgaattgatgaagaagcacaaggctgccgtggctcaggcttcccgggacctggctcagataaatgatctccaagctcagctagaagaagccaacaaagagaagcaggagctgcaggagaagctacaagccctccagagccaggtggagttcctggagcagtccatggtggacaagtccctggtgagcaggcaggaagctaagatacgggagctggagacacgcctggagtttgaaaggacgcaagtgaaacggctggagagcctggctagccgtctcaaggaaaacatggagaagctgactgaggagcgggatcagcgcattgcagccgagaaccgggagaaggaacagaacaagcggctacagaggcagctccgggacaccaaggaggagatgggcgagcttgccaggaaggaggccgaggcgagccgcaagaagcacgaactggagatggatctagaaagcctggaggctgctaaccagagcctgcaggctgacctaaagttggcattcaagcgcatcggggacctgcaggctgccattgaggatgagatggagagtgatgagaatgaggacctcatcaacagtgagggagactctgatgtggactcggagctggaggaccgtgttgacggggtcaagtcctggttgtcaaaaaacaagggaccttccaaggcagcttctgatgatggcagcttaaagagttccagccccaccagctactggaagtcccttgcccctgatcggtcagatgatgagcacgaccctctcgacaacacctccagaccgcgatactcccacagttatctgagtgacagcgacacagaggccaagctgacggagactaacgcatagcccaggggagtggttggcagccctctcaccccagggcctgtggctgcctgggcacctctcccaggaagtggtggggcaccggtctcccccacccgactgctgatctgcatgggaaacaccctgaccttcttctgtcaggggcactttccaggctatgggtgtctgatgtctccacgtggaagaggtgggggaaagaggagtttctgaagagaactttttgctcctctgtctcaaaatgccagactcttggcttctaccctgtgtcaccgtgggcagtggcaggtggcctggcactgcatggagccagcacgttgacctccctctcagctccctgctcagggacggtggacaggttgcctactgggacactctaggttgctgggtccatggggaggattgggggaggagaagcagtgccttccctctcgtgtggggtgggggctctctcttcttggtgcctgctgtctttctactttttaatttaaatacccaacctctccatcacagctgcatccctgagagtgggagggggctgtagtggtagctggggctcccaagaacgactcgggaatgtcatctccatcttcacccttcagagagcagtcctttctctgtgcagctggagacgctggtgaggagagccgggtccaggttcttaagaatgaggtgcggaggggctctccggtgctgctgggctgggttgagcaagcctacgcagacaagtgtgtgtgtggaccatccgcacctccagcccccaccccaccctctttgtctcagcgtgttatgtgcaatgacctatttaaggtaaacccattccaactacagcagttcagggctgatccaagcactgcctccctcctgctctgtccaggtggtctggaccataaactcaacttgagagggaaggcttggggttgaggacttgtgatcagaaaaactgaagatggaagttttggccggtgctcattagacatgagtcctcactctgtgtcctgagcccgtgtcattcttccaacctccctgcccccacacacttatcccagacacaacaccatgtggtctggaggtcccagcccccaccctaaaaaggttatccctgagaactccaccagacttgggagcccaagtgcagtgcctggtgctgctcccatctgccgccccccttctctcctgcaattggtttgtactcactgggctgtgctctcccctgtttacccgatgtatggaaataaaggcccttttcctcctg

SEQ ID NO: 66752 - DNA, 2267 bp, Homo sapiens
gatcatggtagagcattgcaggttccaagatcgaaaaccgtggacctgtagaattgatgactatctgcctcaagccaagacagcgctggaggagcagctgagccgccttcagcgtgagaagaatgagatccagaaccggctggaggaagatcaggaagacatgaacgaattgatgaagaagcacaaggctgccgtggctcaggcttcccgggacctggctcagataaatgatctccaagctcagctagaagaagccaacaaagagaagcaggagctgcaggagaagctacaagccctccagagccaggtggagttcctggagcagtccatggtggacaagtccctggtgagcaggcaggaagctaagatacgggagctggagacacgcctggagtttgaaaggacgcaagtgaaacggctggagagcctggctagccgtctcaaggaaaacatggagaagctgactgaggagcgggatcagcgcattgcagccgagaaccgggagaaggaacagaacaagcggctacagaggcagctccgggacaccaaggaggagatgggcgagcttgccaggaaggaggccgaggcgagccgcaagaagcacgaactggagatggatctagaaagcctggaggctgctaaccagagcctgcaggctgacctaaagttggcattcaagcgcatcggggacctgcaggctgccattgaggatgagatggagagtgatgagaatgaggacctcatcaacagtgagggagactctgatgtggactcggagctggaggaccgtgttgacggggtcaagtcctggttgtcaaaaaacaagggaccttccaaggcagcttctgatgatggcagcttaaagagttccagccccaccagctactggaagtcccttgcccctgatcggtcagatgatgagcacgaccctctcgacaacacctccagaccgcgatactcccacagttatctgagtgacagcgacacagaggccaagctgacggagactaacgcatagcccaggggagtggttggcagccctctcaccccagggcctgtggctgcctgggcacctctcccaggaagtggtggggcaccggtctcccccacccgactgctgatctgcatgggaaacaccctgaccttcttctgtcaggggcactttccaggctatgggtgtctgatgtctccacgtggaagaggtgggggaaagaggagtttctgaagagaactttttgctcctctgtctcaaaatgccagactcttggcttctaccctgtgtcaccgtgggcagtggcaggtggcctggcactgcatggagccagcacgttgacctccctctcagctccctgctcagggacggtggacaggttgcctactgggacactctaggttgctgggtccatggggaggattgggggaggagaagcagtgccttccctctcgtgtggggtgggggctctctcttcttggtgcctgctgtctttctactttttaatttaaatacccaacctctccatcacagctgcatccctgagagtgggagggggctgtagtggtagctggggctcccaagaacgactcgggaatgtcatctccatcttcacccttcagagagcagtcctttctctgtgcagctggagacgctggtgaggagagccgggtccaggttcttaagaatgaggtgcggaggggctctccggtgctgctgggctgggttgagcaagcctacgcagacaagtgtgtgtgtggaccatccgcacctccagcccccaccccaccctctttgtctcagcgtgttatgtgcaatgacctatttaaggtaaacccattccaactacagcagttcagggctgatccaagcactgcctccctcctgctctgtccaggtggtctggaccataaactcaacttgagagggaaggcttggggttgaggacttgtgatcagaaaaactgaagatggaagttttggccggtgctcattagacatgagtcctcactctgtgtcctgagcccgtgtcattcttccaacctccctgcccccacacacttatcccagacacaacaccatgtggtctggaggtcccagcccccaccctaaaaaggttatccctgagaactccaccagacttgggagcccaagtgcagtgcctggtgctgctcccatctgccgccccccttctctcctgcaattggtttgtactcactgggctgtgctctcccctgtttacccgatgtatggaaataaaggcccttttcctcctg

SEQ ID NO: 66753 - DNA, 6622 bp, Homo sapiens
  misc_feature (1676)..(1676): n is a, c, g, or t
caacggtgctgggctagaccaagctctgcctgaaccttagtttcagccctggagcccttgagagagctctgctgttggttagtaattaccgtgaaagtattcagcttcttcattacaaggacaggcgaaaacagaagaacagattgcagcagaagaggcctggaatgagacggagaaggtgtggctggtccatagggacggcttctcactggccagtcaactcaaatctgaggagctcaacttgcctgaggggaaggtgcgtgtgaagctggaccacgatggggccatcctggatgtggatgaggatgacgttgagaaggctaatgctccctcctgcgaccgtctggaggatctggcctcactggtgtacctcaatgagtccagcgtcctgcacaccttgcgccagcgctatggcgctagcctgctgcacacgtatgctggccccagcctgctggttcttggcccccgtggggcccctgctgtgtactctgagaaggtgatgcacatgttcaagggttgtcggcgggaggacatggcaccccacatctatgcagtggcccagaccgcatacagggcgatgctgatgagccgtcaggatcagtcaatcatcctcctgggcagtagtggcagtggcaagaccaccagctgccagcatctggtgcagtacctggccaccatcgcgggcatcagcgggaacaaggtgttttctgtggagaagtggcaggctctgtacaccctcctggaagcctttgggaacagccccaccatcattaatggcaatgccacccgcttctcccagatcctctccctggactttgaccaagctggccaggtggcctcagcctccattcagacaatgcttctggagaagctgcgtgtggctcggcgcccagccagtgaagccacattcaacgtcttctactacctgctggcctgtggggatggcaccctcaggacagagctccacctcaaccacttggcagagaacaatgtgtttgggattgtgccactggccaagcctgaggaaaagcagaaggcagctcagcagtttagtaagctgcaggcggccatgaaggtgctgggcatctcccccgatgaacagaaggcctgctggttcattctggctgccatctaccacctgggggctgcgggagccaccaaaggaagctgctgaagctgggcgcaagcagtttgcccgccatgagtgggcccagaaggctgcgtacctactgggctgcagcctggaggagctgtcctcagccatcttcaagcaccagcacaagggtggcaccctgcagcgctccacctccttccgccagggccccgaggagagtggcctgggagatgggacaggcccgaaactgagtgcactggagtgccttgagggcatggcggccggcctctacagcgagctcttcacccttctcgtctccctggtgaatagggctctcaagtccagccagcactcactctgctccatgatgattgtcgacaccccgggcttccagaaccctgagcagggtgggtcagcccgcggagcctcctttgaggagctgtgccacaactacacccaagaccggctgcagaggctcttccacgagcgcaccttcgtgcaggagttggaaagatacaaggaggagaacatcgagctggcgtttgacgacttggaacccccnacggatgactctgtggctgctgtggaccaggcctcccatcagtccctggtccgctcgctggcccgcacagacgaggcgaggggcctgctctggctattggaagaggaggctctggtgccaggggccagtgaggacaccctcctggagcgccttttctcctattatggcccccaggaaggtgacaaaaaaggccaaagcccccttctgcacagcagcaaaccacaccactttctcctgggccacagccatggcaccaactgggtagagtacaatgtgactggctggctgaactacaccaagcagaacccagccacccagaatgccccccggctcctgcaggactcccagaaaaaaatcatcagcaacctgtttctgggccgcgcaggcagtgccacggtgctctctggctccatcgcgggcctggagggcggctcgcagctggcactgcgccgggccaccagcatgcggaaaacctttaccacaggcatggcggctgtcaaaaagaagtcactgtgcatccagatgaagctacaggtggacgccctcatcgacaccatcaagaagtcaaagctgcattttgtgcactgcttcctgcctgtagctgagggctgggctggggagccccgttccgcctcctcccgccgagtcagcagcagcagtgagctggacctgccctcgggagaccactgcgaggctgggctcctgcagctcgacgtgcccctgctccgcacccagctccgcggctcccgcctgctcgatgccatgcgcatgtaccgccaaggttaccctgaccacatggtgttttccgagttccgccgccgctttgatgtcctggccccgcacctgaccaagaaacacgggcgtaactacatcgtggtggatgaaaggcgggcagtggaggagctgctggagtgcttggatctggagaagagcagctgctgcatgggcctgagccgggtgttcttccgggcgggcaccttggcacggctggaggagcagcgggatgaacaaaccagcaggaacctaaccctgttccaagcagcctgcaggggctacctggcccgccagcacttcaagaagagaaagatccaggacctggccattcgctgtgtacagaagaacatcaagaagaacaaaggggtgaaggactggccctggtggaagctttttaccacagtgaggcccctcatcgaagtacagctgtcagaggagcagatccggaacaaagacgaggagatccagcagctgcggagcaagctcgagaaggcggagaaggagaggaacgagctgcggctcaacagtgaccggctggagagccggatctcagagctgacatcggagctgacagatgagcgtaacacaggagagtccgcctcccagctgctggacgcggagacagcagagaggctccgggctgagaaggagatgaaggaactgcagacccagtacgatgcactgaagaagcagatggaggttatggaaatggaggtgatggaggcccgtctcatccgggcagcggagatcaacggggaagtggatgatgatgatgcaggtggcgagtggcggctgaagtatgagcgggctgtgcgggaggtggacttcaccaagaaacggctccagcaggagtttgaggacaagctggaggtggagcagcagaacaagaggcagctggaacggcggctcggggacctgcaggcagatagtgaggagagtcagcgggctctgcagcagctcaagaagaagtgccagcgactgacggctgagctgcaagacaccaagctgcacctggagggccagcaggtccgcaaccacgaactggagaagaagcagaggaggtttgacagtgagctctcgcaggcgcatgaggaggcccagcgggagaagctgcagcgggagaagctgcagcgggagaaggacatgctcctcgctgaggctttcagcctgaagcagcaactagaggaaaaagacatggacattgcagggttcacccagaaggttgtgtctctagaggcagagctccaggacatttcttcccaagagtccaaggatgaggcttctctggccaaggtcaagaaacagctccgggacctggaggccaaagtcaaggatcaggaagaagagctggatgagcaggcagggaccatccagatgctggaacaggccaagctgcgtctggagatggagatggagcggatgagacagacccattctaaggagatggagagtcgggatgaggaggtggaggaggcccggcagtcgtgtcagaagaagttaaaacagatggaggtgcagctagaggaagagtatgaggacaagcagaaggttctgcgagagaagcgggagctggagggcaagctcgccaccctcagcgaccaggtgaaccggcgggactttgagtcagagaagcggctgcggaaggacctgaagcgcaccaaggccctgctggcagatgcccagctcatgctggaccacctgaagaacagtgctcccagcaagcgagagattgcccagctcaagaaccagctggaggagtcagagttcacctgtgcggcagccgtgaaagcacggaaagcaatggaggtggagatcgaagacctgcacctgcagattgatgacatcgccaaagccaagacagcgctggaggagcagctgagccgccttcagcgtgagaagaatgagatccagaaccggctggaggaagatcaggaagacatgaacgaattgatgaagaagcacaaggctgccgtggctcaggcttcccgggacctggctcagataaatgatctccaagctcagctagaagaagccaacaaagagaagcaggagctgcaggagaagctacaagccctccagagccaggtggagttcctggagcagtccatggtggacaagtccctggtgagcaggcaggaagctaagatacgggagctggagacacgcctggagtttgaaaggacgcaagtgaaacggctggagagcctggctagccgtctcaaggaaaacatggagaagctgactgaggagcgggatcagcgcattgcagccgagaaccgggagaaggaacagaacaagcggctacagaggcagctccgggacaccaaggaggagatgggcgagcttgccaggaaggaggccgaggcgagccgcaagaagcacgaactggagatggatctagaaagcctggaggctgctaaccagagcctgcaggctgacctaaagttggcattcaagcgcatcggggacctgcaggctgccattgaggatgagatggagagtgatgagaatgaggacctcatcaacagtttgcaggacatggtgacaaagtatcagaaaagaaagaataaacttgagggagactctgatgtggactcggagctggaggaccgtgttgacggggtcaagtcctggttgtcaaaaaacaagggaccttccaaggcagcttctgatgatggcagcttaaagagttccagccccaccagctactggaagtcccttgcccctgatcggtcagatgatgagcacgaccctctcgacaacacctccagaccgcgatactcccacagttatctgagtgacagcgacacagaggccaagctgacggagactaacgcatagcccaggggagtggttggcagccctctcaccccagggcctgtggctgcctgggcacctctcccaggaagtggtggggcaccggtctcccccacccgactgctgatctgcatgggaaacaccctgaccttcttctgtcaggggcactttccaggctatgggtgtctgatgtctccacgtggaagaggtgggggaaagaggagtttctgaagagaactttttgctcctctgtctcaaaatgccagactcttggcttctaccctgtgtcaccgtgggcagtggcaggtggcctggcactgcatggagccagcacgttgacctccctctcagctccctgctcagggacggtggacaggttgcctactgggacactctaggttgctgggtccatggggaggattgggggaggagaagcagtgccttccctctcgtgtggggtgggggctctctcttcttggtgcctgctgtctttctactttttaatttaaatacccaacctctccatcacagctgcatccctgagagtgggagggggctgtagtggtagctggggctcccaagaacgactcgggaatgtcatctccatcttcacccttcagagagcagtcctttctctgtgcagctggagacgctggtgaggagagccgggtccaggttcttaagaatgaggtgcggaggggctctccggtgctgctgggctgggttgagcaagcctacgcagacaagtgtgtgtgtggaccatccgcacctccagcccccaccccaccctctttgtctcagcgtgttatgtgcaatgacctatttaaggtaaacccattccaactacagcagttcagggctgatccaagcactgcctccctcctgctctgtccaggtggtctggaccataaactcaacttgagagggaaggcttggggttgaggacttgtgatcagaaaaactgaagatggaagttttggccggtgctcattagacatgagtcctcactctgtgtcctgagcccgtgtcattcttccaacctccctgcccccacacacttatcccagacacaacaccatgtggtctggaggtcccagcccccaccctaaaaaggttatccctgagaactccaccagacttgggagcccaagtgcagtgcctggtgctgctcccatctgccgccccccttctctcctgcaattggtttgtactcactgggctgtgctctcccctgtttacccgatgtatggaaataaaggcccttttcctcctgaaaaaaaaaaaaaaaaaaaaaagaagaaaacaaagaaaaaaaaaaaaaaaacaaaaaaaaaaaaaaaaaaaaaaaaaaaaag

SEQ ID NO: 66754 - DNA, 1575 bp, Homo sapiens
agtctccttcctcttagcattttgagtatcttctaagtaagccaaggaaggtttttacttaacaatgtttggcttttggggagtgctctgacgcagctttgtgggcctccagaaccaaaggcgtgcgtgcttaatggtaggagtgtcatttgtccctaaccttattcctcggtccctgcagccccaccagctactggaagtcccttgcccctgatcggtcagatgatgagcacgaccctctcgacaacacctccagaccgcgatactcccacagttatctgagtgacagcgacacagaggccaagctgacggagactaacgcatagcccaggggagtggttggcagccctctcaccccagggcctgtggctgcctgggcacctctcccaggaagtggtggggcaccggtctcccccacccgactgctgatctgcatgggaaacaccctgaccttcttctgtcaggggcactttccaggctatgggtgtctgatgtctccacgtggaagaggtgggggaaagaggagtttctgaagagaactttttgctcctctgtctcaaaatgccagactcttggcttctaccctgtgtcaccgtgggcagtggcaggtggcctggcactgcatggagccagcacgttgacctccctctcagctccctgctcagggacggtggacaggttgcctactgggacactctaggttgctgggtccatggggaggattgggggaggagaagcagtgccttccctctcgtgtggggtgggggctctctcttcttggtgcctgctgtctttctactttttaatttaaatacccaacctctccatcacagctgcatccctgagagtgggagggggctgtagtggtagctggggctcccaagaacgactcgggaatgtcatctccatcttcacccttcagagagcagtcctttctctgtgcagctggagacgctggtgaggagagccgggtccaggttcttaagaatgaggtgcggaggggctctccggtgctgctgggctgggttgagcaagcctacgcagacaagtgtgtgtgtggaccatccgcacctccagcccccaccccaccctctttgtctcagcgtgttatgtgcaatgacctatttaaggtaaacccattccaactacagcagttcagggctgatccaagcactgcctccctcctgctctgtccaggtggtctggaccataaactcaacttgagagggaaggcttggggttgaggacttgtgatcagaaaaactgaagatggaagttttggccggtgctcattagacatgagtcctcactctgtgtcctgagcccgtgtcattcttccaacctccctgcccccacacacttatcccagacacaacaccatgtggtctggaggtcccagcccccaccctaaaaaggttatccctgagaactccaccagacttgggagcccaagtgcagtgcctggtgctgctcccatctgccgccccccttctctcctgcaattggtttgtactcactgggctgtgctctcccctgtttacccgatgtatggaaataaaggcccttttcctcctg

SEQ ID NO: 66755 - DNA, 1430 bp, Homo sapiens
attaggcgcgttctgcgtgagaagaatgagatccagccccaccagctactggaagtcccttgcccctgatcggtcagatgatgagcacgaccctctcgacaacacctccagaccgcgatactcccacagttatctgagtgacagcgacacagaggccaagctgacggagactaacgcatagcccaggggagtggttggcagccctctcaccccagggcctgtggctgcctgggcacctctcccaggaagtggtggggcaccggtctcccccacccgactgctgatctgcatgggaaacaccctgaccttcttctgtcaggggcactttccaggctatgggtgtctgatgtctccacgtggaagaggtgggggaaagaggagtttctgaagagaactttttgctcctctgtctcaaaatgccagactcttggcttctaccctgtgtcaccgtgggcagtggcaggtggcctggcactgcatggagccagcacgttgacctccctctcagctccctgctcagggacggtggacaggttgcctactgggacactctaggttgctgggtccatggggaggattgggggaggagaagcagtgccttccctctcgtgtggggtgggggctctctcttcttggtgcctgctgtctttctactttttaatttaaatacccaacctctccatcacagctgcatccctgagagtgggagggggctgtagtggtagctggggctcccaagaacgactcgggaatgtcatctccatcttcacccttcagagagcagtcctttctctgtgcagctggagacgctggtgaggagagccgggtccaggttcttaagaatgaggtgcggaggggctctccggtgctgctgggctgggttgagcaagcctacgcagacaagtgtgtgtgtggaccatccgcacctccagcccccaccccaccctctttgtctcagcgtgttatgtgcaatgacctatttaaggtaaacccattccaactacagcagttcagggctgatccaagcactgcctccctcctgctctgtccaggtggtctggaccataaactcaacttgagagggaaggcttggggttgaggacttgtgatcagaaaaactgaagatggaagttttggccggtgctcattagacatgagtcctcactctgtgtcctgagcccgtgtcattcttccaacctccctgcccccacacacttatcccagacacaacaccatgtggtctggaggtcccagcccccaccctaaaaaggttatccctgagaactccaccagacttgggagcccaagtgcagtgcctggtgctgctcccatctgccgccccccttctctcctgcaattggtttgtactcactgggctgtgctctcccctgtttacccgatgtatggaaataaaggcccttttcctcctg

SEQ ID NO: 66756 - DNA, 5656 bp, Homo sapiens
  misc_feature (1676)..(1676): n is a, c, g, or t
caacggtgctgggctagaccaagctctgcctgaaccttagtttcagccctggagcccttgagagagctctgctgttggttagtaattaccgtgaaagtattcagcttcttcattacaaggacaggcgaaaacagaagaacagattgcagcagaagaggcctggaatgagacggagaaggtgtggctggtccatagggacggcttctcactggccagtcaactcaaatctgaggagctcaacttgcctgaggggaaggtgcgtgtgaagctggaccacgatggggccatcctggatgtggatgaggatgacgttgagaaggctaatgctccctcctgcgaccgtctggaggatctggcctcactggtgtacctcaatgagtccagcgtcctgcacaccttgcgccagcgctatggcgctagcctgctgcacacgtatgctggccccagcctgctggttcttggcccccgtggggcccctgctgtgtactctgagaaggtgatgcacatgttcaagggttgtcggcgggaggacatggcaccccacatctatgcagtggcccagaccgcatacagggcgatgctgatgagccgtcaggatcagtcaatcatcctcctgggcagtagtggcagtggcaagaccaccagctgccagcatctggtgcagtacctggccaccatcgcgggcatcagcgggaacaaggtgttttctgtggagaagtggcaggctctgtacaccctcctggaagcctttgggaacagccccaccatcattaatggcaatgccacccgcttctcccagatcctctccctggactttgaccaagctggccaggtggcctcagcctccattcagacaatgcttctggagaagctgcgtgtggctcggcgcccagccagtgaagccacattcaacgtcttctactacctgctggcctgtggggatggcaccctcaggacagagctccacctcaaccacttggcagagaacaatgtgtttgggattgtgccactggccaagcctgaggaaaagcagaaggcagctcagcagtttagtaagctgcaggcggccatgaaggtgctgggcatctcccccgatgaacagaaggcctgctggttcattctggctgccatctaccacctgggggctgcgggagccaccaaaggaagctgctgaagctgggcgcaagcagtttgcccgccatgagtgggcccagaaggctgcgtacctactgggctgcagcctggaggagctgtcctcagccatcttcaagcaccagcacaagggtggcaccctgcagcgctccacctccttccgccagggccccgaggagagtggcctgggagatgggacaggcccgaaactgagtgcactggagtgccttgagggcatggcggccggcctctacagcgagctcttcacccttctcgtctccctggtgaatagggctctcaagtccagccagcactcactctgctccatgatgattgtcgacaccccgggcttccagaaccctgagcagggtgggtcagcccgcggagcctcctttgaggagctgtgccacaactacacccaagaccggctgcagaggctcttccacgagcgcaccttcgtgcaggagttggaaagatacaaggaggagaacatcgagctggcgtttgacgacttggaacccccnacggatgactctgtggctgctgtggaccaggcctcccatcagtccctggtccgctcgctggcccgcacagacgaggcgaggggcctgctctggctattggaagaggaggctctggtgccaggggccagtgaggacaccctcctggagcgccttttctcctattatggcccccaggaaggtgacaaaaaaggccaaagcccccttctgcacagcagcaaaccacaccactttctcctgggccacagccatggcaccaactgggtagagtacaatgtgactggctggctgaactacaccaagcagaacccagccacccagaatgccccccggctcctgcaggactcccagaaaaaaatcatcagcaacctgtttctgggccgcgcaggcagtgccacggtgctctctggctccatcgcgggcctggagggcggctcgcagctggcactgcgccgggccaccagcatgcggaaaacctttaccacaggcatggcggctgtcaaaaagaagtcactgtgcatccagatgaagctacaggtggacgccctcatcgacaccatcaagaagtcaaagctgcattttgtgcactgcttcctgcctgtagctgagggctgggctggggagccccgttccgcctcctcccgccgagtcagcagcagcagtgagctggacctgccctcgggagaccactgcgaggctgggctcctgcagctcgacgtgcccctgctccgcacccagctccgcggctcccgcctgctcgatgccatgcgcatgtaccgccaaggttaccctgaccacatggtgttttccgagttccgccgccgctttgatgtcctggccccgcacctgaccaagaaacacgggcgtaactacatcgtggtggatgaaaggcgggcagtggaggagctgctggagtgcttggatctggagaagagcagctgctgcatgggcctgagccgggtgttcttccgggcgggcaccttggcacggctggaggagcagcgggatgaacaaaccagcaggaacctaaccctgttccaagcagcctgcaggggctacctggcccgccagcacttcaagaagagaaagatccaggacctggccattcgctgtgtacagaagaacatcaagaagaacaaaggggtgaaggactggccctggtggaagctttttaccacagtgaggcccctcatcgaagtacagctgtcagaggagcagatccggaacaaagacgaggagatccagcagctgcggagcaagctcgagaaggcggagaaggagaggaacgagctgcggctcaacagtgaccggctggagagccggatctcagagctgacatcggagctgacagatgagcgtaacacaggagagtccgcctcccagctgctggacgcggagacagcagagaggctccgggctgagaaggagatgaaggaactgcagacccagtacgatgcactgaagaagcagatggaggttatggaaatggaggtgatggaggcccgtctcatccgggcagcggagatcaacggggaagtggatgatgatgatgcaggtggcgagtggcggctgaagtatgagcgggctgtgcgggaggtggacttcaccaagaaacggctccagcaggagtttgaggacaagctggaggtggagcagcagaacaagaggcagctggaacggcggctcggggacctgcaggcagatagtgaggagagtcagcgggctctgcagcagctcaagaagaagtgccagcgactgacggctgagctgcaagacaccaagctgcacctggagggccagcaggtccgcaaccacgaactggagaagaagcagaggaggtttgacagtgagctctcgcaggcgcatgaggaggcccagcgggagaagctgcagcgggagaagctgcagcgggagaaggacatgctcctcgctgaggctttcagcctgaagcagcaactagaggaaaaagacatggacattgcagggttcacccagaaggttgtgtctctagaggcagagctccaggacatttcttcccaagagtccaaggatgaggcttctctggccaaggtcaagaaacagctccgggacctggaggccaaagtcaaggatcaggaagaagagctggatgagcaggcagggaccatccagatgctggaacaggccaagctgcgtctggagatggagatggagcggatgagacagacccattctaaggagatggagagtcgggatgaggaggtggaggaggcccggcagtcgtgtcagaagaagttaaaacagatggaggtgcagctagaggaagagtatgaggacaagcagaaggttctgcgagagaagcgggagctggagggcaagctcgccaccctcagcgaccaggtgaaccggcgggactttgagtcagagaagcggctgcggaaggacctgaagcgcaccaaggccctgctggcagatgcccagctcatgctggaccacctgaagaacagtgctcccagcaagcgagagattgcccagctcaagaaccagctggaggagtcagagttcacctgtgcggcagccgtgaaagcacggaaagcaatggaggtggagatcgaagacctgcacctgcagattgatgacatcgccaaagccaagacagcgctggaggagcagctgagccgccttcagcgtgagaagaatgagatccagaaccggctggaggaagatcaggaagacatgaacgaattgatgaagaagcacaaggctgccgtggctcaggcttcccgggacctggctcagataaatgatctccaagctcagctagaagaagccaacaaagagaagcaggagctgcaggagaagctacaagccctccagagccaggtggagttcctggagcagtccatggtggacaagtccctggtgagcaggcaggaagctaagatacgggagctggagacacgcctggagtttgaaaggacgcaagtgaaacggctggagagcctggctagccgtctcaaggaaaacatggagaagctgactgaggagcgggatcagcgcattgcagccgagaaccgggagaaggaacagaacaagcggctacagaggcagctccgggacaccaaggaggagatgggcgagcttgccaggaaggaggccgaggcgagccgcaagaagcacgaactggagatggatctagaaagcctggaggctgctaaccagagcctgcaggctgacctaaagttggcattcaagcgcatcggggacctgcaggctgccattgaggatgagatggagagtgatgagaatgaggacctcatcaacagtttgcaggacatggtgacaaagtatcagaaaagaaagaataaacttgagggagactctgatgtggactcggagctggaggaccgtgttgacggggtcaagtcctggttgtcaaaaaacaagggaccttccaaggcagcttctgatgatggcagcttaaagagttccagccccaccagctactggaagtcccttgcccctgatcggtcagatgatgagcacgaccctctcgacaacacctccagaccgcgatactcccacagttatctgagtgacagcgacacagaggccaagctgacggagactaacgcatagcccaggggagtggttggcagccctctcaccccagggcctgtggctgcctgggcacctctcccaggaagtggtggggcaccggtctcccccacccgactgctgatctgcatgggaaacaccctgaccttcttctgtcaggggcactttccaggctatgggtgtctgatgtctccacgtggaagaggtgggggaaagaggagtttctgaagagaactttttgctcctctgtctcaaaatgccagactcttggcttctacctgctcccatctgccgccccccttctctcctgcaattggtttgtactcactgggctgtgctctcccctgtttacccgatgtatggaaataaaggcccttttcctcctg

SEQ ID NO: 66757 - DNA, 4083 bp, Homo sapiens
  misc_feature (1676)..(1676): n is a, c, g, or t
caacggtgctgggctagaccaagctctgcctgaaccttagtttcagccctggagcccttgagagagctctgctgttggttagtaattaccgtgaaagtattcagcttcttcattacaaggacaggcgaaaacagaagaacagattgcagcagaagaggcctggaatgagacggagaaggtgtggctggtccatagggacggcttctcactggccagtcaactcaaatctgaggagctcaacttgcctgaggggaaggtgcgtgtgaagctggaccacgatggggccatcctggatgtggatgaggatgacgttgagaaggctaatgctccctcctgcgaccgtctggaggatctggcctcactggtgtacctcaatgagtccagcgtcctgcacaccttgcgccagcgctatggcgctagcctgctgcacacgtatgctggccccagcctgctggttcttggcccccgtggggcccctgctgtgtactctgagaaggtgatgcacatgttcaagggttgtcggcgggaggacatggcaccccacatctatgcagtggcccagaccgcatacagggcgatgctgatgagccgtcaggatcagtcaatcatcctcctgggcagtagtggcagtggcaagaccaccagctgccagcatctggtgcagtacctggccaccatcgcgggcatcagcgggaacaaggtgttttctgtggagaagtggcaggctctgtacaccctcctggaagcctttgggaacagccccaccatcattaatggcaatgccacccgcttctcccagatcctctccctggactttgaccaagctggccaggtggcctcagcctccattcagacaatgcttctggagaagctgcgtgtggctcggcgcccagccagtgaagccacattcaacgtcttctactacctgctggcctgtggggatggcaccctcaggacagagctccacctcaaccacttggcagagaacaatgtgtttgggattgtgccactggccaagcctgaggaaaagcagaaggcagctcagcagtttagtaagctgcaggcggccatgaaggtgctgggcatctcccccgatgaacagaaggcctgctggttcattctggctgccatctaccacctgggggctgcgggagccaccaaaggaagctgctgaagctgggcgcaagcagtttgcccgccatgagtgggcccagaaggctgcgtacctactgggctgcagcctggaggagctgtcctcagccatcttcaagcaccagcacaagggtggcaccctgcagcgctccacctccttccgccagggccccgaggagagtggcctgggagatgggacaggcccgaaactgagtgcactggagtgccttgagggcatggcggccggcctctacagcgagctcttcacccttctcgtctccctggtgaatagggctctcaagtccagccagcactcactctgctccatgatgattgtcgacaccccgggcttccagaaccctgagcagggtgggtcagcccgcggagcctcctttgaggagctgtgccacaactacacccaagaccggctgcagaggctcttccacgagcgcaccttcgtgcaggagttggaaagatacaaggaggagaacatcgagctggcgtttgacgacttggaacccccnacggatgactctgtggctgctgtggaccaggcctcccatcagtccctggtccgctcgctggcccgcacagacgaggcgaggggcctgctctggctattggaagaggaggctctggtgccaggggccagtgaggacaccctcctggagcgccttttctcctattatggcccccaggaaggtgacaaaaaaggccaaagcccccttctgcacagcagcaaaccacaccactttctcctgggccacagccatggcaccaactgggtagagtacaatgtgactggctggctgaactacaccaagcagaacccagccacccagaatgccccccggctcctgcaggactcccagaaaaaaatcatcagcaacctgtttctgggccgcgcaggcagtgccacggtgctctctggctccatcgcgggcctggagggcggctcgcagctggcactgcgccgggccaccagcatgcggaaaacctttaccacaggcatggcggctgtcaaaaagaagtcactgtgcatccagatgaagctacaggtggacgccctcatcgacaccatcaagaagtcaaagctgcattttgtgcactgcttcctgcctgtagctgagggctgggctggggagccccgttccgcctcctcccgccgagtcagcagcagcagtgagctggacctgccctcgggagaccactgcgaggctgggctcctgcagctcgacgtgcccctgctccgcacccagctccgcggctcccgcctgctcgatgccatgcgcatgtaccgccaaggttaccctgaccacatggtgttttccgagttccgccgccgctttgatgtcctggccccgcacctgaccaagaaacacgggcgtaactacatcgtggtggatgaaaggcgggcagtggaggagctgctggagtgcttggatctggagaagagcagctgctgcatgggcctgagccgggtgttcttccgggcgggcaccttggcacggctggaggagcagcgggatgaacaaaccagcaggaacctaaccctgttccaagcagcctgcaggggctacctggcccgccagcacttcaagaagagaaagatccaggacctggccattcgctgtgtacagaagaacatcaagaagaacaaaggggtgaaggactggccctggtggaagctttttaccacagtgaggcccctcatcgaagtacagctgtcagaggagcagatccggaacaaagacgaggagatccagcagctgcggagcaagctcgagaaggcggagaaggagaggaacgagctgcggctcaacagtgaccggctggagagccggatctcagagctgacatcggagctgacagatgagcgtaacacaggagagtccgcctcccagctgctggacgcggagacagcagagaggctccgggctgagaaggagatgaaggaactgcagacccagtacgatgcactgaagaagcagatggaggttatggaaatggaggtgatggaggcccgtctcatccgggcagcggagatcaacggggaagtggatgatgatgatgcaggtggcgagtggcggctgaagtatgagcgggctgtgcgggaggtggacttcaccaagaaacggctccagcaggagtttgaggacaagctggaggtggagcagcagaacaagaggcagctggaacggcggctcggggacctgcaggcagatagtgaggagagtcagcgggctctgcagcagctcaagaagaagtgccagcgactgacggctgagctgcaagacaccaagctgcacctggagggccagcaggtccgcaaccacgaactggagaagaagcagaggaggtttgacagtgagctctcgcaggcgcatgaggaggcccagcgggagaagctgcagcgggagaagctgcagcgggagaaggacatgctcctcgctgaggctttcagcctgaagcagcaactagaggaaaaagacatggacattgcagggttcacccagaaggttgtgtctctagaggcagagctccaggacatttcttcccaagagtccaaggatgaggcttctctggccaaggtcaagaaacagctccgggacctggaggccaaagtcaaggatcaggaagaagagctggatgagcaggcagggaccatccagatgctggaacaggccaagctgcgtctggagatggagatggagcggatgagacagacccattctaaggagatggagagtcgggatgaggaggtggaggaggcccggcagtcgtgtcagaagaagttaaagacatgatggaggtgtcagctatgaggaagaggaggcgaaaaaaaaaataaaaataataaagaaaataataataataaaataaaaaagagaagcaatacattaaagtaataaaaatggtaacaattactat

SEQ ID NO: 66758 - DNA, 3261 bp, Homo sapiens
  misc_feature (1676)..(1676): n is a, c, g, or t
caacggtgctgggctagaccaagctctgcctgaaccttagtttcagccctggagcccttgagagagctctgctgttggttagtaattaccgtgaaagtattcagcttcttcattacaaggacaggcgaaaacagaagaacagattgcagcagaagaggcctggaatgagacggagaaggtgtggctggtccatagggacggcttctcactggccagtcaactcaaatctgaggagctcaacttgcctgaggggaaggtgcgtgtgaagctggaccacgatggggccatcctggatgtggatgaggatgacgttgagaaggctaatgctccctcctgcgaccgtctggaggatctggcctcactggtgtacctcaatgagtccagcgtcctgcacaccttgcgccagcgctatggcgctagcctgctgcacacgtatgctggccccagcctgctggttcttggcccccgtggggcccctgctgtgtactctgagaaggtgatgcacatgttcaagggttgtcggcgggaggacatggcaccccacatctatgcagtggcccagaccgcatacagggcgatgctgatgagccgtcaggatcagtcaatcatcctcctgggcagtagtggcagtggcaagaccaccagctgccagcatctggtgcagtacctggccaccatcgcgggcatcagcgggaacaaggtgttttctgtggagaagtggcaggctctgtacaccctcctggaagcctttgggaacagccccaccatcattaatggcaatgccacccgcttctcccagatcctctccctggactttgaccaagctggccaggtggcctcagcctccattcagacaatgcttctggagaagctgcgtgtggctcggcgcccagccagtgaagccacattcaacgtcttctactacctgctggcctgtggggatggcaccctcaggacagagctccacctcaaccacttggcagagaacaatgtgtttgggattgtgccactggccaagcctgaggaaaagcagaaggcagctcagcagtttagtaagctgcaggcggccatgaaggtgctgggcatctcccccgatgaacagaaggcctgctggttcattctggctgccatctaccacctgggggctgcgggagccaccaaaggaagctgctgaagctgggcgcaagcagtttgcccgccatgagtgggcccagaaggctgcgtacctactgggctgcagcctggaggagctgtcctcagccatcttcaagcaccagcacaagggtggcaccctgcagcgctccacctccttccgccagggccccgaggagagtggcctgggagatgggacaggcccgaaactgagtgcactggagtgccttgagggcatggcggccggcctctacagcgagctcttcacccttctcgtctccctggtgaatagggctctcaagtccagccagcactcactctgctccatgatgattgtcgacaccccgggcttccagaaccctgagcagggtgggtcagcccgcggagcctcctttgaggagctgtgccacaactacacccaagaccggctgcagaggctcttccacgagcgcaccttcgtgcaggagttggaaagatacaaggaggagaacatcgagctggcgtttgacgacttggaacccccnacggatgactctgtggctgctgtggaccaggcctcccatcagtccctggtccgctcgctggcccgcacagacgaggcgaggggcctgctctggctattggaagaggaggctctggtgccaggggccagtgaggacaccctcctggagcgccttttctcctattatggcccccaggaaggtgacaaaaaaggccaaagcccccttctgcacagcagcaaaccacaccactttctcctgggccacagccatggcaccaactgggtagagtacaatgtgactggctggctgaactacaccaagcagaacccagccacccagaatgccccccggctcctgcaggactcccagaaaaaaatcatcagcaacctgtttctgggccgcgcaggcagtgccacggtgctctctggctccatcgcgggcctggagggcggctcgcagctggcactgcgccgggccaccagcatgcggaaaacctttaccacaggcatggcggctgtcaaaaagaagtcactgtgcatccagatgaagctacaggtggacgccctcatcgacaccatcaagaagtcaaagctgcattttgtgcactgcttcctgcctgtagctgagggctgggctggggagccccgttccgcctcctcccgccgagtcagcagcagcagtgagctggacctgccctcgggagaccactgcgaggctgggctcctgcagctcgacgtgcccctgctccgcacccagctccgcggctcccgcctgctcgatgccatgcgcatgtaccgccaaggttaccctgaccacatggtgttttccgagttccgccgccgctttgatgtcctggccccgcacctgaccaagaaacacgggcgtaactacatcgtggtggatgaaaggcgggcagtggaggagctgctggagtgcttggatctggagaagagcagctgctgcatgggcctgagccgggtgttcttccgggcgggcaccttggcacggctggaggagcagcgggatgaacaaaccagcaggaacctaaccctgttccaagcagcctgcaggggctacctggcccgccagcacttcaagaagagaaagatccaggacctggccattcgctgtgtacagaagaacatcaagaagaacaaaggggtgaaggactggccctggtggaagctttttaccacagtgaggcccctcatcgaagtacagctgtcagaggagcagatccggaacaaagacgaggagatccagcagctgcggagcaagctcgagaaggcggagaaggagaggaacgagctgcggctcaacagtgaccggctggagagccggatctcagagctgacatcggagctgacagatgagcgtaacacaggagagtccgcctcccagctgctggacgcggagacagcagagaggctccgggctgagaaggagatgaaggaactgcagacccagtacgatgcactgaagaagcaatgtggagcttaaggagaatggtggtagaagcgtcagtaaatctctgccattttagaacagaaatattctcatagtcttcagaaaggcctggaagtttgtgagggcagctcccgacgga

SEQ ID NO: 66759 - DNA, 3024 bp, Homo sapiens
tgcgccgggaagcgtcgcacagcgactgcatcaccatggagccgagggcaggtgtctccaaacaggacatacgtgaacaaatttggggctacatggaatcacaaaatttagctgactttccccgacctgttcatcacaggatacccaactttaaggggtcttatctggcttgccaaaacatcaaagacctagacgtttttgccagaacacaggaagttaaagtggaccctgataaaccactggaaggcgttcggctgctggtgctgcagagcaaaaaaacattgttggttccaacaccacgactgagaacgggattgtttaataagatcacaccaccccctggggcaactaaagacatcttgagaaaatgtgccacctctcagggtgtgaggaactacagtgtccccataggcttggactccagagtcctcgtggatttagttgtggtgggatccgtcgccgtttctgaaaaaggctggagaatcgggaagggagaaggctacgccgatctggaatatgccatgatggtatccatgggcgccgtcagcaaggagacgccggtggtcaccatcgtccacgactgccaggtcgtggacatccctgaagagcttgttgaggagcacgacatcactgtggactacatcctcactccaaccagagtcatcgccacaggctgcaagcgcccaaagccaatgggaatcacctggttcaagatcagcctggagatgatggagaaaatccccatactgaggagcctccgcgcccgagagcagcaggctgggaaggatgtcaccctccagggtgagcaccagcaccttccggaaccaggctgccagcagacagtgcccctgagtgttggcaggaggcccccggacacacccggaccagaaaccaattccatggaggcagcccctggctccccaccaggggagggtgccccgcttgcagccgatgtttacgttgggaacctcccccgggacgcccgtgtgagtgacctgaagagagccctgcgggaactcggctccgtgcccctgcggctcacctggcagggcccgcggcgcagagccttcctccattacccggactctgccgcagcccagcaggccgtctcctgcttgcagggcctgcgcctgggcaccgacaccctgagggtggcgctggccaggcagcagagggacaagtgacctcgtggacagccacggagctcactgcagactcgccatccccgtcccctgccgctccggttccgatggcactcgagaggcctgcgtggcaagacgtgtcggagccaccgcctgagctgctcgggtctcaattcttctcagaagtcaccgctcagtgaacgcccaggccctcctgtgagtggggaagccgccctgcggttcatctcacagcgcgcagagactgcagcctcccaatcgtgcaggctcgggccttgagtcggtttctgtttctctggagggacagagcagaggggccagggactgagtgagtggctaagcaggggagggtgatgtgaaggtgatctcgagtttgccaggggtgggctgaacaggagaagatgaacaaaggatccggctctcaaaaggccctggcagggactggatgctgggtacagaagcgcgcccttgggcttcaggctcctgagctggcagcacggcagggagagctccatccatgtcgcaggagcccaggaagctcagcccctgggtaaaaagtgctcactgcagctcagatcagtcctcaggtcacatttcggggagccagcctcccctcttcccctccccagccccgctcctccctctgtggacacactccgggccctcagccagctggctgcatgaggagcagctttgtgctgtgggagagaccggctctgggagaatgggtttcatcccagcctacgtcacatttgcccagtgccttatgttttctgggtttttttcctccagttctgtttctaaaaaccagcttgagtttggctgaactgtcctttctcaacagaagcgcttttgcaattgatcccgggcaacaagtcaaaataagcttttaagtggagattttgtttttttcaaatgtatatgctttggaaattttgattttttagccagagggttttaccaagtgttctttgaagcacattacgatgcctcgagagggcggcccgtgcacgcgctttcaagaaaatgttctcgggacactcggtcttctctttgaaaggacattttctcattggttttgccgtgaaaatcctgtggagacttcgcaaagaaaacgcagccttacatttgctcattaaagacagatttccttcccaagtcgccatgaataaaatgagagagtagaaacgtctggaagcgccacacctggccctgggccctcggccctctgtgtccttggccttgcccccgcccgcacggctggtcacgtttgtcattgggcattcagctcagcgtcagaggctgactcagtccccagttcagagtagtcacctggttacactgaactcctcaccttcttttctctctttttttaaaaaatacttctttttctgaaagattcttattttttttttgtttacctttttcctgtggatttgctgccgttagaatagcaactccaggagaagagcaagtgagtcagccccccttctccactccctgccccaccggcagtgggcacagccctgcagacaggagcaaggacttcggggaatagacccactggggccgggagagggagaagctggattctgaccccaccactggcactcctgtgtccagccatgcctgacgcccaccccaccctcagacggcgggattaaaccaggcagtacagggttactcggggaagccagactgctgggatttcctgtcgctttagccagaataatccaggtatatggatatacagataatctgaaagagtttctcatttttatatttgtggaacatcgtgtaagaaaaactgaagagcaagtgcctgaaataaaatcccccacatgtatcagcctgcaaaaaaaaa

SEQ ID NO: 66760 - DNA, 3332 bp, Homo sapiens
tgggcagtggatggcaccaggcaccgtggagcaggagcgtcgctcctcggggaggctctagctgcacaggagcccgccggtgggggtggggaggctcaggcatggcaggctgcaggtcttggggaggcagctaaggcccggcgagaaatagagcacagcagctggtggcccaggtgctaagcccctcactgcccagggccagccgctgtgagtgcggggctccccacgcctacatggaactcgcgctggcccacaagcaccatgcacagcagcagttcccgcccgcgcctctccctccacaccgcccagcaagctgagggagccggcctgggccagtccagaaaggggctcccacagtgcagctgcgggatgaagggctcctcaagcacggccagagtaggcgccaaggccgaggaggcgccgagagggaccgagggctgccagcacgctgtcacctttcaaggggtcttatctggcttgccaaaacatcaaagacctagacgtttttgccagaacacaggaagttaaagtggaccctgataaaccactggaaggcgttcggctgctggtgctgcagagcaaaaaaacattgttggttccaacaccacgactgagaacgggattgtttaataagatcacaccaccccctggggcaactaaagacatcttgagaaaatgtgccacctctcagggtgtgaggaactacagtgtccccataggcttggactccagagtcctcgtggatttagttgtggtgggatccgtcgccgtttctgaaaaaggctggagaatcgggaagggagaaggctacgccgatctggaatatgccatgatggtatccatgggcgccgtcagcaaggagacgccggtggtcaccatcgtccacgactgccaggtcgtggacatccctgaagagcttgttgaggagcacgacatcactgtggactacatcctcactccaaccagagtcatcgccacaggctgcaagcgcccaaagccaatgggaatcacctggttcaagatcagcctggagatgatggagaaaatccccatactgaggagcctccgcgcccgagagcagcaggctgggaaggatgtcaccctccagggtgagcaccagcaccttccggaaccaggctgccagcagacagtgcccctgagtgttggcaggaggcccccggacacacccggaccagaaaccaattccatggaggcagcccctggctccccaccaggggagggtgccccgcttgcagccgatgtttacgttgggaacctcccccgggacgcccgtgtgagtgacctgaagagagccctgcgggaactcggctccgtgcccctgcggctcacctggcagggcccgcggcgcagagccttcctccattacccggactctgccgcagcccagcaggccgtctcctgcttgcagggcctgcgcctgggcaccgacaccctgagggtggcgctggccaggcagcagagggacaagtgacctcgtggacagccacggagctcactgcagactcgccatccccgtcccctgccgctccggttccgatggcactcgagaggcctgcgtggcaagacgtgtcggagccaccgcctgagctgctcgggtctcaattcttctcagaagtcaccgctcagtgaacgcccaggccctcctgtgagtggggaagccgccctgcggttcatctcacagcgcgcagagactgcagcctcccaatcgtgcaggctcgggccttgagtcggtttctgtttctctggagggacagagcagaggggccagggactgagtgagtggctaagcaggggagggtgatgtgaaggtgatctcgagtttgccaggggtgggctgaacaggagaagatgaacaaaggatccggctctcaaaaggccctggcagggactggatgctgggtacagaagcgcgcccttgggcttcaggctcctgagctggcagcacggcagggagagctccatccatgtcgcaggagcccaggaagctcagcccctgggtaaaaagtgctcactgcagctcagatcagtcctcaggtcacatttcggggagccagcctcccctcttcccctccccagccccgctcctccctctgtggacacactccgggccctcagccagctggctgcatgaggagcagctttgtgctgtgggagagaccggctctgggagaatgggtttcatcccagcctacgtcacatttgcccagtgccttatgttttctgggtttttttcctccagttctgtttctaaaaaccagcttgagtttggctgaactgtcctttctcaacagaagcgcttttgcaattgatcccgggcaacaagtcaaaataagcttttaagtggagattttgtttttttcaaatgtatatgctttggaaattttgattttttagccagagggttttaccaagtgttctttgaagcacattacgatgcctcgagagggcggcccgtgcacgcgctttcaagaaaatgttctcgggacactcggtcttctctttgaaaggacattttctcattggttttgccgtgaaaatcctgtggagacttcgcaaagaaaacgcagccttacatttgctcattaaagacagatttccttcccaagtcgccatgaataaaatgagagagtagaaacgtctggaagcgccacacctggccctgggccctcggccctctgtgtccttggccttgcccccgcccgcacggctggtcacgtttgtcattgggcattcagctcagcgtcagaggctgactcagtccccagttcagagtagtcacctggttacactgaactcctcaccttcttttctctctttttttaaaaaatacttctttttctgaaagattcttattttttttttgtttacctttttcctgtggatttgctgccgttagaatagcaactccaggagaagagcaagtgagtcagccccccttctccactccctgccccaccggcagtgggcacagccctgcagacaggagcaaggacttcggggaatagacccactggggccgggagagggagaagctggattctgaccccaccactggcactcctgtgtccagccatgcctgacgcccaccccaccctcagacggcgggattaaaccaggcagtacagggttactcggggaagccagactgctgggatttcctgtcgctttagccagaataatccaggtatatggatatacagataatctgaaagagtttctcatttttatatttgtggaacatcgtgtaagaaaaactgaagagcaagtgcctgaaataaaatcccccacatgtatcagcctgcaaaaaaaaa

SEQ ID NO: 66761 - DNA, 3101 bp, Homo sapiens
tgcgccgggaagcgtcgcacagcgactgcatcaccatggagccgagggcaggtgtctccaaacaggacatacgtgaacaaatttggggctacatggaatcacaaaatttagctgactttccccgacctgttcatcacaggatacccaactttaagggcgcttctcatgctgccgagcaactcccacgcttgcaggcgttcaaaacggccaggaccattaaagtaaatcctgatgccccccagaaaagtgctcgcttcttcgtccttgaaagcaaaaaaacattgttggttccaacaccacgactgagaacgggattgtttaataagatcacaccaccccctggggcaactaaagacatcttgagaaaatgtgccacctctcaggtgccaccagagcgactggggagacaggatagaatttccaaaacatgctccattggaaattgcctcaccagttctaaggtgtgaggaactacagtgtccccataggcttggactccagagtcctcgtggatttagttgtggtgggatccgtcgccgtttctgaaaaaggctggagaatcgggaagggagaaggctacgccgatctggaatatgccatgatggtatccatgggcgccgtcagcaaggagacgccggtggtcaccatcgtccacgactgccaggtcgtggacatccctgaagagcttgttgaggagcacgacatcactgtggactacatcctcactccaaccagagtcatcgccacaggctgcaagcgcccaaagccaatgggaatcacctggttcaagatcagcctggagatgatggagaaaatccccatactgaggagcctccgcgcccgagagcagcaggctgggaaggatgtcaccctccagggtgagcaccagcaccttccggaaccaggctgccagcagacagtgcccctgagtgttggcaggaggcccccggacacacccggaccagaaaccaattccatggaggcagcccctggctccccaccaggggagggtgccccgcttgcagccgatgtttacgttgggaacctcccccgggacgcccgtgtgagtgacctgaagagagccctgcgggaactcggctccgtgcccctgcggctcacctggcagggcccgcggcgcagagccttcctccattacccggactctgccgcagcccagcaggccgtctcctgcttgcagggcctgcgcctgggcaccgacaccctgagggtggcgctggccaggcagcagagggacaagtgacctcgtggacagccacggagctcactgcagactcgccatccccgtcccctgccgctccggttccgatggcactcgagaggcctgcgtggcaagacgtgtcggagccaccgcctgagctgctcgggtctcaattcttctcagaagtcaccgctcagtgaacgcccaggccctcctgtgagtggggaagccgccctgcggttcatctcacagcgcgcagagactgcagcctcccaatcgtgcaggctcgggccttgagtcggtttctgtttctctggagggacagagcagaggggccagggactgagtgagtggctaagcaggggagggtgatgtgaaggtgatctcgagtttgccaggggtgggctgaacaggagaagatgaacaaaggatccggctctcaaaaggccctggcagggactggatgctgggtacagaagcgcgcccttgggcttcaggctcctgagctggcagcacggcagggagagctccatccatgtcgcaggagcccaggaagctcagcccctgggtaaaaagtgctcactgcagctcagatcagtcctcaggtcacatttcggggagccagcctcccctcttcccctccccagccccgctcctccctctgtggacacactccgggccctcagccagctggctgcatgaggagcagctttgtgctgtgggagagaccggctctgggagaatgggtttcatcccagcctacgtcacatttgcccagtgccttatgttttctgggtttttttcctccagttctgtttctaaaaaccagcttgagtttggctgaactgtcctttctcaacagaagcgcttttgcaattgatcccgggcaacaagtcaaaataagcttttaagtggagattttgtttttttcaaatgtatatgctttggaaattttgattttttagccagagggttttaccaagtgttctttgaagcacattacgatgcctcgagagggcggcccgtgcacgcgctttcaagaaaatgttctcgggacactcggtcttctctttgaaaggacattttctcattggttttgccgtgaaaatcctgtggagacttcgcaaagaaaacgcagccttacatttgctcattaaagacagatttccttcccaagtcgccatgaataaaatgagagagtagaaacgtctggaagcgccacacctggccctgggccctcggccctctgtgtccttggccttgcccccgcccgcacggctggtcacgtttgtcattgggcattcagctcagcgtcagaggctgactcagtccccagttcagagtagtcacctggttacactgaactcctcaccttcttttctctctttttttaaaaaatacttctttttctgaaagattcttattttttttttgtttacctttttcctgtggatttgctgccgttagaatagcaactccaggagaagagcaagtgagtcagccccccttctccactccctgccccaccggcagtgggcacagccctgcagacaggagcaaggacttcggggaatagacccactggggccgggagagggagaagctggattctgaccccaccactggcactcctgtgtccagccatgcctgacgcccaccccaccctcagacggcgggattaaaccaggcagtacagggttactcggggaagccagactgctgggatttcctgtcgctttagccagaataatccaggtatatggatatacagataatctgaaagagtttctcatttttatatttgtggaacatcgtgtaagaaaaactgaagagcaagtgcctgaaataaaatcccccacatgtatcagcctgcaaaaaaaaa

SEQ ID NO: 66762 - DNA, 2703 bp, Homo sapiens
tgtgggcatttggtgggcatttctgtgaaaatttctatagattagctcgggatattgggttcaagtttcttcttccactggacctgatggaaaatccacttctcagcgatgccccggaccgcacagcgatactgattctcggttgtctcttaggctggagaatcgggaagggagaaggctacgccgatctggaatatgccatgatggtatccatgggcgccgtcagcaaggagacgccggtggtcaccatcgtccacgactgccaggtcgtggacatccctgaagagcttgttgaggagcacgacatcactgtggactacatcctcactccaaccagagtcatcgccacaggctgcaagcgcccaaagccaatgggaatcacctggttcaagatcagcctggagatgatggagaaaatccccatactgaggagcctccgcgcccgagagcagcaggctgggaaggatgtcaccctccagggtgagcaccagcaccttccggaaccaggctgccagcagacagtgcccctgagtgttggcaggaggcccccggacacacccggaccagaaaccaattccatggaggcagcccctggctccccaccaggggagggtgccccgcttgcagccgatgtttacgttgggaacctcccccgggacgcccgtgtgagtgacctgaagagagccctgcgggaactcggctccgtgcccctgcggctcacctggcagggcccgcggcgcagagccttcctccattacccggactctgccgcagcccagcaggccgtctcctgcttgcagggcctgcgcctgggcaccgacaccctgagggtggcgctggccaggcagcagagggacaagtgacctcgtggacagccacggagctcactgcagactcgccatccccgtcccctgccgctccggttccgatggcactcgagaggcctgcgtggcaagacgtgtcggagccaccgcctgagctgctcgggtctcaattcttctcagaagtcaccgctcagtgaacgcccaggccctcctgtgagtggggaagccgccctgcggttcatctcacagcgcgcagagactgcagcctcccaatcgtgcaggctcgggccttgagtcggtttctgtttctctggagggacagagcagaggggccagggactgagtgagtggctaagcaggggagggtgatgtgaaggtgatctcgagtttgccaggggtgggctgaacaggagaagatgaacaaaggatccggctctcaaaaggccctggcagggactggatgctgggtacagaagcgcgcccttgggcttcaggctcctgagctggcagcacggcagggagagctccatccatgtcgcaggagcccaggaagctcagcccctgggtaaaaagtgctcactgcagctcagatcagtcctcaggtcacatttcggggagccagcctcccctcttcccctccccagccccgctcctccctctgtggacacactccgggccctcagccagctggctgcatgaggagcagctttgtgctgtgggagagaccggctctgggagaatgggtttcatcccagcctacgtcacatttgcccagtgccttatgttttctgggtttttttcctccagttctgtttctaaaaaccagcttgagtttggctgaactgtcctttctcaacagaagcgcttttgcaattgatcccgggcaacaagtcaaaataagcttttaagtggagattttgtttttttcaaatgtatatgctttggaaattttgattttttagccagagggttttaccaagtgttctttgaagcacattacgatgcctcgagagggcggcccgtgcacgcgctttcaagaaaatgttctcgggacactcggtcttctctttgaaaggacattttctcattggttttgccgtgaaaatcctgtggagacttcgcaaagaaaacgcagccttacatttgctcattaaagacagatttccttcccaagtcgccatgaataaaatgagagagtagaaacgtctggaagcgccacacctggccctgggccctcggccctctgtgtccttggccttgcccccgcccgcacggctggtcacgtttgtcattgggcattcagctcagcgtcagaggctgactcagtccccagttcagagtagtcacctggttacactgaactcctcaccttcttttctctctttttttaaaaaatacttctttttctgaaagattcttattttttttttgtttacctttttcctgtggatttgctgccgttagaatagcaactccaggagaagagcaagtgagtcagccccccttctccactccctgccccaccggcagtgggcacagccctgcagacaggagcaaggacttcggggaatagacccactggggccgggagagggagaagctggattctgaccccaccactggcactcctgtgtccagccatgcctgacgcccaccccaccctcagacggcgggattaaaccaggcagtacagggttactcggggaagccagactgctgggatttcctgtcgctttagccagaataatccaggtatatggatatacagataatctgaaagagtttctcatttttatatttgtggaacatcgtgtaagaaaaactgaagagcaagtgcctgaaataaaatcccccacatgtatcagcctgcaaaaaaaaa

SEQ ID NO: 66763 - DNA, 1201 bp, Homo sapiens
tgggcagtggatggcaccaggcaccgtggagcaggagcgtcgctcctcggggaggctctagctgcacaggagcccgccggtgggggtggggaggctcaggcatggcaggctgcaggtcttggggaggcagctaaggcccggcgagaaatagagcacagcagctggtggcccaggtgctaagcccctcactgcccagggccagccgctgtgagtgcggggctccccacgcctacatggaactcgcgctggcccacaagcaccatgcacagcagcagttcccgcccgcgcctctccctccacaccgcccagcaagctgagggagccggcctgggccagtccagaaaggggctcccacagtgcagctgcgggatgaagggctcctcaagcacggccagagtaggcgccaaggccgaggaggcgccgagagggaccgagggctgccagcacgctgtcacctttcaaggggtcttatctggcttgccaaaacatcaaagacctagacgtttttgccagaacacaggaagttaaagtggaccctgataaaccactggaaggcgttcggctgctggtgctgcagagcaaaaaaacattgttggttccaacaccacgactgagaacgggattgtttaataagatcacaccaccccctggggcaactaaagacatcttgagaaaatgtgccacctctcaggtgccaccagagcgactggggagacaggatagaatttccaaaacatgctccattggaaattgcctcaccagttctaattggtcagtgcctgcccccgtggaccctgcgagatgatgagaacacagggtttcctgcagtgcagggtttcctggactaagcccccttctgtgactgtcgggagacccccaagccacccgtatgcactgatccatacggaacttgtcatagcactgcaggcagatcccaccgccacatcgaatgatcagttactgctggatacgggactgaaaatggctttttcctgagtcttacataaaccgtgttatgagaaccatgaacatattcagcttccctattctttatatgcatgcctgcattagtataaagcggtacacttttgggacattttggttgaagggataattttttagaagcgagtatattgtacataaagatagtggccttcaggattttatattgaataaatatgtcatacagtgaaaaaaacca

SEQ ID NO: 66764 - DNA, 1197 bp, Homo sapiens
tgcgccgggaagcgtcgcacagcgactgcatcaccatggagccgagggcaggtgtctccaaacaggacatacgtgaacaaatttggggctacatggaatcacaaaatttagctgactttccccgacctgttcatcacaggatacccaactttaaggggtcttatctggcttgccaaaacatcaaagacctagacgtttttgccagaacacaggaagttaaagtggaccctgataaaccactggaaggcgttcggctgctggtgctgcagagcaaaaaaacattgttggttccaacaccacgactgagaacgggattgtttaataagatcacaccaccccctggggcaactaaagacatcttgagaaaatgtgccacctctcagggtgtgaggaactacagtgtccccataggcttggactccagagtcctcgtggatttagttgtggtgggatccgtcgccgtttctgaaaaaggctggagaatcgggaagggagaaggctacgccgatctggaatatgccatgatggtatccatgggcgccgtcagcaaggagacgccggtggtcaccatcgtccacgactgccaggtcgtggacatccctgaagagcttgttgaggagcacgacatcactgtggactacatcctcactccaaccagagtcatcgccacaggctgcaagcgcccaaagccaatgggaatcacctggttcaagattaggtaatggcacaggttgcaaattagtctgcagtaggagtttgaccctgcaaatcagcctgtaggttatgatgctgtctctgctggcaaacagccagaattactgagaagacatttgtgcttcgtgtggacaaaactactggtcaaataagcatacgtgtccacgtctcccattctttaatcccaaatcattcaccgtttgaatccctcctttgggcatggaaaattaacaacatcacctctaaggatgaacacagaatacctgctgcttttgccacagcccagccgggactttccctgcaggtgtcctgggcaggcactgctggggactcccaggtgtgcactcctcggttggccgctgatgaacgcagagggaacagcctttgtaacccagagtgtatgggcggccctctaagcgcaccaggagcactgggaaagaaggtggtcactgctcttccaggaaatgaaaatatcccttgaaa

SEQ ID NO: 66765 - DNA, 3024 bp, Homo sapiens
tgcgccgggaagcgtcgcacagcgactgcatcaccatggagccgagggcaggtgtctccaaacaggacatacgtgaacaaatttggggctacatggaatcacaaaatttagctgactttccccgacctgttcatcacaggatacccaactttaagggcgcttctcatgctgccgagcaactcccacgcttgcaggcgttcaaaacggccaggaccattaaagtaaatcctgatgccccccagaaaagtgctcgcttcttcgtccttgaaagcaaaaaaacattgttggttccaacaccacgactgagaacgggattgtttaataagatcacaccaccccctggggcaactaaagacatcttgagaaaatgtgccacctctcagggtgtgaggaactacagtgtccccataggcttggactccagagtcctcgtggatttagttgtggtgggatccgtcgccgtttctgaaaaaggctggagaatcgggaagggagaaggctacgccgatctggaatatgccatgatggtatccatgggcgccgtcagcaaggagacgccggtggtcaccatcgtccacgactgccaggtcgtggacatccctgaagagcttgttgaggagcacgacatcactgtggactacatcctcactccaaccagagtcatcgccacaggctgcaagcgcccaaagccaatgggaatcacctggttcaagatcagcctggagatgatggagaaaatccccatactgaggagcctccgcgcccgagagcagcaggctgggaaggatgtcaccctccagggtgagcaccagcaccttccggaaccaggctgccagcagacagtgcccctgagtgttggcaggaggcccccggacacacccggaccagaaaccaattccatggaggcagcccctggctccccaccaggggagggtgccccgcttgcagccgatgtttacgttgggaacctcccccgggacgcccgtgtgagtgacctgaagagagccctgcgggaactcggctccgtgcccctgcggctcacctggcagggcccgcggcgcagagccttcctccattacccggactctgccgcagcccagcaggccgtctcctgcttgcagggcctgcgcctgggcaccgacaccctgagggtggcgctggccaggcagcagagggacaagtgacctcgtggacagccacggagctcactgcagactcgccatccccgtcccctgccgctccggttccgatggcactcgagaggcctgcgtggcaagacgtgtcggagccaccgcctgagctgctcgggtctcaattcttctcagaagtcaccgctcagtgaacgcccaggccctcctgtgagtggggaagccgccctgcggttcatctcacagcgcgcagagactgcagcctcccaatcgtgcaggctcgggccttgagtcggtttctgtttctctggagggacagagcagaggggccagggactgagtgagtggctaagcaggggagggtgatgtgaaggtgatctcgagtttgccaggggtgggctgaacaggagaagatgaacaaaggatccggctctcaaaaggccctggcagggactggatgctgggtacagaagcgcgcccttgggcttcaggctcctgagctggcagcacggcagggagagctccatccatgtcgcaggagcccaggaagctcagcccctgggtaaaaagtgctcactgcagctcagatcagtcctcaggtcacatttcggggagccagcctcccctcttcccctccccagccccgctcctccctctgtggacacactccgggccctcagccagctggctgcatgaggagcagctttgtgctgtgggagagaccggctctgggagaatgggtttcatcccagcctacgtcacatttgcccagtgccttatgttttctgggtttttttcctccagttctgtttctaaaaaccagcttgagtttggctgaactgtcctttctcaacagaagcgcttttgcaattgatcccgggcaacaagtcaaaataagcttttaagtggagattttgtttttttcaaatgtatatgctttggaaattttgattttttagccagagggttttaccaagtgttctttgaagcacattacgatgcctcgagagggcggcccgtgcacgcgctttcaagaaaatgttctcgggacactcggtcttctctttgaaaggacattttctcattggttttgccgtgaaaatcctgtggagacttcgcaaagaaaacgcagccttacatttgctcattaaagacagatttccttcccaagtcgccatgaataaaatgagagagtagaaacgtctggaagcgccacacctggccctgggccctcggccctctgtgtccttggccttgcccccgcccgcacggctggtcacgtttgtcattgggcattcagctcagcgtcagaggctgactcagtccccagttcagagtagtcacctggttacactgaactcctcaccttcttttctctctttttttaaaaaatacttctttttctgaaagattcttattttttttttgtttacctttttcctgtggatttgctgccgttagaatagcaactccaggagaagagcaagtgagtcagccccccttctccactccctgccccaccggcagtgggcacagccctgcagacaggagcaaggacttcggggaatagacccactggggccgggagagggagaagctggattctgaccccaccactggcactcctgtgtccagccatgcctgacgcccaccccaccctcagacggcgggattaaaccaggcagtacagggttactcggggaagccagactgctgggatttcctgtcgctttagccagaataatccaggtatatggatatacagataatctgaaagagtttctcatttttatatttgtggaacatcgtgtaagaaaaactgaagagcaagtgcctgaaataaaatcccccacatgtatcagcctgcaaaaaaaaa

SEQ ID NO: 66766 - DNA, 2806 bp, Homo sapiens
tgcgccgggaagcgtcgcacagcgactgcatcaccatggagccgagggcagagcaaaaaaacattgttggttccaacaccacgactgagaacgggattgtttaataagatcacaccaccccctggggcaactaaagacatcttgagaaaatgtgccacctctcagggtgtgaggaactacagtgtccccataggcttggactccagagtcctcgtggatttagttgtggtgggatccgtcgccgtttctgaaaaaggctggagaatcgggaagggagaaggctacgccgatctggaatatgccatgatggtatccatgggcgccgtcagcaaggagacgccggtggtcaccatcgtccacgactgccaggtcgtggacatccctgaagagcttgttgaggagcacgacatcactgtggactacatcctcactccaaccagagtcatcgccacaggctgcaagcgcccaaagccaatgggaatcacctggttcaagatcagcctggagatgatggagaaaatccccatactgaggagcctccgcgcccgagagcagcaggctgggaaggatgtcaccctccagggtgagcaccagcaccttccggaaccaggctgccagcagacagtgcccctgagtgttggcaggaggcccccggacacacccggaccagaaaccaattccatggaggcagcccctggctccccaccaggggagggtgccccgcttgcagccgatgtttacgttgggaacctcccccgggacgcccgtgtgagtgacctgaagagagccctgcgggaactcggctccgtgcccctgcggctcacctggcagggcccgcggcgcagagccttcctccattacccggactctgccgcagcccagcaggccgtctcctgcttgcagggcctgcgcctgggcaccgacaccctgagggtggcgctggccaggcagcagagggacaagtgacctcgtggacagccacggagctcactgcagactcgccatccccgtcccctgccgctccggttccgatggcactcgagaggcctgcgtggcaagacgtgtcggagccaccgcctgagctgctcgggtctcaattcttctcagaagtcaccgctcagtgaacgcccaggccctcctgtgagtggggaagccgccctgcggttcatctcacagcgcgcagagactgcagcctcccaatcgtgcaggctcgggccttgagtcggtttctgtttctctggagggacagagcagaggggccagggactgagtgagtggctaagcaggggagggtgatgtgaaggtgatctcgagtttgccaggggtgggctgaacaggagaagatgaacaaaggatccggctctcaaaaggccctggcagggactggatgctgggtacagaagcgcgcccttgggcttcaggctcctgagctggcagcacggcagggagagctccatccatgtcgcaggagcccaggaagctcagcccctgggtaaaaagtgctcactgcagctcagatcagtcctcaggtcacatttcggggagccagcctcccctcttcccctccccagccccgctcctccctctgtggacacactccgggccctcagccagctggctgcatgaggagcagctttgtgctgtgggagagaccggctctgggagaatgggtttcatcccagcctacgtcacatttgcccagtgccttatgttttctgggtttttttcctccagttctgtttctaaaaaccagcttgagtttggctgaactgtcctttctcaacagaagcgcttttgcaattgatcccgggcaacaagtcaaaataagcttttaagtggagattttgtttttttcaaatgtatatgctttggaaattttgattttttagccagagggttttaccaagtgttctttgaagcacattacgatgcctcgagagggcggcccgtgcacgcgctttcaagaaaatgttctcgggacactcggtcttctctttgaaaggacattttctcattggttttgccgtgaaaatcctgtggagacttcgcaaagaaaacgcagccttacatttgctcattaaagacagatttccttcccaagtcgccatgaataaaatgagagagtagaaacgtctggaagcgccacacctggccctgggccctcggccctctgtgtccttggccttgcccccgcccgcacggctggtcacgtttgtcattgggcattcagctcagcgtcagaggctgactcagtccccagttcagagtagtcacctggttacactgaactcctcaccttcttttctctctttttttaaaaaatacttctttttctgaaagattcttattttttttttgtttacctttttcctgtggatttgctgccgttagaatagcaactccaggagaagagcaagtgagtcagccccccttctccactccctgccccaccggcagtgggcacagccctgcagacaggagcaaggacttcggggaatagacccactggggccgggagagggagaagctggattctgaccccaccactggcactcctgtgtccagccatgcctgacgcccaccccaccctcagacggcgggattaaaccaggcagtacagggttactcggggaagccagactgctgggatttcctgtcgctttagccagaataatccaggtatatggatatacagataatctgaaagagtttctcatttttatatttgtggaacatcgtgtaagaaaaactgaagagcaagtgcctgaaataaaatcccccacatgtatcagcctgcaaaaaaaaa

SEQ ID NO: 66767 - DNA, 2381 bp, Homo sapiens
tgcgccgggaagcgtcgcacagcgactgcatcaccatggagccgagggcaggtgtctccaaacaggacatacgtgaacaaatttggggctacatggaatcacaaaatttagctgactttccccgacctgttcatcacaggatacccaactttaaggggtcttatctggcttgccaaaacatcaaagacctagacgtttttgccagaacacaggaagttaaagtggaccctgataaaccactggaaggcgttcggctgctggtgctgcagagcaaaaaaacattgttggttccaacaccacgactgagaacgggattgtttaataagatcacaccaccccctggggcaactaaagacatcttgagaaaatgtgccacctctcagggtgtgaggaactacagtgtccccataggcttggactccagagtcctcgtggatttagttgtggtgggatccgtcgccgtttctgaaaaaggctggagaatcgggaagggagaaggctacgccgatctggaatatgccatgatggtatccatgggcgccgtcagcaaggagacgccggtggtcaccatcgtccacgactgccaggtcgtggacatccctgaagagcttgttgaggagcacgacatcactgtggactacatcctcactccaaccagagtcatcgccacaggctgcaagcgcccaaagccaatgggaatcacctggttcaagatcagcctggagatgatggagaaaatccccatactgaggagcctccgcgcccgagagcagcaggctgggaaggatgtcaccctccagggtgagcaccagcaccttccggaaccaggctgccagcagacagtgcccctgagtgttggcaggaggcccccggacacacccggaccagaaaccaattccatggaggcagcccctggctccccaccaggggagggtgccccgcttgcagccgatgtttacgttgggaacctcccccgggacgcccgtgtgagtgacctgaagagagccctgcgggaactcggctccgtgcccctgcggctcacctggcagggcccgcggcgcagagccttcctccattacccggactctgccgcagcccagcaggccgtctcctgcttgcagggcctgcgcctgggcaccgacaccctgagggtggcgctggccaggcagcagagggacaagtgacctcgtggacagccacggagctcactgcagactcgccatccccgtcccctgccgctccggttccgatggcactcgagaggcctgcgtggcaagacgtgtcggagccaccgcctgagctgctcgggtctcaattcttctcagaagtcaccgctcagtgaacgcccaggccctcctgtgagtggggaagccgccctgcggttcatctcacagcgcgcagagactgcagcctcccaatcgtgcaggctcgggccttgagtcggtttctgtttctctggagggacagagcagaggggccagggactgagtgagtggctaagcaggggagggtgatgtgaaggtgatctcgagtttgccaggggtgggctgaacaggagaagatgaacaaaggatccggctctcaaaaggccctggcagggactggatgctgggtacagaagcgcgcccttgggcttcaggctcctgagctggcagcacggcagggagagctccatccatgtcgcaggagcccaggaagctcagcccctgggtaaaaagtgctcactgcagctcagatcagtcctcaggtcacatttcggggagccagcctcccctcttcccctccccagccccgctcctccctctgtggacacactccgggccctcagccagctggctgcatgaggagcagctttgtgctgtgggagagaccggctctgggagaatgggtttcatcccagcctacgtcacatttgcccagtgccttatgttttctgggtttttttcctccagttctgtttctaaaaaccagcttgagtttggctgaactgtcctttctcaacagaagcgcttttgcaattgatcccgggcaacaagtcaaaataagcttttaagtggagattttgtttttttcaaatgtatatgctttggaaattttgattttttagccagagggttttaccaagtgttctttgaagcacattacgatgcctcgagagggcggcccgtgcacgcgctttcaagaaaatgttctcgggacactcggtcttctctttgaaaggacattttctcattggttttccagaataatccaggtatatggatatacagataatctgaaagagtttctcatttttatatttgtggaacatcgtgtaagaaaaactgaagagcaagtgcctgaaataaaatcccccacatgtatcagcctgcaaaaaaaaa

SEQ ID NO: 66768 - DNA, 3547 bp, Homo sapiens
agcaattgtcccctttccaccctacatcaaaatttccctttgtaactggatatatttctcaccctccacacaagctgtatttctcccatctttaaaaagattaaaaaaaaaacccagaaacacccagctctatcttctcctcaagctattccatcccctccttatgcatccattctttctatttgttcttgaatccattcaaccaaagtaactcagatccctgccattgcaccaaaacaattatttcaagatcacctatgaccttcaagtcaccaaatccaatagtcattactcagaaagtcagatcctcttacttaaccagttggcaatatctgacacagctggttgttaaatcctccttaaaacactttttgtactttgcttccaattcatcacacacttctagattttctccttctgcagtggcttctcctctttgtttttgttttaaagatagggtttcactgtgtctcccaggctggagggcagtgatatgatcagctcactgtatcctctgactcctgggctcaaacggccctcccacctcaccctctccagtagctaggacatgtgggataggcacatataggcatgtgcaagtgtgctcagctaatttatttgttttatttattttattttatttatttatttatttttgagacggagtttcactccagcctgggcgacagggtgagactgtgtctcaaaaaaaaaaaaaaaaagttgaaaggattctacagtggacatccatagatttattccaaattctaaagttgttaacagctcgttatactgcattctctttatcacatagtggttgttgaaaggtttgacaggaacactgatgcttcaataatggttttggttcagtttgttagtctgttgaacttcaggatcgtgtcttagaatatatgttcgaaaggataaaaaccgtactttaattttgggtttcaaaagcctacccctgcaacaaaatagaagctcaataagtgtgtcatcctcaaaatatccgtgggtcttttgtctttataatattctgacaccaaaagtgagagaagtagtagttgaattttatgatctgcattgttaaatgagggcttatcttccttaacaaataataacatcaagaacttaaacgaaaattgaacattctgactcgaccgagtggaatattggtgaacgatactaagttagatggacctatattacagattctattcatgaacaatgctatttcaaagcaatatcatcaagaaatagaggaatttgtatcaaatttagtaaaaagatttgaggaacagcagaaaaatgatgtggaaaagacttcctttaatcttttgccccagccatccagtattgtgctagaggaggaccacaaagtggaagagtcctgtgccattaaaaacaacaaggaagctttcagtgtaccatcaagtcttcagccacattgtttctctagaagggcaagaaatacaagtaaaggcaaaaaggccaaagcctcactgtttcaattgtggttctgaagaacaccaaatgaaagattgcccaatgcctcggaatgctgctcgaataagtgaaaagagaaaagagtatatggatgcctgtggagaagcaaacaatcagaatttccagcagcgataccacgcagaagaagtagaagaaagatttggaagattcaagccaggagttattagtgaggaacttcaagatgcactaggtgtgacagacaagagtcttccaccttttatctatcggatgcgccagctagggtacccaccagggtggctcaaagaggctgaattggagaattcggggcttgcactctatgatggaaaagatggcactgatggggaaacagaagttggagaaatacaacagaataaaagtgtcacttacgatctctcaaaattggtcaactatcctggttttaatatatctactcccagaggaattccagacgaatggaggatctttggttccataccaatgcaggcatgtcagcagaaggatgtgtttgccaattaccttacttctaacttccaagcgccaggtgtgaagtctggcaacaagaggtcttcatctcactctagcccaggtagtccaaagaagcagaagaatgaaagcaactcagcgggatctcccgccgacatggagctcgattcagatatggaggtaccacatggttctcagagcagcgaaagttttcagtttcaaccaccattacctcctgacactcctccactcccccggggaactcctccacccgtcttcacccctccactcccaaagggcaccccgccgctgactcccagtgactcaccccagaccagaacagcatctggagctgtggatgaggacgcactgactctagaagaacttgaagaacagcagaggcggatctgggcagctcttgagcaggccgagagcgtaaacagcgactccgacgttcctgtggacacacctttaactggcaattccgttgcctcatcaccttgtccaaatgagctagacctccctgtcccggagggaaaaacatctgaaaagcagacgctggatgagcctgaggtaccagagatttttacaaagaaatcagaagctggacatgcctccagtccagactctgaggtgacatcactttgtcagaaggaaaaagcagagttggctccggtaaacactgaaggtgcccttcttgataatggcagtgtcgtaccaaactgtgacatcagcaatgggggcagccagaagctctttcctgcagacaccagtccttcaacggccactaaaattcatagccctatacctgacatgagcaaatttgcaactggaatcacgccatttgaatttgagaatatggcagaatctactggaatgtacctcaggataagaagcttgttaaagaactcaccccgaaaccagcagaaaaacaaaaaggcctctgaataatggcttgacttagcactgagagctatttaataactttgttccgttaattagtactaattaagtggatagatagaatggttttcctgtttgtccctcccatgtttaaaaatctatccaaggttcatgttccaaagtcaagcctattttaaagaaagactgagctcactagttcagtatattttattctcactgacaaaacttggggggagatgtgaatatgacctggtttagagagggtttgttaaggtttatactatttttggattgtgactatccgtcgagagtgatggtttttatctgtcttttgtacattgttttccctttctacattttgctaattatcctgtatataagtttaatatatcactttttaaaagaaaaaattctaccattttaaattcatgtttcaactcctacaaccaaatgagaaaaatcagggatgagcagctttatcccatttggggtatttttgtaagtgatttacatgtgtcaattttagtaatacttttacttttttgtaacttcatccttcatatatgcttgctatacaggtatgttcatctttgtgtacagaggtttaataaattagttttcatatacataa

SEQ ID NO: 66769 - DNA, 317 bp, Homo sapiens
tcatcaaacccttaggatggggtgtgataggtggcacggagaattttgtattctcagggagggtttcgatgacgtcatcaaacccttcatcaaacccttcatgaaaccctcagctttccgaaggatgggaaatacccaagtatcctacatagtgaatgaagatcttttatgcatcttgccactaagttcacctttaaaacaatttccaaattttgcagaccatgataactattccttaataaaattcactaaaggtaccatcaagtcttcagccacattgtttctctagaagggtagggtttcggtgcggggtccta

SEQ ID NO: 66770 - DNA, 3282 bp, Homo sapiens
tgtgcagctttcgcggcctgcgtctggagaaaaccctagcgggtggctccgtgcggccagagctctagagagtggtgccgccttccaaccttcttccccaagccctggtggccggctccgcctcttctcgaatcttttccacagcccaaaatggccgcagaggtgtattttggcgatctagagctcttcgagccgttcgaccacccagaggagtcgattccgaagcccgttcacactcgcttcaaggacgacgacggcgacgaggaggacgaaaatggggtcggcgacgcggagctacgggagcggcttcggcagtgcgaggagaccatcgagcagctccgcgccgagaatcaagaacttaaacgaaaattgaacattctgactcgaccgagtggaatattggtgaacgatactaagttagatggacctatattacagattctattcatgaacaatgctatttcaaagcaatatcatcaagaaatagaggaatttgtatcaaatttagtaaaaagatttgaggaacagcagaaaaatgatgtggaaaagacttcctttaatcttttgccccagccatccagtattgtgctagaggaggaccacaaagtggaagagtcctgtgccattaaaaacaacaaggaagctttcagtgttgtaggaagtgtcctgtattttactaatttttgccttgataaattggggcaaccgcttctaaatgaaaaccctcagctttccgaaggatgggaaatacccagtaccatcaagtcttcagccacattgtttctctagaagggcaagaaatacaagtaaaggcaaaaaggccaaagcctcactgtttcaattgtggttctgaagaacaccaaatgaaagattgcccaatgcctcggaatgctgctcgaataagtgaaaagagaaaagagtatatggatgcctgtggagaagcaaacaatcagaatttccagcagcgataccacgcagaagaagtagaagaaagatttggaagattcaagccaggagttattagtgaggaacttcaagatgcactaggtgtgacagacaagagtcttccaccttttatctatcggatgcgccagctagggtacccaccagggtggctcaaagaggctgaattggagaattcggggcttgcactctatgatggaaaagatggcactgatggggaaacagaagttggagaaatacaacagaataaaagtgtcacttacgatctctcaaaattggtcaactatcctggttttaatatatctactcccagaggaattccagacgaatggaggatctttggttccataccaatgcaggcatgtcagcagaaggatgtgtttgccaattaccttacttctaacttccaagcgccaggtgtgaagtctggcaacaagaggtcttcatctcactctagcccaggtagtccaaagaagcagaagaatgaaagcaactcagcgggatctcccgccgacatggagctcgattcagatatggaggtaccacatggttctcagagcagcgaaagttttcagtttcaaccaccattacctcctgacactcctccactcccccggggaactcctccacccgtcttcacccctccactcccaaagggcaccccgccgctgactcccagtgactcaccccagaccagaacagcatctggagctgtggatgaggacgcactgactctagaagaacttgaagaacagcagaggcggatctgggcagctcttgagcaggccgagagcgtaaacagcgactccgacgttcctgtggacacacctttaactggcaattccgttgcctcatcaccttgtccaaatgagctagacctccctgtcccggagggaaaaacatctgaaaagcagacgctggatgagcctgaggtaccagagatttttacaaagaaatcagaagctggacatgcctccagtccagactctgaggtgacatcactttgtcagaaggaaaaagcagagttggctccggtaaacactgaaggtgcccttcttgataatggcagtgtcgtaccaaactgtgacatcagcaatgggggcagccagaagctctttcctgcagacaccagtccttcaacggccactaaaattcatagccctatacctgacatgagcaaatttgcaactggaatcacgccatttgaatttgagaatatggcagaatctactggaatgtacctcaggataagaagcttgttaaagaactcaccccgaaaccagcagaaaaacaaaaaggcctctgaataatggcttgacttagcactgagagctatttaataactttgttccgttaattagtactaattaagtggatagatagaatggttttcctgtttgtccctcccatgtttaaaaatctatccaaggttcatgttccaaagtcaagcctattttaaagaaagactgagctcactagttcagtatattttattctcactgacaaaacttggggggagatgtgaatatgacctggtttagagagggtttgttaaggtttatactatttttggattgtgactatccgtcgagagtgatggtttttatctgtcttttgtacattgttttccctttctacattttgctaattatcctgtatataagtttaatatatcactttttaaaagaaaaaattctaccattttaaattcatgtttcaactcctacaaccaaatgagaaaaatcagggatgagcagctttatcccatttggggtatttttgtaagtgatttacatgtgtcaattttagtaatacttttacttttttgtaacttcatccttcatatatgcttgctatacaggtatgttcatctttgtgtacagaggtttaataaattagttttcatatacataaaaaacacaacacacaacccacacaaacaccccaccaacagcgaacaaaaaaaacacaaaacacaaaacacacacacccaaccacacaacacaccaagacccaccaaccaccacaaaaagcaggcagacggcagggaaaacacttccgaggggaacaacacgacctcgcacaatgctatatgatacgagcgagcactagtcactagtgttggtcgtcaaatatagccagaggaggatgaacatatacaccgactagggaggagaagaaaaattgagctgagattttagtatggtaaaccaccactctcggtggtcgatcatggaagaccaactcaacatagaccatgcggagacaaccatgggatgagtcaccagttcgcacgaaagcgaagattataacgacgaa

SEQ ID NO: 66771 - DNA, 2916 bp, Homo sapiens
  misc_feature (2745)..(2745): n is a, c, g, or t
  misc_feature (2856)..(2856): n is a, c, g, or t
tgtgcagctttcgcggcctgcgtctggagaaaaccctagcgggtggctccgtgcggccagagctctagagagtggtgccgccttccaaccttcttccccaagccctggtggccggctccgcctcttctcgaatcttttccacagcccaaaatggccgcagaggtgtattttggcgatctagagctcttcgagccgttcgaccacccagaggagtcgattccgaagcccgttcacactcgcttcaaggacgacgacggcgacgaggaggacgaaaatggggtcggcgacgcggagctacgggagcggcttcggcagtgcgaggagaccatcgagcagctccgcgccgagaatcaagaacttaaacgaaaattgaacattctgactcgaccgagtggaatattggtgaacgatactaagttagatggacctatattacagattctattcatgaacaatgctatttcaaagcaatatcatcaagaaatagaggaatttgtatcaaatttagtaaaaagatttgaggaacagcagaaaaatgatgtggaaaagacttcctttaatcttttgccccagccatccagtattgtgctagaggaggaccacaaagtggaagagtcctgtgccattaaaaacaacaaggaagctttcagtgttgtaggaagtgtcctgtattttactaatttttgccttgataaattggggcaaccgcttctaaatgaaaaccctcagctttccgaaggatgggaaatacccagtaccatcaagtcttcagccacattgtttctctagaagggcaagaaatacaagtaaaggcaaaaaggccaaagcctcactgtttcaattgtggttctgaagaacaccaaatgaaagattgcccaatgcctcggaatgctgctcgaataagtgaaaagagaaaagagtatatggatgcctgtggagaagcaaacaatcagaatttccagcagcgataccacgcagaagaagtagaagaaagatttggaagattcaagccaggagttattagtgaggaacttcaagatgcactaggtgtgacagacaagagtcttccaccttttatctatcggatgcgccagctagggtacccaccagggtggctcaaagaggctgaattggagaattcggggcttgcactctatgatggaaaagatggcactgatggggaaacagaagttggagaaatacaacagaataaaagtgtcacttacgatctctcaaaattggtcaactatcctggttttaatatatctactcccagaggaattccagacgaatggaggatctttggttccataccaatgcaggcatgtcagcagaaggatgtgtttgccaattaccttacttctaacttccaagcgccaggtgtgaagtctggcaacaagaggtcttcatctcactctagcccaggtagtccaaagaagcagaagaatgaaagcaactcagcgggatctcccgccgacatggagctcgattcagatatggaggtaccacatggttctcagagcagcgaaagttttcagtttcaaccaccattacctcctgacactcctccactcccccggggaactcctccacccgtcttcacccctccactcccaaagggcaccccgccgctgactcccagtgactcaccccagaccagaacagcatctggagctgtggatgaggacgcactgactctagaagaacttgaagaacagcagaggcggatctgggcagctcttgagcaggccgagagcgtaaacagcgactccgacgttcctgtggacacacctttaactggcaattccgttgcctcatcaccttgtccaaatgagctagacctccctgtcccggagggaaaaacatctgaaaagcagacgctggatgagcctgaggtaccagagatttttacaaagaaatcagaagctggacatgcctccagtccagactctgaggtgacatcactttgtcagaaggaaaaagcagagttggctccggtaaacactgaaggtgcccttcttgataatggcagtgtcgtaccaaactgtgacatcagcaatgggggcagccagaagctctttcctgcagacaccagtccttcaacggccactaaaattcatagccctatacctgacatgagcaaatttgcaactggaatcacgccatttgaatttgagaatatggcagaatctactggaatgtacctcaggataagaagcttgttaaagaactcaccccgaaaccagcagaaaaacaaaaaggcctctgaataatggcttgacttagcactgagagctatttaataactttgttccgttaattagtactaattaagtggatagatagaatggttttcctgtttgtccctcccatgtttaaaaatctatccaaggttcatgttccaaagtcaagcctattttaaagaaagactgagctcactagttcagtatattttattctcactgacaaaacttggggggagatgtgaatatgacctggtttagagagggtttgttaaggtttatactatttttggattgtgactatccgtcgagagtgatggtttttatctgtcttttgtacattgttttccctttctacattttgctaattatcctgtatataagtttaatatatcactttttaaaagaaaaaattctaccattttaaattcatgtttcaactcctacaaccaaatgagaaaaatcagggatgagcagctttatcccatttggggtatttttngaaaggatacggatagaactatttgatactatagtgtcagtgactggcagatatagtatcacatgcctcctatgattgggcatgatgatctgggtatagcgtacggtgacngcatactgatctcggagagcccgctaggcagagaggtttacgattacttagccactccgg

SEQ ID NO: 66772 - DNA, 2837 bp, Homo sapiens
tgtgcagctttcgcggcctgcgtctggagaaaaccctagcgggtggctccgtgcggccagagctctagagagtggtgccgccttccaaccttcttccccaagccctggtggccggctccgcctcttctcgaatcttttccacagcccaaaatggccgcagaggtgtattttggcgatctagagctcttcgagccgttcgaccacccagaggagtcgattccgaagcccgttcacactcgcttcaaggacgacgacggcgacgaggaggacgaaaatggggtcggcgacgcggagctacgggagcggcttcggcagtgcgaggagaccatcgagcagctccgcgccgagaatcaagaacttaaacgaaaattgaacattctgactcgaccgagtggaatattggtgaacgatactaagttagatggacctatattacagattctattcatgaacaatgctatttcaaagcaatatcatcaagaaatagaggaatttgtatcaaatttagtaaaaagatttgaggaacagcagaaaaatgatgtggaaaagacttcctttaatcttttgccccagccatccagtattgtgctagaggaggaccacaaagtggaagagtcctgtgccattaaaaacaacaaggaagctttcagtgttgtaggaagtgtcctgtattttactaatttttgccttgataaattggggcaaccgcttctaaatgaaaaccctcagctttccgaaggatgggaaatacccagtaccatcaagtcttcagccacattgtttctctagaagggcaagaaatacaagtaaaggcaaaaaggccaaagcctcactgtttcaattgtggttctgaagaacaccaaatgaaagattgcccaatgcctcggaatgctgctcgaataagtgaaaagagaaaagagtatatggatgcctgtggagaagcaaacaatcagaatttccagcagcgataccacgcagaagaagtagaagaaagatttggaagattcaagccaggagttattagtgaggaacttcaagatgcactaggtgtgacagacaagagtcttccaccttttatctatcggatgcgccagctagggtacccaccagggtggctcaaagaggctgaattggagaattcggggcttgcactctatgatggaaaagatggcactgatggggaaacagaagttggagaaatacaacagaataaaagtgtcacttacgatctctcaaaattggtcaactatcctggttttaatatatctactcccagaggaattccagacgaatggaggatctttggttccataccaatgcaggcatgtcagcagaaggatgtgtttgccaattaccttacttctaacttccaagcgccaggtgtgaagtctggcaacaagaggtcttcatctcactctagcccaggtagtccaaagaagcagaagaatgaaagcaactcagcgggatctcccgccgacatggagctcgattcagatatggaggtaccacatggttctcagagcagcgaaagttttcagtttcaaccaccattacctcctgacaccctccactcccaaagggcaccccgccgctgactcccagtgactcaccccagaccagaacagcatctggagctgtggatgaggacgcactgactctagaagaacttgaagaacagcagaggcggatctgggcagctcttgagcaggccgagagcgtaaacagcgactccgacgttcctgtggacacacctttaactggcaattccgttgcctcatcaccttgtccaaatgagctagacctccctgtcccggagggaaaaacatctgaaaagcagacgctggatgagcctgaggtaccagagatttttacaaagaaatcagaagctggacatgcctccagtccagactctgaggtgacatcactttgtcagaaggaaaaagcagagttggctccggtaaacactgaaggtgcccttcttgataatggcagtgtcgtaccaaactgtgacatcagcaatgggggcagccagaagctctttcctgcagacaccagtccttcaacggccactaaaattcatagccctatacctgacatgagcaaatttgcaactggaatcacgccatttgaatttgagaatatggcagaatctactggaatgtacctcaggataagaagcttgttaaagaactcaccccgaaaccagcagaaaaacaaaaaggcctctgaataatggcttgacttagcactgagagctatttaataactttgttccgttaattagtactaattaagtggatagatagaatggttttcctgtttgtccctcccatgtttaaaaatctatccaaggttcatgttccaaagtcaagcctattttaaagaaagactgagctcactagttcagtatattttattctcactgacaaaacttggggggagatgtgaatatgacctggtttagagagggtttgttaaggtttatactatttttggattgtgactatccgtcgagagtgatggtttttatctgtcttttgtacattgttttccctttctacattttgctaattatcctgtatataagtttaatatatcactttttaaaagaaaaaattctaccattttaaattcatgtttcaactcctacaaccaaatgagaaaaatcagggatgagcagctttatcccatttggggtatttttgtaagtgatttacatgtgtcaattttagtaatacttttacttttttgtaacttcatccttcatatatgcttgctatacaggtatgttcatctttgtgtacagaggtttaataaattagttttcatatacataa

SEQ ID NO: 66773 - DNA, 1598 bp, Homo sapiens
tgtgcagctttcgcggcctgcgtctggagaaaaccctagcgggtggctccgtgcggccagagctctagagagtggtgccgccttccaaccttcttccccaagccctggtggccggctccgcctcttctcgaatcttttccacagcccaaaatggccgcagaggtgtattttggcgatctagagctcttcgagccgttcgaccacccagaggagtcgattccgaagcccgttcacactcgcttcaaggacgacgacggcgacgaggaggacgaaaatggggtcggcgacgcggagctacgggagcggcttcggcagtgcgaggagaccatcgagcagctccgcgccgagaatcaagaacttaaacgaaaattgaacattctgactcgaccgagtggaatattggtgaacgatactaagttagatggacctatattacagattctattcatgaacaatgctatttcaaagcaatatcatcaagaaatagaggaatttgtatcaaatttagtaaaaagatttgaggaacagcagaaaaatgatgtggaaaagacttcctttaatcttttgccccagccatccagtattgtgctagaggaggaccacaaagtggaagagtcctgtgccattaaaaacaacaaggaagctttcagtgttgtaggaagtgtcctgtattttactaatttttgccttgataaattggggcaaccgcttctaaatgaaaaccctcagctttccgaaggatgggaaatacccagtaccatcaagtcttcagccacattgtttctctagaagggcaagaaatacaagtaaaggcaaaaaggccaaagcctcactgtttcaattgtggttctgaagaacaccaaatgaaagattgcccaatgcctcggaatgctgctcgaataagtgaaaagagaaaagagtatatggatgcctgtggagaagcaaacaatcagaatttccagcagcgataccacgcagaagaagtagaagaaagatttggaagattcaagccaggagttattagtgaggaacttcaagatgcactaggtgtgacagacaagagtcttccaccttttatctatcggatgcgccagctagggtacccaccagggtggctcaaagaggctgaattggagaattcggggcttgcactctatgatggaaaagatggcactgatggggaaacagaagttggagaaatacaacagaataaaagtgtcacttacgatctctcaaaattggtcaactatcctggttttaatatatctactcccagaggaattccagacgaatggaggatctttggttccataccaatgcaggcatgtcagcagaaggatgtgtttgccaattaccttacttctaacttccaagcgccaggtgtgaagtctggcaacaagaggtcttcatctcactctagcccaggtagtccaaagaagcagaagaatgaaagcaactcagcgggatctcccgccgacatggagctcgattcagatatggaggtaccacatggttctcagagcagcgaaagttttcagtttcaaccaccattacctcctgacatctgaatcgagctccatgtcggcgggagatcccgc

SEQ ID NO: 66774 - DNA, 343 bp, Homo sapiens
ggaaaagtaacataagaaggaaaaatgtaatttgagatctccactgtacctcctttgagcaaaatctcaaaacatgacattttccaaatacatgtgttttttttttccttctcttttcatcattaggaatggaggatctttggttccataccaatgcaggcatgtcagcagaaggatgtgtttgccaattaccttacttctaacttccaagcggtaaatagattttaagggtgtgctctataaaatgttgttgtgtctgcgagattgtgtaatttattagcgtcttacagccttttcttgctttgttatcttgacaaaccaaaaggaaaacagtggcaaaatt

SEQ ID NO: 66775 - DNA, 471 bp, Homo sapiens
gactgagctcactagttcagtatattttattctcactgacaaaacttggggggagatgtgaatatgacctggtttagagagggtttgttaaggtttatactatttttggattgtgactatccgtcgagagtgatggtttttatctgtcttttgtacattgttttccctttctacattttgctaattatcctgtatataagtttaatatatcactttttaaaagaaaaaattctaccattttaaattcatgtttcaactcctacaaccaaatgagaaaaatcagggatgagcagctttatcccatttggggtatttttgtaagtgatttacatgtgtcaattttagtaatacttttacttttttgtaacttcatccttcatatatgcttgctatacaggtatgttcatctttgtgtacagaggtttaataaattagttttcatatacataacataatctaagactttgaata

SEQ ID NO: 66776 - DNA, 4370 bp, Homo sapiens
ggcagcgccaggcgtggggccggggcagcgccgggcgagggcgagggcgcgggcggaagttccaggagggccagaattccaagtgatttctgtcacccgccggcggaccgagagtctagggttcggggcgcgcaggctgcctcggcgcagacctcttcccctcagggaggccgtctcctgaccagacccactcctgcctcccacccgggtgccgtgtttagggttattttaggctgctcacctgacagattgtacacaagcccttaattgcccccctctgtttgaggtcgtggtgaggtttcatatttcgcagccacgctcaaattgtgccgtcatgttacagttgtaggtgatgaaataccggctgcttagacgcgggatcggtttttataccggggcaaacgctagtggtcccagaatgcagagttgggggcctcaaggaatccgggtgtgctgagataattggttaattgcttgattaaaattggggattaattttagagttcttccactcggagctcgcttctgtgctgaagatgctttgcaacgccttgaggaaaacgcgccaaagaagtttctgttagacttgagttacaagattgcagatttttcttgatttgctagtatgtttttttttacgttcgtagagttttataggtagatagataactttggttcgggtagttttccttttaaaatttgtagagaactgaaagtggctgatatgttagcttttttagggggacggggtcggggaatggagtctcagtctgttgcccaggctggagtgcagtggcgcgatctcggctcactgcaacctccgcctcccgggttcaagcgattctcctgcctcagcctcccgaatagctgggattacaggcgcccgccacggcgcccagtcagtatatcagtttttaaggtttgtgaagcgcgatttattttttcagaatgtcgtcttcctccacattgtgaggaaaattttcagaatacaaaaagttgaggccgggcgctgtggctcaagcctgtaatcccagcactttgggaggccgaggcgggtggatcatgaggtcaggaggatcatgaggatcaggtggatcatgaggatcaggaggtcagcctggccaatatggtgaaaccccgtctctactaaaaatacaaaattagccgggtgtggtggcgcgtgcttgtaatcccagctactcaggaggctgaggcaggagaatcccttgaacctgggaggcggaggttgcagtgagccaagatcacaccattgcactccagcctgggcgacagggtgagactgtgtctcaaaaaaaaaaaaaaaaagttgaaaggattctacagtggacatccatagatttattccaaattctaaagttgttaacagctcgttatactgcattctctttatcacatagtggttgttgaaaggtttgacaggaacactgatgcttcaataatggttttggttcagtttgttagtctgttgaacttcaggatcgtgtcttagaatatatgttcgaaaggataaaaaccgtactttaattttgggtttcaaaagcctacccctgcaacaaaatagaagctcaataagtgtgtcatcctcaaaatatccgtgggtcttttgtctttataatattctgacaccaaaagtgagagaagtagtagttgaattttatgatctgcattgttaaatgagggcttatcttccttaacaaataataacatcaagaacttaaacgaaaattgaacattctgactcgaccgagtggaatattggtgaacgatactaagttagatggacctatattacagattctattcatgaacaatgctatttcaaagcaatatcatcaagaaatagaggaatttgtatcaaatttagtaaaaagatttgaggaacagcagaaaaatgatgtggaaaagacttcctttaatcttttgccccagccatccagtattgtgctagaggaggaccacaaagtggaagagtcctgtgccattaaaaacaacaaggaagctttcagtgttgtaggaagtgtcctgtattttactaatttttgccttgataaattggggcaaccgcttctaaatgaaaaccctcagctttccgaaggatgggaaatacccaagtatcctacatagtgaatgaagatcttttatgcatcttgccactaagttcacctttaaaacaatttccaaattttgcagaccatgataactattccttaataaaattcactaaaggtaccatcaagtcttcagccacattgtttctctagaagggcaagaaatacaagtaaaggcaaaaaggccaaagcctcactgtttcaattgtggttctgaagaacaccaaatgaaagattgcccaatgcctcggaatgctgctcgaataagtgaaaagagaaaagagtatatggatgcctgtggagaagcaaacaatcagaatttccagcagcgataccacgcagaagaagtagaagaaagatttggaagattcaagccaggagttattagtgaggaacttcaagatgcactaggtgtgacagacaagagtcttccaccttttatctatcggatgcgccagctagggtacccaccagggtggctcaaagaggctgaattggagaattcggggcttgcactctatgatggaaaagatggcactgatggggaaacagaagttggagaaatacaacagaataaaagtgtcacttacgatctctcaaaattggtcaactatcctggttttaatatatctactcccagaggaattccagacgaatggaggatctttggttccataccaatgcaggcatgtcagcagaaggatgtgtttgccaattaccttacttctaacttccaagcgccaggtgtgaagtctggcaacaagaggtcttcatctcactctagcccaggtagtccaaagaagcagaagaatgaaagcaactcagcgggatctcccgccgacatggagctcgattcagatatggaggtaccacatggttctcagagcagcgaaagttttcagtttcaaccaccattacctcctgacactcctccactcccccggggaactcctccacccgtcttcacccctccactcccaaagggcaccccgccgctgactcccagtgactcaccccagaccagaacagcatctggagctgtggatgaggacgcactgactctagaagaacttgaagaacagcagaggcggatctgggcagctcttgagcaggccgagagcgtaaacagcgactccgacgttcctgtggacacacctttaactggcaattccgttgcctcatcaccttgtccaaatgagctagacctccctgtcccggagggaaaaacatctgaaaagcagacgctggatgagcctgaggtaccagagatttttacaaagaaatcagaagctggacatgcctccagtccagactctgaggtgacatcactttgtcagaaggaaaaagcagagttggctccggtaaacactgaaggtgcccttcttgataatggcagtgtcgtaccaaactgtgacatcagcaatgggggcagccagaagctctttcctgcagacaccagtccttcaacggccactaaaattcatagccctatacctgacatgagcaaatttgcaactggaatcacgccatttgaatttgagaatatggcagaatctactggaatgtacctcaggataagaagcttgttaaagaactcaccccgaaaccagcagaaaaacaaaaaggcctctgaataatggcttgacttagcactgagagctatttaataactttgttccgttaattagtactaattaagtggatagatagaatggttttcctgtttgtccctcccatgtttaaaaatctatccaaggttcatgttccaaagtcaagcctattttaaagaaagactgagctcactagttcagtatattttattctcactgacaaaacttggggggagatgtgaatatgacctggtttagagagggtttgttaaggtttatactatttttggattgtgactatccgtcgagagtgatggtttttatctgtcttttgtacattgttttccctttctacattttgctaattatcctgtatataagtttaatatatcactttttaaaagaaaaaattctaccattttaaattcatgtttcaactcctacaaccaaatgagaaaaatcagggatgagcagctttatcccatttggggtatttttgtaagtgatttacatgtgtcaattttagtaatacttttacttttttgtaacttcatccttcatatatgcttgctatacaggtatgttcatctttgtgtacagaggtttaataaattagttttcatatacataa

SEQ ID NO: 66777 - DNA, 1829 bp, Homo sapiens
  misc_feature (17)..(17): n is a, c, g, or t
  misc_feature (19)..(19): n is a, c, g, or t
gaaccttttttggccangngattgtgtcaggtagtcttttagtattcagtcttaattattttgcaggcaggtttagttttccttcaacacattattttccttaatttccaataaaggaaaagtaacataagaaggaaaaatgtaatttgagatctccactgtacctcctttgagcaaaatctcaaaacatgacattttccaaatacatgtgttttttttttccttctcttttcatcattaggaatggaggatctttggttccataccaatgcaggcatgtcagcagaaggatgtgtttgccaattaccttacttctaacttccaagcgccaggtgtgaagtctggcaacaagaggtcttcatctcactctagcccaggtagtccaaagaagcagaagaatgaaagcaactcagcgggatctcccgccgacatggagctcgattcagatatggaggtaccacatggttctcagagcagcgaaagttttcagtttcaaccaccattacctcctgacactcctccactcccccggggaactcctccacccgtcttcacccctccactcccaaagggcaccccgccgctgactcccagtgactcaccccagaccagaacagcatctggagctgtggatgaggacgcactgactctagaagaacttgaagaacagcagaggcggatctgggcagctcttgagcaggccgagagcgtaaacagcgactccgacgttcctgtggacacacctttaactggcaattccgttgcctcatcaccttgtccaaatgagctagacctccctgtcccggagggaaaaacatctgaaaagcagacgctggatgagcctgaggtaccagagatttttacaaagaaatcagaagctggacatgcctccagtccagactctgaggtgacatcactttgtcagaaggaaaaagcagagttggctccggtaaacactgaaggtgcccttcttgataatggcagtgtcgtaccaaactgtgacatcagcaatgggggcagccagaagctctttcctgcagacaccagtccttcaacggccactaaaattcatagccctatacctgacatgagcaaatttgcaactggaatcacgccatttgaatttgagaatatggcagaatctactggaatgtacctcaggataagaagcttgttaaagaactcaccccgaaaccagcagaaaaacaaaaaggcctctgaataatggcttgacttagcactgagagctatttaataactttgttccgttaattagtactaattaagtggatagatagaatggttttcctgtttgtccctcccatgtttaaaaatctatccaaggttcatgttccaaagtcaagcctattttaaagaaagactgagctcactagttcagtatattttattctcactgacaaaacttggggggagatgtgaatatgacctggtttagagagggtttgttaaggtttatactatttttggattgtgactatccgtcgagagtgatggtttttatctgtcttttgtacattgttttccctttctacattttgctaattatcctgtatataagtttaatatatcactttttaaaagaaaaaattctaccattttaaattcatgtttcaactcctacaaccaaatgagaaaaatcagggatgagcagctttatcccatttggggtatttttgtaagtgatttacatgtgtcaattttagtaatacttttacttttttgtaacttcatccttcatatatgcttgctatacaggtatgttcatctttgtgtacagaggtttaataaattagttttcatatacataa

SEQ ID NO: 66778 - DNA, 872 bp, Homo sapiens
tgtgcagctttcgcggcctgcgtctggagaaaaccctagcgggtggctccgtgcggccagagctctagagagtggtgccgccttccaaccttcttccccaagccctggtggccggctccgcctcttctcgaatcttttccacagcccaaaatggccgcagaggtgtattttggcgatctagagctcttcgagccgttcgaccacccagaggagtcgattccgaagcccgttcacactcgcttcaaggacgacgacggcgacgaggaggacgaaaatggggtcggcgacgcggagctacgggagcggcttcggcagtgcgaggagaccatcgagcagctccgcgccgagaatcaagaacttaaacgaaaattgaacattctgactcgaccgagtggaatattggtgaacgatactaagttagatggacctatattacagattctattcatgaacaatgctatttcaaagcaatatcatcaagaaatagaggaatttgtatcaaatttagtaaaaagatttgaggaacagcagaaaaatgatgtggaaaagacttcctttaatcttttgccccagccatccagtattgtgctagaggaggaccacaaagtggaagagtcctgtgccattaaaaacaacaaggaagctttcagtgttgtaggaagtgtcctgtattttactaatttttgccttgataaattggggcaaccgcttctaaatgaaaaccctcagctttccgaaggatgggaaatacccagtaccatcaagtcttcgcacatggttctctagaaggcagaaatcagtcacggaaggcaagctcctgttcatgggctgaaacacatgaaatgccagcctggatgggcgatatgagcaag

SEQ ID NO: 66779 - DNA, 2877 bp, Homo sapiens
tgtgcagctttcgcggcctgcgtctggagaaaaccctagcgggtggctccgtgcggccagagctctagagagtggtgccgccttccaaccttcttccccaagccctggtggccggctccgcctcttctcgaatcttttccacagcccaaaatggccgcagaggtgtattttggcgatctagagctcttcgagccgttcgaccacccagaggagtcgattccgaagcccgttcacactcgcttcaaggacgacgacggcgacgaggaggacgaaaatggggtcggcgacgcggagctacgggagcggcttcggcagtgcgaggagaccatcgagcagctccgcgccgagaatcaagaacttaaacgaaaattgaacattctgactcgaccgagtggaatattggtgaacgatactaagttagatggacctatattacagattctattcatgaacaatgctatttcaaagcaatatcatcaagaaatagaggaatttgtatcaaatttagtaaaaagatttgaggaacagcagaaaaatgatgtggaaaagacttcctttaatcttttgccccagccatccagtattgtgctagaggaggaccacaaagtggaagagtcctgtgccattaaaaacaacaaggaagctttcagtgttgtaggaagtgtcctgtattttactaatttttgccttgataaattggggcaaccgcttctaaatgaaaaccctcagctttccgaaggatgggaaatacccagtaccatcaagtcttcagccacattgtttctctagaagggcaagaaatacaagtaaaggcaaaaaggccaaagcctcactgtttcaattgtggttctgaagaacaccaaatgaaagattgcccaatgcctcggaatgctgctcgaataagtgaaaagagaaaagagtatatggatgcctgtggagaagcaaacaatcagaatttccagcagcgataccacgcagaagaagtagaagaaagatttggaagattcaagccaggagttattagtgaggaacttcaagatgcactaggtgtgacagacaagagtcttccaccttttatctatcggatgcgccagctagggtacccaccagggtggctcaaagaggctgaattggagaattcggggcttgcactctatgatggaaaagatggcactgatggggaaacagaagttggagaaatacaacagaataaaagtgtcacttacgatctctcaaaattggtcaactatcctggttttaatatatctactcccagaggaattccagacgaatggaggatctttggttccataccaatgcaggcatgtcagcagaaggatgtgtttgccaattaccttacttctaacttccaagcgccaggtgtgaagtctggcaacaagaggtcttcatctcactctagcccaggtagtccaaagaagcagaagaatgaaagcaactcagcgggatctcccgccgacatggagctcgattcagatatggaggtaccacatggttctcagagcagcgaaagttttcagtttcaaccaccattacctcctgacactcctccactcccccggggaactcctccacccgtcttcacccctccactcccaaagggcaccccgccgctgactcccagtgactcaccccagaccagaacagcatctggagctgtggatgaggacgcactgactctagaagaacttgaagaacagcagaggcggatctgggcagctcttgagcaggccgagagcgtaaacagcgactccgacgttcctgtggacacacctttaactggcaattccgttgcctcatcaccttgtccaaatgagctagacctccctgtcccggagggaaaaacatctgaaaagcagacgctggatgagcctgaggtaccagagatttttacaaagaaatcagaagctggacatgcctccagtccagactctgaggtgacatcactttgtcagaaggaaaaagcagagttggctccggtaaacactgaaggtgcccttcttgataatggcagtgtcgtaccaaactgtgacatcagcaatgggggcagccagaagctctttcctgcagacaccagtccttcaacggccactaaaattcatagccctatacctgacatgagcaaatttgcaactggaatcacgccatttgaatttgagaatatggcagaatctactggaatgtacctcaggataagaagcttgttaaagaactcaccccgaaaccagcagaaaaacaaaaaggcctctgaataatggcttgacttagcactgagagctatttaataactttgttccgttaattagtactaattaagtggatagatagaatggttttcctgtttgtccctcccatgtttaaaaatctatccaaggttcatgttccaaagtcaagcctattttaaagaaagactgagctcactagttcagtatattttattctcactgacaaaacttggggggagatgtgaatatgacctggtttagagagggtttgttaaggtttatactatttttggattgtgactatccgtcgagagtgatggtttttatctgtcttttgtacattgttttccctttctacattttgctaattatcctgtatataagtttaatatatcactttttaaaagaaaaaattctaccattttaaattcatgtttcaactcctacaaccaaatgagaaaaatcagggatgagcagctttatcccatttggggtatttttgtaagtgatttacatgtgtcaattttagtaatacttttacttttttgtaacttcatccttcatatatgcttgctatacaggtatgttcatctttgtgtacagaggtttaataaattagttttcatatacataa

SEQ ID NO: 66780 - DNA, 2708 bp, Homo sapiens
tgtgcagctttcgcggcctgcgtctggagaaaaccctagcgggtggctccgtgcggccagagctctagagagtggtgccgccttccaaccttcttccccaagccctggtggccggctccgcctcttctcgaatcttttccacagcccaaaatggccgcagaggtgtattttggcgatctagagctcttcgagccgttcgaccacccagaggagtcgattccgaagcccgttcacactcgcttcaaggacgacgacggcgacgaggaggacgaaaatggggtcggcgacgcggagctacgggagcggcttcggcagtgcgaggagaccatcgagcagctccgcgccgagaatcaagaacttaaacgaaaattgaacattctgactcgaccgagtggaatattggtgaacgatactaagttagatggacctatattacagattctattcatgaacaatgctatttcaaagcaatatcatcaagaaatagaggaatttgtatcaaatttagtaaaaagatttgaggaacagcagaaaaatgatgtggaaaagacttcctttaatcttttgccccagccatccagtattgtgctagaggaggaccacaaagtggaagagtcctgtgccattaaaaacaacaaggaagctttcagtgccaaagcctcactgtttcaattgtggttctgaagaacaccaaatgaaagattgcccaatgcctcggaatgctgctcgaataagtgaaaagagaaaagagtatatggatgcctgtggagaagcaaacaatcagaatttccagcagcgataccacgcagaagaagtagaagaaagatttggaagattcaagccaggagttattagtgaggaacttcaagatgcactaggtgtgacagacaagagtcttccaccttttatctatcggatgcgccagctagggtacccaccagggtggctcaaagaggctgaattggagaattcggggcttgcactctatgatggaaaagatggcactgatggggaaacagaagttggagaaatacaacagaataaaagtgtcacttacgatctctcaaaattggtcaactatcctggttttaatatatctactcccagaggaattccagacgaatggaggatctttggttccataccaatgcaggcatgtcagcagaaggatgtgtttgccaattaccttacttctaacttccaagcgccaggtgtgaagtctggcaacaagaggtcttcatctcactctagcccaggtagtccaaagaagcagaagaatgaaagcaactcagcgggatctcccgccgacatggagctcgattcagatatggaggtaccacatggttctcagagcagcgaaagttttcagtttcaaccaccattacctcctgacactcctccactcccccggggaactcctccacccgtcttcacccctccactcccaaagggcaccccgccgctgactcccagtgactcaccccagaccagaacagcatctggagctgtggatgaggacgcactgactctagaagaacttgaagaacagcagaggcggatctgggcagctcttgagcaggccgagagcgtaaacagcgactccgacgttcctgtggacacacctttaactggcaattccgttgcctcatcaccttgtccaaatgagctagacctccctgtcccggagggaaaaacatctgaaaagcagacgctggatgagcctgaggtaccagagatttttacaaagaaatcagaagctggacatgcctccagtccagactctgaggtgacatcactttgtcagaaggaaaaagcagagttggctccggtaaacactgaaggtgcccttcttgataatggcagtgtcgtaccaaactgtgacatcagcaatgggggcagccagaagctctttcctgcagacaccagtccttcaacggccactaaaattcatagccctatacctgacatgagcaaatttgcaactggaatcacgccatttgaatttgagaatatggcagaatctactggaatgtacctcaggataagaagcttgttaaagaactcaccccgaaaccagcagaaaaacaaaaaggcctctgaataatggcttgacttagcactgagagctatttaataactttgttccgttaattagtactaattaagtggatagatagaatggttttcctgtttgtccctcccatgtttaaaaatctatccaaggttcatgttccaaagtcaagcctattttaaagaaagactgagctcactagttcagtatattttattctcactgacaaaacttggggggagatgtgaatatgacctggtttagagagggtttgttaaggtttatactatttttggattgtgactatccgtcgagagtgatggtttttatctgtcttttgtacattgttttccctttctacattttgctaattatcctgtatataagtttaatatatcactttttaaaagaaaaaattctaccattttaaattcatgtttcaactcctacaaccaaatgagaaaaatcagggatgagcagctttatcccatttggggtatttttgtaagtgatttacatgtgtcaattttagtaatacttttacttttttgtaacttcatccttcatatatgcttgctatacaggtatgttcatctttgtgtacagaggtttaataaattagttttcatatacataa

SEQ ID NO: 66781 - DNA, 1651 bp, Homo sapiens
tgtgcagctttcgcggcctgcgtctggagaaaaccctagcgggtggctccgtgcggccagagctctagagagtggtgccgccttccaaccttcttccccaagccctggtggccggctccgcctcttctcgaatcttttccacagcccaaaatggccgcagaggtgtattttggcgatctagagctcttcgagccgttcgaccacccagaggagtcgattccgaagcccgttcacactcgcttcaaggacgacgacggcgacgaggaggacgaaaatggggtcggcgacgcggagctacgggagcggcttcggcagtgcgaggagaccatcgagcagctccgcgccgagaatcaagaacttaaacgaaaattgaacattctgactcgaccgagtggaatattggtgaacgatactaagttagatggacctatattacagattctattcatgaacaatgctatttcaaagcaatatcatcaagaaatagaggaatttgtatcaaatttagtaaaaagatttgaggaacagcagaaaaatgatgtggaaaagacttcctttaatcttttgccccagccatccagtattgtgctagaggaggaccacaaagtggaagagtcctgtgccattaaaaacaacaaggaagctttcagtgttgtaggaagtgtcctgtattttactaatttttgccttgataaattggggcaaccgcttctaaatgaaaaccctcagctttccgaaggatgggaaatacccagtaccatcaagtcttcagccacattgtttctctagaagggcaagaaatacaagtaaaggcaaaaaggccaaagcctcactgtttcaattgtggttctgaagaacaccaaatgaaagattgcccaatgcctcggaatgctgctcgaataagtgaaaagagaaaagagtatatggatgcctgtggagaagcaaacaatcagaatttccagcagcgataccacgcagaagaagtagaagaaagatttggaagattcaagccaggagttattagtgaggaacttcaagatgcactaggtgtgacagacaagagtcttccaccttttatctatcggatgcgccagctagggtacccaccagggtggctcaaagaggctgaattggagaattcggggcttgcactctatgatggaaaagatggcactgatggggaaacagaagttggagaaatacaacagaataaaagtgtcacttacgatctctcaaaattggtcaactatcctggttttaatatatctactcccagaggaattccagacgaatggaggatctttggttccataccaatgcaggcatgtcagcagaaggatgtgtttgccaattaccttacttctaacttccaagcgccaggtgtgaagtctggcaacaagaggtcttcatctcactctagcccaggtagtccaaagaagcagaagaatgaaagcaactcagcgggatctcccgccgacatggagctcgattcagatatggaggtaccacatggttctcagagcagcgaaagttttcagtttcaaccaccattacctcctgacactcctccactcccccggggaactcctccacccgtcttcacccctccgtgtgccccaggtgccaccaataaaaatcctacagaaaattc

SEQ ID NO: 66782 - DNA, 1479 bp, Homo sapiens
tgtgcagctttcgcggcctgcgtctggagaaaaccctagcgggtggctccgtgcggccagagctctagagagtggtgccgccttccaaccttcttccccaagccctggtggccggctccgcctcttctcgaatcttttccacagcccaaaatggccgcagaggtgtattttggcgatctagagctcttcgagccgttcgaccacccagaggagtcgattccgaagcccgttcacactcgcttcaaggacgacgacggcgacgaggaggacgaaaatggggtcggcgacgcggagctacgggagcggcttcggcagtgcgaggagaccatcgagcagctccgcgccgagaatcaagaacttaaacgaaaattgaacattctgactcgaccgagtggaatattggtgaacgatactaagttagatggacctatattacagattctattcatgaacaatgctatttcaaagcaatatcatcaagaaatagaggaatttgtatcaaatttagtaaaaagatttgaggaacagcagaaaaatgatgtggaaaagacttcctttaatcttttgccccagccatccagtattgtgctagaggaggaccacaaagtggaagagtcctgtgccattaaaaacaacaaggaagctttcagtgttgtaggaagtgtcctgtattttactaatttttgccttgataaattggggcaaccgcttctaaatgaaaaccctcagctttccgaaggatgggaaatacccagtaccatcaagtcttcagccacattgtttctctagaagggcaagaaatacaagtaaaggcaaaaaggccaaagcctcactgtttcaattgtggttctgaagaacaccaaatgaaagattgcccaatgcctcggaatgctgctcgaataagtgaaaagagaaaagagtatatggatgcctgtggagaagcaaacaatcagaatttccagcagcgataccacgcagaagaagtagaagaaagatttggaagattcaagccaggagttattagtgaggaacttcaagatgcactaggtgtgacagacaagagtcttccaccttttatctatcggatgcgccagctagggtacccaccagggtggctcaaagaggctgaattggagaattcggggcttgcactctatgatggaaaagatggcactgatggggaaacagaagttggagaaatacaacagaataaaagtgtcacttacgatctctcaaaattggtcaactatcctggttttaatatatctactcccagaggaattccagacgtaagtatattgatttttttaaattatcgtgtgatgtgatattattatgttaaagattggtcaaaatattaacttgttggctaggcatagtggctcacacctgtaatcccaacactttgggagtccgaggcaagatgatcacttgagtcccagagttcgagaccagcctgggcaacatagcaagaccttg

SEQ ID NO: 66783 - DNA, 1131 bp, Homo sapiens
  misc_feature (4)..(4): n is a, c, g, or t
tccnccgggctgaggaattcggcacgagtgaagataaggcccacatgaatgtggacattgcttgtgctgtggctgatggggaaaatgcctttcagggcctagaacccaaattagagccccaggaactatctcctctctctgctactgttttccccaaagtggaacatagcccagggcctccaccagtcgataaacagtgccaagaaggattgtcagagaacagtgcctatcgctggaccgttgtgaaaacagaggagggaaggcaagctctggagccgctccctcagggcatccaggagtctctaaacaactcttcccctggggatttagaggaagttgtcaagatggaacctgaagatgctacagaggaaatcagtggatttctttgagctaggagaataagagtctggagactgggagccttcacttcggcctccgattggtggcgcatagggtgtaaccaataggaaacccctaaagggtacttaaaccccagattttgcaactggggctcttgagcagcttgctttagcctgctcccactctgtggaatatacttttgcttcaataaatctgtgcttttattgcttaaaaaaaaaaaaaaaaaaaaaaaaaaaaagggggggggggccctaagaaggatactcccctgagaggggcgccacaaggttatacgcgcggatccccaggcttccgggcgacacaggggggccccatataggggaggccggaataaaaaccggcaaggcgcaagggagccggaggagtttaaacaacggcacgggagacggggcgaacaagccgggcaaacccgggggggcactccctgtgggggaaagggggaaacccctttacactcgcgggggggggggcgcaccaccatacatgtggggaacaaaaaatatgaacctttagaggaaaaggtttttcgaaaaagcgcctgtaagggggataacattttgtagacaactctgtaaaacgagggggtaatatcgcgctggtgggttaaaaacctaataagcgggggcaataggtgccttgagaaggggacttttgacgaaagtttgggggcatcacggcgggagaaacgaagaatttgatagcaaaaattttctttattcccccggggac

SEQ ID NO: 66784 - DNA, 435 bp, Homo sapiens
ggacaatatgcttacctgtcgataaacagtgcaagacggtgactagaggatagtgtatatttgggagctgcggtgtgttgcaagcgtggaggtggggggatcggaaggcaagctctggagccgctccctcagggcatccaggagtctctaaacaactcttcccctggggatttagaggaagttgtcaagatggaacctgaagatgctacagaggaaatcagtggatttctttgagctaggagaataagagtctggagactgggagccttcacttcggcctccgattggtggcgcatagggtgtaaccaataggaaacccctaaagggtacttaaaccccagattttgcaactggggctcttgagcagcttgctttagcctgctcccactctgtggaatatacttttgcttcaataaatctgtgcttttattgctt

SEQ ID NO: 66785 - DNA, 425 bp, Homo sapiens
tcagcaccataggatgataactatatatgatgaggatgggtgtttgctaagtcgcaaacctgcctagattaaggaaaacagaagtcatgggtgaccatgagattttggaagctgcagaacttaacacaaaattgagttcagcttcttggaaagataactggaaatcttgttgttttcatctctcacaatttcctctactatcttcacataagattcgccagtctccatctcctctcttcaacaaacgccagcttctgttactgatgtaaggatgcagagtcctgtcaggagttaggtgtcaagtgaagtctccttgttatggggcagtgcagctgtaggccaagctgtatctgtttgggaagggagaaaaaacagtagctggcatccatatccacttctccgggtgagtggtgctggagaggtat

SEQ ID NO: 66786 - DNA, 386 bp, Homo sapiens
ggctccccttctttttgagggtctccgtctcacatatggctttcgaaacatggagaaggcaagctctggagccgctccctcagggcatccaggagtctctaaacaactcttcccctggggatttagaggaagttgtcaagatggaacctgaagatgctacagaggaaatcagtggatttctttgagctaggagaataagagtctggagactgggagccttcacttcggcctccgattggtggcgcatagggtgtaaccaataggaaacccctaaagggtacttaaaccccagattttgcaactggggctcttgagcagcttgctttagcctgctcccactctgtggaatatacttttgcttcaataaatctgtgcttttattgctt

SEQ ID NO: 66787 - DNA, 2887 bp, Homo sapiens
ggcacgaggcctccccacaccacctcatcactctcctttacttggctgccagtccagctgcctcagaatgtcagaagggtgccattttcagttcttttcctgtctgactgtagggtatagaacaggcagccctaagtgctgctttctgcgcaaatgttttttgattacaaatctctaactaggtttgaaatgttttatagaataagacaatattcttttcaacaaactttaaaaaaaatgtacagttttgttgtttgaaggcttgggctcgcgccgctgaagtcggcttacccgctggccgcctcctgacaagcgggagggatccgcggtggacccagggaagcggaggagcctggcggccaccccctcttcctcacttccctgtactctcatcgctctcggcctccgacacgaaaaggaagcaaatgagctgatggaagatctgtttgaaactttccaagatgagatgggattctccaacatggaagatgatggcccagaagaggaggagcgtgtggctgagcctcaagctaactttaacacccctcaagctctacggtttgaggaactactggccaacctactaaatgaacaacatcagatagcgaaggaactatttgaacagctgaagatgaagaaaccttcagccaaacagcagaaggaggtagagaaggttaaaccccagtgtaaggaagttcatcagaccctgattctggacccagcacaaaggaagagactccagcagcagatgcagcagcatgttcagctcttgacacaaatccaccttcttgccacctgcaaccccaatctcaatccggaggccagtagcaccaggatatgtcttaaagagctgggaacctttgctcaaagctccatcgcccttcaccatcagtacaaccccaagtttcagaccctgttccaaccctgtaacttgatgggagctatgcagctgattgaagacttcagcacacatgtcagcattgactgcagccctcataaaactgtcaagaagactgccaatgaatttccctgtttgccaaagcaagtggcttggatcctggccacaagcaaggttttcatgtatccagagttacttccagtgtgttccctgaaggcaaagaatccccaggataagatcctcttcaccaaggctgaggacaatttgttagctttaggactgaagcattttgaagggactgagtttcttaaccctctaatcagcaagtaccttctaacctgcaagactgcccgccaactgacagtgagaatcaagaacctcaacatgaacagagctcctgacaacatcattaaattttataagaagaccaaacagctgccagtcctaggaaaatgctgtgaagagatccagccacatcagtggaagccacctatagagagagaagaacaccggctcccattctggttaaaggccagtctgccatccatccaggaagaactgcggcacatggctgatggtgctagagaggtaggaaatatgactggaaccactgagatcaactcagatcaaggcctagaaaaagacaactcagagttggggagtgaaactcggtacccactgctattgcctaagggtgtagtcctgaaactgaagccagttgccgaccgtttccccaagaaggcttggagacagaagcgttcatcagtcctgaaacccctccttatccaacccagcccctctctccagcccagcttcaaccctgggaaaacaccagcccaatcaactcattcagaagcccctccgagcaaaatggtgctccggattcctcacccaatacagccagccactgttttacagacagttccaggtgtccctccactgggggtcagtggaggtgagagttttgagtctcctgcagcactgcctgctatgccccctgaggccaggacaagcttccctctgtctgagtcccagactttgctctcttctgcccctgtgcccaaggtaatgatgccctcccctgcctcttccatgtttcgaaagccatatgtgagacggagaccctcaaaaagaaggggagccagggcctttcgctgtatcaaacctgcccctgttatccaccctgcatctgttatcttcactgttcctgctaccactgtgaagattgtgagccttggcggtggctgtaacatgatccagcctgtcaatgcggctgtggcccagagtccccagactattcccatcgccaccctcttggttaaccctacttccttcccctgtccattgaaccagccccttgtggcctcctctgtctcacccttaattgtttctggcaattctgtgaatcttcctataccatccacccctgaagataaggcccacatgaatgtggacattgcttgtgctgtggctgatggggaaaatgcctttcagggcctagaacccaaattagagccccaggaactatctcctctctctgctactgttttccccaaagtggaacatagcccagggcctccaccagtcgataaacagtgccaagaaggattgtcagagaacagtgcctatcgctggaccgttgtgaaaacagaggagggaaggcaagctctggagccgctccctcagggcatccaggagtctctaaacaactcttcccctggggatttagaggaagttgtcaagatggaacctgaagatgctacagaggaaatcagtggatttctttgagctaggagaataagagtctggagactgggagccttcacttcggcctccgattggtggcgcatagggtgtaaccaataggaaacccctaaagggtacttaaaccccagattttgcaactggggctcttgagcagcttgctttagcctgctcccactctgtggaatatacttttgcttcaataaatctgtgcttttattgctt

SEQ ID NO: 66788 - DNA, 2670 bp, Homo sapiens
  misc_feature (20)..(20): n is a, c, g, or t
tatgtataccccccgagtantacgaggcgtggtggccacaagggggctcgcgcgtgaagttgttatcggcttacccgctggccgcctcctgacaagcgggagggatccgcggtggacccagggaagcggaggagcctggcggccaccccctcttcctcacttccctgtactctcatcgctctcggcctccgacacgaaaaggaagcaaatgagctgatggaagatctgtttgaaactttccaagatgagatgggattctccaacatggaagatgatggcccagaagaggaggagcgtgtggctgagcctcaagctaactttaacacccctcaagctctacggtttgaggaactactggccaacctactaaatgaacaacatcagatagcgaaggaactatttgaacagctgaagatgaagaaaccttcagccaaacagcagaaggaggtagagaaggttaaaccccagtgtaaggaagttcatcagaccctgattctggacccagcacaaaggaagagactccagcagcagatgcagcagcatgttcagctcttgacacaaatccaccttcttgccacctgcaaccccaatctcaatccggaggccagtagcaccaggatatgtcttaaagagctgggaacctttgctcaaagctccatcgcccttcaccatcagtacaaccccaagtttcagaccctgttccaaccctgtaacttgatgggagctatgcagctgattgaagacttcagcacacatgtcagcattgactgcagccctcataaaactgtcaagaagactgccaatgaatttccctgtttgccaaagcaagtggcttggatcctggccacaagcaaggttttcatgtatccagagttacttccagtgtgttccctgaaggcaaagaatccccaggataagatcctcttcaccaaggctgaggacaatttgttagctttaggactgaagcattttgaagggactgagtttcttaaccctctaatcagcaagtaccttctaacctgcaagactgcccgccaactgacagtgagaatcaagaacctcaacatgaacagagctcctgacaacatcattaaattttataagaagaccaaacagctgccagtcctaggaaaatgctgtgaagagatccagccacatcagtggaagccacctatagagagagaagaacaccggctcccattctggttaaaggccagtctgccatccatccaggaagaactgcggcacatggctgatggtgctagagaggtaggaaatatgactggaaccactgagatcaactcagatcaaggcctagaaaaagacaactcagagttggggagtgaaactcggtacccactgctattgcctaagggtgtagtcctgaaactgaagccagttgccgaccgtttccccaagaaggcttggagacagaagcgttcatcagtcctgaaacccctccttatccaacccagcccctctctccagcccagcttcaaccctgggaaaacaccagcccaatcaactcattcagaagcccctccgagcaaaatggtgctccggattcctcacccaatacagccagccactgttttacagacagttccaggtgtccctccactgggggtcagtggaggtgagagttttgagtctcctgcagcactgcctgctatgccccctgaggccaggacaagcttccctctgtctgagtcccagactttgctctcttctgcccctgtgcccaaggtaatgatgccctcccctgcctcttccatgtttcgaaagccatatgtgagacggagaccctcaaaaagaaggggagccagggcctttcgctgtatcaaacctgcccctgttatccaccctgcatctgttatcttcactgttcctgctaccactgtgaagattgtgagccttggcggtggctgtaacatgatccagcctgtcaatgcggctgtggcccagagtccccagactattcccatcgccaccctcttggttaaccctacttccttcccctgtccattgaaccagccccttgtggcctcctctgtctcacccttaattgtttctggcaattctgtgaatcttcctataccatccacccctgaagataaggcccacatgaatgtggacattgcttgtgctgtggctgatggggaaaatgcctttcagggcctagaacccaaattagagccccaggaactatctcctctctctgctactgttttccccaaagtggaacatagcccagggcctccaccagtcgataaacagtgccaagaaggattgtcagagaacagtgcctatcgctggaccgttgtgaaaacagaggagggaaggcaagctctggagccgctccctcagggcatccaggagtctctaaacaactcttcccctggggatttagaggaagttgtcaagatggaacctgaagatgctacagaggaaatcagtggatttctttgagctaggagaataagagtctggagactgggagccttcacttcggcctccgattggtggcgcatagggtgtaaccaataggaaacccctaaagggtacttaaaccccagattttgcaactggggctcttgagcagcttgctttagcctgctcccactctgtggaatatacttttgcttcaataaatctgtgcttttattgctt

SEQ ID NO: 66789 - DNA, 2467 bp, Homo sapiens
aggctaggtagaggccggggttaatcggccgaggttccaagatgagatgggattctccaacatggaagatgatggcccagaagaggaggagcgtgtggctgagcctcaagctaactttaacacccctcaagctctacggtttgaggaactactggccaacctactaaatgaacaacatcagatagcgaaggaactatttgaacagctgaagatgaagaaaccttcagccaaacagcagaaggaggtagagaaggttaaaccccagtgtaaggaagttcatcagaccctgattctggacccagcacaaaggaagagactccagcagcagatgcagcagcatgttcagctcttgacacaaatccaccttcttgccacctgcaaccccaatctcaatccggaggccagtagcaccaggatatgtcttaaagagctgggaacctttgctcaaagctccatcgcccttcaccatcagtacaaccccaagtttcagaccctgttccaaccctgtaacttgatgggagctatgcagctgattgaagacttcagcacacatgtcagcattgactgcagccctcataaaactgtcaagaagactgccaatgaatttccctgtttgccaaagcaagtggcttggatcctggccacaagcaaggttttcatgtatccagagttacttccagtgtgttccctgaaggcaaagaatccccaggataagatcctcttcaccaaggctgaggacaatttgttagctttaggactgaagcattttgaagggactgagtttcttaaccctctaatcagcaagtaccttctaacctgcaagactgcccgccaactgacagtgagaatcaagaacctcaacatgaacagagctcctgacaacatcattaaattttataagaagaccaaacagctgccagtcctaggaaaatgctgtgaagagatccagccacatcagtggaagccacctatagagagagaagaacaccggctcccattctggttaaaggccagtctgccatccatccaggaagaactgcggcacatggctgatggtgctagagaggtaggaaatatgactggaaccactgagatcaactcagatcaaggcctagaaaaagacaactcagagttggggagtgaaactcggtacccactgctattgcctaagggtgtagtcctgaaactgaagccagttgccgaccgtttccccaagaaggcttggagacagaagcgttcatcagtcctgaaacccctccttatccaacccagcccctctctccagcccagcttcaaccctgggaaaacaccagcccaatcaactcattcagaagcccctccgagcaaaatggtgctccggattcctcacccaatacagccagccactgttttacagacagttccaggtgtccctccactgggggtcagtggaggtgagagttttgagtctcctgcagcactgcctgctatgccccctgaggccaggacaagcttccctctgtctgagtcccagactttgctctcttctgcccctgtgcccaaggtaatgatgccctcccctgcctcttccatgtttcgaaagccatatgtgagacggagaccctcaaaaagaaggggagccagggcctttcgctgtatcaaacctgcccctgttatccaccctgcatctgttatcttcactgttcctgctaccactgtgaagattgtgagccttggcggtggctgtaacatgatccagcctgtcaatgcggctgtggcccagagtccccagactattcccatcgccaccctcttggttaaccctacttccttcccctgtccattgaaccagccccttgtggcctcctctgtctcacccttaattgtttctggcaattctgtgaatcttcctataccatccacccctgaagataaggcccacatgaatgtggacattgcttgtgctgtggctgatggggaaaatgcctttcagggcctagaacccaaattagagccccaggaactatctcctctctctgctactgttttccccaaagtggaacatagcccagggcctccaccagtcgataaacagtgccaagaaggattgtcagagaacagtgcctatcgctggaccgttgtgaaaacagaggagggaaggcaagctctggagccgctccctcagggcatccaggagtctctaaacaactcttcccctggggatttagaggaagttgtcaagatggaacctgaagatgctacagaggaaatcagtggatttctttgagctaggagaataagagtctggagactgggagccttcacttcggcctccgattggtggcgcatagggtgtaaccaataggaaacccctaaagggtacttaaaccccagattttgcaactggggctcttgagcagcttgctttagcctgctcccactctgtggaatatacttttgcttcaataaatctgtgcttttattgctt

SEQ ID NO: 66790 - DNA, 2823 bp, Homo sapiens
ggcacgaggcctccccacaccacctcatcactctcctttacttggctgccagtccagctgcctcagaatgtcagaagggtgccattttcagttcttttcctgtctgactgtagggtatagaacaggcagccctaagtgctgctttctgcgcaaatgttttttgattacaaatctctaactaggtttgaaatgttttatagaataagacaatattcttttcaacaaactttaaaaaaaatgtacagttttgttgtttgaaggcttgggctcgcgccgctgaagtcggcttacccgctggccgcctcctgacaagcgggagggatccgcggtggacccagggaagcggaggagcctggcggccaccccctcttcctcacttccctgtactctcatcgctctcggcctccgacacgaaaaggaagcaaatgagctgatggaagatctgtttgaaactttccaagatgagatgggattctccaacatggaagatgatggcccagaagaggaggagcgtgtggctgagcctcaagctaactttaacacccctcaagctctacggtttgaggaactactggccaacctactaaatgaacaacatcagatagcgaaggaactatttgaacagctgaagatgaagaaaccttcagccaaacagcagaaggaggtagagaaggttaaaccccagtgtaaggaagttcatcagaccctgattctggacccagcacaaaggaagagactccagcagcagatgcagcagcatgttcagctcttgacacaaatccaccttcttgccacctgcaaccccaatctcaatccggaggccagtagcaccaggatatgtcttaaagagctgggaacctttgctcaaagctccatcgcccttcaccatcagtacaaccccaagtttcagaccctgttccaaccctgtaacttgatgggagctatgcagctgattgaagacttcagcacacatgtcagcattgactgcagccctcataaaactgtcaagaagactgccaatgaatttccctgtttgccaaagcaagtggcttggatcctggccacaagcaaggttttcatgtatccagagttacttccagtgtgttccctgaaggcaaagaatccccaggataagatcctcttcaccaaggctgaggacaataccttctaacctgcaagactgcccgccaactgacagtgagaatcaagaacctcaacatgaacagagctcctgacaacatcattaaattttataagaagaccaaacagctgccagtcctaggaaaatgctgtgaagagatccagccacatcagtggaagccacctatagagagagaagaacaccggctcccattctggttaaaggccagtctgccatccatccaggaagaactgcggcacatggctgatggtgctagagaggtaggaaatatgactggaaccactgagatcaactcagatcaaggcctagaaaaagacaactcagagttggggagtgaaactcggtacccactgctattgcctaagggtgtagtcctgaaactgaagccagttgccgaccgtttccccaagaaggcttggagacagaagcgttcatcagtcctgaaacccctccttatccaacccagcccctctctccagcccagcttcaaccctgggaaaacaccagcccaatcaactcattcagaagcccctccgagcaaaatggtgctccggattcctcacccaatacagccagccactgttttacagacagttccaggtgtccctccactgggggtcagtggaggtgagagttttgagtctcctgcagcactgcctgctatgccccctgaggccaggacaagcttccctctgtctgagtcccagactttgctctcttctgcccctgtgcccaaggtaatgatgccctcccctgcctcttccatgtttcgaaagccatatgtgagacggagaccctcaaaaagaaggggagccagggcctttcgctgtatcaaacctgcccctgttatccaccctgcatctgttatcttcactgttcctgctaccactgtgaagattgtgagccttggcggtggctgtaacatgatccagcctgtcaatgcggctgtggcccagagtccccagactattcccatcgccaccctcttggttaaccctacttccttcccctgtccattgaaccagccccttgtggcctcctctgtctcacccttaattgtttctggcaattctgtgaatcttcctataccatccacccctgaagataaggcccacatgaatgtggacattgcttgtgctgtggctgatggggaaaatgcctttcagggcctagaacccaaattagagccccaggaactatctcctctctctgctactgttttccccaaagtggaacatagcccagggcctccaccagtcgataaacagtgccaagaaggattgtcagagaacagtgcctatcgctggaccgttgtgaaaacagaggagggaaggcaagctctggagccgctccctcagggcatccaggagtctctaaacaactcttcccctggggatttagaggaagttgtcaagatggaacctgaagatgctacagaggaaatcagtggatttctttgagctaggagaataagagtctggagactgggagccttcacttcggcctccgattggtggcgcatagggtgtaaccaataggaaacccctaaagggtacttaaaccccagattttgcaactggggctcttgagcagcttgctttagcctgctcccactctgtggaatatacttttgcttcaataaatctgtgcttttattgctt

SEQ ID NO: 66791 - DNA, 2927 bp, Homo sapiens
ggcacgaggcctccccacaccacctcatcactctcctttacttggctgccagtccagctgcctcagaatgtcagaagggtgccattttcagttcttttcctgtctgactgtagggtatagaacaggcagccctaagtgctgctttctgcgcaaatgttttttgattacaaatctctaactaggtttgaaatgttttatagaataagacaatattcttttcaacaaactttaaaaaaaatgtacagttttgttgtttgaaggcttgggctcgcgccgctgaagtcggcttacccgctggccgcctcctgacaagcgggagggatccgcggtggacccagggaagcggaggagcctggcggccaccccctcttcctcacttccctgtactctcatcgctctcggcctccgacacgaaaaggaagcaaatgagctgatggaagatctgtttgaaactttccaagatgagatgggattctccaacatggaagatgatggcccagaagaggaggagcgtgtggctgagcctcaagctaactttaacacccctcaagctctacggtttgaggaactactggccaacctactaaatgaacaacatcagatagcgaaggaactatttgaacagctgaagatgaagaaaccttcagccaaacagcagaaggaggtagagaaggttaaaccccagtgtaaggaagttcatcagaccctgattctggacccagcacaaaggaagagactccagcagcagatgcagcagcatgttcagctcttgacacaaatccaccttcttgccacctgcaaccccaatctcaatccggaggccagtagcaccaggatatgtcttaaagagctgggaacctttgctcaaagctccatcgcccttcaccatcagtacaaccccaagtttcagaccctgttccaaccctgtaacttgatgggagctatgcagctgattgaagacttcagcacacatgtcagcattgactgcagccctcataaaactgtcaagaagactgggtaggagacagatgtgtcagctttaagtttttacttgcgccaatgaatttccctgtttgccaaagcaagtggcttggatcctggccacaagcaaggttttcatgtatccagagttacttccagtgtgttccctgaaggcaaagaatccccaggataagatcctcttcaccaaggctgaggacaatttgttagctttaggactgaagcattttgaagggactgagtttcttaaccctctaatcagcaagtaccttctaacctgcaagactgcccgccaactgacagtgagaatcaagaacctcaacatgaacagagctcctgacaacatcattaaattttataagaagaccaaacagctgccagtcctaggaaaatgctgtgaagagatccagccacatcagtggaagccacctatagagagagaagaacaccggctcccattctggttaaaggccagtctgccatccatccaggaagaactgcggcacatggctgatggtgctagagaggtaggaaatatgactggaaccactgagatcaactcagatcaaggcctagaaaaagacaactcagagttggggagtgaaactcggtacccactgctattgcctaagggtgtagtcctgaaactgaagccagttgccgaccgtttccccaagaaggcttggagacagaagcgttcatcagtcctgaaacccctccttatccaacccagcccctctctccagcccagcttcaaccctgggaaaacaccagcccaatcaactcattcagaagcccctccgagcaaaatggtgctccggattcctcacccaatacagccagccactgttttacagacagttccaggtgtccctccactgggggtcagtggaggtgagagttttgagtctcctgcagcactgcctgctatgccccctgaggccaggacaagcttccctctgtctgagtcccagactttgctctcttctgcccctgtgcccaaggtaatgatgccctcccctgcctcttccatgtttcgaaagccatatgtgagacggagaccctcaaaaagaaggggagccagggcctttcgctgtatcaaacctgcccctgttatccaccctgcatctgttatcttcactgttcctgctaccactgtgaagattgtgagccttggcggtggctgtaacatgatccagcctgtcaatgcggctgtggcccagagtccccagactattcccatcgccaccctcttggttaaccctacttccttcccctgtccattgaaccagccccttgtggcctcctctgtctcacccttaattgtttctggcaattctgtgaatcttcctataccatccacccctgaagataaggcccacatgaatgtggacattgcttgtgctgtggctgatggggaaaatgcctttcagggcctagaacccaaattagagccccaggaactatctcctctctctgctactgttttccccaaagtggaacatagcccagggcctccaccagtcgataaacagtgccaagaaggattgtcagagaacagtgcctatcgctggaccgttgtgaaaacagaggagggaaggcaagctctggagccgctccctcagggcatccaggagtctctaaacaactcttcccctggggatttagaggaagttgtcaagatggaacctgaagatgctacagaggaaatcagtggatttctttgagctaggagaataagagtctggagactgggagccttcacttcggcctccgattggtggcgcatagggtgtaaccaataggaaacccctaaagggtacttaaaccccagattttgcaactggggctcttgagcagcttgctttagcctgctcccactctgtggaatatacttttgcttcaataaatctgtgcttttattgctt

SEQ ID NO: 66792 - DNA, 1582 bp, Homo sapiens
tggaagcaaacataggctaggtacgaggctgggtgtcgcaggaaaatgctgtgaagagatccagccacatcagtggaagccacctatagagagagaagaacaccggctcccattctggttaaaggccagtctgccatccatccaggaagaactgcggcacatggctgatggtgctagagaggtaggaaatatgactggaaccactgagatcaactcagatcaaggcctagaaaaagacaactcagagttggggagtgaaactcggtacccactgctattgcctaagggtgtagtcctgaaactgaagccagttgccgaccgtttccccaagaaggcttggagacagaagcgttcatcagtcctgaaacccctccttatccaacccagcccctctctccagcccagcttcaaccctgggaaaacaccagcccaatcaactcattcagaagcccctccgagcaaaatggtgctccggattcctcacccaatacagccagccactgttttacagacagttccaggtgtccctccactgggggtcagtggaggtgagagttttgagtctcctgcagcactgcctgctatgccccctgaggccaggacaagcttccctctgtctgagtcccagactttgctctcttctgcccctgtgcccaaggtaatgatgccctcccctgcctcttccatgtttcgaaagccatatgtgagacggagaccctcaaaaagaaggggagccagggcctttcgctgtatcaaacctgcccctgttatccaccctgcatctgttatcttcactgttcctgctaccactgtgaagattgtgagccttggcggtggctgtaacatgatccagcctgtcaatgcggctgtggcccagagtccccagactattcccatcgccaccctcttggttaaccctacttccttcccctgtccattgaaccagccccttgtggcctcctctgtctcacccttaattgtttctggcaattctgtgaatcttcctataccatccacccctgaagataaggcccacatgaatgtggacattgcttgtgctgtggctgatggggaaaatgcctttcagggcctagaacccaaattagagccccaggaactatctcctctctctgctactgttttccccaaagtggaacatagcccagggcctccaccagtcgataaacagtgccaagaaggattgtcagagaacagtgcctatcgctggaccgttgtgaaaacagaggagggaaggcaagctctggagccgctccctcagggcatccaggagtctctaaacaactcttcccctggggatttagaggaagttgtcaagatggaacctgaagatgctacagaggaaatcagtggatttctttgagctaggagaataagagtctggagactgggagccttcacttcggcctccgattggtggcgcatagggtgtaaccaataggaaacccctaaagggtacttaaaccccagattttgcaactggggctcttgagcagcttgctttagcctgctcccactctgtggaatatacttttgcttcaataaatctgtgcttttattgctt

SEQ ID NO: 66793 - DNA, 3428 bp, Homo sapiens
ggcacgaggcctccccacaccacctcatcactctcctttacttggctgccagtccagctgcctcagaatgtcagaagggtgccattttcagttcttttcctgtctgactgtagggtatagaacaggcagccctaagtgctgctttctgcgcaaatgttttttgattacaaatctctaactaggtttgaaatgttttatagaataagacaatattcttttcaacaaactttaaaaaaaatgtacagttttgttgtttgaaggcttgggctcgcgccgctgaagtcggcttacccgctggccgcctcctgacaagcgggagggatccgcggtggacccagggaagcggaggagcctggcggccaccccctcttcctcacttccctgtactctcatcgctctcggcctccgacacgaaaaggaagcaaatgagctgatggaagatctgtttgaaactttccaagatgagatgggattctccaacatggaagatgatggcccagaagaggaggagcgtgtggctgagcctcaagctaactttaacacccctcaagctctacggtttgaggaactactggccaacctactaaatgaacaacatcagatagcgaaggaactatttgaacagctgaagatgaagaaaccttcagccaaacagcagaaggaggtagagaaggttaaaccccagtgtaaggaagttcatcagaccctgattctggacccagcacaaaggaagagactccagcagcagatgcagcagcatgttcagctcttgacacaaatccaccttcttgccacctgcaaccccaatctcaatccggaggccagtagcaccaggatatgtcttaaagagctgggaacctttgctcaaagctccatcgcccttcaccatcagtacaaccccaagtttcagaccctgttccaaccctgtaacttgatgggagctatgcagctgattgaagacttcagcacacatgtcagcattgactgcagccctcataaaactgtcaagaagactgccaatgaatttccctgtttgccaaagcaagtggcttggatcctggccacaagcaaggttttcatgtatccagagttacttccagtgtgttccctgaaggcaaagaatccccaggataagatcctcttcaccaaggctgaggacaatttgttagctttaggactgaagcattttgaagggactgagtttcttaaccctctaatcagcaagtaccttctaacctgcaagactgcccgccaactgacagtgagaatcaagaacctcaacatgaacagagctcctgacaacatcattaaattttataagaagaccaaacagctgccagtcctaggaaaatgctgtgaagagatccagccacatcagtggaagccacctatagagagagaagaacaccggctcccattctggttaaaggccagtctgccatccatccaggaagaactgcggcacatggctgatggtgctagagaggtaggaaatatgactggaaccactgagatcaactcagatcaaggcctagaaaaagacaactcagagttggggagtgaaactcggtacccactgctattgcctaagggtgtagtcctgaaactgaagccagttgccgaccgtttccccaagaaggcttggagacagaagcgttcatcagtcctgaaacccctccttatccaacccagcccctctctccagcccagcttcaaccctgggaaaacaccagcccaatcaactcattcagaagcccctccgagcaaaatggtgctccggattcctcacccaatacagccagccactgttttacagacagttccaggtgtccctccactgggggtcagtggaggtgagagttttgagtctcctgcagcactgcctgctatgccccctgaggccaggacaagcttccctctgtctgagtcccagactttgctctcttctgcccctgtgcccaaggtaatgatgccctcccctgcctcttccatgtttcgaaagccatatgtgagacggagaccctcaaaaagaaggggagccagggcctttcgctgtatcaaacctgcccctgttatccaccctgcatctgttatcttcactgttcctgctaccactgtgaagattgtgagccttggcggtggctgtaacatgatccagcctgtcaatgcggctgtggcccagagtccccagactattcccatcgccaccctcttggttaaccctacttccttcccctgtccattgaaccagccccttgtggcctcctctgtctcacccttaattgtttctggcaattctgtgaatcttcctataccatccacccctgaagataaggcccacatgaatgtggacattgcttgtgctgtggctgatggggaaaatgcctttcagggcctagaacccaaattagagccccaggaactatctcctctctctgctactgttttccccaaagtggaacatagcccagggcctccaccagtcgataaacagtgccaagaaggattgtcagagaacagtgcctatcgctggaccgttgtgaaaacagaggagggaaggcaagctctggagccgctccctcagggcatccaggagtctctaaacaactcttcccctggggatttagaggaagttgtcaagatggaacctgaagatgctacagaggaaatcagtggatttctttgagctaggagaataagagtctggagactgggagccttcacttcggcctccgattggtggcgcatagggtgtaaccaataggaaacccctaaagggtacttaaaccccagattttgcaactggggctcttgagcagcttgctttagcctgctcccactctgtggaatatacttttgcttcaataaatctgtgcttttattgcttaaaaaaaaaaaaaaaaaaaaaaaaaaaaagggggggggggccctaagaaggatactcccctgagaggggcgccacaaggttatacgcgcggatccccaggcttccgggcgacacaggggggccccatataggggaggccggaataaaaaccggcaaggcgcaagggagccggaggagtttaaacaacggcacgggagacggggcgaacaagccgggcaaacccgggggggcactccctgtgggggaaagggggaaacccctttacactcgcgggggggggggcgcaccaccatacatgtggggaacaaaaaatatgaacctttagaggaaaaggtttttcgaaaaagcgcctgtaagggggataacattttgtagacaactctgtaaaacgagggggtaatatcgcgctggtgggttaaaaacctaataagcgggggcaataggtgccttgagaaggggacttttgacgaaagtttgggggcatcacggcgggagaaacgaagaatttgatagcaaaaattttctttattcccccggggac

SEQ ID NO: 66794 - DNA, 1364 bp, Homo sapiens
gtagttggacttggcagtgtgcagcgctagagaggaattgtctgaccccagcattgcttcctggctcctttcttcctttttcaggagagcatcttgccgaccgtttccccaagaaggcttggagacagaagcgttcatcagtcctgaaacccctccttatccaacccagcccctctctccagcccagcttcaaccctgggaaaacaccagcccaatcaactcattcagaagcccctccgagcaaaatggtgctccggattcctcacccaatacagccagccactgttttacagacagttccaggtgtccctccactgggggtcagtggaggtgagagttttgagtctcctgcagcactgcctgctatgccccctgaggccaggacaagcttccctctgtctgagtcccagactttgctctcttctgcccctgtgcccaaggtaatgatgccctcccctgcctcttccatgtttcgaaagccatatgtgagacggagaccctcaaaaagaaggggagccagggcctttcgctgtatcaaacctgcccctgttatccaccctgcatctgttatcttcactgttcctgctaccactgtgaagattgtgagccttggcggtggctgtaacatgatccagcctgtcaatgcggctgtggcccagagtccccagactattcccatcgccaccctcttggttaaccctacttccttcccctgtccattgaaccagccccttgtggcctcctctgtctcacccttaattgtttctggcaattctgtgaatcttcctataccatccacccctgaagataaggcccacatgaatgtggacattgcttgtgctgtggctgatggggaaaatgcctttcagggcctagaacccaaattagagccccaggaactatctcctctctctgctactgttttccccaaagtggaacatagcccagggcctccaccagtcgataaacagtgccaagaaggattgtcagagaacagtgcctatcgctggaccgttgtgaaaacagaggagggaaggcaagctctggagccgctccctcagggcatccaggagtctctaaacaactcttcccctggggatttagaggaagttgtcaagatggaacctgaagatgctacagaggaaatcagtggatttctttgagctaggagaataagagtctggagactgggagccttcacttcggcctccgattggtggcgcatagggtgtaaccaataggaaacccctaaagggtacttaaaccccagattttgcaactggggctcttgagcagcttgctttagcctgctcccactctgtggaatatacttttgcttcaataaatctgtgcttttattgctt

SEQ ID NO: 66795 - DNA, 1812 bp, Homo sapiens
ggcacgaggcctccccacaccacctcatcactctcctttacttggctgccagtccagctgcctcagaatgtcagaagggtgccattttcagttcttttcctgtctgactgtagggtatagaacaggcagccctaagtgctgctttctgcgcaaatgttttttgattacaaatctctaactaggtttgaaatgttttatagaataagacaatattcttttcaacaaactttaaaaaaaatgtacagttttgttgtttgaaggcttgggctcgcgccgctgaagtcggcttacccgctggccgcctcctgacaagcgggagggatccgcggtggacccagggaagcggaggagcctggcggccaccccctcttcctcacttccctgtactctcatcgctctcggcctccgacacgaaaaggaagcaaatgagctgatggaagatctgtttgaaactttccaagatgagatgggattctccaacatggaagatgatggcccagaagaggaggagcgtgtggctgagcctcaagctaactttaacacccctcaagctctacggtttgaggaactactggccaacctactaaatgaacaacatcagatagcgaaggaactatttgaacagctgaagatgaagaaaccttcagccaaacaccagcccaatcaactcattcagaagcccctccgagcaaaatggtgctccggattcctcacccaatacagccagccactgttttacagacagttccaggtgtccctccactgggggtcagtggaggtgagagttttgagtctcctgcagcactgcctgctatgccccctgaggccaggacaagcttccctctgtctgagtcccagactttgctctcttctgcccctgtgcccaaggtaatgatgccctcccctgcctcttccatgtttcgaaagccatatgtgagacggagaccctcaaaaagaaggggagccagggcctttcgctgtatcaaacctgcccctgttatccaccctgcatctgttatcttcactgttcctgctaccactgtgaagattgtgagccttggcggtggctgtaacatgatccagcctgtcaatgcggctgtggcccagagtccccagactattcccatcgccaccctcttggttaaccctacttccttcccctgtccattgaaccagccccttgtggcctcctctgtctcacccttaattgtttctggcaattctgtgaatcttcctataccatccacccctgaagataaggcccacatgaatgtggacattgcttgtgctgtggctgatggggaaaatgcctttcagggcctagaacccaaattagagccccaggaactatctcctctctctgctactgttttccccaaagtggaacatagcccagggcctccaccagtcgataaacagtgccaagaaggattgtcagagaacagtgcctatcgctggaccgttgtgaaaacagaggagggaaggcaagctctggagccgctccctcagggcatccaggagtctctaaacaactcttcccctggggatttagaggaagttgtcaagatggaacctgaagatgctacagaggaaatcagtggatttctttgagctaggagaataagagtctggagactgggagccttcacttcggcctccgattggtggcgcatagggtgtaaccaataggaaacccctaaagggtacttaaaccccagattttgcaactggggctcttgagcagcttgctttagcctgctcccactctgtggaatatacttttgcttcaataaatctgtgcttttattgctt

SEQ ID NO: 66796 - DNA, 880 bp, Homo sapiens
agctccgtaccccgatacttggagaaggggagccagggcctttcgctgtatcaaacctgcccctgttatccaccctgcatctgttatcttcactgttcctgctaccactgtgaagattgtgagccttggcggtggctgtaacatgatccagcctgtcaatgcggctgtggcccagagtccccagactattcccatcgccaccctcttggttaaccctacttccttcccctgtccattgaaccagccccttgtggcctcctctgtctcacccttaattgtttctggcaattctgtgaatcttcctataccatccacccctgaagataaggcccacatgaatgtggacattgcttgtgctgtggctgatggggaaaatgcctttcagggcctagaacccaaattagagccccaggaactatctcctctctctgctactgttttccccaaagtggaacatagcccagggcctccaccagtcgataaacagtgccaagaaggattgtcagagaacagtgcctatcgctggaccgttgtgaaaacagaggagggaaggcaagctctggagccgctccctcagggcatccaggagtctctaaacaactcttcccctggggatttagaggaagttgtcaagatggaacctgaagatgctacagaggaaatcagtggatttctttgagctaggagaataagagtctggagactgggagccttcacttcggcctccgattggtggcgcatagggtgtaaccaataggaaacccctaaagggtacttaaaccccagattttgcaactggggctcttgagcagcttgctttagcctgctcccactctgtggaatatacttttgcttcaataaatctgtgcttttattgctt

SEQ ID NO: 66797 - DNA, 512 bp, Homo sapiens
  misc_feature (27)..(27): n is a, c, g, or t
gatccgccttcgtgccgctcgtgccgnccaaattagagccccaggaactatctcctctctctgctactgttttccccaaagtggaacatagcccagggcctccaccagtcgataaacagtgccaagaaggattgtcagagaacagtgcctatcgctggaccgttgtgaaaacagaggagggaaggcaagctctggagccgctccctcagggcatccaggagtctctaaacaactcttcccctggggatttagaggaagttgtcaagatggaacctgaagatgctacagaggaaatcagtggatttctttgagctaggagaataagagtctggagactgggagccttcacttcggcctccgattggtggcgcatagggtgtaaccaataggaaacccctaaagggtacttaaaccccagattttgcaactggggctcttgagcagcttgctttagcctgctcccactctgtggaatatacttttgcttcaataaatctgtgcttttattgctt

SEQ ID NO: 66798 - DNA, 433 bp, Homo sapiens
agctgacgggtaccaatcttcatgctaagtcgataaacagtgccaagaaggattgtcagagaacagtgcctatcgctggaccgttgtgaaaacagaggagggaaggcaagctctggagccgctccctcagggcatccaggagtctctaaacaactcttcccctggggatttagaggaagttgtcaagatggaacctgaagatgctacagaggaaatcagtggatttctttgagctaggagaataagagtctggagactgggagccttcacttcggcctccgattggtggcgcatagggtgtaaccaataggaaacccctaaagggtacttaaaccccagattttgcaactggggctcttgagcagcttgctttagcctgctcccactctgtggaatatacttttgcttcaataaatctgtgcttttattgctt

SEQ ID NO: 66799 - DNA, 2849 bp, Homo sapiens
ggcacgaggcctccccacaccacctcatcactctcctttacttggctgccagtccagctgcctcagaatgtcagaagggtgccattttcagttcttttcctgtctgactgtagggtatagaacaggcagccctaagtgctgctttctgcgcaaatgttttttgattacaaatctctaactaggtttgaaatgttttatagaataagacaatattcttttcaacaaactttaaaaaaaatgtacagttttgttgtttgaaggcttgggctcgcgccgctgaagtcggcttacccgctggccgcctcctgacaagcgggagggatccgcggtggacccagggaagcggaggagcctggcggccaccccctcttcctcacttccctgtactctcatcgctctcggcctccgacacgaaaaggaagcaaatgagctgatggaagatctgtttgaaactttccaagatgagatgggattctccaacatggaagatgatggcccagaagaggaggagcgtgtggctgagcctcaagctaactttaacacccctcaagctctacggtttgaggaactactggccaacctactaaatgaacaacatcagatagcgaaggaactatttgaacagctgaagatgaagaaaccttcagccaaacagcagaaggaggtagagaaggttaaaccccagtgtaaggaagttcatcagaccctgattctggacccagcacaaaggaagagactccagcagcagatgcagcagcatgttcagctcttgacacaaatccaccttcttgccacctgcaaccccaatctcaatccggaggccagtagcaccaggatatgtcttaaagagctgggaacctttgctcaaagctccatcgcccttcaccatcagtacaaccccaagtttcagaccctgttccaaccctgtaacttgatgggagctatgcagctgattgaagacttcagcacacatgtcagcattgactgcagccctcataaaactgtcaagaagactgccaatgaatttccctgtttgccaaagcaagtggcttggatcctggccacaagcaaggttttcatgtatccagagttacttccagtgtgttccctgaaggcaaagaatccccaggataagatcctcttcaccaaggctgaggacaatttgttagctttaggactgaagcattttgaagggactgagtttcttaaccctctaatcagcaagtaccttctaacctgcaagactgcccgccaactgacagtgagaatcaagaacctcaacatgaacagagctcctgacaacatcattaaattttataagaagaccaaacagctgccagtcctaggaaaatgctgtgaagagatccagccacatcagtggaagccacctatagagagagaagaacaccggctcccattctggttaaaggccagtctgccatccatccaggaagaactgcggcacatggctgatggtgctagagaggtaggaaatatgactggaaccactgagatcaactcagatcaaggcctagaaaaagacaactcagagttggggagtgaaactcggtacccactgctattgcctaagggtgtagtcctgaaactgaagccagttgccgaccgtttccccaagaaggcttggagacagaagcgttcatcagtcctgaaacccctccttatccaacccagcccctctctccagcccagcttcaaccctgggaaaacaccagcccaatcaactcattcagaagcccctccgagcaaaatggtgctccggattcctcacccaatacagccagccactgttttacagacagttccaggtgtccctccactgggggtcagtggaggtgagagttttgagtctcctgcagcactgcctgctatgccccctgaggccaggacaagcttccctctgtctgagtcccagactttgctctcttctgcccctgtgcccaaggtaatgatgccctcccctgcctcttccatgtttcgaaagccatatgtgagacggagaccctcaaaaagaaggggagccagggcctttcgctgtatcaaacctgcccctgttatccaccctgcatctgttatcttcactgttcctgctaccactgtgaagattgtgagccttggcggtggctgtaacatgatccagcctgtcaatgcggctgtggcccagagtccccagactattcccatcgccaccctcttggttaaccctacttccttcccctgtccattgaaccagccccttgtggcctcctctgtctcacccttaattgtttctggcaattctgtgaatcttcctataccatccacccctgaagataaggcccacatgaatgtggacattgcttgtgctgtggctgatggggaaaatgcctttcagggcctagaacccaaattagagccccaggaactatctcctctctctgctactgttttccccaaagtggaacatagcccagggcctccaccagtcgataaacagtgccaagaaggattgtcagagaacagtgcctatcgctggaccgttgtgaaaacagaggagggagtctctaaacaactcttcccctggggatttagaggaagttgtcaagatggaacctgaagatgctacagaggaaatcagtggatttctttgagctaggagaataagagtctggagactgggagccttcacttcggcctccgattggtggcgcatagggtgtaaccaataggaaacccctaaagggtacttaaaccccagattttgcaactggggctcttgagcagcttgctttagcctgctcccactctgtggaatatacttttgcttcaataaatctgtgcttttattgctt

SEQ ID NO: 66800 - DNA, 2014 bp, Homo sapiens
ggcacgaggcctccccacaccacctcatcactctcctttacttggctgccagtccagctgcctcagaatgtcagaagggtgccattttcagttcttttcctgtctgactgtagggtatagaacaggcagccctaagtgctgctttctgcgcaaatgttttttgattacaaatctctaactaggtttgaaatgttttatagaataagacaatattcttttcaacaaactttaaaaaaaatgtacagttttgttgtttgaaggcttgggctcgcgccgctgaagtcggcttacccgctggccgcctcctgacaagcgggagggatccgcggtggacccagggaagcggaggagcctggcggccaccccctcttcctcacttccctgtactctcatcgctctcggcctccgacacgaaaaggaagcaaatgagctgatggaagatctgtttgaaactttccaagatgagatgggattctccaacatggaagatgatggcccagaagaggaggagcgtgtggctgagcctcaagctaactttaacacccctcaagctctacggtttgaggaactactggccaacctactaaatgaacaacatcagatagcgaaggaactatttgaacagctgaagatgaagaaaccttcagccaaacagcagaaggaggtagagaaggttaaaccccagtgtaaggaagttcatcagaccctgattctggacccagcacaaaggaagagactccagcagcagatgcagcagcatgttcagctcttgacacaaatccaccttcttgccacctgcaaccccaatctcaatccggaggccagtagcaccaggatatgtcttaaagagctgggaacctttgctcaaagctccatcgcccttcaccatcagtacaaccccaagtttcagaccctgttccaaccctgtaacttgatgggagctatgcagctgattgaagacttcagcacacatgtcagcattgactgcagccctcataaaactgtcaagaagactgccaatgaatttccctgtttgccaaagcaagtggcttggatcctggccacaagcaaggttttcatgtatccagagttacttccagtgtgttccctgaaggcaaagaatccccaggataagatcctcttcaccaaggctgaggacaatttgttagctttaggactgaagcattttgaagggactgagtttcttaaccctctaatcagcaagtaccttctaacctgcaagactgcccgccaactgacagtgagaatcaagaacctcaacatgaacagagctcctgacaacatcattaaattttataagaagaccaaacagctgccagtcctaggaaaatgctgtgaagagatccagccacatcagtggaagccacctatagagagagaagaacaccggctcccattctggttaaaggccagtctgccatccatccaggaagaactgcggcacatggctgatggtgctagagaggtaggaaatatgactggaaccactgagatcaactcagatcaaggcctagaaaaagacaactcagagttggggagtgaaactcggtacccactgctattgcctaagggtgtagtcctgaaactgaagccagttgccgaccgtttccccaagaaggcttggagacagaagcgttcatcagtcctgaaacccctccttatccaacccagcccctctctccagcccagcttcaaccctgggaaaacaccagcccaatcaactcattcagaagcccctccgagcaaaatggtgctccggattcctcacccaatacagccagccactgttttacagacagttccaggtgtccctccactgggggtcagtggaggtgagagttttgagtctcctgcagcactgcctgctatgccccctgaggccaggacaagcttccctctgtctgagtcccagactttgctctcttctgcccctgtgcccaaggtaatgatgccctcccacggctcccaataaaaatgtgaaaaccaaaaaaaa

SEQ ID NO: 66801 - DNA, 1248 bp, Homo sapiens
ggcacgaggcctccccacaccacctcatcactctcctttacttggctgccagtccagctgcctcagaatgtcagaagggtgccattttcagttcttttcctgtctgactgtagggtatagaacaggcagccctaagtgctgctttctgcgcaaatgttttttgattacaaatctctaactaggtttgaaatgttttatagaataagacaatattcttttcaacaaactttaaaaaaaatgtacagttttgttgtttgaaggcttgggctcgcgccgctgaagtcggcttacccgctggccgcctcctgacaagcgggagggatccgcggtggacccagggaagcggaggagcctggcggccaccccctcttcctcacttccctgtactctcatcgctctcggcctccgacacgaaaaggaagcaaatgagctgatggaagatctgtttgaaactttccaagatgagatgggattctccaacatggaagatgatggcccagaagaggaggagcgtgtggctgagcctcaagctaactttaacacccctcaagctctacggtttgaggaactactggccaacctactaaatgaacaacatcagatagcgaaggaactatttgaacagctgaagatgaagaaaccttcagccaaacagcagaaggaggtagagaaggttaaaccccagtgtaaggaagttcatcagaccctgattctggacccagcacaaaggaagagactccagcagcagatgcagcagcatgttcagctcttgacacaaatccaccttcttgccacctgcaaccccaatctcaatccggaggccagtagcaccaggatatgtcttaaagagctgggaacctttgctcaaagctccatcgcccttcaccatcagtacaaccccaagtttcagaccctgttccaaccctgtaacttgatgggagctatgcagctgattgaagacttcagcacacatgtcagcattgactgcagccctcataaaactgtcaagaagactgccaatgaatttccctgtttgccaaagcaagtggcttggatcctggccacaagcaaggttttcatgtatccagagttacttccagtgtgttccctgaaggcaaagaatccccaggataagatcctcttcaccaaggctgaggacaatttgttagctttaggactgaagcattttgaagggactgagtttcttaaccctctaatcagcaagaatcagcgtggggtgcgagctcg

SEQ ID NO: 66802 - DNA, 1313 bp, Homo sapiens
ggcacgaggcctccccacaccacctcatcactctcctttacttggctgccagtccagctgcctcagaatgtcagaagggtgccattttcagttcttttcctgtctgactgtagggtatagaacaggcagccctaagtgctgctttctgcgcaaatgttttttgattacaaatctctaactaggtttgaaatgttttatagaataagacaatattcttttcaacaaactttaaaaaaaatgtacagttttgttgtttgaaggcttgggctcgcgccgctgaagtcggcttacccgctggccgcctcctgacaagcgggagggatccgcggtggacccagggaagcggaggagcctggcggccaccccctcttcctcacttccctgtactctcatcgctctcggcctccgacacgaaaaggaagcaaatgagctgatggaagatctgtttgaaactttccaagatgagatgggattctccaacatggaagatgatggcccagaagaggaggagcgtgtggctgagcctcaagctaactttaacacccctcaagctctacggtttgaggaactactggccaacctactaaatgaacaacatcagatagcgaaggaactatttgaacagctgaagatgaagaaaccttcagccaaacagcagaaggaggtagagaaggttaaaccccagtgtaaggaagttcatcagaccctgattctggacccagcacaaaggaagagactccagcagcagatgcagcagcatgttcagctcttgacacaaatccaccttcttgccacctgcaaccccaatctcaatccggaggccagtagcaccaggatatgtcttaaagagctgggaacctttgctcaaagctccatcgcccttcaccatcagtacaaccccaagtttcagaccctgttccaaccctgtaacttgatgggagctatgcagctgattgaagacttcagcacacatgtcagcattgactgcagccctcataaaactgtcaagaagactgccaatgaatttccctgtttgccaaagcaagtggcttggatcctggccacaagcaaggttttcatgtatccagagttacttccagtgtgttccctgaaggcaaagaatccccaggataagatcctcttcaccaaggctgaggacaataccttctaacctgcaagactgcccgccaactgacagtgagaatcaagaacctcaacatgaacagagctcctgacaacatcattaaattttataagaagaccaaacagctgccagtcctgcaccggctcccattctggttggccagtctgcc

SEQ ID NO: 66803 - DNA, 635 bp, Homo sapiens
ggcacgaggcctccccacaccacctcatcactctcctttacttggctgccagtccagctgcctcagaatgtcagaagggtgccattttcagttcttttcctgtctgactgtagggtatagaacaggcagccctaagtgctgctttctgcgcaaatgttttttgattacaaatctctaactaggtttgaaatgttttatagaataagacaatattcttttcaacaaactttaaaaaaaatgtacagttttgttgtttgaaggcttgggctcgcgccgctgaagtcggcttacccgctggccgcctcctgacaagcgggagggatccgcggtggacccagggaagcggaggagcctggcggccaccccctcttcctcacttccctgtactctcatcgctctcggcctccgacacgaaaaggaagcaaatgagctgatggaagatctgtttgaaactttccaagatgagatgggattctccaacatggaagatgatggcccagaagaggaggagcgtgtggctgagcctcaagctaactttaacacccctcaagctctacgttgaggaactatctgtccaacctactacatcaacgacatcacattcgacgacgttctatttcgacaccctgttacta

SEQ ID NO: 66804 - DNA, 608 bp, Homo sapiens
ggcacgaggcctccccacaccacctcatcactctcctttacttggctgccagtccagctgcctcagaatgtcagaagggtgccattttcagttcttttcctgtctgactgtagggtatagaacaggcagccctaagtgctgctttctgcgcaaatgttttttgattacaaatctctaactaggtttgaaatgttttatagaataagacaatattcttttcaacaaactttaaaaaaaatgtacagttttgttgtttgaaggcttgggctcgcgccgctgaagtcggcttacccgctggccgcctcctgacaagcgggagggatccgcggtggacccagggaagcggaggagcctggcggccaccccctcttcctcacttccctgtactctcatcgctctcggcctccgacacggtgagtagaacgatttgggccggcattcgggcctaagcactctctcagcgattgaatcctgggctttctgggagccactgtcatctcccggacctggacctctgggagagcagtggtgaagatgggggaggggagagcagggagggggatcctgagcctaccgggaagtccctccaggcggggtgaaggggtgtc

SEQ ID NO: 66805 - DNA, 2629 bp, Homo sapiens
  misc_feature (1179)..(1179): n is a, c, g, or t
atttaaaaattgcagactttatttgcatttcctcagcttttctgctaatgtcttctttctttttttgagacagggtctcgctctgtcacctaggctgcagtgtgatggcgtgatctcggctaactttgcaacctcttcctcaatcctcctgcttcagcctcccaagtagctcagactacaagcgtgtgccacacctgtctaatttttgtgtctttttgtagagatggggtttcaccgtgttgcctaagctggtctcgaactcctaggctcaagcaatgcgccctcctccgcctcccaaagtgctgagattacaggtgtgagccactgcgcccagcctaatgtcttctttctgttacaggatccagtagaagattccacatctggagatcttttcctttctttatatctatcaccgacattacctactctttaaaaattttgtaaaaggcataaatttgaaaaatatatcctcattaatctaaatcaagtcattgatacaactatttaacaagacgcccggcctgctttgttttattaacgacttggagctaattccactttacatatattattatttcgtgtgtgtgtgtgtgtgtgacggagtctcgctttgtcgccaggctggagtgcagtggcgcgatctcggctcactgcaacttccgccgcccgggttcaagcaattctcctgcctcagcctcccgagtagctggggctacaggcgcccgccaccacggccggctaatatttgtatttttagtagagacggggtttcaccatgttggccaggattgtctcgatctcttcaccttgtcatccacctgcctcggcctcccaaagtgctgggattacaggcgtgagccaccgcgcccagccctatcttattatttcacacaccaaccctggaggcatgtttggagttgcctaatttttatgtacactttttgataaggaactaacaaaaataacttgctgaagacaagggaaactgagtccagaactgaatgagaagcacatggtttcttcatcctccatcaccaggctgtctaacgaggctgaagtaccatccatgagtaagtgcgtcaagggcaaacaaacatcatcgcatatggacagtggtgtgaaattcgagaaatccgaggagggttaacaacaacaaaaagcacaccaccacgccgaacntcctcgggtcccaggttggcaactcaacgcccgggaggaatcccccccggaggcgcgccggtctaccggcctcactccctacctcctggaggtccggagtcccgctcctttccctcagcggtacaatacccgtgtcggtccattccctcaccgtgagtcgaggactagttctccagactaggcgaccgacacacgctgcctggggccggctccaaagcgcccgtcctgagactgcaaaaaagggtcgggtcatccggcaggaaacgactcaacgcgcagccgccgcggcctccaaccaccggccggcagaggggcgctaggccgccctcgatcccctcgccgcggtcccatggaggaggaggcgagccgcagcgccgcggcgacgaacccagggaggtaggttgtcatgggactcggccggccaccctggcaattccagtcaaacggcaagccagactcgctttgccggtcccttcctctcctgcccctgcagccgccaggaatggaacagtcccgcggtggggactgtgggaggcgcacgcgcgaggagtgtagggtgggggtgctggcggcggctgctttggcggcggttggtggccgtgcgggcggggagggagggggaggagagaagaggaggtggagaaggcttgggctcgcgccgctgaaggtacgcgtgagggcctgcgctggagccggcttgacagggtctgagggggagtggagaactgggcgaggaggttcccgtgggtgagcgcgtacgggatggctggctcgcaggacggccgaaggtggtggttggtgggagcagccagcgacgagcccgtagacactcgtacgcgtgcgggctgacgtgcgcgctacatggccggagtcgggcgaagcgggggaccgtggggaagaacgcgaggagggaggagtgggaggttgggggtgtcgctaggcgcccttagctccctccctctggaggagctgccgcggccactctgctgccgccgctgccgccgccattttgggttcgctttgcgaggggaaacgatcccagtgtcggttgcgggatccgcctcctctcagtttgcccctttagccctccacctttcccttctcctctctcgcatttccgccagtcggcttacccgctggccgcctcctgacaagcgggagggatccgcggtggacccagggaagcggaggagcctggcggccaccccctcttcctcacttccctgtactctcatcgctctcggcctccgacacggtgagtagaacgatttgggccggcattcgggcctaagcactctctcagcgattgaatcctgggctttctgggagccactgtcatctcccggacctggacctctgggagagcagtggtgaagatgggggaggggagagcagggagggggatcctgagcctaccgggaagtccctccaggcggggtgaaggggtgtc

SEQ ID NO: 66806 - DNA, 2663 bp, Homo sapiens
tatatgtcgaccagcgcctcggaggaggtggggaaggcttgggctcgcgccgctgaagtcggcttacccgctggccgcctcctgacaagcgggagggatccgcggtggacccagggaagcggaggagcctggcggccaccccctcttcctcacttccctgtactctcatcgctctcggcctccgacacgaaaaggaagcaaatgagctgatggaagatctgtttgaaactttccaagatgagatgggattctccaacatggaagatgatggcccagaagaggaggagcgtgtggctgagcctcaagctaactttaacacccctcaagctctacggtttgaggaactactggccaacctactaaatgaacaacatcagatagcgaaggaactatttgaacagctgaagatgaagaaaccttcagccaaacagcagaaggaggtagagaaggttaaaccccagtgtaaggaagttcatcagaccctgattctggacccagcacaaaggaagagactccagcagcagatgcagcagcatgttcagctcttgacacaaatccaccttcttgccacctgcaaccccaatctcaatccggaggccagtagcaccaggatatgtcttaaagagctgggaacctttgctcaaagctccatcgcccttcaccatcagtacaaccccaagtttcagaccctgttccaaccctgtaacttgatgggagctatgcagctgattgaagacttcagcacacatgtcagcattgactgcagccctcataaaactgtcaagaagactgccaatgaatttccctgtttgccaaagcaagtggcttggatcctggccacaagcaaggttttcatgtatccagagttacttccagtgtgttccctgaaggcaaagaatccccaggataagatcctcttcaccaaggctgaggacaatttgttagctttaggactgaagcattttgaagggactgagtttcttaaccctctaatcagcaagtaccttctaacctgcaagactgcccgccaactgacagtgagaatcaagaacctcaacatgaacagagctcctgacaacatcattaaattttataagaagaccaaacagctgccagtcctaggaaaatgctgtgaagagatccagccacatcagtggaagccacctatagagagagaagaacaccggctcccattctggttaaaggccagtctgccatccatccaggaagaactgcggcacatggctgatggtgctagagaggtaggaaatatgactggaaccactgagatcaactcagatcaaggcctagaaaaagacaactcagagttggggagtgaaactcggtacccactgctattgcctaagggtgtagtcctgaaactgaagccagttgccgaccgtttccccaagaaggcttggagacagaagcgttcatcagtcctgaaacccctccttatccaacccagcccctctctccagcccagcttcaaccctgggaaaacaccagcccaatcaactcattcagaagcccctccgagcaaaatggtgctccggattcctcacccaatacagccagccactgttttacagacagttccaggtgtccctccactgggggtcagtggaggtgagagttttgagtctcctgcagcactgcctgctatgccccctgaggccaggacaagcttccctctgtctgagtcccagactttgctctcttctgcccctgtgcccaaggtaatgatgccctcccctgcctcttccatgtttcgaaagccatatgtgagacggagaccctcaaaaagaaggggagccagggcctttcgctgtatcaaacctgcccctgttatccaccctgcatctgttatcttcactgttcctgctaccactgtgaagattgtgagccttggcggtggctgtaacatgatccagcctgtcaatgcggctgtggcccagagtccccagactattcccatcgccaccctcttggttaaccctacttccttcccctgtccattgaaccagccccttgtggcctcctctgtctcacccttaattgtttctggcaattctgtgaatcttcctataccatccacccctgaagataaggcccacatgaatgtggacattgcttgtgctgtggctgatggggaaaatgcctttcagggcctagaacccaaattagagccccaggaactatctcctctctctgctactgttttccccaaagtggaacatagcccagggcctccaccagtcgataaacagtgccaagaaggattgtcagagaacagtgcctatcgctggaccgttgtgaaaacagaggagggaaggcaagctctggagccgctccctcagggcatccaggagtctctaaacaactcttcccctggggatttagaggaagttgtcaagatggaacctgaagatgctacagaggaaatcagtggatttctttgagctaggagaataagagtctggagactgggagccttcacttcggcctccgattggtggcgcatagggtgtaaccaataggaaacccctaaagggtacttaaaccccagattttgcaactggggctcttgagcagcttgctttagcctgctcccactctgtggaatatacttttgcttcaataaatctgtgcttttattgctt

SEQ ID NO: 66807 - DNA, 2659 bp, Homo sapiens
ggctattgtagaggctgggtggccccacaggtgcttgggctcgggccgctgaagtcggcttacccgctggccgcctcctgacaagcgggagggatccgcggtggacccagggaagcggaggagcctggcggccaccccctcttcctcacttccctgtactctcatcgctctcggcctccgacacgaaaaggaagcaaatgagctgatggaagatctgtttgaaactttccaagatgagatgggattctccaacatggaagatgatggcccagaagaggaggagcgtgtggctgagcctcaagctaactttaacacccctcaagctctacggtttgaggaactactggccaacctactaaatgaacaacatcagatagcgaaggaactatttgaacagctgaagatgaagaaaccttcagccaaacagcagaaggaggtagagaaggttaaaccccagtgtaaggaagttcatcagaccctgattctggacccagcacaaaggaagagactccagcagcagatgcagcagcatgttcagctcttgacacaaatccaccttcttgccacctgcaaccccaatctcaatccggaggccagtagcaccaggatatgtcttaaagagctgggaacctttgctcaaagctccatcgcccttcaccatcagtacaaccccaagtttcagaccctgttccaaccctgtaacttgatgggagctatgcagctgattgaagacttcagcacacatgtcagcattgactgcagccctcataaaactgtcaagaagactgccaatgaatttccctgtttgccaaagcaagtggcttggatcctggccacaagcaaggttttcatgtatccagagttacttccagtgtgttccctgaaggcaaagaatccccaggataagatcctcttcaccaaggctgaggacaatttgttagctttaggactgaagcattttgaagggactgagtttcttaaccctctaatcagcaagtaccttctaacctgcaagactgcccgccaactgacagtgagaatcaagaacctcaacatgaacagagctcctgacaacatcattaaattttataagaagaccaaacagctgccagtcctaggaaaatgctgtgaagagatccagccacatcagtggaagccacctatagagagagaagaacaccggctcccattctggttaaaggccagtctgccatccatccaggaagaactgcggcacatggctgatggtgctagagaggtaggaaatatgactggaaccactgagatcaactcagatcaaggcctagaaaaagacaactcagagttggggagtgaaactcggtacccactgctattgcctaagggtgtagtcctgaaactgaagccagttgccgaccgtttccccaagaaggcttggagacagaagcgttcatcagtcctgaaacccctccttatccaacccagcccctctctccagcccagcttcaaccctgggaaaacaccagcccaatcaactcattcagaagcccctccgagcaaaatggtgctccggattcctcacccaatacagccagccactgttttacagacagttccaggtgtccctccactgggggtcagtggaggtgagagttttgagtctcctgcagcactgcctgctatgccccctgaggccaggacaagcttccctctgtctgagtcccagactttgctctcttctgcccctgtgcccaaggtaatgatgccctcccctgcctcttccatgtttcgaaagccatatgtgagacggagaccctcaaaaagaaggggagccagggcctttcgctgtatcaaacctgcccctgttatccaccctgcatctgttatcttcactgttcctgctaccactgtgaagattgtgagccttggcggtggctgtaacatgatccagcctgtcaatgcggctgtggcccagagtccccagactattcccatcgccaccctcttggttaaccctacttccttcccctgtccattgaaccagccccttgtggcctcctctgtctcacccttaattgtttctggcaattctgtgaatcttcctataccatccacccctgaagataaggcccacatgaatgtggacattgcttgtgctgtggctgatggggaaaatgcctttcagggcctagaacccaaattagagccccaggaactatctcctctctctgctactgttttccccaaagtggaacatagcccagggcctccaccagtcgataaacagtgccaagaaggattgtcagagaacagtgcctatcgctggaccgttgtgaaaacagaggagggaaggcaagctctggagccgctccctcagggcatccaggagtctctaaacaactcttcccctggggatttagaggaagttgtcaagatggaacctgaagatgctacagaggaaatcagtggatttctttgagctaggagaataagagtctggagactgggagccttcacttcggcctccgattggtggcgcatagggtgtaaccaataggaaacccctaaagggtacttaaaccccagattttgcaactggggctcttgagcagcttgctttagcctgctcccactctgtggaatatacttttgcttcaataaatctgtgcttttattgctt

SEQ ID NO: 66808 - DNA, 3280 bp, Homo sapiens
ggcacgaggcctccccacaccacctcatcactctcctttacttggctgccagtccagctgcctcagaatgtcagaagggtgccattttcagttcttttcctgtctgactgtagggtatagaacaggcagccctaagtgctgctttctgcgcaaatgttttttgattacaaatctctaactaggtttgaaatgttttatagaataagacaatattcttttcaacaaactttaaaaaaaatgtacagttttgttgtttgaaggcttgggctcgcgccgctgaagtcggcttacccgctggccgcctcctgacaagcgggagggatccgcggtggacccagggaagcggaggagcctggcggccaccccctcttcctcacttccctgtactctcatcgctctcggcctccgacacgaaaaggaagcaaatgagctgatggaagatctgtttgaaactttccaagatgagatgggattctccaacatggaagatgatggcccagaagaggaggagcgtgtggctgagcctcaagctaactttaacacccctcaagctctacggtttgaggaactactggccaacctactaaatgaacaacatcagatagcgaaggaactatttgaacagctgaagatgaagaaaccttcagccaaacagcagaaggaggtagagaaggttaaaccccagtgtaaggaagttcatcagaccctgattctggacccagcacaaaggaagagactccagcagcagatgcagcagcatgttcagctcttgacacaaatccaccttcttgccacctgcaaccccaatctcaatccggaggccagtagcaccaggatatgtcttaaagagctgggaacctttgctcaaagctccatcgcccttcaccatcagtacaaccccaagtttcagaccctgttccaaccctgtaacttgatgggagctatgcagctgattgaagacttcagcacacatgtcagcattgactgcagccctcataaaactgtcaagaagactgccaatgaatttccctgtttgccaaagcaagtggcttggatcctggccacaagcaaggttttcatgtatccagagttacttccagtgtgttccctgaaggcaaagaatccccaggataagatcctcttcaccaaggctgaggacaatttgttagctttaggactgaagcattttgaagggactgagtttcttaaccctctaatcagcaagtaccttctaacctgcaagactgcccgccaactgacagtgagaatcaagaacctcaacatgaacagagctcctgacaacatcattaaattttataagaagaccaaacagctgccagtcctaggaaaatgctgtgaagagatccagccacatcagtggaagccacctatagagagagaagaacaccggctcccattctggttaaaggtacagccctcttcctcgaagtctgtaggaggcagaaggtcactgaaagttctgagagaatatcaaggacttccttaatcgtctaatgctttagttgtagaactaggacttcaggaatcttcctgattcacctttcttcccttacttttctgcccttctccgggtgattctacaacattttcaaaataatgggtaaaatggtaatttgctaaaggaaattcagagaagagtttctaaagtgtataattggactgtggtctttgtagaaatttcatatgcagagtcccttggaaagatgccttgagcttgtctcaggtccctaaacttagaaagtcctattctttttcccaaattctgacatgtgctggatcagagtgttctcatttccaataggccagtctgccatccatccaggaagaactgcggcacatggctgatggtgctagagaggtaggaaatatgactggaaccactgagatcaactcagatcaaggcctagaaaaagacaactcagagttggggagtgaaactcggtacccactgctattgcctaagggtgtagtcctgaaactgaagccagttgccgaccgtttccccaagaaggcttggagacagaagcgttcatcagtcctgaaacccctccttatccaacccagcccctctctccagcccagcttcaaccctgggaaaacaccagcccaatcaactcattcagaagcccctccgagcaaaatggtgctccggattcctcacccaatacagccagccactgttttacagacagttccaggtgtccctccactgggggtcagtggaggtgagagttttgagtctcctgcagcactgcctgctatgccccctgaggccaggacaagcttccctctgtctgagtcccagactttgctctcttctgcccctgtgcccaaggtaatgatgccctcccctgcctcttccatgtttcgaaagccatatgtgagacggagaccctcaaaaagaaggggagccagggcctttcgctgtatcaaacctgcccctgttatccaccctgcatctgttatcttcactgttcctgctaccactgtgaagattgtgagccttggcggtggctgtaacatgatccagcctgtcaatgcggctgtggcccagagtccccagactattcccatcgccaccctcttggttaaccctacttccttcccctgtccattgaaccagccccttgtggcctcctctgtctcacccttaattgtttctggcaattctgtgaatcttcctataccatccacccctgaagataaggcccacatgaatgtggacattgcttgtgctgtggctgatggggaaaatgcctttcagggcctagaacccaaattagagccccaggaactatctcctctctctgctactgttttccccaaagtggaacatagcccagggcctccaccagtcgataaacagtgccaagaaggattgtcagagaacagtgcctatcgctggaccgttgtgaaaacagaggagggaaggcaagctctggagccgctccctcagggcatccaggagtctctaaacaactcttcccctggggatttagaggaagttgtcaagatggaacctgaagatgctacagaggaaatcagtggatttctttgagctaggagaataagagtctggagactgggagccttcacttcggcctccgattggtggcgcatagggtgtaaccaataggaaacccctaaagggtacttaaaccccagattttgcaactggggctcttgagcagcttgctttagcctgctcccactctgtggaatatacttttgcttcaataaatctgtgcttttattgctt

SEQ ID NO: 66809 - DNA, 2913 bp, Homo sapiens
ggcacgaggcctccccacaccacctcatcactctcctttacttggctgccagtccagctgcctcagaatgtcagaagggtgccattttcagttcttttcctgtctgactgtagggtatagaacaggcagccctaagtgctgctttctgcgcaaatgttttttgattacaaatctctaactaggtttgaaatgttttatagaataagacaatattcttttcaacaaactttaaaaaaaatgtacagttttgttgtttgaaggcttgggctcgcgccgctgaagtcggcttacccgctggccgcctcctgacaagcgggagggatccgcggtggacccagggaagcggaggagcctggcggccaccccctcttcctcacttccctgtactctcatcgctctcggcctccgacacgaaaaggaagcaaatgagctgatggaagatctgtttgaaactttccaagatgagatgggattctccaacatggaagatgatggcccagaagaggaggagcgtgtggctgagcctcaagctaactttaacacccctcaagctctacggtttgaggaactactggccaacctactaaatgaacaacatcagatagcgaaggaactatttgaacagctgaagatgaagaaaccttcagccaaacagcagaaggaggtagagaaggttaaaccccagtgtaaggaagttcatcagaccctgattctggacccagcacaaaggaagagactccagcagcagatgcagcagcatgttcagctcttgacacaaatccaccttcttgccacctgcaaccccaatctcaatccggaggccagtagcaccaggatatgtcttatcttccttgtgtcgtgttttcccagaaagagctgggaacctttgctcaaagctccatcgcccttcaccatcagtacaaccccaagtttcagaccctgttccaaccctgtaacttgatgggagctatgcagctgattgaagacttcagcacacatgtcagcattgactgcagccctcataaaactgtcaagaagactgccaatgaatttccctgtttgccaaagcaagtggcttggatcctggccacaagcaaggttttcatgtatccagagttacttccagtgtgttccctgaaggcaaagaatccccaggataagatcctcttcaccaaggctgaggacaatttgttagctttaggactgaagcattttgaagggactgagtttcttaaccctctaatcagcaagtaccttctaacctgcaagactgcccgccaactgacagtgagaatcaagaacctcaacatgaacagagctcctgacaacatcattaaattttataagaagaccaaacagctgccagtcctaggaaaatgctgtgaagagatccagccacatcagtggaagccacctatagagagagaagaacaccggctcccattctggttaaaggccagtctgccatccatccaggaagaactgcggcacatggctgatggtgctagagaggtaggaaatatgactggaaccactgagatcaactcagatcaaggcctagaaaaagacaactcagagttggggagtgaaactcggtacccactgctattgcctaagggtgtagtcctgaaactgaagccagttgccgaccgtttccccaagaaggcttggagacagaagcgttcatcagtcctgaaacccctccttatccaacccagcccctctctccagcccagcttcaaccctgggaaaacaccagcccaatcaactcattcagaagcccctccgagcaaaatggtgctccggattcctcacccaatacagccagccactgttttacagacagttccaggtgtccctccactgggggtcagtggaggtgagagttttgagtctcctgcagcactgcctgctatgccccctgaggccaggacaagcttccctctgtctgagtcccagactttgctctcttctgcccctgtgcccaaggtaatgatgccctcccctgcctcttccatgtttcgaaagccatatgtgagacggagaccctcaaaaagaaggggagccagggcctttcgctgtatcaaacctgcccctgttatccaccctgcatctgttatcttcactgttcctgctaccactgtgaagattgtgagccttggcggtggctgtaacatgatccagcctgtcaatgcggctgtggcccagagtccccagactattcccatcgccaccctcttggttaaccctacttccttcccctgtccattgaaccagccccttgtggcctcctctgtctcacccttaattgtttctggcaattctgtgaatcttcctataccatccacccctgaagataaggcccacatgaatgtggacattgcttgtgctgtggctgatggggaaaatgcctttcagggcctagaacccaaattagagccccaggaactatctcctctctctgctactgttttccccaaagtggaacatagcccagggcctccaccagtcgataaacagtgccaagaaggattgtcagagaacagtgcctatcgctggaccgttgtgaaaacagaggagggaaggcaagctctggagccgctccctcagggcatccaggagtctctaaacaactcttcccctggggatttagaggaagttgtcaagatggaacctgaagatgctacagaggaaatcagtggatttctttgagctaggagaataagagtctggagactgggagccttcacttcggcctccgattggtggcgcatagggtgtaaccaataggaaacccctaaagggtacttaaaccccagattttgcaactggggctcttgagcagcttgctttagcctgctcccactctgtggaatatacttttgcttcaataaatctgtgcttttattgctt

SEQ ID NO: 66810 - DNA, 2166 bp, Homo sapiens
  misc_feature (14)..(14): n is a, c, g, or t
tcgcgaacgtagtnatccctagcagcagatgagcagcatgttcagctcttgacacaaatccaccttcttgccacctgcaaccccaatctcaatccggaggccagtagcaccaggatatgtcttaaagagctgggaacctttgctcaaagctccatcgcccttcaccatcagtacaaccccaagtttcagaccctgttccaaccctgtaacttgatgggagctatgcagctgattgaagacttcagcacacatgtcagcattgactgcagccctcataaaactgtcaagaagactgccaatgaatttccctgtttgccaaagcaagtggcttggatcctggccacaagcaaggttttcatgtatccagagttacttccagtgtgttccctgaaggcaaagaatccccaggataagatcctcttcaccaaggctgaggacaatttgttagctttaggactgaagcattttgaagggactgagtttcttaaccctctaatcagcaagtaccttctaacctgcaagactgcccgccaactgacagtgagaatcaagaacctcaacatgaacagagctcctgacaacatcattaaattttataagaagaccaaacagctgccagtcctaggaaaatgctgtgaagagatccagccacatcagtggaagccacctatagagagagaagaacaccggctcccattctggttaaaggccagtctgccatccatccaggaagaactgcggcacatggctgatggtgctagagaggtaggaaatatgactggaaccactgagatcaactcagatcaaggcctagaaaaagacaactcagagttggggagtgaaactcggtacccactgctattgcctaagggtgtagtcctgaaactgaagccagttgccgaccgtttccccaagaaggcttggagacagaagcgttcatcagtcctgaaacccctccttatccaacccagcccctctctccagcccagcttcaaccctgggaaaacaccagcccaatcaactcattcagaagcccctccgagcaaaatggtgctccggattcctcacccaatacagccagccactgttttacagacagttccaggtgtccctccactgggggtcagtggaggtgagagttttgagtctcctgcagcactgcctgctatgccccctgaggccaggacaagcttccctctgtctgagtcccagactttgctctcttctgcccctgtgcccaaggtaatgatgccctcccctgcctcttccatgtttcgaaagccatatgtgagacggagaccctcaaaaagaaggggagccagggcctttcgctgtatcaaacctgcccctgttatccaccctgcatctgttatcttcactgttcctgctaccactgtgaagattgtgagccttggcggtggctgtaacatgatccagcctgtcaatgcggctgtggcccagagtccccagactattcccatcgccaccctcttggttaaccctacttccttcccctgtccattgaaccagccccttgtggcctcctctgtctcacccttaattgtttctggcaattctgtgaatcttcctataccatccacccctgaagataaggcccacatgaatgtggacattgcttgtgctgtggctgatggggaaaatgcctttcagggcctagaacccaaattagagccccaggaactatctcctctctctgctactgttttccccaaagtggaacatagcccagggcctccaccagtcgataaacagtgccaagaaggattgtcagagaacagtgcctatcgctggaccgttgtgaaaacagaggagggaaggcaagctctggagccgctccctcagggcatccaggagtctctaaacaactcttcccctggggatttagaggaagttgtcaagatggaacctgaagatgctacagaggaaatcagtggatttctttgagctaggagaataagagtctggagactgggagccttcacttcggcctccgattggtggcgcatagggtgtaaccaataggaaacccctaaagggtacttaaaccccagattttgcaactggggctcttgagcagcttgctttagcctgctcccactctgtggaatatacttttgcttcaataaatctgtgcttttattgctt

SEQ ID NO: 66811 - DNA, 1995 bp, Homo sapiens
tggaagcaaacataggctaggtacgaggctgggtgtcgcttgatgggagctatgcagctgattgaagacttcagcacacatgtcagcattgactgcagccctcataaaactgtcaagaagactgccaatgaatttccctgtttgccaaagcaagtggcttggatcctggccacaagcaaggttttcatgtatccagagttacttccagtgtgttccctgaaggcaaagaatccccaggataagatcctcttcaccaaggctgaggacaatttgttagctttaggactgaagcattttgaagggactgagtttcttaaccctctaatcagcaagtaccttctaacctgcaagactgcccgccaactgacagtgagaatcaagaacctcaacatgaacagagctcctgacaacatcattaaattttataagaagaccaaacagctgccagtcctaggaaaatgctgtgaagagatccagccacatcagtggaagccacctatagagagagaagaacaccggctcccattctggttaaaggccagtctgccatccatccaggaagaactgcggcacatggctgatggtgctagagaggtaggaaatatgactggaaccactgagatcaactcagatcaaggcctagaaaaagacaactcagagttggggagtgaaactcggtacccactgctattgcctaagggtgtagtcctgaaactgaagccagttgccgaccgtttccccaagaaggcttggagacagaagcgttcatcagtcctgaaacccctccttatccaacccagcccctctctccagcccagcttcaaccctgggaaaacaccagcccaatcaactcattcagaagcccctccgagcaaaatggtgctccggattcctcacccaatacagccagccactgttttacagacagttccaggtgtccctccactgggggtcagtggaggtgagagttttgagtctcctgcagcactgcctgctatgccccctgaggccaggacaagcttccctctgtctgagtcccagactttgctctcttctgcccctgtgcccaaggtaatgatgccctcccctgcctcttccatgtttcgaaagccatatgtgagacggagaccctcaaaaagaaggggagccagggcctttcgctgtatcaaacctgcccctgttatccaccctgcatctgttatcttcactgttcctgctaccactgtgaagattgtgagccttggcggtggctgtaacatgatccagcctgtcaatgcggctgtggcccagagtccccagactattcccatcgccaccctcttggttaaccctacttccttcccctgtccattgaaccagccccttgtggcctcctctgtctcacccttaattgtttctggcaattctgtgaatcttcctataccatccacccctgaagataaggcccacatgaatgtggacattgcttgtgctgtggctgatggggaaaatgcctttcagggcctagaacccaaattagagccccaggaactatctcctctctctgctactgttttccccaaagtggaacatagcccagggcctccaccagtcgataaacagtgccaagaaggattgtcagagaacagtgcctatcgctggaccgttgtgaaaacagaggagggaaggcaagctctggagccgctccctcagggcatccaggagtctctaaacaactcttcccctggggatttagaggaagttgtcaagatggaacctgaagatgctacagaggaaatcagtggatttctttgagctaggagaataagagtctggagactgggagccttcacttcggcctccgattggtggcgcatagggtgtaaccaataggaaacccctaaagggtacttaaaccccagattttgcaactggggctcttgagcagcttgctttagcctgctcccactctgtggaatatacttttgcttcaataaatctgtgcttttattgctt

SEQ ID NO: 66812 - DNA, 2907 bp, Homo sapiens
ggcacgaggcctccccacaccacctcatcactctcctttacttggctgccagtccagctgcctcagaatgtcagaagggtgccattttcagttcttttcctgtctgactgtagggtatagaacaggcagccctaagtgctgctttctgcgcaaatgttttttgattacaaatctctaactaggtttgaaatgttttatagaataagacaatattcttttcaacaaactttaaaaaaaatgtacagttttgttgtttgaaggcttgggctcgcgccgctgaagtcggcttacccgctggccgcctcctgacaagcgggagggatccgcggtggacccagggaagcggaggagcctggcggccaccccctcttcctcacttccctgtactctcatcgctctcggcctccgacacgaaaaggaagcaaatgagctgatggaagatctgtttgaaactttccaagatgagatgggattctccaacatggaagatgatggcccagaagaggaggagcgtgtggctgagcctcaagctaactttaacacccctcaagctctacggtttgaggaactactggccaacctactaaatgaacaacatcagatagcgaaggaactatttgaacagctgaagatgaagaaaccttcagccaaacagcagaaggaggtagagaaggttaaaccccagtgtaaggaagttcatcagaccctgattctggacccagcacaaaggaagagactccagcagcagatgcagcagcatgttcagctcttgacacaaatccaccttcttgccacctgcaaccccaatctcaatccggaggccagtagcaccaggatatgtcttaaagagctgggaacctttgctcaaagctccatcgcccttcaccatcagtacaaccccaagtttcagaccctgttccaaccctgtaacttgatgggagctatgcagctgattgaagacttcagcacacatgtcagcattgactgcagccctcataaaactgtcaagaagactgccaatgaatttccctgtttgccaaagcaagtggcttggatcctggccacaagcaaggttttcatgtatccagagttacttccagtgtgttccctgaaggcaaagaatccccaggataagatcctcttcaccaaggctgaggacaatttgttagctttaggactgaagcattttgaagggactgagtttcttaaccctctaatcagcaagtaccttctaacctgcaagactgcccgccaactgacagtgagaatcaagaacctcaacatgaacagagctcctgacaacatcattaaattttataagaagaccaaacagctgccagtcctaggaaaatgctgtgaagagatccagccacatcagtggaagccacctatagagagagaagaacaccggctcccattctggttaaaggccagtctgccatccatccaggaagaactgcggcacatggctgatggtgctagagaggtaggaaatatgactggaaccactgagatcaactcagatcaaggcctagaaaaagacaactcagagttggggagtgaaactcggtacccactgctattgcctaagggtgtagtcctgaaactgaagccagttgccgaccgtttccccaagaaggcttggagacagaagcgttcatcagtcctgaaacccctccttatccaacccagcccctctctccagcccagcttcaaccctgggaaaacaccagcccaatcaactcattcagaagcccctccgagcaaaatggtgctccggattcctcacccaatacagccagccactgttttacagacagttccaggtgtccctccactgggggtcagtggaggtgagagttttgagtctcctgcagcactgcctgctatgccccctgaggccaggacaagcttccctctgtctgagtcccagactttgctctcttctgcccctgtgcccaaggtaatgatgccctcccctgcctcttccatgtttcgaaagccatatgtgagacggagaccctcaaaaagaaggggagccagggcctttcgctgtatcaaacctgcccctgttatccaccctgcatctgttatcttcactgttcctgctaccactgtgaagattgtgagccttggcggtggctgtaacatgatccagcctgtcaatgcggctgtggcccagagtccccagactattcccatcgccaccctcttggttaaccctacttccttcccctgtccattgaaccagccccttgtggcctcctctgtctcacccttaattgtttctggcaattctgtgaatcttcctataccatccacccctgaagataaggcccacatgaatgtggacattgcttgtgctgtggctgatggggaaaatgcctttcagggcctagaacccaaattagagccccaggaactatctcctctctctgctactgttttccccaaagtggaacatagcccagggcctccaccagtcgataaacagtgccaagaaggattgtcagagaacagtgcctatcgctggaccgttgtgaaaacagaggagggaaggcaagctctggagccgctccctcagggcatccaggagtctctaaacaactcttcccctggggatttagaggaagttgtcaagatggaacctgaagatgctacagaggaaatcagtggatttctttgagctaggagaataagagtctggagactgggagccttcacttcggcctccgattggtggcgcatagggtgtaaccaataggaaacccctaaagggtacttaaaccccagattttgcaactggggctcttgagcagcttgctttagcctgctcccactctgtggaatatacttttgcttcaataaatctgtgcttttattgcttaaaaaaaaaacccgggctca

SEQ ID NO: 66813 - DNA, 1400 bp, Homo sapiens
ttctattctgcgctgagagctgtacagcagcctactcactcttggggtctcctcacaactcagagttggggagtgaaactcggtacccactgctattgcctaagggtgtagtcctgaaactgaagccagttgccgaccgtttccccaagaaggcttggagacagaagcgttcatcagtcctgaaacccctccttatccaacccagcccctctctccagcccagcttcaaccctgggaaaacaccagcccaatcaactcattcagaagcccctccgagcaaaatggtgctccggattcctcacccaatacagccagccactgttttacagacagttccaggtgtccctccactgggggtcagtggaggtgagagttttgagtctcctgcagcactgcctgctatgccccctgaggccaggacaagcttccctctgtctgagtcccagactttgctctcttctgcccctgtgcccaaggtaatgatgccctcccctgcctcttccatgtttcgaaagccatatgtgagacggagaccctcaaaaagaaggggagccagggcctttcgctgtatcaaacctgcccctgttatccaccctgcatctgttatcttcactgttcctgctaccactgtgaagattgtgagccttggcggtggctgtaacatgatccagcctgtcaatgcggctgtggcccagagtccccagactattcccatcgccaccctcttggttaaccctacttccttcccctgtccattgaaccagccccttgtggcctcctctgtctcacccttaattgtttctggcaattctgtgaatcttcctataccatccacccctgaagataaggcccacatgaatgtggacattgcttgtgctgtggctgatggggaaaatgcctttcagggcctagaacccaaattagagccccaggaactatctcctctctctgctactgttttccccaaagtggaacatagcccagggcctccaccagtcgataaacagtgccaagaaggattgtcagagaacagtgcctatcgctggaccgttgtgaaaacagaggagggaaggcaagctctggagccgctccctcagggcatccaggagtctctaaacaactcttcccctggggatttagaggaagttgtcaagatggaacctgaagatgctacagaggaaatcagtggatttctttgagctaggagaataagagtctggagactgggagccttcacttcggcctccgattggtggcgcatagggtgtaaccaataggaaacccctaaagggtacttaaaccccagattttgcaactggggctcttgagcagcttgctttagcctgctcccactctgtggaatatacttttgcttcaataaatctgtgcttttattgctt

SEQ ID NO: 66814 - DNA, 1123 bp, Homo sapiens
tgagtgcgtgccgggtgtttatttcattccgaggccagccactgttttacagacagttccaggtgtccctccactgggggtcagtggaggtgagagttttgagtctcctgcagcactgcctgctatgccccctgaggccaggacaagcttccctctgtctgagtcccagactttgctctcttctgcccctgtgcccaaggtaatgatgccctcccctgcctcttccatgtttcgaaagccatatgtgagacggagaccctcaaaaagaaggggagccagggcctttcgctgtatcaaacctgcccctgttatccaccctgcatctgttatcttcactgttcctgctaccactgtgaagattgtgagccttggcggtggctgtaacatgatccagcctgtcaatgcggctgtggcccagagtccccagactattcccatcgccaccctcttggttaaccctacttccttcccctgtccattgaaccagccccttgtggcctcctctgtctcacccttaattgtttctggcaattctgtgaatcttcctataccatccacccctgaagataaggcccacatgaatgtggacattgcttgtgctgtggctgatggggaaaatgcctttcagggcctagaacccaaattagagccccaggaactatctcctctctctgctactgttttccccaaagtggaacatagcccagggcctccaccagtcgataaacagtgccaagaaggattgtcagagaacagtgcctatcgctggaccgttgtgaaaacagaggagggaaggcaagctctggagccgctccctcagggcatccaggagtctctaaacaactcttcccctggggatttagaggaagttgtcaagatggaacctgaagatgctacagaggaaatcagtggatttctttgagctaggagaataagagtctggagactgggagccttcacttcggcctccgattggtggcgcatagggtgtaaccaataggaaacccctaaagggtacttaaaccccagattttgcaactggggctcttgagcagcttgctttagcctgctcccactctgtggaatatacttttgcttcaataaatctgtgcttttattgctt

SEQ ID NO: 66815 - DNA, 841 bp, Homo sapiens
atttcggcacaggctagcccatgagcttcaataccctgcatctgttatcttcactgttcctgctaccactgtgaagattgtgagccttggcggtggctgtaacatgatccagcctgtcaatgcggctgtggcccagagtccccagactattcccatcgccaccctcttggttaaccctacttccttcccctgtccattgaaccagccccttgtggcctcctctgtctcacccttaattgtttctggcaattctgtgaatcttcctataccatccacccctgaagataaggcccacatgaatgtggacattgcttgtgctgtggctgatggggaaaatgcctttcagggcctagaacccaaattagagccccaggaactatctcctctctctgctactgttttccccaaagtggaacatagcccagggcctccaccagtcgataaacagtgccaagaaggattgtcagagaacagtgcctatcgctggaccgttgtgaaaacagaggagggaaggcaagctctggagccgctccctcagggcatccaggagtctctaaacaactcttcccctggggatttagaggaagttgtcaagatggaacctgaagatgctacagaggaaatcagtggatttctttgagctaggagaataagagtctggagactgggagccttcacttcggcctccgattggtggcgcatagggtgtaaccaataggaaacccctaaagggtacttaaaccccagattttgcaactggggctcttgagcagcttgctttagcctgctcccactctgtggaatatacttttgcttcaataaatctgtgcttttattgctt

SEQ ID NO: 66816 - DNA, 479 bp, Homo sapiens
aagtgcacaagcattgcatggccatgcaaggtcagactgctagtaggatccccagtctgtcatcactaccaagagtcgataaacagtgccaagaaggattgtcagagaacagtgcctatcgctggaccgttgtgaaaacagaggagggaaggcaagctctggagccgctccctcagggcatccaggagtctctaaacaactcttcccctggggatttagaggaagttgtcaagatggaacctgaagatgctacagaggaaatcagtggatttctttgagctaggagaataagagtctggagactgggagccttcacttcggcctccgattggtggcgcatagggtgtaaccaataggaaacccctaaagggtacttaaaccccagattttgcaactggggctcttgagcagcttgctttagcctgctcccactctgtggaatatacttttgcttcaataaatctgtgcttttattgctt

SEQ ID NO: 66817 - DNA, 2682 bp, Homo sapiens
ggcacgaggcctccccacaccacctcatcactctcctttacttggctgccagtccagctgcctcagaatgtcagaagggtgccattttcagttcttttcctgtctgactgtagggtatagaacaggcagccctaagtgctgctttctgcgcaaatgttttttgattacaaatctctaactaggtttgaaatgttttatagaataagacaatattcttttcaacaaactttaaaaaaaatgtacagttttgttgtttgaaggcttgggctcgcgccgctgaagtcggcttacccgctggccgcctcctgacaagcgggagggatccgcggtggacccagggaagcggaggagcctggcggccaccccctcttcctcacttccctgtactctcatcgctctcggcctccgacacgaaaaggaagcaaatgagctgatggaagatctgtttgaaactttccaagatgagatgggattctccaacatggaagatgatggcccagaagaggaggagcgtgtggctgagcctcaagctaactttaacacccctcaagctctacggtttgaggaactactggccaacctactaaatgaacaacatcagatagcgaaggaactatttgaacagctgaagatgaagaaaccttcagccaaacagcagaaggaggtagagaaggttaaaccccagtgtaaggaagttcatcagaccctgattctggacccagcacaaaggaagagactccagcagcagatgcagcagcatgttcagctcttgacacaaatccaccttcttgccacctgcaaccccaatctcaatccggaggccagtagcaccaggatatgtcttaaagagctgggaacctttgctcaaagctccatcgcccttcaccatcagtacaaccccaagtttcagaccctgttccaaccctgtaacttgatgggagctatgcagctgattgaagacttcagcacacatgtcagcattgactgcagccctcataaaactgtcaagaagactgccaatgaatttccctgtttgccaaagcaagtggcttggatcctggccacaagcaaggttttcatgtatccagagttacttccagtgtgttccctgaaggcaaagaatccccaggataagatcctcttcaccaaggctgaggacaatttgttagctttaggactgaagcattttgaagggactgagtttcttaaccctctaatcagcaagtaccttctaacctgcaagactgcccgccaactgacagtgagaatcaagaacctcaacatgaacagagctcctgacaacatcattaaattttataagaagaccaaacagctgccagtcctaggaaaatgctgtgaagagatccagccacatcagtggaagccacctatagagagagaagaacaccggctcccattctggttaaaggccagtctgccatccatccaggaagaactgcggcacatggctgatggtgctagagaggtaggaaatatgactggaaccactgagatcaactcagatcaaggcctagaaaaagacaactcagagttggggagtgaaactcggtacccactgctattgcctaagggtgtagtcctgaaactgaagccagttgccgaccgtttccccaagaaggcttggagacagaagcgttcatcagtcctgaaacccctccttatccaacccagcccctctctccagcccagcttcaaccctgggaaaacaccagcccaatcaactcattcagaagcccctccgagcaaaatggtgctccggattcctcacccaatacagccagccactgttttacagacagttccaggtgtccctccactgggggtcagtggaggtgagagttttgagtctcctgcagcactgcctgctatgccccctgaggccaggacaagcttccctctgtctgagtcccagactttgctctcttctgcccctgtgcccaaggtaatgatgccctcccctgcctcttccatgtttcgaaagccatatgtgagacggagaccctcaaaaagaaggggagccagggcctttcgctgtatcaaacctgcccctgttatccaccctgcatctgttatcttcactgttcctgctaccactgtgaagattgtgagccttggcggtggctgtaacatgatccagcctgtcaatgcggctgtggcccagagtccccagactattcccatcgccaccctcttggttaaccctacttccttcccctgtccattgaaccagccccttgtggcctcctctgtctcacccttaattgtttctggcaattctgtgaatcttcctataccatccacccctgaagataaggcccacatgaatgtggacattgcttgtgctgtggctgatggggaaaatgcctttcagggcctagaacccaaattagagccccaggaactatctcctctctctgctactgttttccccaaagtggaacatagcccagggcctccaccagtcgataaacagtgccaagaaggattgtcagagaacagtgcctatcgctggaccgttgtgaaaacagaggaggcgacgcgaccgcagataatccgcatggtgatcagcagatcatcggcttattcacgaagtcataattattgcgcatcgcccgcggaagacgctgatacgcgtgatgacaggcactgttagtacgatga

SEQ ID NO: 66818 - DNA, 1790 bp, Homo sapiens
ggcacgaggcctccccacaccacctcatcactctcctttacttggctgccagtccagctgcctcagaatgtcagaagggtgccattttcagttcttttcctgtctgactgtagggtatagaacaggcagccctaagtgctgctttctgcgcaaatgttttttgattacaaatctctaactaggtttgaaatgttttatagaataagacaatattcttttcaacaaactttaaaaaaaatgtacagttttgttgtttgaaggcttgggctcgcgccgctgaagtcggcttacccgctggccgcctcctgacaagcgggagggatccgcggtggacccagggaagcggaggagcctggcggccaccccctcttcctcacttccctgtactctcatcgctctcggcctccgacacgaaaaggaagcaaatgagctgatggaagatctgtttgaaactttccaagatgagatgggattctccaacatggaagatgatggcccagaagaggaggagcgtgtggctgagcctcaagctaactttaacacccctcaagctctacggtttgaggaactactggccaacctactaaatgaacaacatcagatagcgaaggaactatttgaacagctgaagatgaagaaaccttcagccaaacagcagaaggaggtagagaaggttaaaccccagtgtaaggaagttcatcagaccctgattctggacccagcacaaaggaagagactccagcagcagatgcagcagcatgttcagctcttgacacaaatccaccttcttgccacctgcaaccccaatctcaatccggaggccagtagcaccaggatatgtcttaaagagctgggaacctttgctcaaagctccatcgcccttcaccatcagtacaaccccaagtttcagaccctgttccaaccctgtaacttgatgggagctatgcagctgattgaagacttcagcacacatgtcagcattgactgcagccctcataaaactgtcaagaagactgccaatgaatttccctgtttgccaaagcaagtggcttggatcctggccacaagcaaggttttcatgtatccagagttacttccagtgtgttccctgaaggcaaagaatccccaggataagatcctcttcaccaaggctgaggacaatttgttagctttaggactgaagcattttgaagggactgagtttcttaaccctctaatcagcaagtaccttctaacctgcaagactgcccgccaactgacagtgagaatcaagaacctcaacatgaacagagctcctgacaacatcattaaattttataagaagaccaaacagctgccagtcctaggaaaatgctgtgaagagatccagccacatcagtggaagccacctatagagagagaagaacaccggctcccattctggttaaaggccagtctgccatccatccaggaagaactgcggcacatggctgatggtgctagagaggtaggaaatatgactggaaccactgagatcaactcagatcaaggcctagaaaaagacaactcagagttggggagtgaaactcggtacccactgctattgcctaagggtgtagtcctgaaactgaagccagttgccgaccgtttccccaagaaggcttggagacagaagcgttcatcagtcctgaaacccctccttatccaacccagcccctctctccagcccagcttcaaccctgggaaaacaccagcccaatcaactcattcagaagcccctccgagttatccaacccagcccctctccccag

SEQ ID NO: 66819 - DNA, 1838 bp, Homo sapiens
ggcacgaggcctccccacaccacctcatcactctcctttacttggctgccagtccagctgcctcagaatgtcagaagggtgccattttcagttcttttcctgtctgactgtagggtatagaacaggcagccctaagtgctgctttctgcgcaaatgttttttgattacaaatctctaactaggtttgaaatgttttatagaataagacaatattcttttcaacaaactttaaaaaaaatgtacagttttgttgtttgaaggcttgggctcgcgccgctgaagtcggcttacccgctggccgcctcctgacaagcgggagggatccgcggtggacccagggaagcggaggagcctggcggccaccccctcttcctcacttccctgtactctcatcgctctcggcctccgacacgaaaaggaagcaaatgagctgatggaagatctgtttgaaactttccaagatgagatgggattctccaacatggaagatgatggcccagaagaggaggagcgtgtggctgagcctcaagctaactttaacacccctcaagctctacggtttgaggaactactggccaacctactaaatgaacaacatcagatagcgaaggaactatttgaacagctgaagatgaagaaaccttcagccaaacagcagaaggaggtagagaaggttaaaccccagtgtaaggaagttcatcagaccctgattctggacccagcacaaaggaagagactccagcagcagatgcagcagcatgttcagctcttgacacaaatccaccttcttgccacctgcaaccccaatctcaatccggaggccagtagcaccaggatatgtcttaaagagctgggaacctttgctcaaagctccatcgcccttcaccatcagtacaaccccaagtttcagaccctgttccaaccctgtaacttgatgggagctatgcagctgattgaagacttcagcacacatgtcagcattgactgcagccctcataaaactgtcaagaagactgggtaggagacagatgtgtcagctttaagtttttacttgcggtgagaggtggtgggaatcttatcccatagataacttcctaggatacttgcctaggaatggaggacacaggacatttgtaatttcttccttctctcttttatcctccctttgtactcattatccaagttctagaattacatgataatctccgggcctgggtaaggcatggaggcagtggacagtataggaatatgggaggtagagatctgaggctcagtgctaagaattggactacagcaatatgaggggtaagtattaggaatcagatcaagataaactggggcctggtaaagatgaaagtcaggtggtaaagttcggtcatgtttagctttttattctcttcattaagatcaactaactttatttaccataatgattgtagcataggtgatatctccattctgaatgaaatgttgacttgcaagttaggcgtaaattagagattgtacatttgccgtgttcagtattttaaagaaatttgccggtttagattctaccttgcattggtttagtattttttgagaaaatatttgctatttacttaagccaaatatttacttctgatttgtttgctgacttagcaaattagttgtggtttgttctggatttgggtttgtctttggattctattttaaatccctaagtcttatcattacattgaatgtagttgaatttaagtgtactatatcatagacacagatcccaaactactttaatagctatattatatgaaatggtaatgaaaacgtgatttaataccaaattatagtattatcttaca

SEQ ID NO: 66820 - DNA, 610 bp, Homo sapiens
acacaaataccacattcatcctcataatgacaacatgccaatggtataagagaaatatctctaaatactgaatttagtttatgtaccagagaagtacctaaaaagtcaaaccacatcaatctcaagaatcactacaaggagaccacaaaattaaaagcattctctattctgaactgcattttgaggatttcaacataaactttggaggagaaattaaaactgtgtaggaatactactgttccctcactgcggaatcagtagcacaattcactccttggttgattgtggtagcttttagcaaagaaggaaatatgggacttttgactgtgttcctgcttttcatggacatggtagcctccacagggagaaattatatggaagtaaaataattttgtacttactgaaaaacattaaaggagtaataaagggggaaaattatactcgttttgactgaaactaaagtccacaagagcagtgcccacagggcatgcactactgaaaaacagaacctcccttctgcctgctgcctgctcccagaatggcctacatctccttcttcacggttgatctcaactgattacgtctctaatactgtactgagcacataaaa

SEQ ID NO: 66821 - DNA, 292 bp, Homo sapiens
tttttaaaaatcatgtatcgtgatatttaccaacagatattaaaagttgagatgtgaactgttttccctttaatttcgtcctaacaaaaagttgagccttaagtggggtaaaaatgtttctgaaaatgagctaaacatgaaatggctttgattaaagattatatttcaaaatatttattatatttatatttgatttagcagattttatttatataaatttttgacatctaagtttggggtgaacattatttttatgttaagttggaccatatgaaattgtcatttttttagg

SEQ ID NO: 66822 - DNA, 470 bp, Homo sapiens
tactgatctgtggaaggggtaggtgaagggggagacagtgcagatataagactaaataacgccgaccaaatagtacactgctgagcaaacaaagaaaggggcagaaacagaatgcagggcattgaccctctcactcactactgctggaacatgaaggcgcctagtggtcttcaatgatccaatttatttgattgcatggggttagagcatattggagaagatatcacagaagcgcattccccacagcatttcagctaccattcagcagtaggaaataaacacccccatttgtgccacaaaggggaaaattacattcatttctggccaggggaaaatctctggaataatatgatgaattgaagaaatcaaaggatttttttataaaatctgctttatcaaagccatttattttctgagtctctttttagttccttttctacacaattaactctgaaaggatgtgtgtaaac

SEQ ID NO: 66823 - DNA, 201 bp, Homo sapiens
tggggtcagagagtcctctttctattatgactcagatgtgaagggaagatgccaagggccctaaacatcacagggccttgcctggcatcaaacagatattaaataaatatatgttaaatgaatgaacaaatattcacagcgtgtgccgccctggacttgcagtgccatggtcgggtgaaagtgattttacttcaggagagg

SEQ ID NO: 66824 - DNA, 475 bp, Homo sapiens
agttggaagacagggtgatagtggctgcgccgccagcaaacagtctggaggtcactggccctgccccttctcaggccaagttattgattaattgacgattcgaggagggaaccccgtcttcctgcctttcttgtttacaagaagcctggtctcagcaatctcccagccctgggcactagcttttcccagctgtccctgaggagttctgtgagaaaccagccaccttccttttgcaatggggtacccagcactgttccagctggcagggacctccgatcagcgagtccaagctctctcatccaccgccaccattttacagataaggatactaaggtccagggaaggagaggattggctgaaggagcgtcagaggccttgcagtgggcttgggtgtcatttgccgcccataagagtcctgtggggtcactgccatcatccctgctccacagtgggaacaccgagaccctgcaaaggg

SEQ ID NO: 66825 - DNA, 498 bp, Homo sapiens
ttagacttgcctgttggagtccaaggatacctccaacaaaattctagacaataaaagaaagggtaagtgtctgaggggagggggcacttacaaattattccatttaatgctaattcgaggcttccagattcattttgggaaaatcaaagagcaagagctgtatgcatggctttttaaaacacaatgaaaattgggaagcatgggcttcccaattttcctgcgcataaacttctagaacaatttctattgttgatactttaaaaaaaatctttttcttttctgtgatgtggtcttttaaactcataccacaacttatggctccctctacttcctatattttaattgatcttgaggttattttcaagtcactgggcttaatgaacaaatattttagaatttcttcctttatatacactcatttctgtctcaataaaatgtctaatcaggaattcacttgtgtagaaaataaaaaatagaagtacatacccttcaagtgaa

SEQ ID NO: 66826 - DNA, 1149 bp, Homo sapiens
tgcagggaatttgttgatgcaaaaccaggaaacaatttatctccactgggaatactttgaagaagggattagagcggggctagggcagggaggatctgtaaaaaacaatatttgccaaactaaaaacacataggcacacatgggaattattttactttcaacaagttctgaaagtagtaacaaaaccagggagagttaaaagaataatttaacactgatgtttcaggaatgctaaaggagaccaggcatttagacttcatgttgctaagtgtgttcatctcaaatctaaaagccactttcataacaacaactttgctattccttagcattttgtctctttaggcagcttatttcccagtcaaagttataattttgtattcataataccataatcatttccatggtaacttcctgtgaagtcacagagaaaacactattgacttctcctgaggctctgatttcccagttgaaatcatatgttgattttattttttccaatgtaagtcaaagatttactattaaaaatcctggggatgaggtcttaacacagaaaacccatctgtcgtcgctacagaggactactatgaagaaagcgcctggcataatcttggcacatcgaaggcattcaaaaaataccagtcgtctctcttcactccctctaactctaactcattttaacctcatttaaactttgaggaaaaagaactcaaggtcagacaaggcttggttcaacaccctgagctgggttggcttgacaggactagcactagacctgacccagaggtaaaggcaattgtgggaagagcggacggacctgggaagaaatctagaagccaacgagcagaacaccaaagcttgtcactgggcaacagagaactggtccaacaaagctgtcaccatcagaaatgtgtgtcaccaggtcagagaaacaggaaatcaaggaaagacagaagagagaaaaaaagaaaagagaaagcagaaatgtgggttttgctgcaaagaaataccaaaattgtttccaatcagtcaaagtgaatcatctgtctaccaacatgcctcatttttcattgtctatagtggtgtccacagctagctgacacttcacatgaagattgaagaagaataaatttcattttaaatacatgttcc

SEQ ID NO: 66827 - DNA, 963 bp, Homo sapiens
aaaacttttcataaaatgttattttattataataaaaaatgtgtgattggttttcaatttcagattgaatcaaacatagcattctttgtaatagcaggagattaacaacatcccagaatatatctttaaaagaagtatggataaagaaaaacccgtatgcacctctgcacacattttatgtaatagtggtgatactaatttacaaagacaaagtatataggatattaaaagtgaattcttaatacctgatcttgattcttattaaatctgacttatgtgtatacaagatattattagatgaagtgtttgtccagtagcttagcttataaataacccccattctagctcattttaaacaatgtagtatgaatgatgccaaaaacaggctagaacattttcttctttccaagatcttagatttggtaaacaagctactgctcctggaactaatctaggtcatcataacccaaaatcttttgaaatatgagagtcccaattaagtctcttaggtactttttagcattttaattttaagaatgtgtttaactcttaaaacagtatattttggttgctgtttggccatttggtttatttgtaccttgttataatgaatgcaagtcagtgggtaatcattgcagcaaatatgattgctaggaatctcatgtaagtggaagtcaatataatgtatggcttaatttatccctgaactgacctaacatcacattttgttttttaataaaaactggtttaatgatatgataaatttctgtattttccacaactgttaataatgttatattttaactattgcttagtcttcattacaaattattcagctgttaaatgtgttgttcagtgtgacattatttaaaaacttaaaaaaaaatcagcttcacagaaatctttctttgatcaagagttgtctcattcccattgttattaatacagtatacaactaatgta

SEQ ID NO: 66828 - DNA, 1444 bp, Homo sapiens
aaaacttttcataaaatgttattttattataataaaaaatgtgtgattggttttcaatttcagattgaatcaaacatagcattctttgtaatagcaggagattaacaacatcccagaatatatctttaaaagaagtatggataaagaaaaacccgtatgcacctctgcacacattttatgtaatagtggtgatactaatttacaaagacaaagtatataggatattaaaagtgaattcttaatacctgatcttgattcttattaaatctgacttatgtgtatacaagatattattagatgaagtgtttgtccagtagcttagcttataaataacccccattctagctcattttaaacaatgtagtatgaatgatgccaaaaacaggctagaacattttcttctttccaagatcttagatttggtaaacaagctactgctcctggaactaatctaggtcatcataacccaaaatcttttgaaatatgagagtcccaattaagtctcttaggtactttttagcattttaattttaagaatgtgtttaactcttaaaacagtatattttggttgctgtttggccatttggtttatttgtaccttgttataatgaatgcaagtcagtgggtaatcattgcagcaaatatgattgctaggaatctcatgtaagtggaagtcaatataatgtatggcttaatttatccctgaactgacctaacatcacattttgttttttaataaaaactggtttaatgatatgataaatttctgtattttccacaactgttaataatgttatattttaactattgcttagtcttcattacaaattattcagctgttaaatgtgttgttcagtgtgacattatttaaaaacttaaaaaaaaatcagcttcacagaaatctttctttgatcaagagttgtctcattcccattgttattaatacagtatacaactaatgtaaaaaaaaaaaaaaaaacaacaaaaaaaaaaaaaaaaaaagggggggacacagaaaaaaaatatcacccccccgagggggccccaccaaatatttacggcatacaccagaaagtcttcttggtagcaagacggggccccctttataggggggcgcgattttacaaacacagggccatactcgatgccccagacatttgctttcaaaacacaactctacagtacaagtgcaaaaaaacacccgcagcgccactagtgcgaaaacacattctgtaataaagcaccaccctatccactttccgtggtgatgaaacacccaatatttgggtaaccacctagcaatcagcagcaattttcaacccccccccagcggtagtattcatcacgtctcaccacgactcatagcgcggtcacccgagacgctgaattgattcatacctcatcaaaataggccaacggcataaattattaaagttttttccag

SEQ ID NO: 66829 - DNA, 1390 bp, Homo sapiens
aaaacttttcataaaatgttattttattataataaaaaatgtgtgattggttttcaatttcagattgaatcaaacatagcattctttgtaatagcaggagattaacaacatcccagaatatatctttaaaagaagtatggataaagaaaaacccgtatgcacctctgcacacattttatgtaatagtggtgatactaatttacaaagacaaagtatataggatattaaaagtgaattcttaatacctgatcttgattcttattaaatctgacttatgtgtatacaagatattattagatgaagtgtttgtccagtagcttagcttataaataacccccattctagctcattttaaacaatgtagtatgaatgatgccaaaaacaggctagaacattttcttctttccaagatcttagatttggtaaacaagctactgctcctggaactaatctaggtcatcataacccttttaattttaagaatgtgtttaactcttaaaacagtatattttggttgctgtttggccatttggtttatttgtaccttgttataatgaatgcaagtcagtgggtaatcattgcagcaaatatgattgctaggaatctcatgtaagtggaagtcaatataatgtatggcttaatttatccctgaactgacctaacatcacattttgttttttaataaaaactggtttaatgatatgataaatttctgtattttccacaactgttaataatgttatattttaactattgcttagtcttcattacaaattattcagctgttaaatgtgttgttcagtgtgacattatttaaaaacttaaaaaaaaatcagcttcacagaaatctttctttgatcaagagttgtctcattcccattgttattaatacagtatacaactaatgtaaaaaaaaaaaaaaaaacaacaaaaaaaaaaaaaaaaaaagggggggacacagaaaaaaaatatcacccccccgagggggccccaccaaatatttacggcatacaccagaaagtcttcttggtagcaagacggggccccctttataggggggcgcgattttacaaacacagggccatactcgatgccccagacatttgctttcaaaacacaactctacagtacaagtgcaaaaaaacacccgcagcgccactagtgcgaaaacacattctgtaataaagcaccaccctatccactttccgtggtgatgaaacacccaatatttgggtaaccacctagcaatcagcagcaattttcaacccccccccagcggtagtattcatcacgtctcaccacgactcatagcgcggtcacccgagacgctgaattgattcatacctcatcaaaataggccaacggcataaattattaaagttttttccag

SEQ ID NO: 66830 - DNA, 217 bp, Homo sapiens
aaaaaaaagtaagtaactctcagaggtcaaaaatgaagaagcgggtctgatggtggtgggttatgagaactgattaacattagtgtcactaacgttggtatacaactctccactgctaagtttaactggcttaaaaaaaaatgtagaagccaaaatccagagaggaagcacctgagctgctggggtgattgaagcccggtgctctggagcctccatt

SEQ ID NO: 66831 - DNA, 299 bp, Homo sapiens
ctaatagcaaacattggaggaggtggagaaattagaaccttcatgcattgcatgagaatgtaaaatggtgcaggtgctttggaaaacaggcagttccttaaatagttaaacatagagttactgtatgatccagcagttccactactaggtctgtacccaagagcattgaaaacatatgtccacacaaaaacttgtacatgaatgttaataacagcattatttataatagtcaaaaggtgaaaacaacatgtgtctgtcaactgataaacaaatgaacaaaatttcgtatattcatacaa

SEQ ID NO: 66832 - DNA, 379 bp, Homo sapiens
cctcacactcaatgtccacagccagtcagtagtgaagtcaaataattacatctgtgaagtgttttgacaatctatgtactttaagttcatgctgccactgcttgagttctggacaacaccaactcttatctggtctaatgcaaaagcttgcctccagattttctaaactagttccttattcaaaagtctttgactaattcccatcccctaactaaccttaacaccaccacattttgggcgtcgtatgaaaacaaaagccagttttcatacaacgtccaaaatgctgaaatctcagaaaaattgaccctcatcacccaattcctatggagaaagacaggctgagcaagggttgtgttctaccataaagagtctgaaaacc

SEQ ID NO: 66833 - DNA, 497 bp, Homo sapiens
accgacttcctttatggccttttctccacttctccggactcagctcctctgtctgtaccacgtcgggggttgggaccaatcattgtatctcaaacttaagaatcaactcacatttgtactattactcatgtaacatttttttaagtcaccttttcttaaaagcaagacttagcctcctccaaagaaataatatgcatgaaatttcaactctgatatgctaggtttttccctaacattaatcacataattatcaatgtaacaaacatgcacccacataccacctgaaatcattttgtgaaccaccaggagcatgtgtatcaaactttgggaccctgagtaactgatatgacagaagatttatgcccttaggggcatcaaagatggtggttcttcacatattagagtcagcagggctgcccataacacacacaggaataatttttgtcatggtttaaggagttcataggcccctttgcagtttatctgcgaactccaaa

SEQ ID NO: 66834 - DNA, 649 bp, Homo sapiens
gatgtcaccccaaattggtagaagttgaaatcttctgatgactgggctttggtgcagtaactggtgtttgccaagtttttgctgtgtttgaaactttgaaataggtaccttacagtggactgggtgagatcttaaggatagggagtctgccctggaggagttttttcagtctgtttttgaggaaataaagacctgaaatgagttaccaaaccctgtgtcaggatgtaagatgaagcggaggcactgtcagcttgtataggtcagaaggaaaaaagcagtgaatgagactgctcgggagagggctgagagaggatactgttggtgggagaaatgacagagagtgtaaaacagtgtttcccaaactttagtcatttgcacacgtccttcatggtttttaccatgttacgtatctcctgtgctaataactacctaatatttttcttcaaattgacctgcttaaaaaaaaaaaaagaaaaggctaggtatgatagcttatcccctgtctcaaaaaaaaaaaaaaaaagaaaagagaaaaaaaactaaaacaacattttaaaagggaaacaatagcgagcccagaattaccaccgaaaatggaaatccagtgtcatcacttgatgtacgtagaaggtaactataaatagaataa

SEQ ID NO: 66835 - DNA, 813 bp, Homo sapiens
cggctagtacgaggctcgggtggtgaatcggcgaggaaaccgctcccgagcacggcggcggcgtcgtctcccggcagtgcagctgccgctaccgccgccctctgcccgccggcccgtctgtctacccccagcatgagcggcctgcgcgtctacagcacgtcggtcaccggctcccgcgaaatcaagtcccagcagagcgaggtgacccgaatcctggatgggaagcgcatccaataccagctagtggacatctcccaggacaacgccctgagggatgagatgcgagccttggcaggcaaccccaaggccaccccaccccagattgtcaacggggaccagtactgtggggactatgagctcttcgtggaggctgtggaacaaaacacgctgcaggagttcctgaagctggcttgagtcaagcctgtccagagttcccctgctggactccatcaccacactccccccagccttcacctggccatgaaggaccttttgaccaactccctgtcattcctaacctaaccttagagtccctcccccaatgcaggccacttctcctccctcctctctaaatgtagtcccctctcctccatctaaaggcaacattccttacccattagtctcagaaattgtcttaagcaacagccccaaatgctggctgcccccagccaagcattggggccgccatcctgcctggcactggctgatgggcacctctgttggttccatcagccagagctctgccaaaggccccgcagtccctctcccaggaggaccctagaggcaattaaatgatgtcctgttccattggca

SEQ ID NO: 66836 - DNA, 300 bp, Homo sapiens
cccacgcgtcgcggacgcgtgggtcgacccacgcgtcgcagctcctccctcctctctaaatgtagtcccctctcctccatctaaaggcaacattccttacccattagtctcagaaattgtcttaagcaacagccccaaatgctggctgcccccagccaagcattggggccgccatcctgcctggcactggctgatgggcacctctgttggttccatcagccagagctctgccaaaggccccgcagtccctctcccaggaggaccctagaggcaattaaatgatgtcctgttccattggca

SEQ ID NO: 66837 - DNA, 393 bp, Homo sapiens
  misc_feature (106)..(106): n is a, c, g, or t
aaaggaaaacccataggtggaaatgagaagaaaccaatgcaagaactccagtaactcaaatggcctctgtgtcatatgtccttcaaacaaccacaccagttctccnacaagagttcctaacctaaccttagagtccctcccccaatgcaggccacttctcctccctcctctctaaatgtagtcccctctcctccatctaaaggcaacattccttacccattagtctcagaaattgtcttaagcaacagccccaaatgctggctgcccccagccaagcattggggccgccatcctgcctggcactggctgatgggcacctctgttggttccatcagccagagctctgccaaggcttccggagggataaggctcccggaggttaaggctccgggg

SEQ ID NO: 66838 - DNA, 1414 bp, Homo sapiens
cggctagtacgaggctcgggtggtgaatcggcgaggaaaccgctcccgagcacggcggcggcgtcgtctcccggcagtgcagctgccgctaccgccgccctctgcccgccggcccgtctgtctacccccagcatgagcggcctgcgcgtctacagcacgtcggtcaccggctcccgcgaaatcaagtcccagcagagcgaggtgacccgaatcctggatgggaagcgcatccaataccagctagtggacatctcccaggacaacgccctgagggatgagatgcgagccttggcaggcaaccccaaggccaccccaccccagattgtcaacggggaccagtactgtggggactatgagctcttcgtggaggctgtggaacaaaacacgctgcaggagttcctgaagctggcttgagtcaagcctgtccagagttcccctgctggactccatcaccacactccccccagccttcacctggccatgaaggaccttttgaccaactccctgtcattcctaacctaaccttagagtccctcccccaatgcaggccacttctcctccctcctctctaaatgtagtcccctctcctccatctaaaggcaacattccttacccattagtctcagaaattgtcttaagcaacagccccaaatgctggctgcccccagccaagcattggggccgccatcctgcctggcactggctgatgggcacctctgttggttccatcagccagagctctgccaaaggccccgcagtccctctcccaggaggaccctagaggcaattaaatgatgtcctgttccattggcaaaaacaaaaaaaaaaaaaaaaaaaaaaaaaaaaaaacaaacaaagagaggggcgcgcgcgcgcgctctctaaagattattctcccccgccgaggaggcgccccaactttaacgcgcgcttcccccgcgactttttcttgtgcaacacaaaggggtggccccccccatatgcgtgcggagcagcgcgcgacattatatatacaagcccagacgagcccgcggcgcccccgcggctatttaacacacacaaggcgcaggacaacggggcgcaacaccacggggcgcaagcacggcggggaacaccccttgggggccacagagaccccccattaacacccgcgggggggggggggcaaccaaaatatggtggggccgacaccaccaatctccccctccaaccacaactgtttatgacaccgccccccacggacggaaacacactattactccaccatctcccgacaggcggtcctaaacccgggggtggtaacccaacccaccaccctcaatatatacgttgcgcccagcctgcaacaaaaaacttcgccgtaacacagcagcagctatacgtacttcgtgcgcaccactttttttatccccgg

SEQ ID NO: 66839 - DNA, 1013 bp, Homo sapiens
  misc_feature (842)..(842): n is a, c, g, or t
  misc_feature (844)..(844): n is a, c, g, or t
cggctagtacgaggctcgggtggtgaatcggcgaggaaaccgctcccgagcacggcggcggcgtcgtctcccggcagtgcagctgccgctaccgccgccctctgcccgccggcccgtctgtctacccccagcatgagcggcctgcgcgtctacagcacgtcggtcaccggctcccgcgaaatcaagtcccagcagagcgaggtgacccgaatcctggatgggaagcgcatccaataccagctagtggacatctcccaggacaacgccctgagggatgagatgcgagccttggcaggcaaccccaaggccaccccaccccagattgtcaacggggaccagtactgtggggactatgagctcttcgtggaggctgtggaacaaaacacgctgcaggagttcctgaagctggcttgagtcaagcctgtccagagttcccctgctggactccatcaccacactccccccagccttcacctggccatgaaggaccttttgaccaactccctgtcattcctaacctaaccttagagtccctcccccaatgcaggccacttctcctccctcctctctaaatgtagtcccctctcctccatctaaaggcaacattccttacccattagtctcagaaattgtcttaagcaacagccccaaatgctggctgcccccagccaagcattggggccgccatcctgcctggcactggctgatgggcacctctgttggttccatcagccagagctctgccaaaggccccgcagtccctctcccaggaggaccctagaggcaattaaatgatgtcctgttccattggcaaaaaaaaaaaaacaacagcaacaaaaaananaacaaaagacacacaaaaaacagagaggcgcccaaaaaaccacacgggcgcaaagcgccaccacataagaagggccacaaagcgagcaaccggacgcggcaaaagcggagacacaggggaccgaacacccgcgggaaggaacacatagcaccaaatggcgtgaaccaca

SEQ ID NO: 66840 - DNA, 1170 bp, Homo sapiens
tgccagaccctctcccgggcctgtcctgccacccaggcccctccccagtctcacactgagctccagatcagggaagggccgaaaaggacgatcagggcagccgcagaaggggcgccctgcgtgggacgggtccgttgcgcgcctggtaaccgagggggaagggaaggggcctctggcgtgcggggcggtgtcgcgcaggtcccaccccgcctgcccgcgccgcccattggtcccgagcgcgatgacttggcgggcggagcaggaaggaaaccgctcccgagcacggcggcggcgtcgtctcccggcagtgcagctgccgctaccgccgccctctgcccgccggcccgtctgtctacccccagcatgagcggcctgcgcgtctacagcacgtcggtcaccggctcccgcgaaatcaagtcccagcagagcgaggtgacccgaatcctggatgggaagcgcatccaataccagctagtggacatctcccaggacaacgccctgagggatgagatgcgagccttggcaggcaaccccaaggccaccccaccccagattgtcaacggggaccagtactgtggggtatgggctgggggacgggggggtggggggagtgttggaagaggactctagccaggggtcatatctgccacaaagcacttgggccccctgcattcaggtgaccacccctcgcctccccttctccaggactatgagctcttcgtggaggctgtggaacaaaacacgctgcaggagttcctgaagctggcttgagtcaagcctgtccagagttcccctgctggactccatcaccacactccccccagccttcacctggccatgaaggaccttttgaccaactccctgtcattcctaacctaaccttagagtccctcccccaatgcaggccacttctcctccctcctctctaaatgtagtcccctctcctccatctaaaggcaacattccttacccattagtctcagaaattgtcttaagcaacagccccaaatgctggctgcccccagccaagcattggggccgccatcctgcctggcactggctgatgggcacctctgttggttccatcagccagagctctgccaaaggccccgcagtccctctcccaggaggaccctagaggcaattaaatgatgtcctgttccattggca

SEQ ID NO: 66841 - DNA, 1172 bp, Homo sapiens
tgccagaccctctcccgggcctgtcctgccacccaggcccctccccagtctcacactgagctccagatcagggaagggccgaaaaggacgatcagggcagccgcagaaggggcgccctgcgtgggacgggtccgttgcgcgcctggtaaccgagggggaagggaaggggcctctggcgtgcggggcggtgtcgcgcaggtcccaccccgcctgcccgcgccgcccattggtcccgagcgcgatgacttggcgggcggagcaggaaggaaaccgctcccgagcacggcggcggcgtcgtctcccggcagtgcagctgccgctaccgccgccctctgcccgccggcccgtctgtctacccccagcatgagcggcctgcgcgtctacagcacgtcggtcaccggctcccgcgaaatcaagtcccagcagagcgaggtgacccgaatcctggatgggaagcgcatccaataccagctagtggacatctcccaggacaacgccctgagggatgagatgcgagccttggcaggcaaccccaaggccaccccaccccagattgtcaacggggaccagtactgtggggtatgggctgggggacgggggggtggggggagtagtgttggaagaggactctagccagggtcatatctgccacaaagcacttgggccccctgcattcaggtgaccacccctcgcctccccttctccaggactatgagctcttcgtggaggctgtggaacaaaacacgctgcaggagttcctgaagctggcttgagtcaagcctgtccagagttcccctgctggactccatcaccacactccccccagccttcacctggccatgaaggaccttttgaccaactccctgtcattcctaacctaaccttagagtccctcccccaatgcaggccacttctcctccctcctctctaaatgtagtcccctctcctccatctaaaggcaacattccttacccattagtctcagaaattgtcttaagcaacagccccaaatgctggctgcccccagccaagcattggggccgccatcctgcctggcactggctgatgggcacctctgttggttccatcagccagagctctgccaaaggccccgcagtccctctcccaggaggaccctagaggcaattaaatgatgtcctgttccattggca

SEQ ID NO: 66842 - DNA, 497 bp, Homo sapiens
ttctagtaggatccgcgggcagtacggatgtggactatgagctcttcgtggaggctgtggaacaaaacacgctgcaggagttcctgaagctggcttgagtcaagcctgtccagagttcccctgctggactccatcaccacactccccccagccttcacctggccatgaaggaccttttgaccaactccctgtcattcctaacctaaccttagagtccctcccccaatgcaggccacttctcctccctcctctctaaatgtagtcccctctcctccatctaaaggcaacattccttacccattagtctcagaaattgtcttaagcaacagccccaaatgctggctgcccccagccaagcattggggccgccatcctgcctggcactggctgatgggcacctctgttggttccatcagccagagctctgccaaaggccccgcagtccctctcccaggaggaccctagaggcaattaaatgatgtcctgttccattggca

SEQ ID NO: 66843 - DNA, 947 bp, Homo sapiens
tgccagaccctctcccgggcctgtcctgccacccaggcccctccccagtctcacactgagctccagatcagggaagggccgaaaaggacgatcagggcagccgcagaaggggcgccctgcgtgggacgggtccgttgcgcgcctggtaaccgagggggaagggaaggggcctctggcgtgcggggcggtgtcgcgcaggtcccaccccgcctgcccgcgccgcccattggtcccgagcgcgatgacttggcgggcggagcaggaaggaaaccgctcccgagcacggcggcggcgtcgtctcccggcagtgcagctgccgctaccgccgccctctgcccgccggcccgtctgtctacccccagcatgagcggcctgcgcgtctacagcacgtcggtcaccggctcccgcgaaatcaagtcccagcagagcgaggtgacccgaatcctggatgggaagcgcatccaataccagctagtggacatctcccaggacaacgccctgagggatgagatgcgagccttggcaggcaaccccaaggccaccccaccccagattgtcaacggggaccagtactgtggggactatgagctcttcgtggaggctgtggaacaaaacacgctgcaggagttcctgaagctggcttgagtcaagcctgtccagagttcccctgctggactccatcaccacactcctccctcctctctaaatgtagtcccctctcctccatctaaaggcaacattccttacccattagtctcagaaattgtcttaagcaacagccccaaatgctggctgcccccagccaagcattggggccgccatcctgcctggcactggctgatgggcacctctgttggttccatcagccagagctctgccaaaggccccgcagtccctctcccaggaggaccctagaggcaattaaatgatgtcctgttccattggca

SEQ ID NO: 66844 - DNA, 1044 bp, Homo sapiens
tgccagaccctctcccgggcctgtcctgccacccaggcccctccccagtctcacactgagctccagatcagggaagggccgaaaaggacgatcagggcagccgcagaaggggcgccctgcgtgggacgggtccgttgcgcgcctggtaaccgagggggaagggaaggggcctctggcgtgcggggcggtgtcgcgcaggtcccaccccgcctgcccgcgccgcccattggtcccgagcgcgatgacttggcgggcggagcaggaaggaaaccgctcccgagcacggcggcggcgtcgtctcccggcagtgcagctgccgctaccgccgccctctgcccgccggcccgtctgtctacccccagcatgagcggcctgcgcgtctacagcacgtcggtcaccggctcccgcgaaatcaagtcccagcagagcgaggtgacccgaatcctggatgggaagcgcatccaataccagctagtggacatctcccaggacaacgccctgagggatgagatgcgagccttggcaggcaaccccaaggccaccccaccccagattgtcaacggggaccagtactgtggggactatgagctcttcgtggaggctgtggaacaaaacacgctgcaggagttcctgaagctggcttgagtcaagcctgtccagagttcccctgctggactccatcaccacactccccccagccttcacctggccatgaaggaccttttgaccaactccctgtcattcctaacctaaccttagagtccctcccccaatgcaggccacttctcctccctcctctctaaatgtagtcccctctcctccatctaaaggcaacattccttacccattagtctcagaaattgtcttaagcaacagccccaaatgctggctgcccccagccaagcattggggccgccatcctgcctggcactggctgatgggcacctctgttggttccatcagccagagctctgccaaaggccccgcagtccctctcccaggaggaccctagaggcaattaaatgatgtcctgttccattggca

SEQ ID NO: 66845 - DNA, 1194 bp, Homo sapiens
cggctagtacgaggctcgggtggtgaatcggcgaggaaaccgctcccgagcacggcggcggcgtcgtctcccggcagtgcagctgccgctaccgccgccctctgcccgccggcccgtctgtctacccccagcatgagcggcctgcgcgtctacagcacgtcggtcaccggctcccgcgaaatcaagtcccagcagagcgaggtgacccgaatcctggatgggaagcgcatccaataccagctagtggacatctcccaggacaacgccctgagggatgagatgcgagccttggcaggcaaccccaaggccaccccaccccagattgtcaacggggaccagtactgtggggactatgagctcttcgtggaggctgtggaacaaaacacgctgcaggagttcctgaagctggcttgagtcaagcctgtccagagttcccctgctggactccatcaccacactccccccagccttcacctggccatgaaggaccttttgaccaactccctgtcattcctaacctaaccttagagtccctcccccaatgcaggccacttctcctccctcctctctaaatgtagtcccctctcctccatctaaaggcaacattccttacccattagtctcagaaattgtcttaagcaacagccccaaatgctggctgcccccagccaagcattggggccgccatcctgcctggcactggctgatgggcacctctgttggttccatcagccagagctctgccaaaggccccgcagtccctctcccaggaggaccctagaggcaattaaatgatgtcctgttccattggcaaaaaaaaaggacaaataaaaacaaaaaaccgtgcaagatttatcagtatatcttgttgttctctctttaaaaacagattttacacaaatgtttgggccacctagaaatttttcgccacgggagagggtaccccaattgtgtggagatctagataaaaagaggagagatttaactcaatagagcgtaatataagtacgagagagatatgaggacttcacatcactataaccaactaatcatatataattaatagctacaaaaagagggacaaaaaaaagggggggcagtaactataaattgacgcgcaaaaaaaactcgaatattatttggaagcccaaaaatagtgcgacaaaaaaaggcaaaaaacttttccccaataaa

SEQ ID NO: 66846 - DNA, 402 bp, Homo sapiens
agctgccgctaccgccgccctctgcccgccggcccgtctgtctacccccagcatgagcggcctgcgcgtctacagcacgtcggtcaccggctcccgcgaagtaagtgcgcgcccggactggcgctgggggaaagcgcagggctgtatcccggtgctttggaccctagcgcccgggacccacccccaggacgggggcggggtggggggagtgcgtcggcgaggtgctgggcacggtctcccggacccggtcccgaggccccatcctgaatgtcttcatcgggcatcctgggtcctttgcagccgcggcatgaacttcccgtgcccatcccccatcaaccccacacccattctctgcactcccactaccgggctgaccctgaccacgaccgcagcctgccctcc

SEQ ID NO: 66847 - DNA, 1074 bp, Homo sapiens
gtcactttgatacacatgtttatgccctaattaactgctagcaaatgacacctgcgaccttaagtgtagaccttaccttacataatttctggcacttttcaaagcactgttaccttctgtatctcaagggtttatcatttttaccctgtgcaggaattaggatgtggtttttcatgcctgttttacagaggaggcaagagtcacaggacatttcttgacagcagtcctgtgttgtttccatcttattgtgttatttcatcaatatttccattctgagcattattttatcatctttattgccttgtctcaaaaatactcgtataatacaaagttcttctgggaaaagaaaaaaaaaaccaacaagctacatgttagaaagcaagcctctctttcatccttccattcaattatggaagaagaaagagatgacatggaaaggagccacaggaggggagccccagctccagctctgctcctcctgctgtgtggcctctgcaaagtcactctccctctctggctttagtgcccaccacagtacaagaaggcgtggcttccaaccctgaactatcagaggaaagaaccagggcaaaggcaggcagcatgtgcaccaagctgttggactaccatactcactgtaactgagtaattacaagcggatttgcccatgaaatgaatgagccattcttaaacctcacatccctgtaagactcagaaactgcccatgtcagtgaatgccaaacaattagaagcaaataaagtgtctctatttttttcccatctcactagccattaacttccccacagtggggcaaggggccatgtggggtttcatggattgactctaccatctgcagacttcgctgaagagtcaaagttgaaacctggaagccaagacacagatacagttttttcttgtagaaagctttggccaaaatttcaaggatatttccccctacttgagactagggaagtaatatttaccaagcacctacgacgtgcccagctctgtgatagctcctttacaaactcatttaatcttcatctcatctttcaaggctaacattatcagatctt

SEQ ID NO: 66848 - DNA, 4931 bp, Homo sapiens
  misc_feature (3347)..(3347): n is a, c, g, or t
  misc_feature (3363)..(3363): n is a, c, g, or t
  misc_feature (3388)..(3388): n is a, c, g, or t
  misc_feature (4436)..(4436): n is a, c, g, or t
  misc_feature (4879)..(4879): n is a, c, g, or t
cctccctgcaagctgagggagccggctccggctctggccttggccagcccataaaggggctcccacagtgcagcggtgggctgaagggctcctcaagtgccgccaaagtgggagcccaggcagaggaggcgccaagagcaagtgagggctgtgaggactgccagcacgctgtcactatgatgtgtcatggctaggacttcccaaagctgccatggaagaataatggcttctgtcttttccatcatcctggtctacatttggccattcattggtggaatctgatgaaaattctcctggtaggtgagttgggaaaattgagttttcaggctctgtacctccatggggaaaagggaggagctttaaaaagcaggaatggcattgttttcaatgaaataactaaaaaacactggacctctctttttaccatgatttcacatctgcttgtttaaaggaaactttatgattttttatgttgattaatgttcttataaatcaagtaattacatcttggtgtggttctttatgtaattttacatattcatggagtatatacatctttgacaaatgtagcttaggcttaatgttttgacatttcactcattctaacaatttgatgcaaatactctattgaaattcttcctgctaaggtcaacaaggactagttgtcaatgcccatggctcatttaaaattcttgttacattttctttttctgtgttattattagtagtaacagttcacattcttgaaatcattgttcacttgacctttgttcagtagggttgaactttattatgagccctgtccttactcagcctccatttctattactattcctttttttgcctccattttactcctttttctttaccaacatcatgttttttcctaagtcttgttttcttctcccttacagctctataaattatctctgtctagcattactctgaatagctctatttaaatagctcacaaaaatgataattcataatctttatatatataagaataactttaatattcaatgacttctctttctgtattctctcttttggttacttcattatttattcagtgaactaaaagatcaaattcaataccacagttaaaggcacacatggaaactatgctttctttgactttttaccctggtctagaacacagcacaatgtcaaaaatgatggttaaacaaataagatatttatctaaagaaaacaaaaaacatatatcatgtaaataaatttgagaaaatgaagtggcagcaaaattgttcaaaacctcatctgttagaaactcatttcccataccagaccaactcattccaacagaagcatgtggtgtacatgataaggaatctctaagtgatcaagacagaaataaaaagcgatgcaagttagtgaatataagttttcatatgtcgatgagtgacaagtatttatttaagaagatgtactagtctcggaagtgtttacattaatgaaataaactggaaggttatcaaaagctaactgcaaaatcacaaagaagaccaatcaccttgttcgctaaggcggctgtctgagaacgtctccagattaggaagcacacaggcaccttgcttttcgaatttgcaggagccacatataagtatatttaacataggcattaggattatagacaatagcaaatctattctagtgatgtaaagtatatgttccttaatatatcattcagaactcaccctttctaccacatctaatgtggattgcgtgccttatcccacctttttattttttacattcctggagcacctggtcacaacttgaacatcagtggtatcactgactgcatggaaattacctggctacttgtatgccttcaaacagaagactgaaccatttggagggatgtgtgactatacttttttttaaatctttatatcacttcacatggctcttattagttgttcaatagttgctgaatattgacactcgtatgagtgagaagtcctgacaatgactgcaataaactcaagtcacccttgaaatagacagaaatgcttgagagatgccactcagtgaatcaatttgataagcaagatgtaggatttgtagaacagtaaaggaaatggaatccagatttggggtgttgatggggagattctgaacaattggtaagtatgtatattaaatgaaagattttcaaatttctaaatgagctttttaaaagtacaatttacatacaaagaaaattcacttttaatgtagttctgtgagtacagatatatgtatatagtagtgtaaccatcaccataatgaaaatttaaagtggttctaacccccaaattcctgcatgtctgttgtagacaactcctccctcacactctcaatctttgttagccactgctatgttttctatctctatactcttaccttttccatgatgtcatagaaatataatcttactagactctcagattgtctactttcacttaacataataaatttgagattcttgcacgtatgagtttttttttttcctttttgagtattattgcctcatttaaagacattgtagtttgtttattagctcaccatttaaacatttcggttgattctagtttggagtaattattttaaaaatcaactggaaccattcaaatacaggtaggttttgtgagaatgtaagtttttatttcacttgtgtaaatactagactaaaattgtgatgccacttagtgtttaactttctataaaattgccaaactgttttctaaagtggggtgccgttttttttctttgtaggatctatgagaattccagttgctccacttgtagacactaagtattgtcaatttttaaagctattctaccaagtgcataattatatcttattgtggttttatttgcacttatctgataactaataatattacatattaccatgtacacattttccattcacatatatatctatgaatggaaaatatatttatatttcataatatatatttcattatatatatattccataaattgtcttcaaaagttttgcctattattacacttggttattttatggaggtaaagtgggattttcttgaggtaaagttaatataacataaaattgataattttaatgtgcacaaaagcatttagaacatatacaatgttatgtaactgtcacctctatatagtaccaaaacattttcatcaccccaaagaaaattctgcattgattaagcagttaccctgaattccaatctctgccccagctgctggcaaacatcaatctgtctgtctctaaagatgtacctattctggatatttcaaataagtcatatctcagatcacatacaatatgtgatctnactggctggcttcctncactaagcaagatgtttttgaggtncacccatattgcattatctattaatacttcatttattttttatggctgaataaaattccattaagattatatattgcaatttgtttttccattcatctgctgatggacagctgtgtcatttctatcttttggctattgtgaatatcgcactgtaaactgtgaacatacgtatacaagtatttgagtacctgtttttaatttttgggtatgtatctagaagtggaattactgggttaattgttaattctaattaattttttatgtagccaccaaattgttttctatactggctaaacaattttatgtatttctatatattttcaccattgccgatttcattttaaaaagaattatatccatcttagtagatgtgaagtagtacctcattgtggattaaatttatgttttcccagtgagaccaatgggattgagaattatctcctatgttttttgtctatttctctattttctttgaagagatgtctattcaagttctttgcccatttttcagttgggctatttgtatttttgttgttcagttgcaagagttatttatatattctggataacacatattcagataggtgatttgcaaatgttttttctcattgtgtttgtgatttactttttttttacaatgtattttgatgcacacattttttattttgaagtcaaatttatctgtttttaaaaatttcattgccaatgcttttgatattacatttatgttattgacccattttgaaatcagaaaatataagtcttccaaatttattatttttttaaagattgtttttgctactcaggaccacttgcaattcattatgaatttaagaataggcttttccattttttcaaaataaaaggctattgatattttgatagagattgctttcagtctgcagattccttaggaagtattgatatgtaaatagtaatgtcttcctatccggaacactggatttatttccatttattaaggtcttccttaagcaatgctttcttgtatttattgcacagattttacctttttggaccaacttatttntaagtataagattctattggaacctactgtaaataaaattgtttctttttttttttttttttcttttgatggagtcttgccccgtcgcccaggctggagtgcagtagtgtgatcttagctcactgcaacctcccgatcccaggttcaagtgattctcctgcctcagactcccaggtagctaggattacaggtgtgtgccaccatgccaggctaatttttgtatttctagtagagacagagtttcaccatgttaggcaggctggtcttgaactcctgaccttaggtgatccatccacctgggccccccaaagtgctgggattacaggcgtgagccaccgcacccggcctgcttattcattttcttttgggggtatttgctggtaatttaaaggaaaacaactcattttttgtgcattgatcttgtatcctggactgttaattcntttactattattaaataacaaattattaataataaattaattatcaattgtg

SEQ ID NO: 66849 - DNA, 875 bp, Homo sapiens
tagggtctgagggaggaaaaaagaagaataagagtcaaggatgattcagaagtttctagctttggggcagctggttggattgctcattccacttactcaaattcaaaaaatattgagtactgaactgtatgcttaacaatggttaaattagtaaatttaatgttaggtgttttctactacaatttaaaaaatatttattgagcactcagtgtgccaagcaatggaaataatagacactggatataatagacacagtttctaactttctggagatactacaaagtgaacccacaaataatatacataaaaatcatggtaaatgcatcggaggaaaagaacagggtactataaatacaatgatattagatctgttaagagataataaggagacaacagtaagggagaagaattccaggcaacatgtgtgaagtccttgaagcaagtaataacttgtcgtgtttaaagaatcgaaaaaaggctatgtaactggaaaggagtgagcaaggggacagtgatgttatacaagtcagagaacgtaggcactgcctgggatgtaaaggatcttacggaccattgtaacaattttggcattaaatcatgcgtggtggaaagccagttaagttagtgtatgtatgtatttgttgagggaaaggcaacgtgatttgtaacttcgtattctaccgtacattttattttaacaaatgaactgtccctacttttatctaaggactcacacatcaatttgtgtattaaatccatctctgtggtctactcagggctttgatcctgattttacctctctgcttcttgcatcagtgtcttattctgtacctgaccacttcagttaggttacagatataatatagcccatcttt

SEQ ID NO: 66850 - DNA, 335 bp, Homo sapiens
cctgacttcaacggatccactcgccttggtctcccaatgtgctgggattacaggcgtgagtcaccatgcctggctcagaggctgttaataaacaagggaagaagtcactctttaaggctcaaatctcctctgttccccaggcagcctgacattttcagaatgggctcattaaccaacttgcctaatgtggagctctatgtaaccacacaacacggaccccactcatcaaggctgaccacttggcacccagtgaatctcaaccccggaaatgacagccttaggtcccatgggaaatggccccaaaggggactcagctccatatcagaggctgggag

SEQ ID NO: 66851 - DNA, 1163 bp, Homo sapiens
tattcgtccccaagcttcctaattttaagctacaacatttcctaacccttaagttttcacgccctaacttggttgcctttccaaagtccatgtttgttgaatatgatatggtaaaaaccaatatctatttggagacagtggaggggatggtagtaattgagagacagtgtcagatggagcagtgactttacaatttttttgactgcaatccacaattagacatttcacattgctcccccatgacaacatccctatcgacccctgcccaaaaacaagttatttaccaatcttgctataagcaatgatgactgattttttcttttttctactttatttaaaaagaaaattatagtctcaactctttatattaattttacacacattaattctacagattgttttagcacttagaactaaaagtgttcaagatttgattttgttaccttctctgtgtaagctaaagttgctgacttttctgagtttccattttattgattaaaactgggatagtaatagtattttacaccattttataactttattagaatgacataatctgagtgaagtggttgtgccaggcacttactaaacacacagtcaatgagtatgttctctccgaagtttgttagcttagggaattgggaggatgccactgataataatggtgactcttattcagaggaaaactaattcagttttagacatgctagagtttgaggtagccaaaagagtttagtcatatcacttggaagcaaaccaatgtgaaatagtttcaaataagcaaattttaaaaaatgttaaatgcaaagcaaacagtattaaagctttggggacttaatgattgagtctccttacacctacacaagattggctaaatacacatacaactgtgtcactctaccagatttctgttaacattctccagaatttaaactgcagaatcagtcatttgtatgactgtttgtctctattagcagaggtaatgacatgtatcagtgataggtaattgtggaaaaaaaaacagcacttggaattaaacctagagttggtgattcttacagggtaacccaacggctaccttaatttctatgattcagtttcttcatctacaaaatattatttcacaaagttgcagttgtcaaagggacaagtaaatatgggat

SEQ ID NO: 66852 - DNA, 497 bp, Homo sapiens
catctgtgtctttagaagtagtgtcacctctagtaaaagagggccagtagaattgagtggtggcagcctgtgatgtatatgaattttggctgtacgtctctagcgactattttctccaactctatttagtaaaattctacctaatttcagctattgtgcttccaaagtccatgtttgttgaatatgatatggtaaaaaccaatatctatttggagacagtggaggggatggtagtaattgagagacagtgtcagatggagcagtgactttacaatttttttgactgcaatccacaattagacatttcacattgctcccccatgacaacatccctatcgacccctgcccaaaaacaagttatttaccaatcttgctataagcaatgatgactgattttttcttttttctactttatttaaaaagaaaattatagtctcaactctttatattaattttacacacattaattctacagattgttttagcacttagaacta

SEQ ID NO: 66853 - DNA, 2267 bp, Homo sapiens
attagaacagcttgaagaccgttcatttttaagtgacaagagactcacctccaagaagcaattgtgttttcagaatgattttattcaagcaagcaacttatttcatttccttgtttgctacagtttcctgtggatgtctgactcaactctatgaaaacgccttcttcagaggtggggatgtagcttccatgtacaccccaaatgcccaatactgccagatgaggtgcacattccacccaaggtgtttgctattcagttttcttccagcaagttcaatcaatgacatggagaaaaggtttggttgcttcttgaaagatagtgttacaggaaccctgctcaaatagtacatcgaacaggtgcagtttctggacattccttgaagcaatgtggtcatcaaataagtgagtgcttgccatcgagacatttataaaggagttgatatgagaggagtcaattttaatgtgtctaaggttagcagtgttgaagaatgccaaaaaaggtgcaccaataacattcgctgccagtttttttcatatgccacgcaaacatttcacaaggcagagtaccggaacaattgcctattaaagtacagtcccggaggaacacctaccgctataaaggtgctgagtaacgtggaatctggattctcactgaagccctgtgccctttcagaaattggttgccacatgaacatcttccagcatcttgcgttctcagatgtggatgttgccagggttctcactccagatgcttttgtgtgtcggaccatctgcacctatcaccccaactgcctcttctttacattctatacaaatgtatggaaaatcgagtcacaaagaaatgtttgtcttcttaaaacatctgaaagtggcacaccaagttcctctactcctcaagaaaacaccatatctggatatagccttttaacctgcaaaagaactttacctgaaccctgccattctaaaatttacccgggagttgactttggaggagaagaattgaatgtgacttttgttaaaggagtgaatgtttgccaagagacttgcacaaagatgattcgctgtcagtttttcacttattctttactcccagaagactgtaaggaagagaagtgtaagtgtttcttaagattatctatggatggttctccaactaggattgcgtatgggacacaagggagctctggttactctttgagattgtgtaacactggggacaactctgtctgcacaacaaaaacaagcacacgcattgttggaggaacaaactcttcttggggagagtggccctggcaggtgagcctgcaggtgaagctgacagctcagaggcacctgtgtggagggtcactcataggacaccagtgggtcctcactgctgcccactgctttgatgggcttcccctgcaggatgtttggcgcatctatagtggcattttaaatctgtcagacattacaaaagatacacctttctcacaaataaaagagattattattcaccaaaactataaagtctcagaagggaatcatgatatcgccttgataaaactccaggctcctttgaattacactgaattccaaaaaccaatatgcctaccttccaaaggtgacacaagcacaatttataccaactgttgggtaaccggatggggcttctcgaaggagaaaggtgaaatccaaaatattctacaaaaggtaaatattcctttggtaacaaatgaagaatgccagaaaagatatcaagattataaaataacccaacggatggtctgtgctggctataaagaagggggaaaagatgcttgtaagggagattcaggtggtcccttagtttgcaaacacaacggaatgtggcgtttggtgggcatcaccagctggggtgaaggctgtgcccgcagggagcaacctggtgtctacaccaaagtcgctgagtacatggactggattttagagaaaacacagagcagtgatggaaaagctcagatgcagtcaccagcatgagaagcagtccagagtctaggcaatttttacaacctgagttcaagtcaaattctgagcctggggggtcctcatctgcaaagcatggagagtggcatcttctttgcatcctaaggacgaaagacacagtgcactcagagctgctgaggacaatgtctggctgaagcccgctttcagcacgccgtaaccaggggctgacaatgcgaggtcgcaactgagatctccatgactgtgtgttgtgaaataaaatggtgaaagatcacgaaaaaaaag

SEQ ID NO: 66854 - DNA, 1757 bp, Homo sapiens
caggagtttacaatttagtttttatttggacccaggttgctcttgatttacatttaatctctgcaatttattagagtcctgtagttggatttactttgaagagagtttcccagaagaataaaatttgctgcgttgctttttgggtgtgagctgcttttgtatttgcctaatgcctttaatgcaaatttctttctttctctcttgcttttttttaaaaaaaatagaaatgtttgtcttcttaaaacatctgaaagtggcacaccaagttcctctactcctcaagaaaacaccatatctggatatagccttttaacctgcaaaagaactttacctggtaatgtgatttgataataatattacataaaatgtaacctatttcatgacttttaacagcaacagtgatgaaacaatcctcaaggtaacagaaacttgtgtaaatgtcgttcattgcttttcccatctgatatctttttgtgtttataattgacacagaaccctgccattctaaaagagtgaatgtttgccaagagacttgcacaaagatgattcgctgtcagtttttcacttattctttactcccagaagactgtaaggaagagaagtgtaagtgtttcttaagattatctatggatggttctccaactaggattgcgtatgggacacaagggagctctggttactctttgagattgtgtaacactggggacaactctgtctgcacaacaaaaacaagcacacgcattgttggaggaacaaactcttcttggggagagtggccctggcaggtgagcctgcaggtgaagctgacagctcagaggcacctgtgtggagggtcactcataggacaccagtgggtcctcactgctgcccactgctttgatgggcttcccctgcaggatgtttggcgcatctatagtggcattttaaatctgtcagacattacaaaagatacacctttctcacaaataaaagagattattattcaccaaaactataaagtctcagaagggaatcatgatatcgccttgataaaactccaggctcctttgaattacactgaattccaaaaaccaatatgcctaccttccaaaggtgacacaagcacaatttataccaactgttgggtaaccggatggggcttctcgaaggagaaaggtgaaatccaaaatattctacaaaaggtaaatattcctttggtaacaaatgaagaatgccagaaaagatatcaagattataaaataacccaacggatggtctgtgctggctataaagaagggggaaaagatgcttgtaagggagattcaggtggtcccttagtttgcaaacacaacggaatgtggcgtttggtgggcatcaccagctggggtgaaggctgtgcccgcagggagcaacctggtgtctacaccaaagtcgctgagtacatggactggattttagagaaaacacagagcagtgatggaaaagctcagatgcagtcaccagcatgagaagcagtccagagtctaggcaatttttacaacctgagttcaagtcaaattctgagcctggggggtcctcatctgcaaagcatggagagtggcatcttctttgcatcctaaggacgaaagacacagtgcactcagagctgctgaggacaatgtctggctgaagcccgctttcagcacgccgtaaccaggggctgacaatgcgaggtcgcaactgagatctccatgactgtgtgttgtgaaataaaatggtgaaagatcacgaaaaaaaag

SEQ ID NO: 66855 - DNA, 711 bp, Homo sapiens
gtattcaaagataaggtccttatgaaaaatacactgctctgattcactttaaaacttatttccatatttattatttattgtgggaataacaatattcccaatattattatttattatttaagttattattattaacttccctctgaggttatatattggttactcacaggtgaaatccaaaatattctacaaaaggtaaatattcctttggtaacaaatgaagaatgccagaaaagatatcaagattataaaataacccaacggatggtctgtgctggctataaagaagggggaaaagatgcttgtaaggtaactcatgagattatgaaaaacacaataggctgcttgagaaaattcatttcaaaatatattttccaatagcataatttaatcatagttttttaaaaaattcagagacaaatgatctgataaattgataagcaacttttaacaaattgaatatacataatatatatttatattatttatgatatatgtcacaatctatgcatgtgctatttaagaggggcaaatatacatgcaataattgtgctagaatataaaaacattagacttctttgtcattgggatgatgatatcaagatttctttgttagatttatttcagatagaaaaggggatacgaaaaatgcaggcacatgagatacttggagaactttaagaaagagtgagtgtgtgtgtgtgtgtgtgt

SEQ ID NO: 66856 - DNA, 612 bp, Homo sapiens
gggatctgtggtgaagttaggttctatcttaactgtccctcctccatgcaagagggcatctctctccatactgtgctgcccaggcttgaaggtgagatgacaccggtaatgtgaaattgtccttcctatacacttctatgtgtcttttcttatttctgtgctgcaaccaggtggtataacctctcacctgattccttagctctagtgaagttattttcgtgcatggatacttgttcgaattgatgtttctgcaagggatgagcgctagaaactcctgttctgacaaactcctattcctattcttgctgacatcactccctgaaatagttaatatacttaacagctgaacacggataggatgttcatggaatatgttgacaggacaaaaagttgaaactgttggcagaaacccaaagtcaatattgaagccaagcaaaatattgcctgcagtgccacattagaacagcttgaagaccgttcatttttaagtgacaagagactcacctccaagaagcaattgtgttttcaggtagcaaatttttattattctgattgtttccaaataaactataatttttaagtataattttttactttatgagaaaattaatc

SEQ ID NO: 66857 - DNA, 2364 bp, Homo sapiens
attagaacagcttgaagaccgttcatttttaagtgacaagagactcacctccaagaagcaattgtgttttcagaatgattttattcaagcaagcaacttatttcatttccttgtttgctacagtttcctgtggatgtctgactcaactctatgaaaacgccttcttcagaggtggggatgtagcttccatgtacaccccaaatgcccaatactgccagatgaggtgcacattccacccaaggtgtttgctattcagttttcttccagcaagttcaatcaatgacatggagaaaaggtttggttgcttcttgaaagatagtgttacaggaaccctgctcaaataagtgcttgccatcgagacatttataaaggagttgatatgagaggagtcaattttaatgtgtctaaggttagcagtgttgaagaatgccaaaaaaggtgcaccaataacattcgctgccagtttttttcatatgccacgcaaacatttcacaaggcagagtaccggaacaattgcctattaaagtacagtcccggaggaacacctaccgctataaaggtgctgagtaacgtggaatctggattctcactgaagccctgtgccctttcagaaattggttgccacatgaacatcttccagcatcttgcgttctcagatgtggatgttgccagggttctcactccagatgcttttgtgtgtcggaccatctgcacctatcaccccaactgcctcttctttacattctatacaaatgtatggaaaatcgagtcacaaagaaatgtttgtcttcttaaaacatctgaaagtggcacaccaagttcctctactcctcaagaaaacaccatatctggatatagccttttaacctgcaaaagaactttacctggtaatgtgatttgataataatattacataaaatgtaacctatttcatgacttttaacagcaacagtgatgaaacaatcctcaaggtaacagaaacttgtgtaaatgtcgttcattgcttttcccatctgatatctttttgtgtttataattgacacagaaccctgccattctaaaatttacccgggagttgactttggaggagaagaattgaatgtgacttttgttaaaggagtgaatgtttgccaagagacttgcacaaagatgattcgctgtcagtttttcacttattctttactcccagaagactgtaaggaagagaagtgtaagtgtttcttaagattatctatggatggttctccaactaggattgcgtatgggacacaagggagctctggttactctttgagattgtgtaacactggggacaactctgtctgcacaacaaaaacaagcacacgcattgttggaggaacaaactcttcttggggagagtggccctggcaggtgagcctgcaggtgaagctgacagctcagaggcacctgtgtggagggtcactcataggacaccagtgggtcctcactgctgcccactgctttgatgggcttcccctgcaggatgtttggcgcatctatagtggcattttaaatctgtcagacattacaaaagatacacctttctcacaaataaaagagattattattcaccaaaactataaagtctcagaagggaatcatgatatcgccttgataaaactccaggctcctttgaattacactgaattccaaaaaccaatatgcctaccttccaaaggtgacacaagcacaatttataccaactgttgggtaaccggatggggcttctcgaaggagaaaggtgaaatccaaaatattctacaaaaggtaaatattcctttggtaacaaatgaagaatgccagaaaagatatcaagattataaaataacccaacggatggtctgtgctggctataaagaagggggaaaagatgcttgtaagggagattcaggtggtcccttagtttgcaaacacaacggaatgtggcgtttggtgggcatcaccagctggggtgaaggctgtgcccgcagggagcaacctggtgtctacaccaaagtcgctgagtacatggactggattttagagaaaacacagagcagtgatggaaaagctcagatgcagtcaccagcatgagaagcagtccagagtctaggcaatttttacaacctgagttcaagtcaaattctgagcctggggggtcctcatctgcaaagcatggagagtggcatcttctttgcatcctaaggacgaaagacacagtgcactcagagctgctgaggacaatgtctggctgaagcccgctttcagcacgccgtaaccaggggctgacaatgcgaggtcgcaactgagatctccatgactgtgtgttgtgaaataaaatggtgaaagatcacgaaaaaaaag

SEQ ID NO: 66858 - DNA, 1460 bp, Homo sapiens
ccctcccctgcctgcattcccgggacggacccgagggaagaagcctcaggaggagggtgtgggccgaggcgcggcggcggctggagcagcgcggtagggtccttcgccagagcatccggtccgagggcgcacacaggcagaaggctcggggctcgtccactctcctccctctctcctcctctccctggcttttgtgttggtgcctccgagctgcaaggagggtgcgctggaggaggaggaggggggcccggagtgagaggcacccccttcacgcgcgcgcgcgcacacggtgccggcgcacgcacacacgggcggacacacacacacgcgcgcacacacacacgcacagagctcgctcgcctcgagcgcacgaacgtggacgttctctttgtgtggagccctcaaggggggttggggccccggttcggtccgggggagatggcgcagcccatcctgggccatgggagcctgcagcccgcctcggccgctggcctggcgtccctggagctcgactcgtcgctggaccagtacgtgcagattcgcatcttcaaaataatcgtgattggggactccaacgtgggcaagacctgcctgaccttccgcttctgcgggggtaccttcccagacaagactgaagccaccatcggcgtggacttcagggagaagaccgtggaaatcgagggcgagaagatcaaggttcaggtgtgggacacagcaggtcaggaacgtttccgcaaaagcatggtcgagcattactaccgcaacgtacatgccgtggtcttcgtctatgacgtcaccaagatgacatctttcaccaacctcaaaatgtggatccaagaatgcaatgggcatgctgtgcccccactagtccccaaagtgcttgtgggcaacaagtgtgacttgagggaacagatccaggtgccctccaacttagccctgaaatttgctgatgcccacaacatgctcttgtttgagacatcggccaaggaccccaaagagagccagaacgtggagtcgattttcatgtgcttggcttgccgattgaaggcccagaaatccctgctgtatcgtgatgctgagaggcagcaggggaaggtgcagaaactggagttcccacaggaagctaacagtaaaacttcctgtccttgttgaaaccaaacgatataaatacaagataaattatcactggagttttttctttcccttttttctgtgcctgcataatgctgacacctgcttgtttccatacaaattgatatcaaaataaaatttgtatagattatcacatggctttttgtcttgctttcctccaagacattcctgattgtgatgagcagaacaggcagtttgccctactagagtgatattctccatgccagtggcacactccctaccagctttctaggctctctgaaattctcatcgtttgagtcacttcttcaggactaattcattctctc

SEQ ID NO: 66859 - DNA, 1282 bp, Homo sapiens
ccctcccctgcctgcattcccgggacggacccgagggaagaagcctcaggaggagggtgtgggccgaggcgcggcggcggctggagcagcgcggtagggtccttcgccagagcatccggtccgagggcgcacacaggcagaaggctcggggctcgtccactctcctccctctctcctcctctccctggcttttgtgttggtgcctccgagctgcaaggagggtgcgctggaggaggaggaggggggcccggagtgagaggcacccccttcacgcgcgcgcgcgcacacggtgccggcgcacgcacacacgggcggacacacacacacgcgcgcacacacacacgcacagagctcgctcgcctcgagcgcacgaacgtggacgttctctttgtgtggagccctcaaggggggttggggccccggttcggtccgggggagatggcgcagcccatcctgggccatgggagcctgcagcccgcctcggccgctggcctggcgtccctggagctcgactcgtcgctggaccagtacgtgcagattcgcatcttcaaaataatcgtgattggggactccaacgtgggcaagacctgcctgaccttccgcttctgcgggggtaccttcccagacaagactgaagccaccatcggcgtggacttcagggagaagaccgtggaaatcgagggcgagaagatcaaggttcaggtgtgggacacagcaggtcaggaacgtttccgcaaaagcatggtcgagcattactaccgcaacgtacatgccgtggtcttcgtctatgacgtcaccaagatgacatctttcaccaacctcaaaatgtggatccaagaatgcaatgggcatgctgtgcccccactagtccccaaagtgcttgtgggcaacaagtgtgacttgagggaacagatccaggtgccctccaacttagccctgaaatttgctgatgcccacaacatgctcttgtttgagacatcggccaaggaccccaaagagagccagaacgtggagtcgattttcatgtgcttggcttgccgattgaaggcccagaaatccctgctgtatcgtgatgctgagaggcagcaggggaaggtgcagaaactggagttcccacaggaagctaacagtaaaacttcctgtccttgttgaaaccaaacgatataaatacaagataaattatcactggagttttttctttcccttttttctgtgcctgcataatgctgacacctgcttgtttccatacaaattgatatcaaaataaaatttgtatagatta

SEQ ID NO: 66860 - DNA, 455 bp, Homo sapiens
ggggtagaggggacggggtagcggggaccgggaaggcgcggctcagctgcccgctgctcccgaggtgaaagaggtgcctccgcccccaccccatccccgcagagttgcgttgctccagggaggccgaagtgatccagtgatgtcttaaggtgcagctctttgtcctccccagctgtgctccctgcccgctgaccccgtgcgctcgagccagtgggggtggggagcccgaaacctataacataaacgggggcaaggagaaagaagtctatcccggggtggcgtgtgccgctgtccccaccccgtctctttcctcctgaggcttcttccctcgggtccgtcccgggaatgcagtcaggaggagggtgtgggccgaggcgcggcggcggctggagcagcgcggtagggtccttcgccagagcatccggtccgagggcgcacacaggcagaaggctcgg

SEQ ID NO: 66861 - DNA, 435 bp, Homo sapiens
cacttcatttttatagtgctacagaaccatgttttctcctctctgttcatgttcccttttctgactccacctttgggtttttgtatcttccaggttcaggtgtgggacacagcaggtcaggaacgtttccgcaaaagcatggtcgagcattactaccgcaacgtacatgccgtggtcttcgtctatgacgtcaccaagatgacatctttcaccaacctcaaaatgtggatccaagaatgcaatgggcatgctgtgcccccactagtccccaaagtgcttgtgggcaacaagtgtgacttgagggaacagatccaggtgccctccaacttagccctgaaatttgctgatgcccacaacatgctcttgtttgagacatcggccaaggaccccaaagagagccagaacgtggagtcgattttcatgtgcttggcttgc

SEQ ID NO: 66862 - DNA, 738 bp, Homo sapiens
aaaacagttatacatgtctcctcccagcaccatgaaagcccctacaaaacttcagaagatcaccggctttcaattgtcttcgagctggacagcagctcaggagggctggctgcctggaggggatgatgccgacacaggaggcgctgctggctgttcaggtgtgggacacagcaggtcaggaacgtttccgcaaaagcatggtcgagcattactaccgcaacgtacatgccgtggtcttcgtctatgacgtcaccaagatgacatctttcaccaacctcaaaatgtggatccaagaatgcaatgggcatgctgtgcccccactagtccccaaagtgcttgtgggcaacaagtgtgacttgagggaacagatccaggtgccctccaacttagccctgaaatttgctgatgcccacaacatgctcttgtttgagacatcggccaaggaccccaaagagagccagaacgtggagtcgattttcatgtgcttggcttgccgattgaaggcccagaaatccctgctgtatcgtgatgctgagaggcagcaggggaaggtgcagaaactggagttcccacaggaagctaacagtaaaacttcctgtccttgttgaaaccaaacgatataaatacaagataaattatcactggagttttttctttcccttttttctgtgcctgcataatgctgacacctgcttgtttccatacaaattgatatcaaaataaaatttgtatagatta

SEQ ID NO: 66863 - DNA, 985 bp, Homo sapiens
ggtcgcttcgatatttagatgctcgaacgttagactgtacttcttgtgtgttggatgccgcgtcatagggggtggtttgcgtgcccacgtattgcggatcctgcgaggtgagaatgagcgcatccctcattcactgggacatagggatcctgactatgcactcaggcatcgtgacctggtgaggctcgtaggctgtccctgtaagtctcgtagttcgttctactggaacagtacgtgcagattcgcatcttcaaaataatcgtgattggggactccaacgtgggcaagacctgcctgaccttccgcttctgcgggggtaccttcccagacaagactgaagccaccatcggcgtggacttcagggagaagaccgtggaaatcgagggcgagaagatcaaggttcaggtgtgggacacagcaggtcaggaacgtttccgcaaaagcatggtcgagcattactaccgcaacgtacatgccgtggtcttcgtctatgacgtcaccaagatgacatctttcaccaacctcaaaatgtggatccaagaatgcaatgggcatgctgtgcccccactagtccccaaagtgcttgtgggcaacaagtgtgacttgagggaacagatccaggtgccctccaacttagccctgaaatttgctgatgcccacaacatgctcttgtttgagacatcggccaaggaccccaaagagagccagaacgtggagtcgattttcatgtgcttggcttgccgattgaaggcccagaaatccctgctgtatcgtgatgctgagaggcagcaggggaaggtgcagaaactggagttcccacaggaagctaacagtaaaacttcctgtccttgttgaaaccaaacgatataaatacaagataaattatcactggagttttttctttcccttttttctgtgcctgcataatgctgacacctgcttgtttccatacaaattgatatcaaaataaaatttgtatagatta

SEQ ID NO: 66864 - DNA, 410 bp, Homo sapiens
ctgtgcccccactagtccccaaagtgcttgtgggcaacaagtgtgacttgagggaacagatccaggtgccctccaacttagccctgaaatttgctgatgcccacaacatgctcttgtttgagacatcggccaaggaccccaaagagagccagaacgtggagtcgattttcatgtgcttggcttgccgattgaaggcccagaaatccctgctgtatcgtgatgctgagaggcagcaggggaaggtgcagaaactggagttcccacaggaagctaacagtaaaacttcctgtccttgttgaaaccaaacgatataaatacaagataaattatcactggagttttttctttcccttttttctgtgcctgcataatgctgacacctgcttgtttccatacaaattgatatcaaa

SEQ ID NO: 66865 - DNA, 153 bp, Homo sapiens
aatgaacatggtaatgagaaaaatttacacacaagtgattttgaaaacagaatggattgcttacaaattacaggaaatgttataacacaaaccagaagaattcaatggaaggcaataagggattctgaaatgaaaattataaaagtatcaaga

SEQ ID NO: 66866 - DNA, 335 bp, Homo sapiens
aagtccagatgcaaagcaaagagagacttttagatgattgtaaagtcatttaatttccagacattgtctagtgtttaaacactgacatcaaagcaaagagccaattatcagagttcatttggtctgaagccccattgcctgaattgctatagttttccttaggctgaaaaggaaatgtgtgtcacatcttgaagatgtagtatataagatcactttatctagagcagtttaacttgaaatgtgtgtttgggctcactaaccacaaggaggcattgaagcatctcttcaaaatgtgaaaagcaattttaatgaagaaaaaaaaagttacacctaca

SEQ ID NO: 66867 - DNA, 343 bp, Homo sapiens
atcatctctttgtgcaggtatccacactgcctctgctacctgcccgttggtcactcactcattgttctgatgataagatcgacagatcacaagaagggacaaggctcatcccaggaggatccatgatgctttatgaagacagtcccaacagcccatctctgtcatcctccagacgtgccaaggctgaatcatggagcaaacacagcacaggctcaagctgagaccctgccatgtgacctcctagttctatgaaatacccttcaacaatgcagaattgacaaaccctcccagaacctgatatagatacacatatttattatataagtgtctcagtaaagaaaca

SEQ ID NO: 66868 - DNA, 391 bp, Homo sapiens
catcaggcttacttccttgctcagctcctggttccctctgcaggacggctctttctcctattttctgctaggctaactcctattcttctcagcttcctccaggatgtccctgactcccaagccttgatcaggtgcccttttcattggcccgctcccttatccaccctgaatttatcccatggccagcgtactgacatgacctagtcactggccttcgtccctcccacactgtagtattgattaggatttttgggtttagtatataccaggcacggagcttagtgctttgtttattatctcactgaggtctcataatgatcctatgaaataagtattagtactgatgaggaaactgaagctcagaaagggtgaatgatttgcccagggttat

SEQ ID NO: 66869 - DNA, 2344 bp, Homo sapiens
  misc_feature (18)..(18): n is a, c, g, or t
  misc_feature (161)..(161): n is a, c, g, or t
  misc_feature (489)..(489): n is a, c, g, or t
  misc_feature (790)..(790): n is a, c, g, or t
  misc_feature (943)..(943): n is a, c, g, or t
  misc_feature (1080)..(1080): n is a, c, g, or t
  misc_feature (1154)..(1154): n is a, c, g, or t
  misc_feature (2143)..(2143): n is a, c, g, or t
agttttcggagttaatantaactagtgatttggggctacatttaagtgctttaagctatcctacaagcttaaagtagtatacatgcaaatacttaaatgaattaggtacaagaatacagaggtaagaaatagaatctattgtagaataaatcctatttcanatgtgactgttttaggatttgaatcaaccacatattacagaaaaccccaagataaagccttggcataaccaagacaaagtttatttttttctctcacataaaattagtccagacttattttaccagtggtatggcaactccacagtcaaagggacccaagctcatctgaccttcgattcccttatcctgggacaggcttacattctcaaggtcgactcctggcctaatggggctactggagcttcagccatcacactctgtgcttcctgttatatctactggtcagaacttcagatacatctgtctaaaaggaacgctgaaaatacantctttaagctgtgcaattgtacctggaataaatgagttcttttaataaaaagagttgaatggatatttggtgggcaaatagcagtccatgctacaataataaacttcacaattttagaattagatatcttgtaatgaatattctgacgtggtgtcaacttataccatagatagattataactttgaaaaggaattagaacacaataataataaattcacactaaggctcttttggggaaaaaaaatctctaccatttattgagtgtttattatcttcacaacatccctatgagttagggantatttttgtggacattttacagataaagaaacagaggcattgagatgataactagcttgactaaggagtggcggagctctgggcagtgtggttcctgtgtgcccataaggccattgcacaatgctgcttcatcatgtaattcagaaagtattncaggatgtggcagttggtcatcatgaatgttcattgttatcttgtggctttgtgaaaaattctggtcattcaaacgatttgactgttgagattctgtgcacatgagattgtactgtgtacatgtttctaaaaatgtntgttatagatcaaaatgcacacactcatttacctctaagaacagttcttatattgaagggaaattatctgtacntgagagaacaacgtggttttgagtacaagtggtgaacagacattgaatagttgttttcagaaagcatcactcccctgtacctcagaacccagcctcagtgctggttgcgagccaacagctttgatgtcctgaagtttttgcatcacttctcttttgcccctctttgggattcaaagatgataagtttgaagtggagttctaccgcttccattggaagagaaaaagtttccgtgtgtgtgtgtgtgtgtgtgcgtgtgtgtgtttacggagaggagttctatgcatctgcagagggtgctgccatcaacaaggagaacagagtgggatgaagggtttgggaagccaggatgggcatctctgacgagctccagaactctccacctaagtgtgcaagtgtaaacactccctgatgtgtgaactggccatctcaagactaagtatttagcaggaaatgccccctattcaacccttgccttctcaggtgtagaggttgggttgtctcttccatctttgtttgaattatgtcattaatcaaccttagtgaaagatcacttagtcatttgtgacagcataagttcttaattgttaggaatcactggtgcggcacacatctttttctatccatgaacaacgtcaaatgcttattttctcatgagcttttattttttccttttaaaaaaagtttcttaggataaacacagcctttttccttgtctctcccttgccctctcatctttttctcaatctttatattcctatatgtcactgaagagtccccgtgccaacgctgtgcagtgggaggctcctacctccaccagcttttgaggaggttgtagtcctgcaaccttagaggttccacagccaagctgggggtctttctggagcatgggtggtgaatctgagatctatgcacccaggaagcctgacacattattgtggtgtctcaattcttttttttttaattagaaaaattgtatcaaattgcattnggtgagagcaaaaataaactgaagttggttgagctttggaagactacaagccactgtaatatttaagatttcttgacctccagaactaacatttgtcctgtcagagaaaataattactcctgttgagaatacatgcattaaagtaagatgttcactactctatatgatcaccaaacattaaataatatgttttacacatgt

SEQ ID NO: 66870 - DNA, 243 bp, Homo sapiens
aaaaatcttccctgccagcccacctccaagaagtcacttccaccgatcatgccgctgggcacaggtgttgcccaccaatcatccaaatgagcgagcgcctttcaagcctatggggagaagctgctggtcttcatggccttcccctccttggcatagcttccatgcccagcaagccaggagggatgggagcagccctgggccagaatgccacagactcccgctgttcttactcaaaatccagcc

SEQ ID NO: 66871 - DNA, 380 bp, Homo sapiens
ttatactctatatatcccagcagtggtatgttaattctaggccaagaatgtttaaaaacaatattgtaaagtccaattataagaaaagccttccctgcctcatgagttatacatattagatggtttttaacttcagatatctttttaaaagcagtgaaccgaaagtaccggtaaatgggagaaatgagaatgcattttctatacaggtgagaaaagatgcctcatcatacttgacttttgaataccctccctaaaattttaatatctgctctataaaaaccatacactgtaaagtcacaggtgataaactcatcactaaatgtaattatctttatttttcccaacctctatgacacttggaattggaaacaaatttaaaa

SEQ ID NO: 66872 - DNA, 526 bp, Homo sapiens
agctaattaagcaaactgaaatgcagtgccaaagttacaaagagctttagggttaaagaatggttatttgacagtcatgagaggcttttactaatctccgagacttcatgactatataggatggtgtctgaacattttaaatgaatgttggtgaaataagcagagattcactatgaaaccccttatcagctaaaatacagtaaatgtgtctgtattagtctgggcaccttggcagtgtgagaaatgagaccagttgatgtggatgagtctggttagatgggccaggctatttcagtattttgaaactgcaactgaagagtttcatttaaacagtttctctccatcagactataggagtggtccaataattgacatttatatgtttgcacagccataaaccaaggtccatagcctatgtcatgccccagcatcagcatcttttaaattttatctctggtaagagttgacatttcaaaagaccaacatatgcgataaaaatgagaatatgggagtcatctatggtttt

SEQ ID NO: 66873 - DNA, 182 bp, Homo sapiens
tttgtttcccatcaagtccctttcttctagcaaccaagcgcccctgcagcctgcccctgacacagcctggcagcaggtgcttaccctccaagggaaacagccaggccctgtgccccatatgcaatgaacaaggctgggctgtgcccctttcctgcaagcaatcagcacaggccctcaagcat

SEQ ID NO: 66874 - DNA, 219 bp, Homo sapiens
tagacaaaataaatggacatttctttacaatgaaatactgtcacagcacaaatttttaagtattaactgaaaaatgtaaagattacacccaaggctcatacaagaaaggaccgttagatttggggtcaaatgtttgaaattgtctgtcttacaatgaaactgccaacttaattggttttttaataataaacactattttatgtgtgctgtagatcctat

SEQ ID NO: 66875 - DNA, 1785 bp, Homo sapiens
  misc_feature (212)..(212): n is a, c, g, or t
  misc_feature (511)..(511): n is a, c, g, or t
  misc_feature (621)..(622): n is a, c, g, or t
  misc_feature (894)..(894): n is a, c, g, or t
  misc_feature (1231)..(1231): n is a, c, g, or t
  misc_feature (1247)..(1247): n is a, c, g, or t
  misc_feature (1417)..(1417): n is a, c, g, or t
  misc_feature (1598)..(1598): n is a, c, g, or t
gggacatccagtagtaatgactagtaagtagtttgggagaagctgagccttgaaggaagtctgtgggtcaccagattttaggtggaattgaagtcctggatttgcagtctctgggaattacatatagagtgagaagggcagaggactgaggaaggaaccctaggtaacaaatgttgggtagggatagaagagcagtctgcaaaaaagacttnggaccaaacacttcagaggcagctggtaaagaggatggtgtttctgaagttatagccaggcagtcttctctgacttctctgtctgcctcttctctctgccaactcccaaccaaatcagcctttgagtatagttgtctctgcctccataccttagttcagaactacctcattttttgctaggactccattaatagcctattgtcttgtctctttactcctaaacttactcttgtcagtcattcttccacacttttccatagcactctttctaaagtacctaaactgtgccagtggttccncatcttcagaatagtctgaccttctcagcttggcataagatgcctttcatgatctggcctccactgtttgttttcaccttttgcttcctttccccttcacatcctaaatnncatgcattcaaattatttgtccttcctagaaggatgcttctttgcttctgggtctctgtatgtgcttttttcatgtgttcttacttcctggaatgacagactctccatggttcattaactgtacaagatttgactaaagcgttaccttttctgcaaagacttctgacttccaagtaaaaccaggctcttccctctgggctgacttcctgatttgttgcatatctctggtgtagttgtaatgacaatatcttgaaactgtttcgtatttgttntccccttccaatttatgagctcttagaggacaacaattttgatataaggatcttcatattcttagtgtttggcttagtttaataaatgtttaatgcagtggttttctttttttttttttaatttgctgttaaaattttttttacacatttaaaaactataaatagagatgggatctcacttgatcacccaggctcttgaactcctgggctcaagtgatccacctgcctcggctcccaaagttctgggtttgcaggcatgagccaccacatccagccatggaatggttttcaatgtggcttctgtaccagcagtatcagcatctctggaaacttgttngaaatgcagattcttnggccccactcaatatttactggattagaaactaagggggtgggtcccagtaatctgtgttttaacaaacttctcaggtgattctgataccttataacaaatcctgcaggtgattctgatagttctaatagttagaaaattattaattcgtccagtgaaacgaatgattgncaacattcacagagaggaataaactctgatcttatgataagtggaggagaaccctgttcagtctttagaaaaaggaaacaaccatgctgtagtgatggctgcaagaaattaaaatagtgagcctatatagttagattgacagttttgtttttttgtttgtttgttttgagacggagtttcnctcttgcactccagcctgagcgacaagagcgaaactctctctcaaaaaaaaaaaaaaaatccaatcctggctgggcgcagtggttcatgcctgtcatcacaacactttggaaggccaaggttagaggattgcttgagcccagaagttcaagaccagcctacgcaacatggcaagaaactttctctac

SEQ ID NO: 66876 - DNA, 401 bp, Homo sapiens
ttgaagtagatttattctacaaggtttatgcatctgccctcccatatggcccccatgtcatctgtggatctcagttcctgtttggaacacctgatccaaccattcttatctagagttgggcaactatctcagaaaggcaatatttttttgaaactgcaaaccaaagtttccattcagactccccaagggattttactgacaattttaagcactgaagatttctgggagggaaggagagctgaagtctctttgagatgcacaatacctgtccccagttgagaggagaaatgcaagtatcaatacatgcagctatgaagcatcaatcagaaaacaacaaatgggtgttacagtaaatgcacatgaggcagtctcaataaaaagggaactgtgtctctgataag

SEQ ID NO: 66877 - DNA, 270 bp, Homo sapiens
cctttacttgtagtcttaggtgattttctaaaccattatttcctaggattacgtatgcccttttatttttgcttcagttttgtttttgtttttggttgttgttgttttgttgtttttagagatagtgtcttgctatattgcctggggctggagtgcggtggtgagatcatagctcactgcagccccaatctcctgagctcaagttatcctcacgcctcagcctcctgagtagctgggactacaggtgcatgccaccatgtccagctattt

SEQ ID NO: 66878 - DNA, 578 bp, Homo sapiens
cgagacttggagctgaggtcatttggagctgtttaatactgaagagctgttgagcactggaaagtgctgtgtaaccctggaaaagaaccgtgtaacgctgcagaagtgtgtggtagctatgccggaggtgtcatctaaaggtgctaccatttccaagaagggctttaagaaagctgtcgttaagacccagaaaaaggaaggcaaaaagcgcaagaggacccgtaaggagagttattctatttacatctacaaagtgctaaagcaggtccatccggacactggcatctcttcgaaagctatgagcattatgaattccttcgtcactgatatctttgagcgtatagcgagcgaggcatcacgtttggctcactacagcaagcgctccaccatttcttccagagagattcagacagcagtgcgcttgctactgccgggagagctggctaaacatgctgtgtctgagggcaccaaggctgtcactaagtacaccagctccaagtaagcctgctaagtaaacgtcatttctaacccaaaggctcttttcagagccacttaaacatactgaaacagctgtgggc

SEQ ID NO: 66879 - DNA, 1103 bp, Homo sapiens
cgcgctattcattcagagaggttctgcagttccccgtgggcggtgtcaacgggctgctcagcaagggcaacgatgccgagagggtcgggggctgcacgctagcgtacctgccggcggttctggagtacctggcctccgacaccctggagttggcgggcaacgccgtcggaacaagaagaagacccgcatcatcccgcgccacctgcagctggccatccgcaacgacaaggagctcgacaagctgctggcccgagtgacaatggcttagggtgacgttttgcccaacatccaagctgtgctgctgtcccaaaggattgggagccactaccacaaagtccagtatgaataaccacccaagttgtaaaagccagcgaagtgacttgaatgtctaatgtctagaagaaacaaaaacaaaaacaaaaacaaaaaccccaaagctgaaatcaaaggcccttttcagagccactcaatttctgagaaagagctagtttacaaaaggattacaaaatgctgtttcgtcaataagactacagctttcgtaaacaggactcagaacagttctggttattggggtatccgaagcagtttcctttaatactcggtagtattgacagcagaacttgatgtttctgggtggaactgtttcagcacctacttcaggcttttgcatttctgatgactggatggccccactggatccatgactcttgactcaactggtcctatggccactactcagaagtggactcagcttcaggaaggccattttccctatccctatgattgctttctcaaccaatcagcagcacccattccctagccccctgcttgccaaactatctttgaaaaaccctagcctccaaattttcggggaggttagtttgagtagtaataaaactctagtctcccttctagcctgttttacatgtattaaactgtttctctattgcaatttccttatattgataaattggctttatctgggcagcaggcaaaagaaacccattgggtggttacaactgctattacaaccagtaatatatgaccatcatatggcacccaaataacatgattttggaaataaaagttactgccttccaatg

SEQ ID NO: 66880 - DNA, 550 bp, Homo sapiens
cagttacccacagtgttcaccacagtaacatgctgtacagaaacccaggagaaataggctataccctatagcctaggtgtgtagcaggctctaccatctaagtatgtgcttttgcatttctgatgactggatggccccactggatccatgactcttgactcaactggtcctatggccactactcagaagtggactcagcttcaggaaggccattttccctatccctatgattgctttctcaaccaatcagcagcacccattccctagccccctgcttgccaaactatctttgaaaaaccctagcctccaaattttcggggaggttagtttgagtagtaataaaactctagtctcccttctagcctgttttacatgtattaaactgtttctctattgcaatttccttatattgataaattggctttatctgggcagcaggcaaaagaaacccattgggtggttacaactgctattacaaccagtaatatatgaccatcatatggcacccaaataacatgattttggaaataaaagttactgccttccaatg

SEQ ID NO: 66881 - DNA, 1515 bp, Homo sapiens
cgcgctattcattcagagaggttctgcagttccccgtgggcggtgtcaacgggctgctcagcaagggcaacgatgccgagagggtcgggggctgcacgctagcgtacctgccggcggttctggagtacctggcctccgacaccctggagttggcgggcaacgccgtcggaacaagaagaagacccgcatcatcccgcgccacctgcagctggccatccgcaacgacaaggagctcgacaagctgctggcccgagtgacaatggcttagggtgacgttttgcccaacatccaagctgtgctgctgtcccaaaggattgggagccactaccacaaagtccagtatgaataaccacccaagttgtaaaagccagcgaagtgacttgaatgtctaatgtctagaagaaacaaaaacaaaaacaaaaacaaaaaccccaaagctgaaatcaaaggcccttttcagagccactcaatttctgagaaagagctagtttacaaaaggattacaaaatgctgtttcgtcaataagactacagctttcgtaaacaggactcagaacagttctggttattggggtatccgaagcagtttcctttaatactcggtagtattgacagcagaacttgatgtttctgggtggaactgtttcagcacctacttcaggtaggcagagcagtgattatagcaggctcctggaagggaaaatgccattcttcttgggaaaatgaacaaacaaattaggatgttattgtgacaacctatgtaattcctgagaaaaataatgtgaagatggggaatcatattttgggggttgaattttagttagagtgtcgaattagactaaatgattagaagcaaaggaagatttgtaaacttgcagctttcagcacaactcttgttgggagagcatgactgtatggacatcagtcaaggaatgggcatatctaaacatactcctagggcgcatgttttcttctgccaaagaattaccttccgagaattctaggatggttatatgtctagaagaccgtagccatgctatgttaataaaccaaaagataaaaggtacatacaggcttttgcatttctgatgactggatggccccactggatccatgactcttgactcaactggtcctatggccactactcagaagtggactcagcttcaggaaggccattttccctatccctatgattgctttctcaaccaatcagcagcacccattccctagccccctgcttgccaaactatctttgaaaaaccctagcctccaaattttcggggaggttagtttgagtagtaataaaactctagtctcccttctagcctgttttacatgtattaaactgtttctctattgcaatttccttatattgataaattggctttatctgggcagcaggcaaaagaaacccattgggtggttacaactgctattacaaccagtaatatatgaccatcatatggcacccaaataacatgattttggaaataaaagttactgccttccaatg

SEQ ID NO: 66882 - DNA, 337 bp, Homo sapiens
gcaagactcttctcaaaaataaataaataaatttattttaaggcctgctcatagacctgagccatctgtacactgtagccctgttcttttggccccagcctgtgcctgtgcctgctgtgatgttttcatttcctttgctacactatttactatctggcctttgcagacaaagtgtaaaggcatttcattttgcaaacctttaaggtttgcattttcaccttctttactgactagctcagatctctcctacttcaaacagaatgaccaactctgtcctgttatgactcttttatttcacagcttctcaacagtgaaatacaggagtactctgtgcaaa

SEQ ID NO: 66883 - DNA, 630 bp, Homo sapiens
aaaataaaatccatacatttctgagtcctgaaaaattataaatacttgtaatatagttttccttgaacatgtggtctctgcctgcaaacacatagacttttagttttaatttacatagagttaaatatacacatattactctgaagataaacctgaggtgtaagaaaattatgaattgagtgtttttgtgtgagtataggtttgtacatattttcagaataaaagcaattactgcaacaaaacaaattatgttatttaggtgattaacaaaactaaacacttttaaaatggtgaaagcaaatctatactttctgctttgtattgaatttattaatataaaatgttctggcctgtgattcggattctccccagagtctgcctattaaagcacaggcaactttgtctccagaaacaactctcttgagtacaataataaaagccctcttaaaacaggaaaaaaaaatcatttttaacacttatttgaatgaacattcaaccaaaattgaataattggatatatttttattgttctatgtgtgtgtgaatgtataaatggtgcataaaaaataatttaagccagaaaaatagttatttgtaatgaataaaactaaaaagtagttaattattata

SEQ ID NO: 66884 - DNA, 466 bp, Homo sapiens
atccaagatagatcaactctccctaaaggctgacagtgaactcttggggccgttttattctctgaggttagcaaggagtcatctactagccattcaggaggccagctgggaagacaaaataggcaccccaaactcagcaacttcataacaccttcctctccccgcctgaagccttaaactgcatcaagtcaaagaaacctggggcaaatccttaacatgtttttgactgcagtaaatccacagccactctctactccgagctggcagattgagaccaagtattcaacgaaagtgctcactggacttgccagacaacaagtggcgcagataaactcagagtacgagatctggcccgtcaaaggtgctctcagaatcatcatctgcatttggcggtacctgtcccccctcaaaacccacaggttcctttcttttccatccaacaattaaagatctttgacactaagca

SEQ ID NO: 66885 - DNA, 1023 bp, Homo sapiens
atccaagatagatcaactctccctaaaggctgacagtgaactcttggggccgttttattctctgaggttagcaaggagtcatctactagccattcaggaggccagctgggaagacaaaataggcaccccaaactcagcaacttcataacaccttcctctccccgcctgaagccttaaactgcatcaagtcaaagaaacctggggcaaatccttaacatgtttttgactgcagtaaatccacagccactctctactccgagctggcagattgagaccaagtattcaacgaaagtgctcactggaaattggatggaagagaggagaaagttcaccagagacactgacaagacaccccaatccatttacagaaaagaatacatccccttcccagaccacagaccagaccagatctccaggtggtatgggaagaggaaagttgaggggctaccttacaaacacctgatcacccaccaccaggagcccccacatcgctacctgatcagcacctatgacgaccattacaaccggcatggttacaacccggggctgcctccactccgcacttggaatggacagaagttgctgtggctgccagagaagtctgactttccccttcttgctccccctacaaactatggactctatgagcagctcaagcagagacagctcacacccaaggctggcctgaagcagagcacttatacttcatcctaccccagaccaccgttgtgcgctatgtcctggagggagcatgcggtcccggtccctccccatcgcctgcatcctttcccacacttctgagagctgccaccccaggagcagctcagatagaatcagctggagaccacagcctcactggacttgccagacaacaagtggcgcagataaactcagagtacgagatctggcccgtcaaaggtgctctcagaatcatcatctgcatttggcggtacctgtcccccctcaaaacccacaggttcctttcttttccatccaacaattaaagatctttgacactaagca

SEQ ID NO: 66886 - DNA, 239 bp, Homo sapiens
tgtggtttacctccattgcccacatcctcgtccatgacactattgtatcttacctgggctactgcaatggtgtcctaactggtctccccgccttctttttgtgtgctacaacctattttttcacaaagcagctgtttatacttgttaaatgtaatttgactatgtgtaactccttagattaagcccatccactggcttttcggtgtatttacaataaaatccttagtccacgcctctct

SEQ ID NO: 66887 - DNA, 93 bp, Homo sapiens
ggttctggtttcatagcaacttctaggtggtgtgggcgaagtttgggactggtttagggcggggacaagaccaagaacacaagtttccttgta

SEQ ID NO: 66888 - DNA, 2946 bp, Homo sapiens
  misc_feature (1581)..(1581): n is a, c, g, or t
  misc_feature (1627)..(1627): n is a, c, g, or t
  misc_feature (1661)..(1661): n is a, c, g, or t
  misc_feature (2628)..(2628): n is a, c, g, or t
caagagtggccgacaacccagaaatctgatggctttcgtggaaccaaagtgcacttgttttggtttttcctaggtttggttttgcttttttctttattcacacagagtttattgcttccatctctggcgtttctgcatcagtaggtacacttacatgggcaaagctgaacaggatgcaaatcaagcccagccattacatgcttcttccaggaagtgacacgcatcacttcctctccatttcattggccagagcaaatcacatgaccacacttcacctcaagggggctgggaagtctaatcctccagtttatctagaagtcccagagaagcagatgttggaaatacctcccccaagtagacaaatgagtgagactgttggagggagaggaaggagactacttatccttccagctcctgatggtctcatccccttgttatgaagtattcccttcctgatgatccagggtgtcacttcacctgttgttgctgaccactagcatcccctccttctcttcagccctccataccccagagatgcactttgcagctgcagctacttgctgcaaacctacttccaacagtctgcccagactaacagcatcttctgatctctctctgcgtgtgccagctccaagtgagcacagactggaaacacccgacacctcacctgaaaactctttcagaagagggcaggcattgtggatattggtcttagtcgtagcagtagagcttccagtagacatttaatttttaaaatttttatggattaccatgtaatccaagaaacaggaattgccactgctgtgatattagttctcaggtcaatttaaagctagccttgagcagacaggggattaaataacgtgtccatttcagtgacctttcattctgtgtgagatcaccatccccttgaagttggcaaaatgagaacctagactgctgaagcctgcctctaatgagccactgtaggtatatcttgggagttctccatggccagggacctgagctcatgtccaagtccttacagtcttataggactgtccatagcgtgaattggtacaatttgttttttcctcagctttccccaccatggtatgaggtaagaagtgctgctctgttgacttagatagaaatatccttctgtccacttcacaggtttaaactggacccatgtaagttcagctctgaggctcaaatttggactgaatgactttacgtaattcaatgtttttcagatgtacaactgaagagactataaagctttagaactagcttctgtttaatccccaccattattgagtgacaggccaaaacataggcgtatttaacacagaactatgatataaccctaacccaaccacccttccttccttccttccttccttccttccttccttccttccttcgttccttccttccttccttccaggttctggctggtgtagtttaatttctttcctatcaaaatgtcttaccctaaatgggtaagaaaataattgtataacttgttagcttgcaggtagggaaaatttttttcttttttctgagacagagtcttgctctgtcacccaggctggagtncagtggtgcgaccttggctcactgcaacctccgcctcctgggttcnggtgattctcttgccttagcctcccgagtagctngtattacaggcgcccacactgggctaatttttgtatttttagtagagatggggttttgccatgttgtccacactggtctcggactcctgacctcagttgatccgcccgcattggcctcccaaagtgttgggattacaggcgtgagccatcacgcccggccaaaattttaaaaagaaaagaattgtaaaacacttttaaaatgaagagtttattagatgtgcttcccaaaactggctctgtaaatccattatagagaacttttgatagtgtccaccttcttgcttcattccccttagggatttactgcttactactaccaggatctctttctacccagataacactctgacaccaaatgtgtaggtttcttacaccaaaaaattcagttctctgcagacaccagctgggtgtcctacgatttaattcaattctgacactacctggagttagggcagagcccacaggttaagggctctgtcccacaggagtgcctcacacttcagacaccaatcacaagtagtggttcttcagattacccacacttctgtccaacttggctacaaatcagggctcccacaaccccttcctcaggctcaataatttgctgtaatggttcatgaaactctgagaagcactttactcactattactagtgattttaaaggttattataagggcacaggtgaccatccaaggtgacgatgtacatagggcaagttccagaagggtccaggagcttcagtccccatggagttggggtatataccacctcctggcatatagacatgctcaccaaccggaagctctctgaacccctcagttagggtctttatgggggttccattatgtatgcatgattgattcattcattggccattggtgattaactcaatctttagcccctctcccctccccaaggcctggtggaaggggctgaaactttcaaccctctaataatgccgtggtntttctggcaaccagtccccatcctgaagctatccaagattcccgaagcccggtcatctcattagcatgcaaaagacacgcatatcactctggagattccacgggttttagaaactctggtccagcctggccaacatggtgaagccccatctctattaaaaatacaaaaattagccaggcatggtagcatgcacccgtagtcccggctgctcgggaggctgaggcaggagaatcgcttgaacctgggaggtggatgttgcagtgggccaaggtcgcgccactgcgctccagcctgagcaacggagcgagactctgtctc

SEQ ID NO: 66889 - DNA, 473 bp, Homo sapiens
cttcagctgaggatgcagccaatcctaaaggcagttctggaaccaggatggctcttcagagttgttacaaattgagacaaggtgctggtattttgcatcagccagtaattggctgtgagctctcctatgggcgggtaaggcagttccccactcccaagggcaacttccagggagggatgcagctgtgagcccatgcacctgacattcccagcaatggggaatggatatgttgctcttgaggagtggatgtggatggagcatccagcagccattacctgttccatctaacctaagatattttgagatgcccacttgtttttgagacttaatgagaattatttggcattctctatctctgaactgctcatgccaaatcttagtacccgatataagtggagtctggttgcatgatcagttgctcagatcaaagtgggaaaaataagaaaataaatagaaatttggatttgatcact

SEQ ID NO: 66890 - DNA, 385 bp, Homo sapiens
taaatatttcctcttcccactgacactgttagtgagaatcagtggttaccttttgtcattcctacaatttttgttaatatcccactttgggcacttttcatgttttgcattataatttttttgttcatgtctgccttccccaccagccttcaatcttcttgagattgtgggccatggaccatgtcttaattatgtttatgtaagtagcacaatgccttatccagagtaagcactgtgatgaatatttaatttaattcacttcttaacatctggcactaggtcattttgaaataatgactatcaatttttttacacttcctgttaaatgtaggctttcagtgtttttgcaggagcaattgtgtgtgaaatattacacacacacata

SEQ ID NO: 66891 - DNA, 366 bp, Homo sapiens
tggagaaaccacattcttttagatttggtgggcacgtaattacagtgtaggtggtatattcttcttgacgaaaatcttataaagcacttacaggaacttggatatttgtaatgaaatatagtattagattttcatttttatacattttcttttcctctaaccatagccattaggactgttttgaaagagtttttagctcctataaaaacaaagtgcccccccgaaaagaaagggtcttttaactcttcaaggatcatttgggctgcctgggtccttgctttagagttggagaaataatattaagcagtcataaaaagggattcttaggcacaatacacaaaagctgttttatatactgtttttcat

SEQ ID NO: 66892 - DNA, 634 bp, Homo sapiens
cattctctaaaatgctgttcatcttagaccaggaaaaatattaaccttacagactctgtttcaattcatagctaaatattttcaaaagagtgactttgtaaaaatatgttccaatggcaaattgattcattgtgatgggatcacttattccaaagacttcctgtctttattttgttgccatgcctaccttttagccatgatacaacagaatcaaatattggccactgggaaaaaatattcaaagaaagaaagaatgtgaacagaacttatgaccatgatgattcaatgttttaccacaatgctttctaaaacagaagagtgtaaaaggatattcaaagtcaatttcctcaccgaggctttgcagaaaatgaggaaactagagaaacaaaaatggcgggacattctacgggtgattttaaatgttgctatgttttatgggaaaaaatactttaccttttaaagaatcacaaagaattgttggaaacccaaactctggaatgtttgcaaatttagttgagcttctatgtaattatgtctatataggtagccacaaagttgatgatttttaaaaatctgtgccttatttgtgtaataaaatacacaatgaataattaatgttcctaggaaaacctta

SEQ ID NO: 66893 - DNA, 473 bp, Homo sapiens
tgaaatctcaccgcgtcgactaaaaaaaacatacaaaaattagctgggcgtggtggcacatgtctgtaaccccagctacttagaggctgaggcacgagaattgcttgaatccaagaggcggaggttacagtgagctgagatcacaccactgcactccagcctggaggacagaccaagactccagtcttaaaaacaagaagaaaaaaaaattaaaatcaatggtgtacctcagtataggtggacaaaacagcactagcaagaagggtgtcagcaataggtaaaaataaaaggaaatccttaaaacacattagaatgagaagccttacaaatggtcaagaaaaagacttagatcaagttgtgggttgaagaaaaattaataaagtcggaagatgcaaagatagataaacgttactacagacagaatcatttatagaaaaaaagtcgacgcggccgcgaatttagtagtagtagta

SEQ ID NO: 66894 - DNA, 285 bp, Homo sapiens
ctgtgttccaggatagtttctttctatttccttcagggcactgaaggtaaagatcaagggtactacttttagcagaagtacttgcatttttttccattctaagagatgccaaaagttagacctctaatgcggaacttgacagggtgagaaaagaattcagcatctgtccgactacacagtatgttatctactcaaaagtccagccctggaaagctgtccttccacctcaggaggaaatacagctgcttgctgggttgttcacttcagcatcttcaataagatgag

SEQ ID NO: 66895 - DNA, 251 bp, Homo sapiens
aagattataggcacaggctttctccaatgtggcacccaactgcaatgcaaatagtacacacatcactcaagcattttccaatcttattttggaattctacagtttcaaatgatttatgcaattttttagaaaaaaatggataaatgttgcatatattttatacattttttctaaagaaaaaatatgttaaaggaggaaatactaaattcttagaagttagtatgagggagtatgtcccaattagcattcag

SEQ ID NO: 66896 - DNA, 3487 bp, Homo sapiens
  misc_feature (379)..(379): n is a, c, g, or t
  misc_feature (962)..(962): n is a, c, g, or t
  misc_feature (3480)..(3480): n is a, c, g, or t
  misc_feature (3482)..(3482): n is a, c, g, or t
  misc_feature (3484)..(3487): n is a, c, g, or t
ggacagggggctctgttgaagctggtgctggagacgctgggtcaacagtagccatagaaggtggagaaggagtttgtgatggtggtgctggatccaattccgctgtttccacagtggcctgacactcctggttgtcttcgtaagcagccagtgtcttcagatactctttcttggcagcctcagttttcctcttatatatctgtttttgctcctctccaagactatcccacatggaggccacaatttttgaaacctcaccaaaagtggcattaggattctgtcccttgatggcagcccgtgtatcaggaaagaataaagcatatgctgaaactggtttctgaggttcattaggatctttcttttttctcttctttgggancttctgctttttccctgcttccaccaccactgtcttctggctggaaatttgcctccagaaatcctcaacaccaacctcgtgaagtgaactagtaggtgaaggggtggttgaaatacgatcttcaggtgactgggcaggtggcaggatggtgccaccccgtaagctcaaacccagttggaaactcagttctgactgatcagtggtggtcaactggctatgccccatcaagtcagatgtcatgtctatcattagtacatcaattgtaacaggtgggttggcactatactgagttcctatagagtggtttaagtccatgatcaagcctccactgaggagcccccaccttgctccatcaagccatgggtcatgcccacagagcatgtccaatgtctggaccccatactgggctgaagcactgccatcctgtgaagaggaagggtctgccaggtcatcaaagtggtcaaccacatctgagacagccaatgagggatcagaatccaaagagataggtgggatttcaaattcttcatcacctaagcttggtgtatggaatgtctcggcccctgacaggaagaggtgtganggccctgtgattgtcaggtaattgtcatttcctccgggagactccatcttcacacaactgctcctaccatctcagactgtcatcgctcccaccgccccactggactcggaactgtgagaccacttcttgtatcatgtgtatcctatttaactttccttaaacaagcctgtgttccttgcatctaaaaaccttaaaatgtgtgtgaaacccagcatctcagaaccaggagcgcaccaaactcacattatgtggtaggcaacactctaaagatgccctcccccaagattcttatctgttggttgttcaaacagtaatacaggcactgctgtaaagtcccaagtcagttaacttaattaattaataaattaataagtattaattaattaattaagacagagtctctgttgcccaggctggagtgcagtagtgcgatctcagctcactgcaacctcagcctcctgggttcaagtgattctcatgcctcagcctctcaagtagctgggattacaggcgtgagccaccactcctggctaatttttgtatttctagtagagacgaggtttcaccatgttgccaaggctgggcttgaactcctgacctcaagggatctgcccgtctcagcctcccaaagtactaggattacatgtgtgagccaccatgcctggttgaaagtcagttaactttaaaatatggggattatccaggtgggcctgactcaattagctgaccccttttaaagcagaaagttttctatgactggaagcaggagaagtcagagaaatttgaagcatgagaaggatttagtgtgctgttgttggccttgatgctggaggggttccatacaaggaccacagagtggctacaagtaactgagacaaacccagctaacagccaacaaggaaacagccacctcagttctacaaccacaaggaactgaattttaccaacatcaggaatgagattggaagatgatcccaagctccagaagagaacacagccagctgacagattgcttttaggcctgtgataccctgagctgaggtgccagtcataccatccaggatttctgacctatggaactgtcagataacaaacaggtattgttttaagctgctaaatttgtgataatttattaggcagcaatagatgactaatgcatgttgatttcaagtgaatgggactctctggagctgtgtgaggctgcaacccttaatgtaaataattttgtgaccatgtgttatcagagtcaaatacgtttggaaaaccacattttcataatcaggatgaaaggttaatgatgttgagtggacttatagcagagaccgatcacagaaagcatggaggcaacactatgaaacaaaacttgaatactcaagtgtggaggttaacgatacagaaagcagattctatcagtgaaaattaaagcaactggcattcatctaggaattaaccttagctcaagtggaaaacacaactaatattgctaactctaactctgctttggtttaaaggatgaaaatatggtgaataaataatgataaaaaaatagcaacaacaaccattgatgaaacatttactctttgccaggcaccgtcctagcaaggttacatgtgctctaattctcacaaaagttttgaagttgatactattaatcgtcttttaacctttgggtagtagtaatgaagaatggtcctgagattaatcaggaaagagatgggaaacaaaggcagcattttggcacaggaagtttaaatgcctgttttagtttcatgatgtgcctttaatcttggagtctcaataatccttagcagctctggataaaggaggaaacacactctttaattcatgaaactcaatgcacttaaaacacctggtttctgagccagaaccagtaaattaggccctctttatcacttgttttaaaagtaattcatgctttatctgaagcatatcatgtaataatgcatataatataggttaaaaacatttactgatcttaaaaaattggattaccagtacatttgggtcacatagtagtagagtactcctagagataatgatgccctattcctagagtctaagaacagatggcaatcaatttctccggcattatctggtttacagatatataagagcgataaaaatcaacagtaataaaatactggtaaccataattttcaccaattttattcgtgtaccacaaaaatgatttaattttcttaattaaataagcactaaaataaaaatcatggaaaagaagatgggctcaatctccctaagtgatggagcactcaagcatttttactttttcactgagacaaaaaccaaaagcaaataacaaacaaacaacaacaaaaaaaaccctgtccacccaggagctaatccattttccacactcattatcattcagatgagtcttttgtaagacaaagatgtcagcatagcttctttcagtgtctgagaacgcctttcttatttggattgtacaaataaagaggaccctctggatctaattaananannnn

SEQ ID NO: 66897 - DNA, 440 bp, Homo sapiens
ttatagcctgcaaatgtcaggcagttgccacctaagcaagaacccgaaagctaaaacagagatattttgctgatcagaaggcacggtggctttcattaaaccaacagtattaactggtcttatttaccgaagatttacccaagttatgtgaactaaaagggatttgagttactttctatttttctgataaaatatttaagtgtttcctttctcttttggccaattagaactcattcatatatttttgtaataaattttacatacacatgacacatataaacatgcagacacacacaggcagattttatagctttgtaagtttcttcatttgccagttttcaatagtttctctcccacctttagactgtcaagccctaaacaattgttagctaggcaaccttaaatttgtacttctaaagggatgactcttagctgaaaca

SEQ ID NO: 66898 - DNA, 253 bp, Homo sapiens
cttccttttctttttctgttttagagaggagactcaatctgttgcccaagctggtctcccaggctcacgcgatcctcccaccttggcctcccaaagtgctgggattacttacaggcgtgagccaccttgcccagccgactcggccactttctagccaagtgaacttgggcaagtcacctcctttcttggggcttaagctgctgtgtctgtaaagggggtatcggtgcacacttcacagaatgatggggagctt

SEQ ID NO: 66899 - DNA, 202 bp, Homo sapiens
acactcagtgttaacgaagctcattggtgaaccccctgcattccccaagagaattcttcccatagttgccttcattttacactgcactgcttccaatcaagaaaatagttttaatttagaatcaaaatccagagaagtaaggaaattatagctgttatatcataataggctctaaaggaaagacaacagtgaaactgttgcc

SEQ ID NO: 66900 - DNA, 977 bp, Homo sapiens
tgcatggcagcattatgagctcttctataaactagcttaataatgagctctattctgaccatctattctggaacttggagtgggggtggggtaccacatcctcagaagtgaatgtgtacagtcggtgatagtacaactgagtaatggggcttcatacccttggcctctttttgactgctaagaatttggagaaggctattaatgaaggtaaggtaatgagccagtccaaatccctcactgtctggctaagagattgagccattccactttacagcccctaattcccttcttcccaactgcagcaacatttccaacagggacaaaaaggaagtgaaggaaaccacttcagtattgggatcaatagaaattcaagaggtagttcataatgaccttatatgtgacacaaatggaaatactctacacttctggcatgcttctctcccaaatatttagaacattagtgacaatatgaaaaactttgctgactgagctgatcaatggaatgtgaaggcagtatactttaaggctatttactttcacacagaatgtttatctattagtcagtttgtattctactcaaatgcagatagacgggtataatgttttcttgtgcatttgaaacctatcaaggagaaaataaaccattccactaaaatacataggccaaacaccatctgggaaagtgataaaagctatccagaggctatgctatgtaaaatagcaaggtcaatttacatgggttgcatagtacttggctatgcagttttcaaaagaacacatccaaaaaaaaaaaaaatccaaattagttcctataataggtctttgtaaatttaaatatatttgtgggttggaaaatacgtttttagagacatttagaatttctttctctaaaaatgtatccaactccaagcagaaagagacttctgtactcacattctcatgtttcttagaattgggtagcatgatcattgaatctg

SEQ ID NO: 66901 - DNA, 1406 bp, Homo sapiens
  misc_feature (893)..(893): n is a, c, g, or t
  misc_feature (902)..(902): n is a, c, g, or t
tgcgtcctggcagcagaagctgcaccatgtccatgtcacccacggtcatcatcctggcatgtcttgggttcttcttggaccagagtgtgtgggcacacgtgggtggtcaggacaagcccttctgctctgcctggcccagcgctgtggtgcctcaaggaggacacgtgactcttcggtgtcactatcgtcgtgggtttaacatcttcacgctgtacaagaaagatggggtccctgtccctgagctctacaacagaatattctggaacagtttcctcattagccctctgacccctgcacacgcagggacctacagatgtcgaggttttcacccgcactcccccactgagtggtcggcacccagcaaccccctggtgatcatggtcacaggtctatatgagaaaccttcgcttacagcccggccgggccccacggttcgcgcaggagagaacgtgaccttgtcctgcagctcccagagctcctttgacatctaccatctatccagggagggggaagcccatgaacttaggctccctgcagtgcccagcatcaatggaacattccaggccgacttccctctgggtcctgccacccacggagagacctacagatgcttcggctctttccatggatctccctacgagtggtcagacccgagtgacccactgcctgtttctgtcacagatgctgctgtaatgaaccaagagcctgcgggacacagaacagtgaacagggaggactctgatgaacaagaccctcaggaggtgacatacgcacagttggatcactgcattttcacacagagaaaaatcactggcccttctcagaggagcaagagaccctcaacagataccagcgtgtgtatagaacttccaaatgctgagcccagagcgttntctcctgcncatgagcaccacagtcaggccttgatgggatcttctagggagacaacagccctgtctcaaacccagcttgccagctcccatgtaccagcagctggaatctgaaggcgtgagtctccatcttagagcatcactcttcctcacaccacaaatctggtgcctgtctcttgcttaccaatgtctaaggtccccactgcctgctgcagagaaaacacactcctttgcttagcccacaattctctatttcacttgacccctgcccacctctccaacctaactggcttacttcctagtctacttgaggctgcaatcacactgaggaactcacaattccaaacatacaagaggctctctcttaacacggcacttagacacgtgctgttccaccttccctcgtgctgttccacctttcctcagactatttttcagccttctggcatcagcaaaccttataaaatttttttgatttcagtgtagttctctcctcttcaaataaacatgtctgcc

SEQ ID NO: 66902 - DNA, 1561 bp, Homo sapiens
  misc_feature (1048)..(1048): n is a, c, g, or t
  misc_feature (1057)..(1057): n is a, c, g, or t
tgcgtcctggcagcagaagctgcaccatgtccatgtcacccacggtcatcatcctggcatgtcttgggttcttcttggaccagagtgtgtgggcacacgtgggtggtcaggacaagcccttctgctctgcctggcccagcgctgtggtgcctcaaggaggacacgtgactcttcggtgtcactatcgtcgtgggtttaacatcttcacgctgtacaagaaagatggggtccctgtccctgagctctacaacagaatattctggaacagtttcctcattagccctctgacccctgcacacgcagggacctacagatgtcgaggttttcacccgcactcccccactgagtggtcggcacccagcaaccccctggtgatcatggtcacaggtctatatgagaaaccttcgcttacagcccggccgggccccacggttcgcgcaggagagaacgtgaccttgtcctgcagctcccagagctcctttgacatctaccatctatccagggagggggaagcccatgaacttaggctccctgcagtgcccagcatcaatggaacattccaggccgacttccctctgggtcctgccacccacggagagacctacagatgcttcggctctttccatggatctccctacgagtggtcagacccgagtgacccactgcctgtttctgtcacaggaaacccttctagtagttggccttcacccactgaaccaagcttcaaaactggtatcgccagacacctgcatgctgtgattaggtactcagtggccatcatcctctttaccatccttcccttctttctccttcatcgctggtgctccaaaaaaaaaatgctgctgtaatgaaccaagagcctgcgggacacagaacagtgaacagggaggactctgatgaacaagaccctcaggaggtgacatacgcacagttggatcactgcattttcacacagagaaaaatcactggcccttctcagaggagcaagagaccctcaacagataccagcgtgtgtatagaacttccaaatgctgagcccagagcgttntctcctgcncatgagcaccacagtcaggccttgatgggatcttctagggagacaacagccctgtctcaaacccagcttgccagctcccatgtaccagcagctggaatctgaaggcgtgagtctccatcttagagcatcactcttcctcacaccacaaatctggtgcctgtctcttgcttaccaatgtctaaggtccccactgcctgctgcagagaaaacacactcctttgcttagcccacaattctctatttcacttgacccctgcccacctctccaacctaactggcttacttcctagtctacttgaggctgcaatcacactgaggaactcacaattccaaacatacaagaggctctctcttaacacggcacttagacacgtgctgttccaccttccctcgtgctgttccacctttcctcagactatttttcagccttctggcatcagcaaaccttataaaatttttttgatttcagtgtagttctctcctcttcaaataaacatgtctgcc

SEQ ID NO: 66903 - DNA, 1353 bp, Homo sapiens
  misc_feature (840)..(840): n is a, c, g, or t
  misc_feature (849)..(849): n is a, c, g, or t
tgcgtcctggcagcagaagctgcaccatgtccatgtcacccacggtcatcatcctggcatgtcttgggttcttcttggaccagagtgtgtgggcacacgtgggtggtcaggacaagcccttctgctctgcctggcccagcgctgtggtgcctcaaggaggacacgtgactcttcggtgtcactatcgtcgtgggtttaacatcttcacgctgtacaagaaagatggggtccctgtccctgagctctacaacagaatattctggaacagtttcctcattagccctctgacccctgcacacgcagggacctacagatgtcgaggttttcacccgcactcccccactgagtggtcggcacccagcaaccccctggtgatcatggtcacaggtctatatgagaaaccttcgcttacagcccggccgggccccacggttcgcgcaggagagaacgtgaccttgtcctgcagctcccagagctcctttgacatctaccatctatccagggagggggaagcccatgaacttaggctccctgcagtgcccagcatcaatggaacattccaggccgacttccctctgggtcctgccacccacggagagacctacagatgcttcggctctttccatggatctccctacgagtggtcagacccgagtgacccactgcctgtttctgtcacaggactctgatgaacaagaccctcaggaggtgacatacgcacagttggatcactgcattttcacacagagaaaaatcactggcccttctcagaggagcaagagaccctcaacagataccagcgtgtgtatagaacttccaaatgctgagcccagagcgttntctcctgcncatgagcaccacagtcaggccttgatgggatcttctagggagacaacagccctgtctcaaacccagcttgccagctcccatgtaccagcagctggaatctgaaggcgtgagtctccatcttagagcatcactcttcctcacaccacaaatctggtgcctgtctcttgcttaccaatgtctaaggtccccactgcctgctgcagagaaaacacactcctttgcttagcccacaattctctatttcacttgacccctgcccacctctccaacctaactggcttacttcctagtctacttgaggctgcaatcacactgaggaactcacaattccaaacatacaagaggctctctcttaacacggcacttagacacgtgctgttccaccttccctcgtgctgttccacctttcctcagactatttttcagccttctggcatcagcaaaccttataaaatttttttgatttcagtgtagttctctcctcttcaaataaacatgtctgcc

SEQ ID NO: 66904 - DNA, 1121 bp, Homo sapiens
  misc_feature (608)..(608): n is a, c, g, or t
  misc_feature (617)..(617): n is a, c, g, or t
tgcgtcctggcagcagaagctgcaccatgtccatgtcacccacggtcatcatcctggcatgtcttgggttcttcttggaccagagtgtgtgggcacacgtgggtctatatgagaaaccttcgcttacagcccggccgggccccacggttcgcgcaggagagaacgtgaccttgtcctgcagctcccagagctcctttgacatctaccatctatccagggagggggaagcccatgaacttaggctccctgcagtgcccagcatcaatggaacattccaggccgacttccctctgggtcctgccacccacggagagacctacagatgcttcggctctttccatggatctccctacgagtggtcagacccgagtgacccactgcctgtttctgtcacagatgctgctgtaatgaaccaagagcctgcgggacacagaacagtgaacagggaggactctgatgaacaagaccctcaggaggtgacatacgcacagttggatcactgcattttcacacagagaaaaatcactggcccttctcagaggagcaagagaccctcaacagataccagcgtgtgtatagaacttccaaatgctgagcccagagcgttntctcctgcncatgagcaccacagtcaggccttgatgggatcttctagggagacaacagccctgtctcaaacccagcttgccagctcccatgtaccagcagctggaatctgaaggcgtgagtctccatcttagagcatcactcttcctcacaccacaaatctggtgcctgtctcttgcttaccaatgtctaaggtccccactgcctgctgcagagaaaacacactcctttgcttagcccacaattctctatttcacttgacccctgcccacctctccaacctaactggcttacttcctagtctacttgaggctgcaatcacactgaggaactcacaattccaaacatacaagaggctctctcttaacacggcacttagacacgtgctgttccaccttccctcgtgctgttccacctttcctcagactatttttcagccttctggcatcagcaaaccttataaaatttttttgatttcagtgtagttctctcctcttcaaataaacatgtctgcc

SEQ ID NO: 66905 - DNA, 1457 bp, Homo sapiens
  misc_feature (944)..(944): n is a, c, g, or t
  misc_feature (953)..(953): n is a, c, g, or t
tgcgtcctggcagcagaagctgcaccatgtccatgtcacccacggtcatcatcctggcatgtcttgggttcttcttggaccagagtgtgtgggcacacgtgggtggtcaggacaagcccttctgctctgcctggcccagcgctgtggtgcctcaaggaggacacgtgactcttcggtgtcactatcgtcgtgggtttaacatcttcacgctgtacaagaaagatggggtccctgtccctgagctctacaacagaatattctggaacagtttcctcattagccctctgacccctgcacacgcagggacctacagatgtcgaggttttcacccgcactcccccactgagtggtcggcacccagcaaccccctggtgatcatggtcacaggtctatatgagaaaccttcgcttacagcccggccgggccccacggttcgcgcaggagagaacgtgaccttgtcctgcagctcccagagctcctttgacatctaccatctatccagggagggggaagcccatgaacttaggctccctgcagtgcccagcatcaatggaacattccaggccgacttccctctgggtcctgccacccacggagagacctacagatgcttcggctctttccatggatctccctacgagtggtcagacccgagtgacccactgcctgtttctgtcacaggaaacccttctagtagttggccttcacccactgaaccaagcttcaaaactgatgctgctgtaatgaaccaagagcctgcgggacacagaacagtgaacagggaggactctgatgaacaagaccctcaggaggtgacatacgcacagttggatcactgcattttcacacagagaaaaatcactggcccttctcagaggagcaagagaccctcaacagataccagcgtgtgtatagaacttccaaatgctgagcccagagcgttntctcctgcncatgagcaccacagtcaggccttgatgggatcttctagggagacaacagccctgtctcaaacccagcttgccagctcccatgtaccagcagctggaatctgaaggcgtgagtctccatcttagagcatcactcttcctcacaccacaaatctggtgcctgtctcttgcttaccaatgtctaaggtccccactgcctgctgcagagaaaacacactcctttgcttagcccacaattctctatttcacttgacccctgcccacctctccaacctaactggcttacttcctagtctacttgaggctgcaatcacactgaggaactcacaattccaaacatacaagaggctctctcttaacacggcacttagacacgtgctgttccaccttccctcgtgctgttccacctttcctcagactatttttcagccttctggcatcagcaaaccttataaaatttttttgatttcagtgtagttctctcctcttcaaataaacatgtctgcc

SEQ ID NO: 66906 - DNA, 1172 bp, Homo sapiens
  misc_feature (659)..(659): n is a, c, g, or t
  misc_feature (668)..(668): n is a, c, g, or t
tgcgtcctggcagcagaagctgcaccatgtccatgtcacccacggtcatcatcctggcatgtcttgggttcttcttggaccagagtgtgtgggcacacgtgggtctatatgagaaaccttcgcttacagcccggccgggccccacggttcgcgcaggagagaacgtgaccttgtcctgcagctcccagagctcctttgacatctaccatctatccagggagggggaagcccatgaacttaggctccctgcagtgcccagcatcaatggaacattccaggccgacttccctctgggtcctgccacccacggagagacctacagatgcttcggctctttccatggatctccctacgagtggtcagacccgagtgacccactgcctgtttctgtcacaggaaacccttctagtagttggccttcacccactgaaccaagcttcaaaactgatgctgctgtaatgaaccaagagcctgcgggacacagaacagtgaacagggaggactctgatgaacaagaccctcaggaggtgacatacgcacagttggatcactgcattttcacacagagaaaaatcactggcccttctcagaggagcaagagaccctcaacagataccagcgtgtgtatagaacttccaaatgctgagcccagagcgttntctcctgcncatgagcaccacagtcaggccttgatgggatcttctagggagacaacagccctgtctcaaacccagcttgccagctcccatgtaccagcagctggaatctgaaggcgtgagtctccatcttagagcatcactcttcctcacaccacaaatctggtgcctgtctcttgcttaccaatgtctaaggtccccactgcctgctgcagagaaaacacactcctttgcttagcccacaattctctatttcacttgacccctgcccacctctccaacctaactggcttacttcctagtctacttgaggctgcaatcacactgaggaactcacaattccaaacatacaagaggctctctcttaacacggcacttagacacgtgctgttccaccttccctcgtgctgttccacctttcctcagactatttttcagccttctggcatcagcaaaccttataaaatttttttgatttcagtgtagttctctcctcttcaaataaacatgtctgcc

SEQ ID NO: 66907 - DNA, 352 bp, Homo sapiens
agtattcatccacgttttccacaagtcctactatttatttattttaactttaatttaaatatcacctaccttaggtagaagttttcctttgtgtaatataatataaaaccgacatttcttgggggcataatagtaaagatgttaacattttttggttctttttggatgctgtatttgtgcttcttctgaaagtgatgtgtgccaagatggctcatgtaacccagttttgactaggctattgatcttctgtctggttaatttattgaactggcttaaagctatacatattttcttttagttaactatgtaagatattctagatatattgtctactgattcataatatcactgg

SEQ ID NO: 66908 - DNA, 400 bp, Homo sapiens
ttttttttttaagagacagggtcttgctctgtcacccaggcctaggttggagtgcagtcatagtccactgcagccttgacctcccaggctcaagcaatcctcttgcctcagcctcctggatagctgggactacaggtatgtgctaccatgcccagcttccttcctttaatttgtgtttgcaattttactgcatgggatgtgtattttcatgtttttatttaagatttacttttggattgcagagttacactaggaagcaaaaataattcaacaaatatttaagatctacaacctagatacataagaacttaaaacagaatgttgtaatgtttaatcacttttaggtaaaaatcagtagtggcctgtcagtttcttcatccatacctaactcttcagcttt

SEQ ID NO: 66909 - DNA, 290 bp, Homo sapiens
tctataattcctgtttgtagagaaggtagatagccctcacttttgaaaatcggcaataattagaaaaagagactcctgctatggtttgaatgtctctcccataattcatgtgttagaagcttaacccctaatgcaacggtattggaaagtagggtctagtaagaagtgattaggtcatgagggcagagacctcatcaatggattaatgttggtctcacaggaatgggttaatcattgcaagagtgggcttgttataaaagcaagcttggccctcttttgcattttcgctc

SEQ ID NO: 66910 - DNA, 3319 bp, Homo sapiens
  misc_feature (530)..(530): n is a, c, g, or t
ggcggtcccctgttctccccgctcaggtgcggcgctgtggcaggaagccaccccctcggtcggccggtgcgcggggctgttgcgccatccgctccggctttcgtaaccgcaccctgggacggcccagagacgctccagcgcgagttcctcaaatgttttcctgcgttgccaggaccgtccgccgctctgagtcatgtgcgagtgggaagtcgcactgacactgagccgggccagagggagaggagccgagcgcggcgcggggccgagggactcgcagtgtgtgtagagagccgggctcctgcggatgggggctgcccccggggcctgagcccgcctgcccgcccaccgccccgccccgcccctgccacccctgccgcccggttcccattagcctgtccgcctctgcgggaccatggagtggtagccgaggaggaagcatgctggccgtcggctgcgcgctgctggctgccctgctggccgcgccgggagcggcgctggccccaaggcgctgccctgcgcaggaggtggcnagaggcgtgctgaccagtctgccaggagacagcgtgactctgacctgcccgggggtagagccggaagacaatgccactgttcactgggtgctcaggaagccggctgcaggctcccaccccagcagatgggctggcatgggaaggaggctgctgctgaggtcggtgcagctccacgactctggaaactattcatgctaccgggccggccgcccagctgggactgtgcacttgctggtggatgttccccccgaggagccccagctctcctgcttccggaagagccccctcagcaatgttgtttgtgagtggggtcctcggagcaccccatccctgacgacaaaggctgtgctcttggtgaggaagtttcagaacagtccggccgaagacttccaggagccgtgccagtattcccaggagtcccagaagttctcctgccagttagcagtcccggagggagacagctctttctacatagtgtccatgtgcgtcgccagtagtgtcgggagcaagttcagcaaaactcaaacctttcagggttgtggaatcttgcagcctgatccgcctgccaacatcacagtcactgccgtggccagaaacccccgctggctcagtgtcacctggcaagacccccactcctggaactcatctttctacagactacggtttgagctcagatatcgggctgaacggtcaaagacattcacaacatggatggtcaaggacctccagcatcactgtgtcatccacgacgcctggagcggcctgaggcacgtggtgcagcttcgtgcccaggaggagttcgggcaaggcgagtggagcgagtggagcccggaggccatgggcacgccttggacagaatccaggagtcctccagctgagaacgaggtgtccacccccatgcaggcacttactactaataaagacgatgataatattctcttcagagattctgcaaatgcgacaagcctcccagtgcaagattcttcttcagtaccactgcccacattcctggttgctggagggagcctggccttcggaacgctcctctgcattgccattgttctgaggttcaagaagacgtggaagctgcgggctctgaaggaaggcaagacaagcatgcatccgccgtactctttggggcagctggtcccggagaggcctcgacccaccccagtgcttgttcctctcatctccccaccggtgtcccccagcagcctggggtctgacaatacctcgagccacaaccgaccagatgccagggacccacggagcccttatgacatcagcaatacagactacttcttccccagatagctggctgggtggcaccagcagcctggaccctgtggatgacaaaacacaaacgggctcagcaaaagatgcttctcactgccatgccagcttatctcaggggtgtgcggcctttggcttcacggaagagccttgcggaaggttctacgccaggggaaaatcagcctgctccagctgttcagctggttgaggtttcaaacctccctttccaaatgcccagcttaaaggggttagagtgaacttgggccactgtgaagagaaccatatcaagactctttggacactcacacggacactcaaaagctgggcaggttggtgggggcctcggtgtggagaagcggctggcagcccacccctcaacacctctgcacaagctgcaccctcaggcaggtgggatggatttccagccaaagcctcctccagccgccatgctcctggcccactgcatcgtttcatcttccaactcaaactcttaaaacccaagtgcccttagcaaattctgtttttctaggcctggggacggcttttacttaaacgccaaggcctgggggaagaagctctctcctccctttcttccctacagttcaaaaacagctgagggtgagtgggtgaataatacagtatgtcagggcctggtcgttttcaacagaattataattagttcctcattagcagttttgcctaaatgtgaatgatgatcctaggcatttgctgaatacagaggcaactgcattggctttgggttgcaggacctcaggtgagaagcagaggaaggagaggagaggggcacagggtctctaccatcccctgtagagtgggagctgagtgggggatcacagcctctgaaaaccaatgttctctcttctccacctcccacaaaggagagctagcagcagggagggcttctgccatttctgagatcaaaacggttttactgcagctttgtttgttgtcagctgaacctgggtaactagggaagataatattaaggaagacaatgtgaaaagaaaaatgagcctggcaagaatgcgtttaaacttggtttttaaaaaactgctgactgttttctcttgagagggtggaatatccaatattcgctgtgtcagcatagaagtaacttacttaggtgtgggggaagcaccataactttgtttagcccaaaaccaagtcaagtgaaaaaggaggaagagaaaaaatattttcctgccaggcatggaggcccacgcacttcgggaggtcgaggcaggaggatcacttgagtccagaagtttgagatcagcctgggcaatgtgataaaaccccatctctacaaaaagcataaaaattagccaagtgtggtagagtgtgcctgaagtcccagatacttggggggctgaggtgggaggatctcttgagcctgggaggtcaaggctgcagtgagccgagattgcaccactgcactccagcctggggtgacagagcaagtgagaccctgtctc

SEQ ID NO: 66911 - DNA, 3225 bp, Homo sapiens
  misc_feature (530)..(530): n is a, c, g, or t
ggcggtcccctgttctccccgctcaggtgcggcgctgtggcaggaagccaccccctcggtcggccggtgcgcggggctgttgcgccatccgctccggctttcgtaaccgcaccctgggacggcccagagacgctccagcgcgagttcctcaaatgttttcctgcgttgccaggaccgtccgccgctctgagtcatgtgcgagtgggaagtcgcactgacactgagccgggccagagggagaggagccgagcgcggcgcggggccgagggactcgcagtgtgtgtagagagccgggctcctgcggatgggggctgcccccggggcctgagcccgcctgcccgcccaccgccccgccccgcccctgccacccctgccgcccggttcccattagcctgtccgcctctgcgggaccatggagtggtagccgaggaggaagcatgctggccgtcggctgcgcgctgctggctgccctgctggccgcgccgggagcggcgctggccccaaggcgctgccctgcgcaggaggtggcnagaggcgtgctgaccagtctgccaggagacagcgtgactctgacctgcccgggggtagagccggaagacaatgccactgttcactgggtgctcaggaagccggctgcaggctcccaccccagcagatgggctggcatgggaaggaggctgctgctgaggtcggtgcagctccacgactctggaaactattcatgctaccgggccggccgcccagctgggactgtgcacttgctggtggatgttccccccgaggagccccagctctcctgcttccggaagagccccctcagcaatgttgtttgtgagtggggtcctcggagcaccccatccctgacgacaaaggctgtgctcttggtgaggaagtttcagaacagtccggccgaagacttccaggagccgtgccagtattcccaggagtcccagaagttctcctgccagttagcagtcccggagggagacagctctttctacatagtgtccatgtgcgtcgccagtagtgtcgggagcaagttcagcaaaactcaaacctttcagggttgtggaatcttgcagcctgatccgcctgccaacatcacagtcactgccgtggccagaaacccccgctggctcagtgtcacctggcaagacccccactcctggaactcatctttctacagactacggtttgagctcagatatcgggctgaacggtcaaagacattcacaacatggatggtcaaggacctccagcatcactgtgtcatccacgacgcctggagcggcctgaggcacgtggtgcagcttcgtgcccaggaggagttcgggcaaggcgagtggagcgagtggagcccggaggccatgggcacgccttggacagaatccaggagtcctccagctgagaacgaggtgtccacccccatgcaggcacttactactaataaagacgatgataatattctcttcagagattctgcaaatgcgacaagcctcccaggttcaagaagacgtggaagctgcgggctctgaaggaaggcaagacaagcatgcatccgccgtactctttggggcagctggtcccggagaggcctcgacccaccccagtgcttgttcctctcatctccccaccggtgtcccccagcagcctggggtctgacaatacctcgagccacaaccgaccagatgccagggacccacggagcccttatgacatcagcaatacagactacttcttccccagatagctggctgggtggcaccagcagcctggaccctgtggatgacaaaacacaaacgggctcagcaaaagatgcttctcactgccatgccagcttatctcaggggtgtgcggcctttggcttcacggaagagccttgcggaaggttctacgccaggggaaaatcagcctgctccagctgttcagctggttgaggtttcaaacctccctttccaaatgcccagcttaaaggggttagagtgaacttgggccactgtgaagagaaccatatcaagactctttggacactcacacggacactcaaaagctgggcaggttggtgggggcctcggtgtggagaagcggctggcagcccacccctcaacacctctgcacaagctgcaccctcaggcaggtgggatggatttccagccaaagcctcctccagccgccatgctcctggcccactgcatcgtttcatcttccaactcaaactcttaaaacccaagtgcccttagcaaattctgtttttctaggcctggggacggcttttacttaaacgccaaggcctgggggaagaagctctctcctccctttcttccctacagttcaaaaacagctgagggtgagtgggtgaataatacagtatgtcagggcctggtcgttttcaacagaattataattagttcctcattagcagttttgcctaaatgtgaatgatgatcctaggcatttgctgaatacagaggcaactgcattggctttgggttgcaggacctcaggtgagaagcagaggaaggagaggagaggggcacagggtctctaccatcccctgtagagtgggagctgagtgggggatcacagcctctgaaaaccaatgttctctcttctccacctcccacaaaggagagctagcagcagggagggcttctgccatttctgagatcaaaacggttttactgcagctttgtttgttgtcagctgaacctgggtaactagggaagataatattaaggaagacaatgtgaaaagaaaaatgagcctggcaagaatgcgtttaaacttggtttttaaaaaactgctgactgttttctcttgagagggtggaatatccaatattcgctgtgtcagcatagaagtaacttacttaggtgtgggggaagcaccataactttgtttagcccaaaaccaagtcaagtgaaaaaggaggaagagaaaaaatattttcctgccaggcatggaggcccacgcacttcgggaggtcgaggcaggaggatcacttgagtccagaagtttgagatcagcctgggcaatgtgataaaaccccatctctacaaaaagcataaaaattagccaagtgtggtagagtgtgcctgaagtcccagatacttggggggctgaggtgggaggatctcttgagcctgggaggtcaaggctgcagtgagccgagattgcaccactgcactccagcctggggtgacagagcaagtgagaccctgtctc

SEQ ID NO: 66912 - DNA, 935 bp, Homo sapiens
aaattgggattgggtcctgagaagatccatggaagcccagaggaccctgcctctctctgttgcttcatgctgtagaggcagtactggggagggcctgccccacatccggcagggcagctggaaccatgtgtttgatgacactctgctccctcaatgtggagcctcatcctcatctcacagtctagcaggcctctggtgggttaggcttgtctcacccagtgtgtgagtttttttggaagtgacctgattttggagtttccctccaagcctttctcaggtacatgctttctcttttattctgtcttctttttttgatcttcttaaatctgattttctcctttttccctctcttgtctccatcttttttccagtctctcgcttctctttatttctccccatatttcactctgttctctcaccccaacctttcccttctgtttctctccctccctctcttcccaccccctgcctggccttccatatatcaagcagagttttatcaccttatgcaggggcagccctgccacctgccataaagttgataggctaatgacattttgtggatattgccatgtcacaagtccaggacagcatcaaaaatagccctgatgtctaaaccacttcagctatcttttttatttttaaaataaatacattcacatgcttttaagaaactataaaaatatataaagtaaaaagatctttctctcacactgtctccacctctcctggtctcaccgttgtgcttaggggaaaccattgtgattagtttctcctgtgtccttccagagtgtctttatgcaaatgaaaattattgtgataatatattcctattttcccccttactacacaaaagatagactaccataatcccattctgcacttttttttcacttgataataaaaacatgattttattaatgggtgtttatgga

SEQ ID NO: 66913 - DNA, 730 bp, Homo sapiens
ttgaataaattgttgtttctttggttgaaccatgatgagataattggcttaaaccaggagtcatgcatggtatctggaaacttcctcacttgaatcaccagcatcatactcagcatgcataatcctctcatcatgagaggcacaggggaaatgagccagcctgtctggaaaggaagcaaatgcatgctttccatctcccactcagtactggacatgaggctatgtcatcaccacttaatgccagcaccacttaaatgatgtttctctctctctgccctgtacttgctggaggcacatgcccatatcacgtagggtgtcagggcagagagctcttaggaagagctgagctgtggggacttcctcccacgcagaagagggaggcctccgcagaattctctgccatgtgcttctaggcttcctcaactcagaaattttattatagagttttagaatgtgaagagctcttggaaatcatgaaagatgaagaatcaagatggaagtttgatggcttgtcccaggccccagagtggaccctttgctttttggaatccaacagcaaggactcatgggaatatcgtgggatttgacttggagagacagggctcaaacctcatctttgtcacttagtgattgtgtaattctctaaaagtctatttgtagaaaagggataagggagctttctttcctggattgcaagatgattaaaagagatgtatgtataaagggaaaa

SEQ ID NO: 66914 - DNA, 434 bp, Homo sapiens
cttttcctatccctgtacccatagctctccgtagactcagaatttttccactgccatgtctttgcttatcttgagtgacagtgtttgtgggtgaaccttgaaggtgctctttctgctacaagggccctgggagatagcatgggcatgtgcattgagaagccagcctcagaccttatcttgaagcagcttgaggccagacctactgtaggctcagcatcttgctaggaggcatgggagtgatctaacctgccagctatctctcttcctttcctccttctgctgatcaaagtcctgtcctttaagaccctgaagctttcctaggtggagttgatctctcttttcagtattctttgtcctcttgtgggtcatcttactctacttttatttagtaaataaaataattgcaataaaaattattttattgaaaactccat

SEQ ID NO: 66915 - DNA, 383 bp, Homo sapiens
gatttaaattaagtacccaaaacttgtttttagaggctggaggaactaactgatctttgaatcagtcccttttgagaacctgctttttccaaatagcatcatgagcgtggtggtctggttttcctcttctatcttgttgtcatagataagatgcacatgaagaattcatataaattgctctcagatactatggattcctagcatattggattaaaaaagaagtggatatggtccttcgatagaatgtgaagtgtttttttaaaaatcagccaagaactatgcctgtctttttttcacacctgtgattctttcagcaagttagaaggatagcaagagaatgtgcatccttccccaaaccccgaagacaggcagctttggcttaa

SEQ ID NO: 66916 - DNA, 302 bp, Homo sapiens
gggcccattgttggtcagttgttatttgcaatgaagcacagttctgatcatgtttaaagtggaggcacgcagggcaggagtgcttgagcccaagcaaaggatggaaaaaaataagcctttgttgggtaaaaaaggactgtctgagactttcatttgttctgtgcaacatataagtcaatacagataagtcttcctctgcaaacttcactaaaaagcctgggggttctggcagtctagattaaaatgcttgcacatgcagaaacctctggggacaaagacacacttccactgaattatactct

SEQ ID NO: 66917 - DNA, 1249 bp, Homo sapiens
agacagggtctctctctgttgcccatgctggaatgcagtagcatgaacacagctcactgcagcttcaacctcctgggttcaagtgatcttcccatctcagcctcctgagtagcagggactaccgccacacgccaccacacctggctaattttggtgtcttttgtagagatctttcgccatgttgcccaggctgatctcaaacttctgacctcaagtgatctgcccatcttggcctcccaaaataatgggattacaggcatgagccatctcacctagccaaactttcaataatagtgaaagtagtgtatcagagaggttaggattccttctatgtaagaatagggagcagttccttccaaacattaccaatttttaagaaaattaacttttcagttacttgaagaaatgaagtaacagatcaaataggtttttgaaatcttgttttaagtttctgaaatgtttttttctctctgctcagaagtgacaacaggtctattcgtgagactgtcttttgagcttttcctgggggttcatcaatcttttcagagcactttctaagaaaagaatgaatgctactctttgggctatagtagtagtgttaacataaagttgggtagctaaactgtaatatgtggtatatattaattagaataccagacacaggtgttttgattagatttggtggatggatgacagaagttagatgatgaaagcagtgtttgagaaagagtaagtcctattatcagttggagaaagcagaatggagtccagccagctaacaatggaaataacatgggatctggtgcagtaatgggaaacggagaaggaaaaaaataaatcccaggcacttaaataagaagtgaaccctgggttatttggcaaaaacaagagaaaatgatagtgtagggtgatagaataaatgtttattacatttcacagtattttcgtaaagtgatttgcagtggacgtgagtctgaaaagtgggagcaaattctaaaacctctgtccttgggactaaaggaaggtaatgtcacagtagttactgaagaggatctaattgagtgtgcataattatatttctgaacaccatatctgaattttacataggagtttcactttggtgatttcagctagtgattttcagtctgtcctgcagaggtggactgggtagctgggggagagaaaaagaaagaaagaaagctaggtttgattttatctcttgagattctagtatgtttaaaaaaaaaaa

SEQ ID NO: 66918 - DNA, 887 bp, Homo sapiens
aggaaggcaggggtgggagggtcaggagggcagggtgaagggggggctggagggcagcggtgacgagggcagcctgtctcccacgtgtggtggctgcttcctgtgtgccctggggttggctctgtggaggggtgggcactggctttggaacacctccctccccttcctcctctgccacccagtgccttctaaagggcagcagaaagaggcctgctaggcaggggtggcggaggccaccttccttctcacaaatacttcttggccctggccctgtgctgcccgggcaggtccccaggctcaggggctgagaggctgcttactgctgcaggtggaggccccatgccggagggagagcggggttccccccatgcctctccagccctcctgctgcccacggcccaagcccaagcttgtgccggtcattacggccttgcctagctggcagggacagctgcgtgtgatgctggtggagatgccagatgccgcctgccctgtgaggacggctggcggggccgtggggggggttgtgggctggcggggctgtgggaagggggctgccgatcatggtgaaaggggacattttcattgggtcctcgtggtccgtgtcctgggtactcggggtcaccgtgcagacagctgccctttgtctgccggacacagtgcaggcaggggagacaggtttagggctctgacatggggcacagggactccgagccaagggatgtcagggcagctctgtgcatctgaggcctttgcccttgctttgcgggtcagttcatgtccaaagcactttaggaggctgcagggatcaatacccaatatacccaacaactggaattgtttacacatgacctacattttggacggtttatcaataaacatgtgtg

SEQ ID NO: 66919 - DNA, 1273 bp, Homo sapiens
  misc_feature (2)..(3): n is a, c, g, or t
  misc_feature (617)..(617): n is a, c, g, or t
  misc_feature (784)..(784): n is a, c, g, or t
tnncacacagaaattccttttagggactcttgataatggtgagtccatgtaaggctgtgagttatgttaataagagcattatttttctttgagattccacattgtcgtcactttttttttgaaacagcttaagaaaaaaacctttctttcctcttctttctttccctttcctgtattcactctttctttcttcgctctatcttttttcagtaatctctgagacaatgtagacacagtccctgcccccaagggtgggaaaaactagtaggaatgtggcataagaattccacagcaacttagaggaagagatgccattcacttaaggatatgtcatgtgagtctttatgtctaagagacagaaggtagcttgtgagaagtgtgaatggtgtttagctggcagtgggaggagactttctaaatagagagttacggagtttcatgagaaaaagtaggcaaaaaaatgggatgtgtgcaagcacacacaaaaacagagatgaataaggaccaaggccatacatattccctagggcaaaacaattggcttagatagtgtattcattaaatttacagaacaacatcactgtacttgctgcatagcttctcttaggtacttgttntcctgcccacaaaggctcaatgtttgtccacatacacaggcatgatatacaaactgcttcaatttggggagagggcatttggtggctaagatatttgtgatcagcaaggtgatcacaggtggctagttattttcaaaacaatgttcagactatcatttatttctggnggccctttgaacccctcctttctcttcctcctgtctgagttccaacctttcttaccctctccgccccttatccaggcccatgtcaagttattcctgctccacaattggaaatggacccttgcatttcaccagaccatttttctcttgtgatttcactgtcttatgtttaacattgttgttatttgattcaaaaattttctaagttcccttatgattttttctttgacccatggaatatttagaagtgtgttgcttcgtgtccaaatatttagtaactttccagctatctttctattatggatttctagtttgattttattgtaattacagtgaacactgtgttatttcagttcttttaaatttgtcaaggtttattttatggtccagcatacagtctatcttggtgaatattccatatgcacttgaacagaatatgtattcagctgttgctgggtataatgatattaaaaatatccattaggtcaaggt

SEQ ID NO: 66920 - DNA, 341 bp, Homo sapiens
ttaggaagaaaataccaacagcagaaagatggactggaggcatgagaaagcagagaaaaagaatcagctggaagcttttaaatttagttaacttaaattttttttggacacagaaagactttctgaagtaggagatgattagagtcttaactaatgtaataataatgggaatggatgaaagtaaaacaatatgtgacaggcattgtggaggtagaatagacaggatgtgagaaataaaaagctgtaagttataatggagatgaagtagtcaatatgtttccattgggatttcaaagagtggagggagagacttattaacagagactgcaagtagagaataa

SEQ ID NO: 66921 - DNA, 408 bp, Homo sapiens
cacagagagcggtttgatatgtcactgaaaccagcatccaggtggtattgctccatatgcctgagaccctaacaaaagcctaattacaactcatatgcctggagccaggacatgtgcaggatgcatgatggtccaagttatattgggattcagccaatagaagatattttgcctgtcatccctaagcttaggacaatagactctgccaagagaggggattattacatattgcagagcccagcacctaggtggagtgactctcatctttttcttctaccccgtatatagccagcttggtgacctactatttgagtctatacccaggcccagaccacagatgaaattgtgcaatatgtggaacaaacacctaaacaatatataacaccttccttggctctgtctacaaag

SEQ ID NO: 66922 - DNA, 185 bp, Homo sapiens
ttactaggaacttttcaaacataaaagttgagaggaacatataatgaatgcgatggacccgaccccccaacttcaagaggaaaactctggctctactcctagtcttctctgctggcttgttttgaagctaatccaagacttctatcatttcattgtcaatatttccaagtgtatctgcataatat

SEQ ID NO: 66923 - DNA, 346 bp, Homo sapiens
tttaaatagaactggcggaagcacaagcacaccgtatcagcagcttatcagggaccatggttttccacgtacatttgctaggcacttcagtttacccaactccatcagcactgagttaaattgcaaggttgggctgtactacgctgagccagggcagggagaacaagccagttactggggatgagggtgtcgggggggccctcaagaccttatttgcattctgcccacatagagaataaagctgtgatagcctgtgtactaagaggcacccaaagagaaccagtcagtcttaggaatgcacccggaaggtgggatgagtccaggcctccctatggtggaagtagtt

SEQ ID NO: 66924 - DNA, 1311 bp, Homo sapiens
atggcccagcagtggagcctccaaaggctcgcaggccgccatccgcaggacagctatgaggacagcacccagtccagcatcttcacctacaccaacagcaactccaccagaggccccttcgaaggcccgaattaccacatcgctcccagatgggtgtaccacctcaccagtgtctggatgatctttgtggtcactgcatccgtcttcacaaatgggcttgtgctggcggccaccatgaagttcaagaagctgcgccacccgctgaactggatcctggtgaacctggcggtcgctgacctagcagagaccgtcatcgccagcactatcagcattgtgaaccaggtctctggctacttcgtgctgggccaccctatgtgtgtcctggagggctacaccgtctccctgtgtgggatcacaggtctctggtctctggccatcatttcctgggagaggtggctggtggtgtgcaagccctttggcaatgtgagatttgatgccaagctggccatcgtgggcattgccttctcctggatctggtctgctgtgtggacagccccgcccatctttggttggagcaggtactggccccacggcctgaagacttcatgcggcccagacgtgttcagcggcagctcgtaccccggggtgcagtcttacatgattgtcctcatggtcacctgctgcatcatcccactcgctatcatcatgctctgctacctccaagtgtggctggccatccgagcggtggcaaagcagcagaaagagtctgaatccacccagaaggcagagaaggaagtgacgcgcatggtggtggtgatgatctttgcgtactgcgtctgctggggaccctacaccttcttcgcatgctttgctgctgccaaccctggttacgccttccaccctttgatggctgccctgccggcctactttgccaaaagtgccactatctacaaccccgttatctatgtctttatgaaccggcagtttcgaaactgcatcttgcagcttttcgggaagaaggttgacgatggctctgaactctccagcgcctccaaaacggaggtctcatctgtgtcctcggtatcgcctgcatgaggtctgcctcctacccatcccgcccaccggggctttggccacctctcctttccccctccttctccatccctgtaaaataaatgtaatttatctttgccaaaaccaactgcttcttcttccgtgcgactttctctgtctctcctccccccgtacctgcgctgcctccatctttctcgatactaaaacttccagggggggccccggtccccaatcccc

SEQ ID NO: 66925 - DNA, 481 bp, Homo sapiens
ctttgaagaaagaaataccttgcgtatccagacaaaaagaccaaatgacttacaagggaaggaaaatcagactgccttcactctttttgacatcagtgctttattccagaagaaaatgccataatgtatttgagagactctcggggggagaaaatgtcagccagggactttatgtccagccaatgtgactttcagatagactgcagataagctgttaccaatatctataatctcttttcccgtgagtgttttgtataggaatcttctcgtgaatgagctttagatagccaaaatgactgacaaaacatcagtagtaggtgataaataaataaaagtttaatcatatgtatgagttagtatacctgcatatatgtgtttatgagaggaatctaagagcagtgacaccccagtaacaatgaacacagcctccagattttgatttcaaaatgtcattctcctgtaagaggaaccagagctcctt

SEQ ID NO: 66926 - DNA, 481 bp, Homo sapiens
caataataaagctgactacaagttggtctattttttattaccaccatgagccagcaattctaaataatatcagtgataaagtattcatcccccaaaatattttattgaactaggttctaaacaatttctgaggttactgttgagttttaaataatacatatatgtaagcttcaaagtagcacatttgtactgtttttcttcaataatcattttactccacatggaaactaattcagggaatatcctgctatatagttggctctcagtacatatggtgtcagctcatgtgtctccagcccctgtagtactatatattattgcatttaaatgatggatttgaaataaacaatgattataccatgattgtaaagacaagaaacagaacctgaaatacttcaatttttgattctatgtggcagtttagagttttttaaaacaatttttatgtataatttatatgcaataaatgccctcaaagttc

SEQ ID NO: 66927 - DNA, 381 bp, Homo sapiens
cctcaagctgggcctcactgcctccctcacattgggggttaggccacaccttctcaagccctaagggagcaccagattctccgctggtctcacccatcaccttgcattgttatggtttaactgtgtcctcaaaactccactagactgtggactccttgagggcggaggctgagcctatccttgtacctgcggcaccggtacctggttcagtgcctgacccagaggagatgcgctgggaatatttgtcaagggaatgaatgacgtcatgaaagcgaaagataactccagctcaaagtgtgaattctcatcaaaggaatttcatgaccacacgtaaaaaatatttgttcaatatagtacttttcaataaatattcttactgaa

SEQ ID NO: 66928 - DNA, 390 bp, Homo sapiens
atgatggttctttttccatatccttaatatgtatctttcctactcatcaggtagtgatagggacaggaggtagggaaattctgggcagaagagggtgggtccccagcaaccaccccaccctcaagcctggaactgtggcccactgtgagagcatgcattcctgttttcccgctcgaatgttcccttttccaaaaccacccatggcctgccccacagccccatcctgtgcccatagaaaccccaggttccacacagcagagaagagaagagaagagaagagaagagaagagaagagaagaggagaagcagtgagatgccagagactatggttggacattgaagagaagcagcttgacttcagagggatagcttgatggtattgcttcagag

SEQ ID NO: 66929 - DNA, 2871 bp, Homo sapiens
  misc_feature (70)..(70): n is a, c, g, or t
tcggtgcggtttgttttatggtcggtaagcgtagcgccttgttgagacggcggaagcgtctaggccgcgnctgtcctcggccttcatcatcgtcatgctcctggccagcctcaacagctgctgcaacccctggatctacatgctgttcacgggccacctcttccacgaactcgtgcagcgcttcctgtgctgctccgccagctacctgaagggcagacgcctgggagagacgagtgccagcaaaaagagcaactcgtcctcctttgtcctgagccatcgcagctccagccagaggagctgctcccagccatccacggcgtgacccaccagccagggccagggctgcagcctgaggctcaggctgtgctggcataagtgctctgctcctaggtgatggcgtatgtttgtgtataaggtacctatcagtttgtatccctcccctccttggggtggcttcagtggggtggagagtggcctccatgatggaagatgataggggactcagccatcagacaacaccctggcctcctacacgtacttctaccaccctgaacccactgctgccctgggcagtgagtggcttgttttttctcctggacttgtaatttcactccagtatatttttacttcttcattctgggatattgtgaaaagcggtaaatataggattggtgaccaattgggtcaggaagtccagtgttctggacttggggtaagcagtggggttgggacctcagatgggaagggtggtgctaagatcctcctgacctcaaagtgtatttgcctttaagcgaacaaatgctggggtccttggggaccagcttgtcagagggtagccctaagagaaggggattaccttgtaagaccatctggcgcagtggacctattagaacttgggttaaaaatgtttaagaagctaatgtttaagaagcatttgggaaagaaaaagaaataaatgtatccagataggaaaagaagaagtaaaactatttgcagatgacacagttttgtatatagaaaatcctaaggaactcacacacacacacacacacacacacgcacacagctattagaactaataagcaagttccgcaaggtttcaagatacaagatcaatatacaaaaatgaattgtatttctttatactagcaacaaacaatatgaaaacgaagttaaataattccatttataataccatcagaaagaataaaataggaatcaacttaacaaaacaagtgcaagactgaaaactacaaaattggaaagaaattaaagaaggcttaaataaatggaaagacatcctgtgttcatggatcagacttagtattgttaagatggcaatactatcctaactgacatgcagattcagtgcaatccttatgaaaatcatagctggcttttttacagaaattgataagctagtcccaaaattcataaagaaatgcaagggacccagaatatccaaataagccttgaaaaagaacaaagttggtggattcacacttcctgatttcataatttacgataaaggtaatcagctcagtgtgttactggtttaaggatagacatacggagcagaataaagagtacagatatgaacacttatacttacggtcaattgatttttgacaaggttcccaagacaattcaatagagaaaggagagtcttttcaacaaatggcaccgagacaatgatatgcaagtgcaaaagaatgaggttggacctttactcacactatgtgcaaaaatcaactcaaaacgcatccaagatctaaatataagagctgaaactataaaatcttagaaagaaacataggcatagatctttgtaaccttgaattaggcagtggtttcttagatatgataccaaagacacaagcaaccaatggaaaaataggtaaattggacttaatcaagatttgaagcttttgtgattgaaaagaccctatcaagaaggtgaaaagataacctgcagaatgggagaaaatatttgcgagtcatatatatgataaggggcttgtatctggaatatataaataactcttataacacaacaataaggagaaaaataaatcaatttaaaaaatgggctaacggtttgaatagacatttctccaaagaagatatgcaaatggctactaagcacatgaaaaatactcaacattattattcattagggaaatgcaagtcaaaatcacaatgagattccagtttacaatcactaggatggctacaataaaaagatggacaagaacgagtgtcggtgaggatgtagagaaactggtagaaatttaaattgttggtgggaatgtaaatggtgcacctgctttgaaaaacagtttggcagtacctcaaaaagttaaacgtagagtgaccatatgacccaggaatgccactcctaggtatttacccaagagaaatgaaaacgtacatacacacaaaaacttgtacaccaatgttcatagcaacattatttgtaatagccaaaaagtggaaacaacccaaatgtctaccaactgatgaatgggaaataaaatgtggtctgtccacgcaatggaacattattagactctaaaaagaaatgaagtactcacacatgccacaacatggatgagccttgaaaacttgctaagtgaaagaagccaggtgcaaaagcccacatattgtctgactgcattgaaatgcaatgtctaaaatggacgaatctatatagagtgaatatagattagcgtttgccagggcctggaggctgtgagagatgaggcatgactactaagggtttggggtttctttttcgggtgatgaaaatgttctgaaattagtggtgattgtgcacgattttgagaatgtactaaaaaccaatgaacttta

SEQ ID NO: 66930 - DNA, 5022 bp, Homo sapiens
  misc_feature (137)..(137): n is a, c, g, or t
tgttaaggctctgggaccaacgctgggcgaaccagctccgctccggaggggtctgcgcggctggcctcgcccgccccctagcggacccgtgcgatagtgcagcctcagccccaggcacagcgccgcatccagacgcngtccgcgcgcgcagcctgggaggcgctcctcgctcgcctcctgtacccatccagcgaccagccaggctgcggcgaggggattccaaccgaggctccagtgagagacctcagcttagcatcacattaggtgcagccggcaggccatcccaactcgggccgggagcgcacgcgtcactggggccgtcagtcgccgtgcaacttccccggggggagtcaactttaggttcgcctgcggactcggtgcagtggaagccgctgaacatcccgaggaactggcacgctgggggctctgggcttgtggccggtagaggattcccgctcatttgcagtggctcagaggagggtggacccagcagatccgtccgtggagtctccaggagtggagccccgggcgcccctacaccctccgacacgccggatccggcccagccgcgccaagccgtaaagggctcgaaggccggggcgcaccgctgccgccagggtcatggagggcgcgctcgcagccaactggagcgccgaggcagccaacgccagcgccgcgccgccgggggccgagggcaaccgcaccgccggacccccgcggcgcaacgaggccctggcgcgcgtggaggtggcggtgctgtgtctcatcctgctcctggcgctgagcgggaacgcgtgtgtgctgctggcgctgcgcaccacacgccagaagcactcgcgcctcttcttcttcatgaagcacctaagcatcgccgacctggtggtggcagtgtttcaggtgctgccgcagttgctgtgggacatcaccttccgcttctacgggcccgacctgctgtgccgcctggtcaagtacttgcaggtggtgggcatgttcgcctccacctacctgctgctgctcatgtccctggaccgctgcctggccatctgccagccgctgcgctcgctgcgccgccgcaccgaccgcctggcagtgctcgccacgtggctcggctgcctggtggccagcgcgccgcaggtgcacatcttctctctgcgcgaggtggctgacggcgtcttcgactgctgggccgtcttcatccagccctggggacccaaggcctacatcacatggatcacgctagctgtctacatcgtgccggtcatcgtgctcgctacctgctacggccttatcagcttcaagatctggcagaacttgcggctcaagaccgctgcagcggcggcggccgaggcgccagagggcgcggcggctggcgatggggggcgcgtggccctggcgcgtgtcagcagcgtcaagctcatctccaaggccaagatccgcacggtcaagatgactttcatcatcgtgctggccttcatcgtgtgctggacgcctttcttcttcgtgcagatgtggagcgtctgggatgccaacgcgcccaaggaagcctcggccttcatcatcgtcatgctcctggccagcctcaacagctgctgcaacccctggatctacatgctgttcacgggccacctcttccacgaactcgtgcagcgcttcctgtgctgctccgccagctacctgaagggcagacgcctgggagagacgagtgccagcaaaaagagcaactcgtcctcctttgtcctgagccatcgcagctccagccagaggagctgctcccagccatccacggcgtgacccaccagccagggccagggctgcagcctgaggctcaggctgtgctggcataagtgctctgctcctaggtgatggcgtatgtttgtgtataaggtacctatcagtttgtatccctcccctccttggggtggcttcagtggggtggagagtggcctccatgatggaagatgataggggactcagccatcagacaacaccctggcctcctacacgtacttctaccaccctgaacccactgctgccctgggcagtgagtggcttgttttttctcctggacttgtaatttcactccagtatatttttacttcttcattctgggatattgtgaaaagcggtaaatataggattggtgaccaattgggtcaggaagtccagtgttctggacttggggtaagcagtggggttgggacctcagatgggaagggtggtgctaagatcctcctgacctcaaagtgtatttgcctttaagcgaacaaatgctggggtccttggggaccagcttgtcagagggtagccctaagagaaggggattaccttgtaagaccatctggcgcagtggacctattagaacttgggttaaaaatgtttaagaagctaatgtttaagaagcatttgggaaagaaaaagaaataaatgtatccagataggaaaagaagaagtaaaactatttgcagatgacacagttttgtatatagaaaatcctaaggaactcacacacacacacacacacacacacgcacacagctattagaactaataagcaagttccgcaaggtttcaagatacaagatcaatatacaaaaatgaattgtatttctttatactagcaacaaacaatatgaaaacgaagttaaataattccatttataataccatcagaaagaataaaataggaatcaacttaacaaaacaagtgcaagactgaaaactacaaaattggaaagaaattaaagaaggcttaaataaatggaaagacatcctgtgttcatggatcagacttagtattgttaagatggcaatactatcctaactgacatgcagattcagtgcaatccttatgaaaatcatagctggcttttttacagaaattgataagctagtcccaaaattcataaagaaatgcaagggacccagaatatccaaataagccttgaaaaagaacaaagttggtggattcacacttcctgatttcataatttacgataaaggtaatcagctcagtgtgttactggtttaaggatagacatacggagcagaataaagagtacagatatgaacacttatacttacggtcaattgatttttgacaaggttcccaagacaattcaatagagaaaggagagtcttttcaacaaatggcaccgagacaatgatatgcaagtgcaaaagaatgaggttggacctttactcacactatgtgcaaaaatcaactcaaaacgcatccaagatctaaatataagagctgaaactataaaatcttagaaagaaacataggcatagatctttgtaaccttgaattaggcagtggtttcttagatatgataccaaagacacaagcaaccaatggaaaaataggtaaattggacttaatcaagatttgaagcttttgtgattgaaaagaccctatcaagaaggtgaaaagataacctgcagaatgggagaaaatatttgcgagtcatatatatgataaggggcttgtatctggaatatataaataactcttataacacaacaataaggagaaaaataaatcaatttaaaaaatgggctaacggtttgaatagacatttctccaaagaagatatgcaaatggctactaagcacatgaaaaatactcaacattattattcattagggaaatgcaagtcaaaatcacaatgagattccagtttacaatcactaggatggctacaataaaaagatggacaagaacgagtgtcggtgaggatgtagagaaactggtagaaatttaaattgttggtgggaatgtaaatggtgcacctgctttgaaaaacagtttggcagtacctcaaaaagttaaacgtagagtgaccatatgacccaggaatgccactcctaggtatttacccaagagaaatgaaaacgtacatacacacaaaaacttgtacaccaatgttcatagcaacattatttgtaatagccaaaaagtggaaacaacccaaatgtctaccaactgatgaatgggaaataaaatgtggtctgtccacgcaatggaacattattagactctaaaaagaaatgaagtactcacacatgccacaacatggatgagccttgaaaacttgctaagtgaaagaagccaggtgcaaaagcccacatattgtctgactgcattgaaatgcaatgtctaaaatggacgaatctatatagagtgaatatagattagcgtttgccagggcctggaggctgtgagagatgaggcatgactactaagggtttggggtttctttttcgggtgatgaaaatgttctgaaattagtggtgattgtgcacgattttgagaatgtactaaaaaccaatgaactttaaaaaataaaaataaacaaaaaaaattcaacagatgaattcagagaaggccagcttgatggatgaattccttggaatctcttgcctctcagcacttttgtttctctatgtggctcactgcttgagagggatctcatcattttcttactcagttttactgcaagagatgatgtctctatttggcaaaaagtaacagcagtgaaaatatatccctactttgtaaaggcacaagtgatgccttgtagctgcaggttgttatgttttatttaaaatagaaattcactagaggtgtcagaggtttttcttacctagtgaacatgttctcaaatgtcctctcagccttgaggttaggacatgaccacgtctaagaaatacctttagtcactaaatacaggacactactgatcagaggtttactgtcagggactggccagctgagtgcatggtggggcaccttttaagtttccaggcacatttttgtacttactgagatacagcaggagcactctcaaaggccacagatccactctgtctctttataacacactttattcttcctccatgctgcagtagccacatagccacacacacgcgcatacacacacaatagaatgagctagcattgtctagaggttctgggagaagagaggcttgcactgaaatgtccacgttcaaagtctaagg

SEQ ID NO: 66931 - DNA, 323 bp, Homo sapiens
gacagcctgagggcatgtccaggacaaggagggagaaggaagacaaactttgcctctttagtacctcatcttgtgattcaggatgtagtacttggacaaggctgtcgctcaggaaatgatgtttaagtcagataggtctggaagtggctccagtgttaattaatgcccttttctcctttctcctgcccccaccccctcagcctcggccttcatcatcgtcatgctcctggccagcctcaacagctgctgcaacccctggatctacatgctgttcacgggccacctcttccacgaactcgtgcagcgcttcctgtgctgctccg

SEQ ID NO: 66932 - DNA, 553 bp, Homo sapiens
taatgtcattttcatgaaagacagtcatttggaagccaagagctctatctatgttttgttcaaatagccgagtaatctactatcttggcagtaattacttctgctgcatttctaatgtgaattgcatgtgagagcttatgaatacactcttttcaagtgtatgtgggttttcaaggtatgtatttgtgtttgatcctatatttcctttgttataacattctgcttttcatcactttgacagaatatttgtaaattttctggagagtgagtttgggtatatgctttgaggaatatgcttcctcattacaaaagatatggaaacataattgattactacacttgcttatcaatagtattttgattttgtttaaatgaaatgtttaagatacgtggattgctatgcattcatgttttagatttatcctctccaggcatgatttatgccattcaataattaaaataactaagttactttagaaaaagtgcctattaaacagagtactttgtttagaggacgtatatttaaataaacttatacagctaaagaaactga

SEQ ID NO: 66933 - DNA, 471 bp, Homo sapiens
gagagacttaacaatgaactttctggatgaagaggtaatgttcctcccaggtttagaggactgtggatatatgtctataggccagctcttaaaatctccagagcagattcttcaaaactgcagcaatagacgactacactaggaacagcaatactaaaaataaagaaaatattctcaatgcttgattgacagaatgtcttcctgtcaagttaagggggaatcacaatttccaaacacctctgagaagacactttgaatagcagtcacacatctgcagtcacacatctgcaatacaaactacagatcaacgccaaacacgttataaggtacttagcacttctctgatgcatcagagattaagaatgttttttccctttttcctaccaagtaaattaaaatccaccaacacccttcagctcctctcagaaaagaaaatgatgttgggggggaaaaaagtgttgttagtttaga

SEQ ID NO: 66934 - DNA, 477 bp, Homo sapiens
caaaaaccaaaccaaccaactggcaatttcccaaatgatgattctttcccataaagaatatttaaaattcccattttgctgggcattacactagggcagcagtcttcaaactttttgtcttaagaccttagtccactcttacaaacaattgagtctctctgcttttgttgatgtgagttatatctattgatatttataatattgaaattaaaattgagaaatttaaaaagttacacatgcattcatcttaataataaaaaactcattttgtgttaatatagttaacccatttctgtgaaatctaactatatttgtccaaatacaaatttgtgagaggagttgccttgttttacatttttgccactttgtcagctgaagaataagagtcataaatttgaaaaggagagctttatttctcataaagcgttgcaacctgcaggggggccattctgacaggctgggaagcatagccttcag

SEQ ID NO: 66935 - DNA, 437 bp, Homo sapiens
gtttgacatgctgctaaatgaagttgattttatgcctccttgtacctacatatctagtaggggaggtaaacaaggcagtagccagttataatatttttaggaagcaaggaaaggggattatggaaacaaaataacaattatttcttccatccagactagaaaacatatttaattttcagtcagaaagaataattttctctcttgtggaattactatgatggaaatgaattcataatttaacttttgtttgctttttatctgagtccactgcagcaaattgactcaacactttcttttgtcttcaacgggttgtagcttatgcatacacaaacatagagtcattcacatacatgtgtacatacaaaattttgaatgtgttctccgaactggtatatctcttgattgttagaataagcatctcatgtggacaggaatta

SEQ ID NO: 66936 - DNA, 957 bp, Homo sapiens
tgtaactattagttcaagaagcagagtatgatatattcaattacaatgccggaagctaagagcaagccacattacatcctcctaaatcctgccaacaaataaaatagaaaataacaataagagagatggtacttgtgacagagactgctattgtcccacaaaatctattttctcctttcagaataaccaaacccttgttatctgggcacatatcctggattaaccaataagtggtgtcttcataaggagagggaaatttggagacaaggatacacacagagaagaaagacatgtgaagacagcggcagagattgaaatgatacagctgcaagccaaagaacactcttgccagtaaccatcagaagctaggagagaggcatggaacagattctctttcagcccccaaaagaactaaccctgctgtcaccttgatgtcagacttctgccctcctgaaataccagtcgacacttagggaaaatagaaaagaacctacattgaaatattgggggctggttcccccgatactttgggaaagctattctggaagtataacagagggaggactggacaggaagaaacttgagaggttgctggaatacaggctacacatgcctccatgctaaggactacatgtgagattgaaggaggctgttctgaggcatcagcaggagaaaatacatgacttggtcaacaacttgtatagaatgaaggcaaaagactcaaagatacatctaaaatttccaagcaacctgatacaaatggtgtccctgcagagagaagatgatttacagctcaaatgttggaactggagattttaaatgagaaagaaaatgacattaagagttgactgactatatttcagtttatttttctaaagatgaatgggtcacatcaaagaaacaaatggtaaataataaagggtattgataaagttatatgaatgtacaaaaattcaa

SEQ ID NO: 66937 - DNA, 902 bp, Homo sapiens
tgtaactattagttcaagaagcagagtatgatatattcaattacaatgccggaagctaagagcaagccacattacatcctcctaaatcctgccaacaaataaaatagaaaataacaataagagagatggtacttgtgacagagactgctattgtcccacaaaatctattttctcctttcagaataaccaaacccttgttatctgggcacatatcctggattaaccaataagtggtgtcttcataaggagagggaaatttggagacaaggatacacacagagaagaaagacatgtgaagacagcggcagagattgaaatgatacagctgcaagccaaagaacactcttgccagtaaccatcagaagctaggagagaggcatggaacagattctctttcagcccccaaaagaactaaccctgctgtcaccttgatgtcagacttctgccctcctgaaatgtaagaataaatttcttgttttaagccgttctgtctgtggtagtttgttatggccaccctagaaaaggaacgcatgtgatatcgaagtctttccactggacagttccaacctccctttggccctccattcatgctcagtcgataaccttgcttttgaggaagtagaagccatcagacggtaacttcctcaacttctggacaaggacaggtgaagtggaagagatggaactgatgacaaagatgcagaactaagtagccaaagctctcagattctacgctgggacactagtttcctgggaaattcctaggatgaccagcgtgaagaggaagatgaggcagttgttaacaaacaagatgtgagcaaaaagagtaatgaaaaaaggaagatggctttagccagtcagcaggtatcagtttcaaaggtagtttttaaaaaataacagag

SEQ ID NO: 66938 - DNA, 530 bp, Homo sapiens
  misc_feature (469)..(469): n is a, c, g, or t
tgtaactattagttcaagaagcagagtatgatatattcaattacaatgccggaagctaagagcaagccacattacatcctcctaaatcctgccaacaaataaaatagaaaataacaataagagagatggtacttgtgacagagactgctattgtcccacaaaatctattttctcctttcagaataaccaaacccttgttatctgggcacatatcctggattaaccaataagtggtgtcttcataaggagagggaaatttggagacaaggatacacacagagaagaaagacatgtgaagacagcggcagagattgaaatgatacagctgcaagccaaagaacactcttgccagtaaccatcagaagctaggagagaggcatggaacagattctctttcagcccccaaaagaactaaccctgctgtcaccttgatgtcagacttctgccctcctgaaatgtaagaataaanccggatgcggccgaaaaccataatatatataataataacagggagactgtgaaaataaaaa

SEQ ID NO: 66939 - DNA, 1195 bp, Homo sapiens
  misc_feature (26)..(27): n is a, c, g, or t
gactactactactaaattcgcggccnntcagactccttttagaaaatgggatgatcctggctcttactgtgaaatattgcaagatgaagtccttcctgctgatggctctcccagtgagagtacatttcttgtttgtcttttttttctttttcttgtcaattcttgggtgggagaaaagccttctaatatttcctcatccaaaaactcatagtctgagatttttgcagttaattttatcatgattagtctagaatacgactgcctttcattttgcattcaccttcttcgtctaataatgattaatgccttctgtcagttttttctctttgccattatgaatggaaaatgaaaaattgtgaattcccatcggtgttcagtgaaagctaaaagtagacaacaggtatgatgtcttgaaagatgatgatgaaatactttggacaatacaatgagaaaactaatatcttaaaaactatttagttatttttagcatagttgagaataatgaattataaataatgaattataaataatgaactattaaaaactattaaaaaacaacagtttttacatttgtttcaaaatgtagggaaaaaatacgctcactaggattccatcatatttcttagatttataagagttcagtggactcatttgataattgcaagatagcatgagttttagtctgttcttttaaaaaataagttttctctttgttctttggaagacttttaagaaagaataaaagtaatgacatctcaatcctaacaagtaactagaactgctaaaaaaaaaaagcagaatttttaacttcaactaacaactgtggctgccatctaagttcagagtactaggtgctctaggaccctaccctgcgaggcagtgggtctcaaagtgtggtccccagataaatagcatcagcaatcatttaagaatttgttgaaattcaaatcctagagctccaccccagacccgctgaatctctggggctgtagccctgcagtctgttttaacaagccctctaggtgacgctgatagaggcaaacttttgagactcagctctggctgtaggagaactaaaggattctgctgtgaggtaatagaaaaggagtaaatttgaatgtgatgaatatgcttaacttcctaagcaagaaaaatgaacgctgtttatagttacaactgacaggggaaaaaaact

SEQ ID NO: 66940 - DNA, 342 bp, Homo sapiens
atgcctagttatgttataggcactggggatacaataatggaacaaaatacctaagtctgtgccattatggagcttacattctggtatggagagttagacaattagtgaaatataatccttaaggaggttatagattctatagagaaaaatgaagtaggggccaggcacagtggctcatgcctgtaatcccagtgttttgggagactgaagcaggcagatcacttgaggccaggagttcaagatcagcctggccaacatagtgaaacccgtctctactaaaaatacgaaaatcagccgagtgtggtggtgctcacctgtaatcccagctacttagaaggctga

SEQ ID NO: 66941 - DNA, 333 bp, Homo sapiens
ccaatgcaaaactgcttaccaccttggcatcttggcacaacctagtccctctgcctagaatgcccttcctattacccaccttcacttggctaacaccaggtcatctttttgatctcagctgaaatgctgcatgtgaataaggcttccttgcctctccaggctaagtcaggtttttctaatacgtggcctgctggcattctggatttctctatctcagctctcatcaaaattgcaattaattattactatatttccttgactttctgatatgtgtatatgtttctaaacacctaacatctctgaagttgggatgcatcttataattgaaggcat

SEQ ID NO: 66942 - DNA, 491 bp, Homo sapiens
tggaaaagctgtaactctcatacattactggtaataacataaaatagtgcaaccactatggaaaatagtttggcagtttcttaatgacctagcaactgcactcttgcatttatgtgagagaagtgacaatatgtccaactcaaaagatttacattcaaacattcaaagcggctttactcagccccaaagtggaaacaacatatatttctaagaacaagaaaatggatttaaaaactttgctatatgcatgaaatggaacattactaaccaatttaaaaagtactaatacaacagacatggggatgaatctcaataccattattctgagcaaaaggatgtctctctcaatatttgcccttggaactcagctgccatgctatgaggaagccttttcacagagagaagtcacatgaagtgtaagccaaagttcccaggtaaagtctctcagtcaacagccagcatcaatggccagatgtgagttagtgagcctt

SEQ ID NO: 66943 - DNA, 589 bp, Homo sapiens
ggtttaaagcaaacgcatgccagtttagcagccctctcatttaggcaccaaacacaagaaagcacctgctgtcatccgctgggaatccccggtcccaggcccctgtattctgtattgggatggcccatgaagactgacctgcccacaccagccagtttgggaggggccaggggagtactggactctgtgtcaaccagcagagcatctcaaaaacaaatattcagtcactattacagtcttggcacttttccctctaaagcacaagtcagtgctggttaacatagcctgggtcacttaatgctttcctatctccaccagtcaccacaaaccatgtcatgaggcccagtgaggcccccttacacattgtgggactagcacaggggcagcttgggatactaggtcataggggacagtggagagacatagaacagtgtccaaggggctttcgtccataatgatggagttttgcttttaaacactgttctaaacatttaaaatgtaccttttcctgtcatttagtttatgataaaggcattgcagcttttccattggatttgctcattatttaagtcttttataaatccaggaa

SEQ ID NO: 66944 - DNA, 312 bp, Homo sapiens
catcctcataaaaagggagcaggaaaaccaaagggttgaaactacagctacccgagaagaggagatgaataaaaagtatgagtcccagaacattatctctactcagctgaggtccattttcccagtctgtctcctgagaacatgacatgaatagtctgcccacccaggctactttctatactaatgaagggtcccagggcctggctaaatcccgtcagggtgaactgaggtttgtctgctgcagcttcagatttctgcaccaagcccaactctaactcattcaataaatatcatttaggtatctattctatt

SEQ ID NO: 66945 - DNA, 541 bp, Homo sapiens
gagaaaccccatctctactaaaaatacaaaattagccaggtgtggtgttgcatgcctgtaatcccagctattagggaggctgaggcaggagaatcgcttgaacccgggaggcagaggttgcagtgagtcgagatcacaccattgcactccagcctgggcaataagagcaaaactccgtctcaaaaataataataataataatttaactgtgttctgcacacacagaattacaaaatccctataggactttcacagatagctttgggcttaaggtcttcggacaacaggtagttctaatttcttactctttgggacatttagtacatgttggtacacataaggaaagaaaatggcttatattagagctaggaaacaggggcagcctggatttttatggtaggaactcactctgtgcttttttttttttctgttaagttttcttgacactgacttcggtaacattggctaaagggaattgtgagtcatgtgaatttcacctgcagtgcagactttaaaggactgtgttcattctgatttgggg

SEQ ID NO: 66946 - DNA, 487 bp, Homo sapiens
gagaaaccccatctctactaaaaatacaaaattagccaggtgtggtgttgcatgcctgtaatcccagctattagggaggctgaggcaggagaatcgcttgaacccgggaggcagaggttgcagtgagtcgagatcacaccattgcactccagcctgggcaataagagcaaaactccgtctcaaaaataataataataataatttaactgtgttctgcacacacagaattacaaaatccctataggactttcacagatagctttgggcttaaggtcttcggacaacaggtagttctaatttcttactctttgggacatttagtacatgttggtacacataaggaaaggaactcactctgtgcttttttttttttctgttaagttttcttgacactgacttcggtaacattggctaaagggaattgtgagtcatgtgaatttcacctgcagtgcagactttaaaggactgtgttcattctgatttgggg

SEQ ID NO: 66947 - DNA, 176 bp, Homo sapiens
gttaaatctagatggacatgatttcataaaatggtctaatgtcaggtttaaattaagtatgcttgtgatgctcaaatagttaactaaaaaataaatttaaagaaaaaaggcattagaaaatagaagagaaggaaataagaacttataacaatgaaaaaaagaatttaaaatattgg

SEQ ID NO: 66948 - DNA, 725 bp, Homo sapiens
ctaaattctcatgtctgttactgattctgtctgttgtgatctgttgttttcattgaagaggttaggaaagaaaggtattttagaagcattttcagataattgtgggtattcttctttcatacatattatagcaaaacttcagtgttgcatgtggaatctgaaaccatattgacagagtctgttacagtaatacccatttgtctattttatcttttacttgatgccacaattctacgacattatttggaaaaatcccaattcactaaatcatgcagctcttccaatgttgacatatttcatcctatagtattaaaaaatcgtatttgttcatatctgtattgatcttagttgaaaagtattttaagtaggaagctgtcagacttgtggtggcagatacaagttttccaaaattctaattttcacttgaaagcttgaattctatcacatgcaacaaataatgtcagtggttttccccagagtggcagcctcactttgttaattttcaaaaatgtctgccaaatacccaggtctgagtaactgaccgtggtttgtcactcaagtttcctttcaagtaaaaatggtgtccttgaaaaaaatgacttgattagcttgcaactcaaacagtaatatgcttttttttttttttttggcaataaccattgtacttcagtatgcagaagggctttaagtgtacttagtatttcatcacacagtgcattaaaaag

SEQ ID NO: 66949 - DNA, 601 bp, Homo sapiens
  misc_feature (4)..(4): n is a, c, g, or t
  misc_feature (45)..(45): n is a, c, g, or t
gtgncctaggccagacccgggaaggtattggcttgattggattgncggggtgttgctaatccaaatgtcctattccggcctgggtatagccttagagtatttcttaacacatgattcctggatgtcgctcctttttgctcccaactggagcaaaactgtaaaaacagcaacttgttctagatctggaggcaaaattggttccagcagacccactgggaagtgggaggtgtttgctatgctttgtggacaatttaagtgtttaaaaggcaattttgatgagccatgattttcatcttaagtgccaactttagaagataaccttcatataaaagtttctctacagtttgtattttaaaatataaaatggaagaaaaaactatcaccagctttgcttttttcctcttggttaatggactatctattaacgtctcactaaatggccaaatggagtctcacagtacacagtttgggaaatgctgccttaagttgctctgtgaagccttaagttcgtgtaaccatgacttagccatctgtgaaatgggtagacccatggggcataggaattggggaatgtattttgcatcaagtaggactggtgtgg

SEQ ID NO: 66950 - DNA, 370 bp, Homo sapiens
cattgacaaggcgctaaggccttccattctatcttgtaaagtgtgtagtctctaaaaaaaaaaatgttaaaagtttttatctgtacaaaagtatccagagaagaccatgcttcctctttgatttgacagaaactaatcatgttgagctatttaagaaacacagaatactccaaagaaattagttttaacatccttcttgttataaggtgataaaaacaaatctttgtgatttcccagggacctttaggaacctccagagatagtttagatgtaaaaaacagagttgcatactacttagcaatggaaaaggataaattactggctgatacatgtaacgatgtggattaatctcaaaactattatgctgcat

SEQ ID NO: 66951 - DNA, 300 bp, Homo sapiens
taatacatttaagaaaacagatttatgcgtgctcacaaatctgacaatatgaaggctatattaatataaccagtacttacattatcccatttaagtaaagtctttggattttagatgtgcagctaggccctgctttatttaaaagcttaaaaaattatggctaaaatggttttttgtacaacacctttcttttgccccttgtaactttatgagttagtaataaatgagtttggttacgtcaaaacaaatgggaaatagtttgagttttaatgcaatattttaaaacctggtaaaaattcc

SEQ ID NO: 66952 - DNA, 528 bp, Homo sapiens
tccctcattaacctacccctgcccttgctaaacttaataataaatgctggtatatcccagtgcattgttggcaccatgggaccagaaggtggtgacccccctggacccagctttcactatccttgtgtgtgtctgttatttctcaacctgctgaatccgcctgggaacaaagagccccgttgcattgcgggctactggccagatcccgcaatactctgctgtttaaaattgtagctgtttcaatcataaagaaactggcatttattatgcatatgattttttcaccttgttcttgttactaagtcaattatgataagcttaaggtttatgttgtgaataatcactaatcagttgcacttttgaaggtatgtcactatcaaaatggttttgtagagctagagttgaaaatgctgtatctattgtatgctttccataaattcattgcttatgtaaagttttgtcctgttgtgactatgctgttgaactattaattaaaacattttgaaaagcatcttggaaagttatatt

SEQ ID NO: 66953 - DNA, 2439 bp, Homo sapiens
cttgtcttacaatttttaattgtttaaaagaaggtttgatatataaaaacaagaaaaggagcagctttgagagttaaaaaagccgaggctgaaatgatgcattacaaagtatatagattctgtactccagataagatggggtttagagggagtggtagaaacatttgctccttaatggcaaaggtaataaactcctgctctcactgcaagaattgaccatgagatggggtcaggaatcttcaggggagcagacagtggtgtggcccttgtctaggtctccatttatacctgaagatggagcggaatacgcactccagatgcctggaacaccattgcatgggagtgtgggtcacggatccgagggatacacactctagatgactggaagtcaatagcctgggaagcgcaggtcacaccccgagggaaagggcttcaggatgaacatctgcagaaggcgtggacaaggatgggaggcaacagggtcactgggctttccaggactcagagaatcaaaaggcttccaggtcatttctggtagagctgttggtggttacaggaagcaatttggatcccagactcctggagatgaacagctttacggtgagctcagctctgagtgtggaagcactgccatcccaggggcttctgtcgcagaagaaacggaaatctggcaaaaggatggccaggctggccagaaaccactggtctagatagaaaaggaatatgctactgttgccagccaaggctttgtttgttttggggaaaaaatattgctctgagtgaaatatctatttctggcatctattaacaattggttatggttccttgttttaattatatcattacatttttaaaatgaaggatttaatttgcttttgctcctatttgttgctgatgtcgctcagttctccaaatggctgctgtcttcctctagtacttagtctgccatctagaagcaaattaaagacacccaagaaacttcagttattgtattggtaactataaaataatgattaacaaacagaaggacaggaagcgggagaaggcagtcaagtaggaagtagaaaatctaacactgagagagcaccccccaacatagggactgtgtggaggttttacccaaatgatgcttcatttaattttcaccaaaagaaagtgaggtccttccccatctgagggacaggcctctgacacccatctccgtagcagtcatcccacaggttggccatggctgagtaggtcagggacagacaccttctcgaagctgggctatcgtcctctcactctttgatttggaattcagtctttatcattgaagggttagaactgtaatagacaaacaattgggaattaagaggctgccagatcctgttatatggagtaacaaaataggacattagatggatagatggagagagacagaaagagagatggatagatggatggattgagagatgatagataacagatagaggacaggaaagaggagagaaagaaagaaagggcacgagaaaaagaaaaagagagagagccacgtacagagagaaatgtgcatgggaagcagagccccggttccagtttcttcctgtagttcccctgcattcctattccttggttccatgagacaccccaagtccttacaacaaactctcattctaagctaaaagtttgtttctgttgcctgcacacaaagactcctaactaataaaacagtgaacaaaatgactgatatctgtaatagggtaacctgataacacttttaagattgattagattgagaccaaacagaagggaaaacacctaggcaccgtgaagacctatacagtcattaacattctcctgacttagaacctgtgataattagggagtgacctgcagcagtttccttcactctgtgagccatgcatgcaaatgaggggtgcaggagaggaatgcagacctggggcccacccgcattcaagtgcaattgatggggccattgcaggtcaccctgatctgcccagtgcccctagctgctgctggtagacttgtaggatcctataatttaggcttctcattaattcagatgaaccgtgactttggtgtgcccttctccattccagttatgtggaagaaatttcatctcttggtcttttatgcattttaagatttgatagcaacgctagtggctcatgcctgtaatccagcactttgggaggccgaggtgggcagatcacaaggtcaggagatcgagaccatcctggccaacatggtgaaacactgtctctactaaaaatacaaaaaaaaaaaaaattagctggcgtggtggcacgtacctgtaatctcagctactcaggaggctgaggcaggagaatcgcttgaaccagggagtcggagattgcagtgagctgagatcgcaccactgcattgcagcctggtgacagagtgagactccatctc

SEQ ID NO: 66954 - DNA, 4300 bp, Homo sapiens
  misc_feature (3564)..(3564): n is a, c, g, or t
  misc_feature (3580)..(3580): n is a, c, g, or t
  misc_feature (3598)..(3598): n is a, c, g, or t
  misc_feature (3632)..(3632): n is a, c, g, or t
  misc_feature (3637)..(3637): n is a, c, g, or t
  misc_feature (3671)..(3672): n is a, c, g, or t
  misc_feature (3713)..(3713): n is a, c, g, or t
  misc_feature (3835)..(3835): n is a, c, g, or t
  misc_feature (3864)..(3864): n is a, c, g, or t
gcttccagaacaggaggcagagcctttccgcagtttccctgcccacagcacacaccctgtgccctccgccccctggttcttggacactggggacatctggatgcggctagagcctgtgggggtggccgcagccctgggggactgttcccaggagtaggcctcggggccacaggggcgcggcctcgggcctggcactgcaacctcagggtgagcgcccttcgtgtgtgcggcaggagccggggcccctggctgtcagcaggcccccgagtccaggtaggtcccagacagcagtcccgggtgtggcagatgcagtgaggtccacttctgaggcgttccctggagtctgtgagttctggtcggaccttcgatggcattttaatgtgtctcttgtgtttgatttttagtaagactttgaccccgacgcaggcttcagtgattgccgcggatcagaagcctgagcactttggctcgagacaattaaggacgtgggatgaggctccgagacaggacgcggttctgcctggggatcctgaagataaaaagctttgaaaagtcgaattcatggtcgtggaagctgagcccatattaagagatgtcaggcgtccgacctccgatcatgaacgggcccctgcacccgcggcccctggtggcattgctggatggccgggactgcacagtggagatgcccatcctgaaggacgtggccactgtggccttctgcgacgcgcagtccacgcaggagatccatgagaaggtaccaccacgtggtcgcctggggctggcagaaccgcacgttggggggagttggagggacgggagcacggcaggcccgggccacagcaggtctgggtgccactggggcaggagcagcctctgtcccagtcgtcccgcgccgtcaggaggtggacacggggttttccctggacaccatcaggaggtggacatcgggtttgccctgagccccatcaggaggtggacacggggttttccctgtgccccatcaggaggtggacaccacgtttgtcctgagccccatcaggaggtggacattcggtttgccctgtgccccatcaggaggtggacacggggttttccctgagccccatcaggaggtggacactcgttttgccctgtgccccatcaggaggtggacacggggtttgtcctgagccccatcaggaggtggacacagggttttccctgagccccatcaggaggtggacacggggtttgtcctgagccccatcaggaggtggacacggggtttgtcctgagccccatcaggaggtggacacggggtttgtcctgagccccatcaggaggtgaacaccgggttttccctgagccccatcaggaggtggacacggggtttgtcctgagccccatcaggaggtggacacggggtttgtcctaagccccatcaggaggtggacacggggttttccctgcacaccatcaggaggtggacacggggtttgtcctgagccccatcaggaggtggacacggggttttccctgcacaccatcaggaggtgaacaccgggttttcactgagccccatcaggaggtggacacggggtttgtcctgagccccatcaggaggtggacacggggttttccctgagccccatcaggaggtggacatggggttttccctgagccccatcaggaggtggacactcggtttgtcctgagccccatcaggaggtggacaccgggttttccctgagccccatgaggaggtggacactcggtttgtcctgagccccatcaggaggtggacactcggtttgccctgtgctccatcaggaggtggacactcggtttatcctgagccccatcaggaggtggacactcggtttgccctgtgccccatcaggaggtggacactcggtttctcctgagcctcatcaggaggtggacacggggttttccctgagccccacactcggtttgtcctgagcgccatcaggaggtggacactgggtttgccctgtgccccatcaggagatggacgctcggtttctcctgagccccatcaggaggtggacacggggtttgccctgagccccatcaggaggtggacaccgggtttgccctgagccccatcaggaggtggacattcggtttgccctgagccccctcaggaggtggacaccgggtttgtcctgagccccatcaggaggtggacattcggtttgccctgagccccatcaggaggtggacaccgggtttgtcctgagccccatcaggaggtggacacttggtttgccctgtgccccatcaggaggtggacacttggtttgccctgtgccccatcaggaggtggacaccgggtttgccctgagccccatcaggaggtggacaccgggtttgccctgagccccatcaggaggtggacacggggtttgtcctgagccccatcaggaggtggacactcggtttgtcctgagccccatcaggaggtggacaccgggtttgccctgtggcttcttgattcattttcagttttttcccagagagcaggtcctcgggatgccagcttttgtggcgggggtggagtaaggtgcttcccccggccccagttgcgcggcggtcttcacacgggcggtctcggcattgcccgcggcctggctttggtccagcagtgagcagcctttgggcagctttcctgattcttgtttgctcaggagacccacaggctcctccgtgatgagaactaggttggtctggcttctacttgtagccagggatcagtgattcagagcagcttttccctgaagacagacgaagaagctgggcccccaggagctcacaggatagggccaggcccaggctgcagcctggagaggcctagaacctgcaggaacgggcgggccttgccaactctggcctggggtgttggctgttctggaagaagtagctgagaggctgaatttggctttggtggcatcactggcctgctgggtgtggggccctgccgggatatccatggcctgaaaggtgacatctggagtgagggtgacctggactctgacgcgccacacgatcggcacccagcctgctgatgtccaggaaaccttgaatctggatttttggggaccccacactgccggccccaggtgcctggcaaaagaagtaagacggcccctttagaggaagacagcgtcagccgaggcctcgggtcatttctacaaatcaccatctggtgcggggtccatcacatgcaaacagaggtaaccaggcagtcaaggagatgcgcaaaacgcagaagccagggaagcagtgccacccgcaggagctccccgtgctgcccacgagccgatcaccccagcccagcccccaggaggctgggccagacaccgacgaagagctgatgactctggaacggggcgtagcagcgttaggggagaaaatgagatgcggatctgagaaaacggcgaagctgatcggtggaactgaggggcgggtttaccagctgaccaggcggcagcggacaggagggaaggagagaacgcgggagagggcgagatgagaagggtcgtcttgcagaacttcagacangagagggaagggttgnaagtgtgatgacagcaanccctttccaaaatgacggaagaaaatctgatgtnaaaantgcgcgtgtctgccgggagcgtctgctgggcgtnngctctgaagattcttcacggtttctcacacgggtagatgcntgctgtaatgcagcccagtgccacactcctttatcccggagactcggaatgcgcgtccacacacagacctgcacgtcatgctccctagcagcttaactcaccatagcccaaaccagaaggangccccccaccggctgtccttcagtgggtnagtgccaggcaaatgctggccacctccctcggtgtcctcctcagcaacaggcatgaacgctgggtccctgccacaccctgggtgatctcggcagcatgatggcgagtgaagaagctggtttcaaggggtgcacactgtatgatctcttcatccccaggtgataggattagcgtgacggaaacagtggcccggggtgtaggtgggggggccgcgcaggccggtgtctggaatcggcacatgggcacgttggcacgtcacgtgggcatgtccacacgcatgcaaggggctgtgggtgaactgcccgtggtgcacacctgagggagttgtgtggcaccagctcggtttggacagtgccctttgttaggtacggttttctcattgggaagctggatttgtattaaagatgcacacgtaagaataaaaaagaggctcgtag

SEQ ID NO: 66955 - DNA, 630 bp, Homo sapiens
ggatcgacgaactgatgaaggaggaccgagctgggcagtggtggtgtcttgatcgggcatgtggaggggcaggtcaggtccctcccagctgtgctttgtgacacgtcaggccggtgcgtgatctcctgttttggcttctggccaggccactagcacccatccgaaaaccatcctcatgattgcatcctgccgtcagcttccctactgacctggctgctgagtctgcttgtgagcagctctcggttcaaggctgcagccctcgcttctgttgggcaggtgcctgtaggtgcagaagcaggccaccagctccatgcaggccactggccctcccctgcctggtacccaggcaggtctgctcaggggcgcagtggtcatgtcccagagccatgtgctctttgctgctttgtcctacctgctgccccgttcctcgcccaaaacaggctcctcccctgctaccttgtcctaggtgctccccaacccaaccagccagacgctgttcataccccttttgttacttctgagctgccctgtcccctgccatcaccttaattctcatcacttggacagctgcagtaaccacccagcaggtctccctgccttttctcagtgccaccaacaagaccctgatac

SEQ ID NO: 66956 - DNA, 354 bp, Homo sapiens
cccatccgaaaaccatcctcatgattgcatcctgccgtcagcttccctactgacctggctgctgagtctgcttgtgagcagctctcggttcaaggctgcagccctcgcttctgttgggcaggtgcctgtaggtgcagaagcaggccaccagctccatgcaggccactggccctcccctgcctggtacccaggcaggtctgctcaggggcgcagtggtcatgtcccagagccatgtgctctttgctgctttgtcctacctgctgccccgttcctcgcccaaaacaggctcctcccctgctacccttgcacaagcaccgaggacaagccctagactccacctcatccaagcaggag

SEQ ID NO: 66957 - DNA, 538 bp, Homo sapiens
tgacttcttgctgcattcttacataatggaagaggtaaacaagctttcttgggcctcttttataagaacactagtcctattcataagggctccaccctcatgatctagtcacctcctcaaggcctcacctcttaacgctgtcgcattggaaattaagtttcaacatacaaatttgtggcagggaaggaggacacaaacattcagaccgtaacaatccccaagtatttttatgctattataaatggaatttttttaagttttctaattgttcactgttagtctacagaaatataaattttgtttattgaccttgtgtcttaccattttgcattcacttattagttctagtaactttttgtagattctttaaaattttctatgtacaaaatcgttttatatgtaaacaaatagaattttacttcttttccagtttatatgttttttattactttttttgtatattacattggtgaagactccagtgaaatattgagtaactccgtaaaaagtagatatctttccctcatttttgatctta

SEQ ID NO: 66958 - DNA, 442 bp, Homo sapiens
ccggaattcccgggtcgactactactactaaatcgcggcgcgtcgactctagatgcttctctatttcttttttctttcattttttttctccctatcatcttgtattaaagatgcttcttaaagttgatttgtaatttccttaggattctgactgtggcatatcaattttacctttcaagagtgagagctaggctgggcatggtggtggcttatgctggtaatcccagcactttgggaggccaaggcaggagcccaggagttcaaaaccagcctgggcaacacagtgagagcccatctctacaaaaaaagaaaaaaaattagccaggcgtagtggcatgtgcctatggtcctaggtacttgggaggctaaagtacttgagcccagtagtttgaggctacactctagcctgggtgacagagtgataccctgtctcaaaaaaaaa

SEQ ID NO: 66959 - DNA, 352 bp, Homo sapiens
ccttgaatcaaagtcagagaagtcccatgtcttccaggaatagacctgtcttagtatccctgccggccttaactatttgctaggagcagcctgtataggaagcatgcctgggtgcaaatgcagataggtctcagtacagcaatggagcccttaggccattttgttccctgtggctggaggtgtgtgaggcacattctcctggccaccataggagccagaacaaagaccaggatgggtgtgacacagcctgatttaaatgccagtctgcgtctttaataacaggtctgacttgtaaagtaatacaagctgctgctcaggatggcactgctttcaggagtgtcttttgagtcag

SEQ ID NO: 66960 - DNA, 554 bp, Homo sapiens
agcacatctaggtactggggcccagggtgactctgagtggctcaagtcccctggccagatcctctccagatgggcccctggccatcttagccaacatcacctgattctgtttcctctgactctgtcctcaaaaggcagcatctgattgtgatttggtccagaaattcctggccagaatatttccagtgtggtgcatgtgaacttcccgccttcccttccttccctcctccctcctttcttcactggggagaaagaatttggcattcgagtatctcaccccgtcttgctaagcagtttagttagactgcaggccagtctctgtggtgtgaccaccccccagtggcaaggagctgccaaaactgagcttctgggcaagacgtgggcagagcaaagagagacccacacttggcacttcctgcccagaaaggacctgctcaggcctggctggcctttaccaccgtcatctccaggctttctgttcatccgtactttcaaagatttagtgatcaagtactatgtgtcaggaaccatgctcagcactcgataaaacagac

SEQ ID NO: 66961 - DNA, 528 bp, Homo sapiens
ccagcaatactgagcctatattctagcttagtaacaattggctggagctaaatgatgggccacagaccttcctgtttgtcagtctccattgaatacatatgctcttgcttcctgcctggaccgtggaaggtcttgcagtacaaaatagagatttgaggcattttggagttaagacaggccttccctggagtcctgttactatctcttaatagttatgtgccacagagtgatacactttaacttctgggcccagtgttctcatgtatgtagtcatacctacctttctaggttgtggtgaggtttaaacaaatacatatgaagtgctcagtattacctattacctggcatcaaaaaaagtgttcaataaaatgtacgtatcacatatgatcagttgagtttgttattgggctagattatataagtaaacgttgtcagttgaaagcctatggagtactcttatatatatttatatttttaatagatatattatagttatatatctgaggagtactcaattctcacaaaaaa

SEQ ID NO: 66962 - DNA, 424 bp, Homo sapiens
aaaaaagtgcccccaaagaccattgaacctctcattgtgaaacagaagctcatgagttttaaatagagaagaagtcaggaggggcctctgaacagtttgttctccaagcagccgagcacaccttcactaaggagaaccacattctaggatttagcattcttcttgaattacttatctcagatccaaaagttcaacttgctgaaggctttgatgtgtttatgcctaaaacttcactgtactctatattgtcaaactacactcgcacagaaagccttttgtttagaaaatggtgtgtgcattttttataacgactttggctaactccttacccaatagtaagagaaaaaaaggacttgatgacaaccaaaaaggactagaccaaaatactgtgtgtacaataaaagtgagaagtgttacagcattc

SEQ ID NO: 66963 - DNA, 2393 bp, Homo sapiens
ggcctaaggctgggggccgacggcggcggcagcagggagctgggaagcggagaagccgggagcgcggggctcagtcggggggcggcggcggcggcggctccggggatggcggcggctccgctgctgctgctgctgctgctcgtgcccgtgccgctgctgccgctgctggcccaagggcccggaggggcgctgggaaaccggcatgcggtgtactggaacagctccaaccagcacctgcggcgagagggctacaccgtgcaggtgaacgtgaacgactatctggatatttactgcccgcactacaacagctcgggggtgggccccggggcgggaccggggcccggaggcggggcagagcagtacgtgctgtacatggtgagccgcaacggctaccgcacctgcaacgccagccagggcttcaagcgctgggagtgcaaccggccgcacgccccgcacagccccatcaagttctcggagaagttccagcgctacagcgccttctctctgggctacgagttccacgccggccacgagtactactacatctccacgcccactcacaacctgcactggaagtgtctgaggatgaaggtgttcgtctgctgcgcctccacatcgcactccggggagaagccggtccccactctcccccagttcaccatgggccccaatgtgaagatcaacgtgctggaagactttgagggagagaaccctcaggtgcccaagcttgagaagagcatcagcgggaccagccccaaacgggaacacctgcccctggccgtgggcatcgccttcttcctcatgacgttcttggcctcctagctctgccccctcccctggggggggagagatggggcggggcttggaaggagcagggagcctttggcctctccaagggaagcctagtgggcctagacccctcctcccatggctagaagtggggcctgcaccatacatctgtgtccgccccctctaccccttccccccacgtagggcactgtagtggaccaagcacggggacagccatgggtcccgggcggccttgtggctctggtaatgtttggtaccaaacttgggggccaaaaagggcagtgctcaggactccctggcccctggtacctttccctgactcctggtgccctctccctttgtccccccagagagacatatgcccccagagagagcaaatcgaagcgtgggaggcacccccattgctctcctccaggggcagaacatggggaggggactagatgggcaaggggcagcactgcctgctgcttccttcccctgtttacagcaataagcacgtcctcctcccccactcccacttccaggattgtggtttggattgaaaccaagtttacaagtagacacccctgggggggcgggcagtggacaaggatggcaaggggtgggcattggggtgccaggcaggcatgtacagactctatatctctatatataatgtacagacagacagagtcccttccctctttaaccccctgacctttcttgacttccccttcagcttcagaccccttccccaccaggctaggccccccacacctgggggaccccctggcccctcttttgtcttctgtgaagacaggacctatgcaacgcacagacacttttggagaccgtaaaacaacagcgccccctcccttccagccctgagccgggaaccatctcccaggaccttgccctgctcaccctatgtggtcccacctatcctcctgggcctttttcaagtgctttggctgtgactttcatactctgctcttagtctaaaaaaaataaactggagataaaaataaaaaaaaaaaaaaaaaaaaaaaaaaaaaaaaaaaaaaaaaaaaaaaaaaaaaaaaaagaaacaaacaccacaaaacaacaaagaaaaaaaaaacaacaggggcggcgccgcgcgcggcaacaagacccccacgggggggcggccgcaatagcaccgccgccgccccgcttttgacggagggaggcgcacccacagagaagcgcgaccaacatataacaacaaccgaacacgacggggcccgaccaccaaacagcacacggaacacagcagggaggaacacaacgacgacagcaccagagcagcacaccacgacgcgcacaacgaccaccaccacacacgaacgcgggccgagcgcacacaacacgtggggcaaacaaccccgcccaagacggcggaacgacccgcccccgccagtcgaggccacccagccaccgcaccagataacagagcggcgacaacacggacgcaggcaccaccacacctaccgcccaaaagcagacgccagagaggacacgagagaaattgagagacaacacaggagggcccatactgcccagccaacatctacaacaggaca

SEQ ID NO: 66964 - DNA, 1974 bp, Homo sapiens
cgcggctgagaccagggaggaggcgtgggcacgggacgcctgaggggttcagctcagacgaggtcgtggggccaagagaggagtttggtgacagtcccaagtttgggctgcggagaatcgctgtttctccacgcccactcacaacctgcactggaagtgtctgaggatgaaggtgttcgtctgctgcgcctccacatcgcactccggggagaagccggtccccactctcccccagttcaccatgggccccaatgtgaagatcaacgtgctggaagactttgagggagagaaccctcaggtgcccaagcttgagaagagcatcagcgggaccagccccaaacgggaacacctgcccctggccgtgggcatcgccttcttcctcatgacgttcttggcctcctagctctgccccctcccctggggggggagagatggggcggggcttggaaggagcagggagcctttggcctctccaagggaagcctagtgggcctagacccctcctcccatggctagaagtggggcctgcaccatacatctgtgtccgccccctctaccccttccccccacgtagggcactgtagtggaccaagcacggggacagccatgggtcccgggcggccttgtggctctggtaatgtttggtaccaaacttgggggccaaaaagggcagtgctcaggactccctggcccctggtacctttccctgactcctggtgccctctccctttgtccccccagagagacatatgcccccagagagagcaaatcgaagcgtgggaggcacccccattgctctcctccaggggcagaacatggggaggggactagatgggcaaggggcagcactgcctgctgcttccttcccctgtttacagcaataagcacgtcctcctcccccactcccacttccaggattgtggtttggattgaaaccaagtttacaagtagacacccctgggggggcgggcagtggacaaggatggcaaggggtgggcattggggtgccaggcaggcatgtacagactctatatctctatatataatgtacagacagacagagtcccttccctctttaaccccctgacctttcttgacttccccttcagcttcagaccccttccccaccaggctaggccccccacacctgggggaccccctggcccctcttttgtcttctgtgaagacaggacctatgcaacgcacagacacttttggagaccgtaaaacaacagcgccccctcccttccagccctgagccgggaaccatctcccaggaccttgccctgctcaccctatgtggtcccacctatcctcctgggcctttttcaagtgctttggctgtgactttcatactctgctcttagtctaaaaaaaataaactggagataaaaataaaaaaaaaaaaaaaaaaaaaaaaaaaaaaaaaaaaaaaaaaaaaaaaaaaaaaaaaagaaacaaacaccacaaaacaacaaagaaaaaaaaaacaacaggggcggcgccgcgcgcggcaacaagacccccacgggggggcggccgcaatagcaccgccgccgccccgcttttgacggagggaggcgcacccacagagaagcgcgaccaacatataacaacaaccgaacacgacggggcccgaccaccaaacagcacacggaacacagcagggaggaacacaacgacgacagcaccagagcagcacaccacgacgcgcacaacgaccaccaccacacacgaacgcgggccgagcgcacacaacacgtggggcaaacaaccccgcccaagacggcggaacgacccgcccccgccagtcgaggccacccagccaccgcaccagataacagagcggcgacaacacggacgcaggcaccaccacacctaccgcccaaaagcagacgccagagaggacacgagagaaattgagagacaacacaggagggcccatactgcccagccaacatctacaacaggaca

SEQ ID NO: 66965 - DNA, 2256 bp, Homo sapiens
gggggcagagacagggctgagccgcgaggaagctcggaggaaaagtcggaaggctacgcggaccctggggaggggctgcggagcggtcagatggaaagcggctttgctctggggtttcttctctctgagccgcttcctcttccccacagcctgcggcgagagggctacaccgtgcaggtgaacgtgaacgactatctggatatttactgcccgcactacaacagctcgggggtgggccccggggcgggaccggggcccggaggcggggcagagcagtacgtgctgtacatggtgagccgcaacggctaccgcacctgcaacccccatcaagttctcggagaagttccagcgctacagcgccttctctctgggctacgagttccacgccggccacgagtactactacatctccacgcccactcacaacctgcactggaagtgtctgaggatgaaggtgttcgtctgctgcgcctccacatcgcactccggggagaagccggtccccactctcccccagttcaccatgggccccaatgtgaagatcaacgtgctggaagactttgagggagagaaccctcaggtgcccaagcttgagaagagcatcagcgggaccagccccaaacgggaacacctgcccctggccgtgggcatcgccttcttcctcatgacgttcttggcctcctagctctgccccctcccctggggggggagagatggggcggggcttggaaggagcagggagcctttggcctctccaagggaagcctagtgggcctagacccctcctcccatggctagaagtggggcctgcaccatacatctgtgtccgccccctctaccccttccccccacgtagggcactgtagtggaccaagcacggggacagccatgggtcccgggcggccttgtggctctggtaatgtttggtaccaaacttgggggccaaaaagggcagtgctcaggactccctggcccctggtacctttccctgactcctggtgccctctccctttgtccccccagagagacatatgcccccagagagagcaaatcgaagcgtgggaggcacccccattgctctcctccaggggcagaacatggggaggggactagatgggcaaggggcagcactgcctgctgcttccttcccctgtttacagcaataagcacgtcctcctcccccactcccacttccaggattgtggtttggattgaaaccaagtttacaagtagacacccctgggggggcgggcagtggacaaggatggcaaggggtgggcattggggtgccaggcaggcatgtacagactctatatctctatatataatgtacagacagacagagtcccttccctctttaaccccctgacctttcttgacttccccttcagcttcagaccccttccccaccaggctaggccccccacacctgggggaccccctggcccctcttttgtcttctgtgaagacaggacctatgcaacgcacagacacttttggagaccgtaaaacaacagcgccccctcccttccagccctgagccgggaaccatctcccaggaccttgccctgctcaccctatgtggtcccacctatcctcctgggcctttttcaagtgctttggctgtgactttcatactctgctcttagtctaaaaaaaataaactggagataaaaataaaaaaaaaaaaaaaaaaaaaaaaaaaaaaaaaaaaaaaaaaaaaaaaaaaaaaaaaagaaacaaacaccacaaaacaacaaagaaaaaaaaaacaacaggggcggcgccgcgcgcggcaacaagacccccacgggggggcggccgcaatagcaccgccgccgccccgcttttgacggagggaggcgcacccacagagaagcgcgaccaacatataacaacaaccgaacacgacggggcccgaccaccaaacagcacacggaacacagcagggaggaacacaacgacgacagcaccagagcagcacaccacgacgcgcacaacgaccaccaccacacacgaacgcgggccgagcgcacacaacacgtggggcaaacaaccccgcccaagacggcggaacgacccgcccccgccagtcgaggccacccagccaccgcaccagataacagagcggcgacaacacggacgcaggcaccaccacacctaccgcccaaaagcagacgccagagaggacacgagagaaattgagagacaacacaggagggcccatactgcccagccaacatctacaacaggaca

SEQ ID NO: 66966 - DNA, 1896 bp, Homo sapiens
cgcggctgagaccagggaggaggcgtgggcacgggacgcctgaggggttcagctcagacgaggtcgtggggccaagagaggagtttggtgacagtcccaagtttgggctgcggagaatcgctgtttctccacgcccactcacaacctgcactggaagtgtctgaggatgaaggtgttcgtctgctgcgcctccaaagactttgagggagagaaccctcaggtgcccaagcttgagaagagcatcagcgggaccagccccaaacgggaacacctgcccctggccgtgggcatcgccttcttcctcatgacgttcttggcctcctagctctgccccctcccctggggggggagagatggggcggggcttggaaggagcagggagcctttggcctctccaagggaagcctagtgggcctagacccctcctcccatggctagaagtggggcctgcaccatacatctgtgtccgccccctctaccccttccccccacgtagggcactgtagtggaccaagcacggggacagccatgggtcccgggcggccttgtggctctggtaatgtttggtaccaaacttgggggccaaaaagggcagtgctcaggactccctggcccctggtacctttccctgactcctggtgccctctccctttgtccccccagagagacatatgcccccagagagagcaaatcgaagcgtgggaggcacccccattgctctcctccaggggcagaacatggggaggggactagatgggcaaggggcagcactgcctgctgcttccttcccctgtttacagcaataagcacgtcctcctcccccactcccacttccaggattgtggtttggattgaaaccaagtttacaagtagacacccctgggggggcgggcagtggacaaggatggcaaggggtgggcattggggtgccaggcaggcatgtacagactctatatctctatatataatgtacagacagacagagtcccttccctctttaaccccctgacctttcttgacttccccttcagcttcagaccccttccccaccaggctaggccccccacacctgggggaccccctggcccctcttttgtcttctgtgaagacaggacctatgcaacgcacagacacttttggagaccgtaaaacaacagcgccccctcccttccagccctgagccgggaaccatctcccaggaccttgccctgctcaccctatgtggtcccacctatcctcctgggcctttttcaagtgctttggctgtgactttcatactctgctcttagtctaaaaaaaataaactggagataaaaataaaaaaaaaaaaaaaaaaaaaaaaaaaaaaaaaaaaaaaaaaaaaaaaaaaaaaaaaagaaacaaacaccacaaaacaacaaagaaaaaaaaaacaacaggggcggcgccgcgcgcggcaacaagacccccacgggggggcggccgcaatagcaccgccgccgccccgcttttgacggagggaggcgcacccacagagaagcgcgaccaacatataacaacaaccgaacacgacggggcccgaccaccaaacagcacacggaacacagcagggaggaacacaacgacgacagcaccagagcagcacaccacgacgcgcacaacgaccaccaccacacacgaacgcgggccgagcgcacacaacacgtggggcaaacaaccccgcccaagacggcggaacgacccgcccccgccagtcgaggccacccagccaccgcaccagataacagagcggcgacaacacggacgcaggcaccaccacacctaccgcccaaaagcagacgccagagaggacacgagagaaattgagagacaacacaggagggcccatactgcccagccaacatctacaacaggaca

SEQ ID NO: 66967 - DNA, 850 bp, Homo sapiens
  misc_feature (27)..(27): n is a, c, g, or t
cccgagaatcgtgccactgcactcgancctgggtgatggcccctcttttgtcttctgtgaagacaggacctatgcaacgcacagacacttttggagaccgtaaaacaacagcgccccctcccttccagccctgagccgggaaccatctcccaggaccttgccctgctcaccctatgtggtcccacctatcctcctgggcctttttcaagtgctttggctgtgactttcatactctgctcttagtctaaaaaaaataaactggagataaaaataaaaaaaaaaaaaaaaaaaaaaaaaaaaaaaaaaaaaaaaaaaaaaaaaaaaaaaaaagaaacaaacaccacaaaacaacaaagaaaaaaaaaacaacaggggcggcgccgcgcgcggcaacaagacccccacgggggggcggccgcaatagcaccgccgccgccccgcttttgacggagggaggcgcacccacagagaagcgcgaccaacatataacaacaaccgaacacgacggggcccgaccaccaaacagcacacggaacacagcagggaggaacacaacgacgacagcaccagagcagcacaccacgacgcgcacaacgaccaccaccacacacgaacgcgggccgagcgcacacaacacgtggggcaaacaaccccgcccaagacggcggaacgacccgcccccgccagtcgaggccacccagccaccgcaccagataacagagcggcgacaacacggacgcaggcaccaccacacctaccgcccaaaagcagacgccagagaggacacgagagaaattgagagacaacacaggagggcccatactgcccagccaacatctacaacaggaca

SEQ ID NO: 66968 - DNA, 2007 bp, Homo sapiens
ggcctaaggctgggggccgacggcggcggcagcagggagctgggaagcggagaagccgggagcgcggggctcagtcggggggcggcggcggcggcggctccggggatggcggcggctccgctgctgctgctgctgctgctcgtgcccgtgccgctgctgccgctgctggcccaagggcccggaggggcgctgggaaaccggcatgcggtgtactggaacagctccaaccagcacctgcggcgagagggctacaccgtgcaggtgaacgtgaacgactatctggatatttactgcccgcactacaacagctcgggggtgggccccggggcgggaccggggcccggaggcggggcagagcagtacgtgctgtacatggtgagccgcaacggctaccgcacctgcaacgccagccagggcttcaagcgctgggagtgcaaccggccgcacgccccgcacagccccatcaagttctcggagaagttccagcgctacagcgccttctctctgggctacgagttccacgccggccacgagtactactacatctccacgcccactcacaacctgcactggaagtgtctgaggatgaaggtgttcgtctgctgcgcctccacatcgcactccggggagaagccggtccccactctcccccagttcaccatgggccccaatgtgaagatcaacgtgctggaagactttgagggagagaaccctcaggtgcccaagcttgagaagagcatcagcgggaccagccccaaacgggaacacctgcccctggccgtgggcatcgccttcttcctcatgacgttcttggcctcctagctctgccccctcccctggggggggagagatggggcggggcttggaaggagcagggagcctttggcctctccaagggaagcctagtgggcctagacccctcctcccatggctagaagtggggcctgcaccatacatctgtgtccgccccctctaccccttccccccacgtagggcactgtagtggaccaagcacggggacagccatgggtcccgggcggccttgtggctctggtaatgtttggtaccaaacttgggggccaaaaagggcagtgctcaggactccctggcccctggtacctttccctgactcctggtgccctctccctttgtccccccagagagacatatgcccccagagagagcaaatcgaagcgtgggaggcacccccattgctctcctccaggggcagaacatggggaggggactagatgggcaaggggcagcactgcctgctgcttccttcccctgtttacagcaataagcacgtcctcctcccccactcccacttccaggattgtggtttggattgaaaccaagtttacaatgctttggctgtgactttcatactctgctcttagtctaaaaaaaataaactggagataaaaataaaaaaaaaaaaaaaaaaaaaaaaaaaaaaaaaaaaaaaaaaaaaaaaaaaaaaaaaagaaacaaacaccacaaaacaacaaagaaaaaaaaaacaacaggggcggcgccgcgcgcggcaacaagacccccacgggggggcggccgcaatagcaccgccgccgccccgcttttgacggagggaggcgcacccacagagaagcgcgaccaacatataacaacaaccgaacacgacggggcccgaccaccaaacagcacacggaacacagcagggaggaacacaacgacgacagcaccagagcagcacaccacgacgcgcacaacgaccaccaccacacacgaacgcgggccgagcgcacacaacacgtggggcaaacaaccccgcccaagacggcggaacgacccgcccccgccagtcgaggccacccagccaccgcaccagataacagagcggcgacaacacggacgcaggcaccaccacacctaccgcccaaaagcagacgccagagaggacacgagagaaattgagagacaacacaggagggcccatactgcccagccaacatctacaacaggaca

SEQ ID NO: 66969 - DNA, 2309 bp, Homo sapiens
gggggcagagacagggctgagccgcgaggaagctcggaggaaaagtcggaaggctacgcggaccctggggaggggctgcggagcggtcagatggaaagcggctttgctctggggtttcttctctctgagccgcttcctcttccccacagcctgcggcgagagggctacaccgtgcaggtgaacgtgaacgactatctggatatttactgcccgcactacaacagctcgggggtgggccccggggcgggaccggggcccggaggcggggcagagcagtacgtgctgtacatggtgagccgcaacggctaccgcacctgcaacgccagccagggcttcaagcgctgggagtgcaaccggccgcacgccccgcacagccccatcaagttctcggagaagttccagcgctacagcgccttctctctgggctacgagttccacgccggccacgagtactactacatctccacgcccactcacaacctgcactggaagtgtctgaggatgaaggtgttcgtctgctgcgcctccacatcgcactccggggagaagccggtccccactctcccccagttcaccatgggccccaatgtgaagatcaacgtgctggaagactttgagggagagaaccctcaggtgcccaagcttgagaagagcatcagcgggaccagccccaaacgggaacacctgcccctggccgtgggcatcgccttcttcctcatgacgttcttggcctcctagctctgccccctcccctggggggggagagatggggcggggcttggaaggagcagggagcctttggcctctccaagggaagcctagtgggcctagacccctcctcccatggctagaagtggggcctgcaccatacatctgtgtccgccccctctaccccttccccccacgtagggcactgtagtggaccaagcacggggacagccatgggtcccgggcggccttgtggctctggtaatgtttggtaccaaacttgggggccaaaaagggcagtgctcaggactccctggcccctggtacctttccctgactcctggtgccctctccctttgtccccccagagagacatatgcccccagagagagcaaatcgaagcgtgggaggcacccccattgctctcctccaggggcagaacatggggaggggactagatgggcaaggggcagcactgcctgctgcttccttcccctgtttacagcaataagcacgtcctcctcccccactcccacttccaggattgtggtttggattgaaaccaagtttacaagtagacacccctgggggggcgggcagtggacaaggatggcaaggggtgggcattggggtgccaggcaggcatgtacagactctatatctctatatataatgtacagacagacagagtcccttccctctttaaccccctgacctttcttgacttccccttcagcttcagaccccttccccaccaggctaggccccccacacctgggggaccccctggcccctcttttgtcttctgtgaagacaggacctatgcaacgcacagacacttttggagaccgtaaaacaacagcgccccctcccttccagccctgagccgggaaccatctcccaggaccttgccctgctcaccctatgtggtcccacctatcctcctgggcctttttcaagtgctttggctgtgactttcatactctgctcttagtctaaaaaaaataaactggagataaaaataaaaaaaaaaaaaaaaaaaaaaaaaaaaaaaaaaaaaaaaaaaaaaaaaaaaaaaaaagaaacaaacaccacaaaacaacaaagaaaaaaaaaacaacaggggcggcgccgcgcgcggcaacaagacccccacgggggggcggccgcaatagcaccgccgccgccccgcttttgacggagggaggcgcacccacagagaagcgcgaccaacatataacaacaaccgaacacgacggggcccgaccaccaaacagcacacggaacacagcagggaggaacacaacgacgacagcaccagagcagcacaccacgacgcgcacaacgaccaccaccacacacgaacgcgggccgagcgcacacaacacgtggggcaaacaaccccgcccaagacggcggaacgacccgcccccgccagtcgaggccacccagccaccgcaccagataacagagcggcgacaacacggacgcaggcaccaccacacctaccgcccaaaagcagacgccagagaggacacgagagaaattgagagacaacacaggagggcccatactgcccagccaacatctacaacaggaca

SEQ ID NO: 66970 - DNA, 413 bp, Homo sapiens
gatacctatttctgtttttagtaaacaaagcttattgaaaaagtcttttttgtatttgctaagaatgtttttcattaacaatggctattttctaatattggagtacactgatgcttccatgggtcattgatgtcagcaaagcttgcttgcctaggcattcttatttgtataaattattctgatggtaatccggctatttccaaacacagtgatctcttccgagttcatcctcattctttgtagctggctccttctttatggccaaatcacttggctctgggtggttttgtttctattgcttctcaaacttccattctaatttgaatttgcatttgtaaaatcactgcccaaatttctgatcgtaatctagcaagcgtgtaaagacaataaaaacaaaagaagttgcataattt

SEQ ID NO: 66971 - DNA, 1122 bp, Homo sapiens
gttccctctcactcatggagaggctttcaaaaagatcttataaatccccaaaatgtaataactcctaaagcctctttgtaatttcccaattctacctcatgtcttttactgtggtacaaaagggctaagatgacgagtttctgataatgtctttttttttgtagagactgggatcctttgaaaatccaacatgtgtaccaccacttacaggtttaagtttgtgctctgcaaactcatttgaggagtaatagatagagttaggcttgtagagatcagtttacctgtcaaatggatgggctttatgagaggagttataaatctagaaagaagaagtaaaagccaatacactgatctttgatcactcaaaccatttttcccaagggcagggactaaacaggggtttccagtcttttggcttccctggggcacattggaagaagaagaattgtcttgggccacacataaaataaactaacattaatgatagctgatgagctaaaaaaaaaaaaaaaaaaaagttgtaaaaaaaaaatctcataatgttttaagaaagtttacaaatttgtgttaggccacattcaaagccatcctgagccacaggttggacaagcttggactagcagaaggtgacagataatggtttttacatgagacctcattataatcaatatcaggtctcaatatggttataagattataatcttcatgtgtcaattccatctctttattttgataggtcaatgcttttaaaaaatagtaaactcttaaaattattattaggaaataagctttgtgtaatttttctggtatagtgaaagattatactcattcattcacattctttcctaagctcataattccttgtacttgcaagacggctaagtaagaatagaaatttggtttgtgggataatataatttaagttatagcaaaattctgaaacatctctagagtggtatataggttttcagtgtttccatatccatctaccacccctgtggggctggggaagggttgttgactgggactggactctcagtcttctgggtctgatgtgctcttgacctgataccattccaaagcttactctttgtagaaggaataaattcagggctttcttct

SEQ ID NO: 66972 - DNA, 944 bp, Homo sapiens
gcggtcgctcataaagggtgcagcatttacaggtttaagtttgtgctctgcaaactcatttgaggagtaatagatagagttaggcttgtagagatcagtttacctgtcaaatggatgggctttatgagaggagttataaatctagaaagaagaagtaaaagccaatacactgatctttgatcactcaaaccatttttcccaagggcagggactaaacaggggtttccagtcttttggcttccctggggcacattggaagaagaagaattgtcttgggccacacataaaataaactaacattaatgatagctgatgagctaaaaaaaaaaaaaaaaaaaagttgtaaaaaaaaaatctcataatgttttaagaaagtttacaaatttgtgttaggccacattcaaagccatcctgagccacaggttggacaagcttggactagcagaaggtgacagataatggtttttacatgagacctcattataatcaatatcaggtctcaatatggttataagattataatcttcatgtgtcaattccatctctttattttgataggtcaatgcttttaaaaaatagtaaactcttaaaattattattaggaaataagctttgtgtaatttttctggtatagtgaaagattatactcattcattcacattctttcctaagctcataattccttgtacttgcaagacggctaagtaagaatagaaatttggtttgtgggataatataatttaagttatagcaaaattctgaaacatctctagagtggtatataggttttcagtgtttccatatccatctaccacccctgtggggctggggaagggttgttgactgggactggactctcagtcttctgggtctgatgtgctcttgacctgataccattccaaagcttactctttgtagaaggaataaattcagggctttcttct

SEQ ID NO: 66973 - DNA, 466 bp, Homo sapiens
tgtcttcgagcacttgagcgtttgctccccattgtccaattttggtgaagcaaagccactgtttcccttttggacatgtagccccattatgactgccagatactcctagattttttactttataataactctttcctgattcaacacattcctcgactaaggttccacaataggatctttctatatgactatggtgagtgaaggactgttgacatgagtatggtgagtgaaggattgttgcatctttcctctgtggtggaaagactgataacactcacagcagctctgaagggctgctgtgggcagcagggcggctactgaccgtataaggatcgtggtgagggatattcccgtattaagacttttggttggaagtgaggcacagcatcggattgggtagatacaggccatctctggaagcaggtgtttagtcttcctcgtgttttggttttaagaaaaagaaaat

SEQ ID NO: 66974 - DNA, 805 bp, Homo sapiens
tggccgcggagggggcgaactgggttccggccctcggaggctgacggaaggcggtggctgaggagcggcgcctctggttgagcgctcgccgtgtgtcccgcacctgtctgtcctgccgccgcccggtaagagtctcactctgttgccaaggctggagtgcagtggcgggatctcggctaactgcaacctccccatcccgggttcaagcgattctcctgcctcagcctcccgagtagctgcgattacagacatttgccaccatgcccggcacagcacagcaccgcacatctccagtcggactggctacatttcaagggctcaaccatcacgcgttaccagtggctactgcatcagactgtgcagtgctagatggggagtcagaagagaaaccaagtgatttccatgtcaagtggtgaacaggctaagaagaaaaacagagtctcgctgcatcccccaggctggagtacagtggtatgatcttggctcactgcaacctctgcctcctaggttcaagtgattctcctgcctcagtctcccgagtagctgggattacaggcgcccaccaccatgcccggctaatttttgtatttttagtagagatggggtttcactatgttggccaggctggtctcaaactcctgacctcaggtgatctgcctgacttggcctcccaaagtgctgggattacaggcatgagccaccttgcctggcctcttcctaatgattttttaaagtacatcttgttttctctgtcttactttatcataaaaatatatgatacaaataaaatacagaatatgtgtta

SEQ ID NO: 66975 - DNA, 1826 bp, Homo sapiens
gagacagattctcactcagttgcccaggctggagtgcagtggtgcagtcttggctcactgcaacctctgcctcctgggttaaagcgattctcatgcctcagcctccctagtagctgagactacaggcgtgcaccaccacgcccagctaatttttgtatttttagtagagacaggatttcaccatgttcaccatgttggtcaggctggtcttgaactcctggcctcaagtgatctgcccgcctcgacctcccagagtgctgggattataggtgtgagccactaagcctggctgagacaactagtttcccttaactcattggaattctctaggattaggagaattccacagagcctatatgatattatagctcaacatttagtataccaaaggcatacccgtgtaaatctaggagttatttccagagattgttttaaggagcagtcttatattcagggtagaaagttatgattggatctgctgttaaggagaacaaaggagcttctaaaggtttgggaggtttactggtagtaactattctaggaaatatttatgttttaaggtgatgttcacatgggttctttagaaggaacatagtcaagtgtgatggattaactctatatagtctttctcctcttgtgcgtgtaggaaatctgacctgcagtgtcagttgatgtgacaagagataaagaaagcacagtattttaaaatctaaagcagattcctttcttagaaaacaataggaaaaaattatagatggatgtctttgctgaaatctaacaattagctcatattccatgagaaagagtggcctaagaattatttcatgttacctagccttctgaagctactcacttgatgtgcctagcactttgaaactaaccttttctttctttgttcatgacagtttaattccaaatatttactattttctcttgtaactgttagaacagttccttttgacattaatttttgcctacatatatatttttaagttgagaccaaatcggtgaagtgttgagcaagtaacatttatgatgtgtgtatattggaacaaatgtaaaagggttacaaagattagaaacagagtcataaaaaatggcttgatttataaaggcattacttttggtgctttatataatggcatatattgaactaaaaatttgtatatacagtatgtcagcatttcttagtaacttctcttgaatccatttttaatatctaatattgtacaggttggggagttacattcttcaggccaatactatccagactatataaatttataaaataaattgaaaaattcattcccctgtattcaagaccaaagcacataaatgctaatgtagggctcagaggggaaatacagttctcctgcatatttgagaaaatgtgaagtcctttcaagaaaatctaataaacataataatcatagcctgctgacactaaggaaaaaggacctcattcactctttcttttatgcagtgatttactggtccctactgatttccaaattggatcacgatagtaaattatccatgctggtacctgtgaaagtaagccctgggatccatatttgttttgtgttctgcttaaatcagcaagaatgataaatttgatggtgtgaaattggaagtatcaagggctttctttggtgattgagggaaataatgtctctacttgtaatttattgtgaccctttttcactgtatatgctttgtatgtctaatatttatttcaatgcaaattcaattgttccttcatctgtattgttatatctaagattttattgatgttaaaatctaattgtggaataaaaatctctctg

SEQ ID NO: 66976 - DNA, 2085 bp, Homo sapiens
gagacagattctcactcagttgcccaggctggagtgcagtggtgcagtcttggctcactgcaacctctgcctcctgggttaaagcgattctcatgcctcagcctccctagtagctgagactacaggcgtgcaccaccacgcccagctaatttttgtatttttagtagagacaggatttcaccatgttcaccatgttggtcaggctggtcttgaactcctggcctcaagtgatctgcccgcctcgacctcccagagtgctgggattataggtgtgagccactaagcctggctgagacaactagtttcccttaactcattggaattctctaggattaggagaattccacagagcctatatgatattatagctcaacatttagtataccaaaggcatacccgtgtaaatctaggagttatttccagagattgttttaaggagcagtcttatattcagggtagaaagttatgattggatctgctgttaaggagaacaaaggagcttctaaaggtttgggaggtttactggtagtaactattctaggaaatatttatgttttaaggtgatgttcacatgggttctttagaaggaacatagtcaagtgtgatggattaactctatatagtctttctcctcttgtgcgtgtaggaaatctgacctgcagtgtcagttgatgtgacaagagataaagaaagcacagtattttaaaatctaaagcagattcctttcttagaaaacaataggaaaaaattatagatggatgtctttgctgaaatctaacaattagctcatattccatgagaaagagtggcctaagaattatttcatgttacctagccttctgaagctactcacttgatgtgcctagcactttgaaactaaccttttctttctttgttcatgacagtttaattccaaatatttactattttctcttgtaactgttagaacagttccttttgacattaatttttgcctacatatatatttttaagttgagaccaaatcggtgaagtgttgagcaagtaacatttatgatgtgtgtatattggaacaaatgtaaaagggttacaaagattagaaacagagtcataaaaaatggcttgatttataaaggcattacttttggtgctttatataatggcatatattgaactaaaaatttgtatatacagtatgtcagcatttcttagtaacttctcttgaatccatttttaatatctaatattgtacaggttggggagttacattcttcaggccaatactatccagactatataaatttataaaataaattgaaaaattcattcccctgtattcaagaccaaagcacataaatgctaatgtagggctcagaggggaaatacagttctcctgcatatttgagaaaatgtgaagtcctttcaagaaaatctaataaacataataatcatagcctgctgacactaaggaaaaaggacctcattcactctttcttttatgcagtgatttactggtccctactgatttccaaattggatcacgatagtaaattatccatgctggtacctgtgaaagtaagccctgggatccatatttgttttgtgttctgcttaaatcagcaagaatgataaatttgatggtgtgaaattggaagtatcaagggctttctttggtgattgagggaaataatgtctctacttgtaatttattgtgaccctttttcactgtatatgctttgtatgtctaatatttatttcaatgcaaattcaattgttccttcatctgtattgttatatctaagattttattgatgttaaaatctaattgtggaataaaaatctctctggaatttagcagatacaaaaatgttatcttgcaaaagaactaagaacatttgtagttagaaatcagctttcctttgagcttaattgcctttttgttagaataaggtgaatttgaacacactcctcttatcctcagcccatcacaaataatagagatgccatgattttgaggtctgatgtgaaactggtaaaaatgtgatctaaggtgtaactggaaaaaaaaaggaaagaaaaattacattgatgcctcagctgtttgct

SEQ ID NO: 66977 - DNA, 1494 bp, Homo sapiens
gagacagattctcactcagttgcccaggctggagtgcagtggtgcagtcttggctcactgcaacctctgcctcctgggttaaagcgattctcatgcctcagcctccctagtagctgagactacaggcgtgcaccaccacgcccagctaatttttgtatttttagtagagacaggatttcaccatgttcaccatgttggtcaggctggtcttgaactcctggcctcaagtgatctgcccgcctcgacctcccagagtgctgggattataggtgtgagccactaagcctggctgagacaactagtttcccttaactcattggaattctctaggattaggagaattccacagagcctatatgatattatagctcaacatttagtataccaaaggcatacccgtgtaaatctaggagttatttccagagattgttttaaggagcagtcttatattcagggtagaaagttatgattggatctgctgttaaggagaacaaaggagcttctaaaggtttgggaggtttactggtagtaactattctaggaaatatttatgttttaaggtgatgttcacatgggttctttagaaggaacatagtcaagtgtgatggattaactctatatagtctttctcctcttgtgcgtgtaggaaatctgacctgcagtgtcagttgatgtgacaagagataaagaaagcacagtattttaaaatctaaagcagattcctttcttagaaaacaataggaaaaaattatagatggatgtctttgctgaaatctaacaattagctcatattccatgagaaagagtggcctaagaattatttcatgttacctagccttctgaagctactcacttgatgtgcctagcactttgaaactaaccttttctttctttgttcatgacagtttaattccaaatatttactattttctcttgtaactgttagaacagttccttttgacattaatttttgcctacatatatatttttaagttgagaccaaatcggtgaagtgttgagcaagtaacatttatgatgtgtgtatattggaacaaatgtacacacaggggttaccaacagacttcagaaaaccaggagctccataaccaccacactggccgtttgtcatatctaccacaccgcgcccactcactctatgagatggcctctcactacttaattgggccattagtactttggaaacctacacaccactattcggtactactcagcaacgtcacttgttccaagccaattttacctttaaacctcacaacttttcctcccttatgacacattacccaaattcttattcacataacttcctacaacattaatttgtctacaccaaaggccttggcaagcacaagctctcaccgctttatccctttcaccacggatcacacaacttcacagtcaaatcccaaggcacacctcacattactcacacaccttatccgttcacacacacctctcagcactctctgcacacac

SEQ ID NO: 66978 - DNA, 892 bp, Homo sapiens
gagacagattctcactcagttgcccaggctggagtgcagtggtgcagtcttggctcactgcaacctctgcctcctgggttaaagcgattctcatgcctcagcctccctagtagctgagactacaggcgtgcaccaccacgcccagctaatttttgtatttttagtagagacaggatttcaccatgttcaccatgttggtcaggctggtcttgaactcctggcctcaagtgatctgcccgcctcgacctcccagagtgctgggattataggtgtgagccactaagcctggctgagacaactagtttcccttaactcattggaattctctaggattaggagaattccacagagcctatatgatattatagctcaacatttagtataccaaaggcatacccgtgtaaatctaggagttatttccagagattgttttaaggagcagtcttatattcagggtagaaagttatgattggatctgctgttaaggagaacaaaggagcttctaaaggtttgggaggtttactggtagtaactattctaggaaatatttatgttttaaggtgatgttcacatgggttctttagaaggaacatagtcaagtgtgatggattaactctatatagtctttctcctcttgtgcgtgtaggaaatctgacctgcagtgtcagttgatgtgacaagagataaagaaagcacagtattttaaaatctaaagcagattcctttcttagaaaacaataggaaaaaattcttaggccactctttctcatggaatatgagctaattgttagatttcagcaaagacatccatctataattttttcctattgttttctaagaaaggaatctgctttagattttagtcgacgcggccgcgaatttagtagtagta

SEQ ID NO: 66979 - DNA, 620 bp, Homo sapiens
gagacagattctcactcagttgcccaggctggagtgcagtggtgcagtcttggctcactgcaacctctgcctcctgggttaaagcgattctcatgcctcagcctccctagtagctgagactacaggcgtgcaccaccacgcccagctaatttttgtatttttagtagagacaggatttcaccatgttcaccatgttggtcaggctggtcttgaactcctggcctcaagtgatctgcccgcctcgacctcccagagtgctgggattataggtgtgagccactaagcctggctgagacaactagtttcccttaactcattggaattctctaggattaggagaattccacagagcctatatgatattatagctcaacatttagtataccaaaggcatacccgtgtaaatctaggagttatttccagagattgttttaaggagcagtcttatattcagggtagaaagttatgattggatctgctgttaaggagaacaaaggagcttctaaaggtttgggaggctgaggcaggagaatggcgtgaacccgggaggcggagcttgcagtgagccgagatcgcgccactgcactccagcctgggcgacagagcgaggctccgtctca

SEQ ID NO: 66980 - DNA, 1573 bp, Homo sapiens
ccagcgcgttaatagctatagatgtcgaataccaaggggtggacaaataatccctttccctcattggaattctctaggattaggagaattccacagagcctatatgatattatagctcaacatttagtataccaaaggcatacccgtgtaaatctaggagttatttccagagattgttttaaggagcagtcttatattcagggtagaaagttatgattggatctgctgttaaggagaacaaaggagcttctaaaggtttgggaggtttactggtagtaactattctaggaaatatttatgttttaaggtgatgttcacatgggttctttagaaggaacatagtcaagtgtgatggattaactctatatagtctttctcctcttgtgcgtgtaggaaatctgacctgcagtgtcagttgatgtgacaagagataaagaaagcacagtattttaaaatctaaagcagattcctttcttagaaaacaataggaaaaaattatagatggatgtctttgctgaaatctaacaattagctcatattccatgagaaagagtggcctaagaattatttcatgttacctagccttctgaagctactcacttgatgtgcctagcactttgaaactaaccttttctttctttgttcatgacagtttaattccaaatatttactattttctcttgtaactgttagaacagttccttttgacattaatttttgcctacatatatatttttaagttgagaccaaatcggtgaagtgttgagcaagtaacatttatgatgtgtgtatattggaacaaatgtaaaagggttacaaagattagaaacagagtcataaaaaatggcttgatttataaaggcattacttttggtgctttatataatggcatatattgaactaaaaatttgtatatacagtatgtcagcatttcttagtaacttctcttgaatccatttttaatatctaatattgtacaggttggggagttacattcttcaggccaatactatccagactatataaatttataaaataaattgaaaaattcattcccctgtattcaagaccaaagcacataaatgctaatgtagggctcagaggggaaatacagttctcctgcatatttgagaaaatgtgaagtcctttcaagaaaatctaataaacataataatcatagcctgctgacactaaggaaaaaggacctcattcactctttcttttatgcagtgatttactggtccctactgatttccaaattggatcacgatagtaaattatccatgctggtacctgtgaaagtaagccctgggatccatatttgttttgtgttctgcttaaatcagcaagaatgataaatttgatggtgtgaaattggaagtatcaagggctttctttggtgattgagggaaataatgtctctacttgtaatttattgtgaccctttttcactgtatatgctttgtatgtctaatatttatttcaatgcaaattcaattgttccttcatctgtattgttatatctaagattttattgatgttaaaatctaattgtggaataaaaatctctctg

SEQ ID NO: 66981 - DNA, 1802 bp, Homo sapiens
tgctgggattacaggcatgagccacagtgccggacattatgggaaaattttttgagggactaaactaatctccacaaatagcaatgcatttaggaaatatatttaaaggggaaaaaaagactcatagtttcactcagtcatgttcataatttttagtatttgggttttttagcatgtaatttgtgtacatagttttggtttttgtaaacttgcataggggttttctggtacaaactggaaaacctgctagacaaattctgaaacatctgtaatgcttgtaggtagttgttgtaacactatgcccacacataatcactttccatattgctgcatagtctttgtaaccatttttcttcttcttttttttgagatggagttttgctcttgttgcccaggctggagtgcaatggcgcgatcttggcccactgcaacctctgcctcccgggttcaagctattctgctgccttagcctcccgagtagctgggattgcaggcacacgccaccacgcccggctagttttgtgtttttggtagagacggggtttcaccatgtcagccaggcttttcttgaacttctgatctcaagtgatcctcactcctcagcctcccaaattgctgggattacaggcgtgagccaccacgcccacctgtaaccattatttttaagattgctaccattggatagttctgtcatggtccaacttttggatatttaaaattgatccctgtgtggctaacagaattaatgtttccaaaaatgttgaaaattatatagttctcttaattccccacctctaactatatttttgggttatttctttaggaacagatgcccaggagtcatattactgagaatctagaaatcttttgcaaagttcttgttatattgccaaattgcttcccaaaagggttgttctaaaccataatttcaccagcaatgtaggggagaaccatttttatgctgcccttgtgagaattgggtatgaaaacatttttaaaatgatttttgatgaggtgaaaataatatttgaatatattttaatttgcctttcccccacttatagtgagcttaaacattttttccttttcctagctgtatttctccctttgttattcgttcttttgtccatttatctactggggagatggggagtgttatctttttagtttatcagttatttgcattttaaatataaccatttgccatattttaacaacgatttttccattaaataattctttttataaaaaaactttatatatctgttgatgttttgtgatttttattgcttctaagctaatacagatttttggatcttaaaaaaaaaaaaaaaaaaaaaaaaaaaaaacaaaaaaaaaaaaaaaagaaaagagagagaagaaaagacacaacaaaaaaaacaaaaaaaaaagaagaaaacaaagaagaacaagaaaaacaagaaagagaaaggagcacaaagaagagagacacaaaaaaagaagagggaacaaaaatataaaaaaaaaaaaaaggagagaacagaaggaagatagagagcagaaacaacataaaaaagaagaaaaaaaaagaaacgtggggggaggagaaatcgtcgagagagagactagggacgaaactccacacaagagaaaaaaaagaagaaaaacacaaagagagaacagcgagacaagaaacggaaagcaacaagcaggcagcacaaacataacaaggagagcacaccaaacaaatcaagagaagagaaaataaaaaaacacaagggacagaaactacacaacataaacaggacacagggggacac

SEQ ID NO: 66982 - DNA, 270 bp, Homo sapiens
ataaccatttgccatattttaacaacgatttttccattaaataattctttttataaaaaaactttatatatctgttgatgttttgtgatttttattgcttctaagctaatacagatttttggatcttattcaatttcgctttcttctgtttaggttattatctggttttatacctaactacttattttcaaattgctaaccagttatcctaatagtatttactgaattccttcccactcctacatcacatattaaaattattttatgcct

SEQ ID NO: 66983 - DNA, 2607 bp, Homo sapiens
  misc_feature (2)..(2): n is a, c, g, or t
  misc_feature (8)..(8): n is a, c, g, or t
  misc_feature (2351)..(2351): n is a, c, g, or t
cnacgcgnggagccggcgcagggtggccggggaggggtgagcagggtgccgctggctgctggggtctgcaggtcaccgagtccccaggagaggggactcctaagaagccacctgcctgtgtttacccggcagcgagcgcgcaggcccccgcgaactcctggcagcgctcaggaaaggccgttgcgcctcgcgaaggaaacagagccgttgaccatggttgcaactggcagtttgagcagcaagaacccggccagcatttcagaattgctggactgtggctatcacccagagagcctgctaagtgattttgactactgggattatgttgttcctgaacccaacctcaacgaggtaatatttgaggaatcaacttgccagaatttggttaaaatgctggagaactgtctgtccaaatcaaagcaaactaaacttggttgctcaaaggtccttgtccctgagaaactgacccagagaattgctcaagatgtcctgcggctttcctcaacggagccctgcggcttgcgaggttgtgttatgcacgtgaacttggaaattgaaaatgtatgtaaaaagctggataggattgtgtgtgattctagcgtcgtacctacttttgagcttacacttgtgtttaagcaggagaactgctcatggactagcttcagggactttttctttagtagaggtcgcttctcctctggtttcaggagaactctgatcctcagctcaggatttcgacttgttaagaaaaaactttactcactgattggaacaacagtgattgaagggtcctaaaaagggaaaatatataaagattatttcatgattgggtagtaaaactattcagctagtcagctaaagtcatttgtagtttgccccacctgccctaaataagaaaccccaaatgtagtctcttttctttctgtgtttcacattcatagcaactgcagctaacaggctgattttctggccttggagaagtgattcaaaatagtgtagattttctgcatagatcccatttttgtacagaattgaatgggatggaataggtaagcaaaagtagaagcccatttgagttttacatttgattccacaattggtttcaggtaggcttggtaatagactatataaaccagatttgcctattttgattttcatatggcttttttttctgtaagttttcagaggattttttaaatcacagaatcatactaaatgatatttagcctatcaaaacttccaaaagcccacaccaccagttcctgactcaaatttgaagggtttttagacaggagggtaggattaagtaggtgagtttaattaaagcttaaccctaggtaagagtaaatgagaaatattacggcaataatggaactgcttcactgtttcttggtgacttcctcactctaatgttttaaagaggcaacaaaagcttgtggtgccatttcagtaaccacggtgttgttttagatgcctttataagctcagtttcccctgttcttaagtgttgaatactgtctttaaactagaaaaatgcaaaatattgaactgatatttttgtgtgtagttgattactcttccattgagtgaatgatgaatacctgtgaggataggaaattagttctgagatctagtccctctctgattcacttagtaatctatcctcttttcagtattacatgtgcttaatctcagatgaaccatttcaccatggcagtgttatctcatctctgggcttttctgggaattgaagtatctctccttaaccccaattgtcaagggtagtagctgtatactaccactttgaattattgaaacgggtcaatttacgaagtctgcattggctatggagatatggtttatagtacagcctagagaatgaaactcaccgtccagataaccatgcatgcacccagattttttccaccttggatacctgtcactagggaataataaaggccttattttttgtcttattccaactaagtagatcattatctctttccttttttatgttaatgagagaatttagcctccactcaacaatgttcaattcagcaaggctttcatatccttgctgtgggtcgtggataaggagcttattcaggtttcctgccctagctattagctccacttcacatgctggagaccggcgtagggacagatgtattcatcctggtgttactgaaaaacaggtgtgatcctgttactgatactataagtgacctaaaatgtcactgttcaaattagccagtgttctaacaaactaaactcttcaaatgcttggaaagatactacaaagccaatctttatagaattgggccaagataaatctatgttgttttgcatgnctattgttaagctccaaaggttcactgtgtttctgccgctgtcctggagttgtcaccactgactgggcaaggcttcttgggcatcgatgtagaactgttgtcctttttccactaacagttatctttgactctcttgcctgttatgcttacaaaatggtgatggcttatggaaggctgttaaattaatattcctgttaaaggaaattaaagtttgtctatttttgacaataaaacattatatatttttaaaaaaatt

SEQ ID NO: 66984 - DNA, 2877 bp, Homo sapiens
  misc_feature (2)..(2): n is a, c, g, or t
  misc_feature (8)..(8): n is a, c, g, or t
  misc_feature (2621)..(2621): n is a, c, g, or t
cnacgcgnggagccggcgcagggtggccggggaggggtgagcagggtgccgctggctgctggggtctgcaggtcaccgagtccccaggagaggggactcctaagaagccacctgcctgtgtttacccggcagcgagcgcgcaggcccccgcgaactcctggcaggtgagcgaagctgcggccttggtgggggcagcggggccggggggcgctccgcggggcaggtcgcttccaagttttgcgaactgttgagttagtttcaggttgcggctccgctcccagggctttgtcaaattgagttgcagaggccggttccacccctttggcaaaggagttcctccgctagttcgctcccgggacgccgggcattttaggagcctctgcacgactcgcctgcttttgcaaatccgtctcttctcgcctcattttttccagcgctcaggaaaggccgttgcgcctcgcgaaggaaacagagccgttgaccatggttgcaactggcagtttgagcagcaagaacccggccagcatttcagaattgctggactgtggctatcacccagagagcctgctaagtgattttgactactgggattatgttgttcctgaacccaacctcaacgaggtaatatttgaggaatcaacttgccagaatttggttaaaatgctggagaactgtctgtccaaatcaaagcaaactaaacttggttgctcaaaggtccttgtccctgagaaactgacccagagaattgctcaagatgtcctgcggctttcctcaacggagccctgcggcttgcgaggttgtgttatgcacgtgaacttggaaattgaaaatgtatgtaaaaagctggataggattgtgtgtgattctagcgtcgtacctacttttgagcttacacttgtgtttaagcaggagaactgctcatggactagcttcagggactttttctttagtagaggtcgcttctcctctggtttcaggagaactctgatcctcagctcaggatttcgacttgttaagaaaaaactttactcactgattggaacaacagtgattgaagggtcctaaaaagggaaaatatataaagattatttcatgattgggtagtaaaactattcagctagtcagctaaagtcatttgtagtttgccccacctgccctaaataagaaaccccaaatgtagtctcttttctttctgtgtttcacattcatagcaactgcagctaacaggctgattttctggccttggagaagtgattcaaaatagtgtagattttctgcatagatcccatttttgtacagaattgaatgggatggaataggtaagcaaaagtagaagcccatttgagttttacatttgattccacaattggtttcaggtaggcttggtaatagactatataaaccagatttgcctattttgattttcatatggcttttttttctgtaagttttcagaggattttttaaatcacagaatcatactaaatgatatttagcctatcaaaacttccaaaagcccacaccaccagttcctgactcaaatttgaagggtttttagacaggagggtaggattaagtaggtgagtttaattaaagcttaaccctaggtaagagtaaatgagaaatattacggcaataatggaactgcttcactgtttcttggtgacttcctcactctaatgttttaaagaggcaacaaaagcttgtggtgccatttcagtaaccacggtgttgttttagatgcctttataagctcagtttcccctgttcttaagtgttgaatactgtctttaaactagaaaaatgcaaaatattgaactgatatttttgtgtgtagttgattactcttccattgagtgaatgatgaatacctgtgaggataggaaattagttctgagatctagtccctctctgattcacttagtaatctatcctcttttcagtattacatgtgcttaatctcagatgaaccatttcaccatggcagtgttatctcatctctgggcttttctgggaattgaagtatctctccttaaccccaattgtcaagggtagtagctgtatactaccactttgaattattgaaacgggtcaatttacgaagtctgcattggctatggagatatggtttatagtacagcctagagaatgaaactcaccgtccagataaccatgcatgcacccagattttttccaccttggatacctgtcactagggaataataaaggccttattttttgtcttattccaactaagtagatcattatctctttccttttttatgttaatgagagaatttagcctccactcaacaatgttcaattcagcaaggctttcatatccttgctgtgggtcgtggataaggagcttattcaggtttcctgccctagctattagctccacttcacatgctggagaccggcgtagggacagatgtattcatcctggtgttactgaaaaacaggtgtgatcctgttactgatactataagtgacctaaaatgtcactgttcaaattagccagtgttctaacaaactaaactcttcaaatgcttggaaagatactacaaagccaatctttatagaattgggccaagataaatctatgttgttttgcatgnctattgttaagctccaaaggttcactgtgtttctgccgctgtcctggagttgtcaccactgactgggcaaggcttcttgggcatcgatgtagaactgttgtcctttttccactaacagttatctttgactctcttgcctgttatgcttacaaaatggtgatggcttatggaaggctgttaaattaatattcctgttaaaggaaattaaagtttgtctatttttgacaataaaacattatatatttttaaaaaaatt

SEQ ID NO: 66985 - DNA, 1084 bp, Homo sapiens
  misc_feature (828)..(828): n is a, c, g, or t
cggacgcgtgggtccggacgcgtgggtgatatttttgtgtgtagttgattactcttccattgagtgaatgatgaatacctgtgaggataggaaattagttctgagatctagtccctctctgattcacttagtaatctatcctcttttcagtattacatgtgcttaatctcagatgaaccatttcaccatggcagtgttatctcatctctgggcttttctgggaattgaagtatctctccttaaccccaattgtcaagggtagtagctgtatactaccactttgaattattgaaacgggtcaatttacgaagtctgcattggctatggagatatggtttatagtacagcctagagaatgaaactcaccgtccagataaccatgcatgcacccagattttttccaccttggatacctgtcactagggaataataaaggccttattttttgtcttattccaactaagtagatcattatctctttccttttttatgttaatgagagaatttagcctccactcaacaatgttcaattcagcaaggctttcatatccttgctgtgggtcgtggataaggagcttattcaggtttcctgccctagctattagctccacttcacatgctggagaccggcgtagggacagatgtattcatcctggtgttactgaaaaacaggtgtgatcctgttactgatactataagtgacctaaaatgtcactgttcaaattagccagtgttctaacaaactaaactcttcaaatgcttggaaagatactacaaagccaatctttatagaattgggccaagataaatctatgttgttttgcatgnctattgttaagctccaaaggttcactgtgtttctgccgctgtcctggagttgtcaccactgactgggcaaggcttcttgggcatcgatgtagaactgttgtcctttttccactaacagttatctttgactctcttgcctgttatgcttacaaaatggtgatggcttatggaaggctgttaaattaatattcctgttaaaggaaattaaagtttgtctatttttgacaataaaacattatatatttttaaaaaaatt

SEQ ID NO: 66986 - DNA, 674 bp, Homo sapiens
ttttttttgtttttgaggcaaaagtcagtagccaatatttgtaacccccaaacttgaaactatccaaatgttcaatagaatggaaatatacaaatttaggcataggccgctctgcctacagagtagctatgctttattctttcactttcttaataaacttgctttcactaaaaaaaaaaaaaaaaaatttaggcatatccacacaatgaaaccctatgcagcagtaagaattaacaccataaacacatgagaaaatataaatttcacaaacatgttgactgaaaaacacaaaagaatatatgctctataattccacttactacaataatcaaaatgaatctatggtattaaaagtcaggataggccgggcgtggtggctcacgcctgtaatcccagctctttgggaggccgaaccaggtagattacctgaggtcaggagtttgagaccagcctggccaacatggtgaaaccccgtctctactaaaaatacaaaaattagccagacgtggtggtgggtgcctgtaatctcggctactcaggaggctgaggcaggagaatcacttgaacccgggaggcagaggttgcagtgagccgagattgcgccactgcaccccagcctgggccacacaccccacccagcctgggcgacaagagcaaagctccgtctatataaa

SEQ ID NO: 66987 - DNA, 199 bp, Homo sapiens
ttttttttgtttttgaggcaaaagtcagtagccaatatttgtaacccccaaacttgaaactatccaaatgttcaatagaatggaaatatacaaatttaggcataggccgctctgcctacagagtagctatgctgagtcagaatgtctgcgtgttccagagtgtctgtctaacaccgcttaagattagccactgcatgac

SEQ ID NO: 66988 - DNA, 383 bp, Homo sapiens
ttcaccatgaaattgaaaatgtttcgatatattggccttcaggagctactgctagagaattctgtaactctgtatagtagccttatgtgtataatgtagcttttgacaggtgtctgtaaattaagtcagcatagtaactatctcagttaacagtaaactatcttagtttattgattttagaagtagtggagaggaagggctataacagaaaggaccaaaatcttgtaaagagttccacttgtaatagcaacaggcagctggaaacagaaagacctgttagcaggagttccattgcccagtacttaaaactggccattgttgagatctctctggaaagagatcagtattagtggcttttggacctgctctattaattttaatgc

SEQ ID NO: 66989 - DNA, 380 bp, Homo sapiens
gtatttttaacttgttaaaacatacttttagttaatattgtatccgtttatatgtaatgtaagtgcctaatgactacttgttatttttcatttcctctcatagatgctatggttttcataaatattataagtacatatattataaatcctatgatatagtattatcagtttctctttacatagccatatattataaaaaaattaaaagtaataaaatattactgtatatttaccaaaatatttgctattactgcagtcttcagtgattcatgaaggattgagtttccattttacgtcaatgctctttagactcaaagactcccttcatattttctgtattcaggtgtattagaaataaacactttttattcttattttca

SEQ ID NO: 66990 - DNA, 249 bp, Homo sapiens
gcaagtaggtttaaatttgcatttatttattcatttttaattgtaattattatctttttagatggagactcactctgttgcccaggctggagtgcagtggtgtgatctcagctcaccgcagcctcctgctcccagttcaagggattcttgtgcctcagcctcccaagtaactgggattacaggcgcctgccaccacacctagctaatttttgtatttttagtagagatgggggtttcaccatgttggtg

SEQ ID NO: 66991 - DNA, 630 bp, Homo sapiens
cacgagggtgaccagcggcgggtcacgtgacgcggtgcctggcgccgagcctcccaagatggcggtgtgcatcgcggtgattgccaaggagaattaccccctctacattcgcagcacccctacggagaacgagctgaagttccactacatggtgcacacatctctggacgtggtggatgagaagatctccgcaatggggaaggccctggtcgaccagagggagctgtacctgggcctgctctaccccacggaggactacaaggtatacggctacgtcaccaactccaaggtgaagtttgtcatggtggtagattcctccaacacagcccttcgagacaacgaaattcgcagcatgttccggaagctacacaactcctacacagacgtgatgtgcaaccccttctacaacccgggggaccgcatccagtccagggcctttgataacatggtgacgtcgatgatgatacaggtgtgctgagtgagctgtgctgccagccatcgcagaggagcccgcgcacgactgtggtggggccgtcggtctgttctggttgcctcttcctgaatgggacgcctggggctttcagggcaggcagctgtgcatgttctctcaactaaaggtcttgtgagagg

SEQ ID NO: 66992 - DNA, 1136 bp, Homo sapiens
cacgagggtgaccagcggcgggtcacgtgacgcggtgcctggcgccgagcctcccaagatggcggtgtgcatcgcggtgattgccaaggagaattaccccctctacattcgcagcacccctacggagaacgagctgaagttccactacatggtgcacacatctctggacgtggtggatgagaagatctccgcaatggggaaggccctggtcgaccagagggagctgtacctgggcctgctctaccccacggaggactacaaggtatacggctacgtcaccaactccaaggtgaagtttgtcatggtggtagattcctccaacacagcccttcgagacaacgaaattcgcagcatgttccggaagctacacaactcctacacagacgtgatgtgcaaccccttctacaacccgggggaccgcatccagtccagggcctttgataacatggtgacgtcgatgatgatacaggtgtgctgagtgagctgtgctgccagccatcgcagaggagcccgcgcacgactgtggtggggccgtcggtctgttctggttgcctcttcctgaatgggacgcctggggctttcagggcaggcagctgtgcatgttctctcaactaaaggtcttgtgagaggaacaaccaaacaaaaacaaaaaaaaaaaattccggggctctcttttgtgggggtgtgcggacaacaggcgggtcatgcaatggcgcccaggtggccaataaggtgtttccgtgaccccagttttcttgtcccccagggggaaaacttggacggggttacccattatggagagagggggaataaatttcgagaaaagcccgggtttatccgggctttattagatctgtgggaaaatcatagtagagatataaacaaggagaaagagaaaaaaacaatgggggcagtagacaacatattggagaagaaaaaaaaggtggggctagaaaacaagataaaacaatagttgacccaataaataagccatcaagagcacgccgaacaaaaaaacaaacaagaagagctaagaaccccagctattactaccctacatagaagagacaggagagaatagaataaattgaaccaaagtagagtgagtggactgacacacaaaagatgaacactgt

SEQ ID NO: 66993 - DNA, 713 bp, Homo sapiens
cacgagggtgaccagcggcgggtcacgtgacgcggtgcctggcgccgagcctcccaagatggcggtgtgcatcgcggtgattgccaaggagaattaccccctctacattcgcagcacccctacggagaacgagctgaagttccactacatggtgcacacatctctggacgtggtggatgagaagatctccgcaatggggaaggccctggtcgaccagagggagctgtacctgggcctgctctaccccacggaggactacaaggtatacggctacgtcaccaactccaaggtgaagtttgtcatggtggtagattcctccaacacagcccttcgagacaacgaaattcgcagcatgttccggaagctacacaactcctacacagacgtgatgtgcaaccccttctacaacccgggggaccgcatccagtccagggcctttgataacatggtgacgtcgatgatgatacaggtgtgctgagtgagctgtgctgccagccatcgcagaggagcccgcgcacgactgtggtggggccgtcggtctgttctggttgcctcttcctgaatgggacgcctggggctttcagggcaggcagctgtgcatgttctctcaactaaaggtcttgtgagaggcacttccccgctacctacaatcatgtcggcccgccttggcccagccgactttagacttgggcacgtcttgctgtcgccgccct

SEQ ID NO: 66994 - DNA, 674 bp, Homo sapiens
cacgagggtgaccagcggcgggtcacgtgacgcggtgcctggcgccgagcctcccaagatggcggtgtgcatcgcggtgattgccaaggagaattaccccctctacattcgcagcacccctacggagaacgagctgaagttccactacatggtgcacacatctctggacgtggtggatgagaagatctccgcaatggggaaggccctggtcgaccagagggagctgtacctgggcctgctctaccccacggaggactacaaggtatacggctacgtcaccaactccaaggtgaagtttgtcatggtggtagattcctccaacacagcccttcgagacaacgaaattcgcagcatgttccggaagctacacaactcctacacagacgtgatgtgcaaccccttctacaacccgggggaccgcatccagtccagggcctttgataacatggtgacgtcgatgatgatacaggtgtgctgagtgagctgtgctgccagccatcgcagaggagcccgcgcacgactgtggtggggccgtcggtctgttctggttgcctcttcctgaatgggacgcctggggctttcagggcaggcagctgtgcatgttctctcaactaaaggtcttgtgagaggaaaataaacaaccattctcgacataaacaaaaaacattggcgtc

SEQ ID NO: 66995 - DNA, 399 bp, Homo sapiens
gccacgcccgagtgggtgtttgtttttcctttttgactttgttttgaaatgctgagaaactaaaaatctggcagtggctgtgtgtatgtggcaaggtcatggtttgctgggtctttttcagatgttccggaagctacacaactcctacacagacgtgatgtgcaaccccttctacaacccgggggaccgcatccagtccagggcctttgataacatggtgacgtcgatgatgatacaggtgtgctgagtgagctgtgctgccagccatcgcagaggagcccgcgcacgactgtggtggggccgtcggtctgttctggttgcctcttcctgaatgggacgcctggggctttcagggcaggcagctgtgcatgttctctcaactaaaggtcttgtgagagg

SEQ ID NO: 66996 - DNA, 503 bp, Homo sapiens
  misc_feature (12)..(12): n is a, c, g, or t
  misc_feature (25)..(25): n is a, c, g, or t
  misc_feature (45)..(45): n is a, c, g, or t
caccctaagganagtggagcagaanacaggaaggaccctgggccnttttgacgcagaacacaggaaggaccctgggcctttgctgacgcagaacgcgggaaggaccctgggcctttgctgacataccagccccagactacttaaattcagctttttttttaatgtgagaaaataaatgcacccctctctggtttaagccactgatttttgggttttctgttaggtgcagccagacccacctgtaagtactttttacatgagggcgttttcacaagccttgttaggcagcatccccattttaagcccaaggaaacagtgcctgatgaggcgctgttagtcgtggaatgctggagtcaggtgtgtgcacataagcagccttgggcttctgcggccgtgcatgcagccagggagcccgactggctgtgctttcagaggggacagtcgtcaaagtgcccaggacagagacctccacttctgcttcctgagcttctgacaagggccag

SEQ ID NO: 66997 - DNA, 2193 bp, Homo sapiens
cacgagggtgaccagcggcgggtcacgtgacgcggtgcctggcgccgagcctcccaagatggcggtgtgcatcgcggtgattgccaaggagaattaccccctctacattcgcagcacccctacggagaacgagctgaagttccactacatggtgcacacatctctggacgtggtggatgagaagatctccgcaatggggaaggccctggtcgaccagagggagctgtacctgggcctgctctaccccacggaggactacaaggtatacggctacgtcaccaactccaaggtgaagtttgtcatggtggtagattcctccaacacagcccttcgagacaacgaaattcgcagcatgttccggaagctacacaactcctacacagacgtgatgtgcaaccccttctacaacccgggggaccgcatccagtccagggcctttgataacatggtgacgtcgatgatgatacaggtgtgctgagtgagctgtgctgccagccatcgcagaggagcccgcgcacgactgtggtggggccgtcggtctgttctggttgcctcttcctgaatgggacgcctggggctttcagggcaggcagctgtgcatgttctctcaactaaaggtcttgtgagaggagatttggctttttccttccgtgtcagccaaggatttaattaagaagaattcaactaaggacttttctggggtgtgggcagaggtttgggatcagatggcgcaggtagcctgtcctcagttgtcccaaaggggcagaggcaggggtgcctggagccaagagttcctgagcctgcaggacctgtgaccatgtgggtcacccactggctgaacaggtgggctggtctggagggggtggcctcctgagcccagaaccagcctaggatctaggggcacaaggggagccggcgtggcttcccacaggggagggccctcctctttctggacttggcctccattctttgcatctggctcaatgtctggattccgcccggccttaaaaggagcccttgtgaaacctgggaagcctcgtggccccgcggcgttggctcagctgcagccctggtcctaaaccttggagcgcagacttgaggcaccccctcctgcctgttggtgctgagggggttgggtgctgtgtcacttgatgacgtggctgactaccacccagggcagcggccgagcccatagtggcgtcagtgccgccggcgtccttggggtccagcggtcaaggctcagcccgctgaggggacccccccggagttggttccagcactggtccaggactggagagtttctcaaggaccttgaggaccccagaagcccttgcagcaggaaaggctgtaagggggggtcagcctagggcaggacctagggaggggaactttcttgatacgtatttgccttttcatcccatctagcaagcacagtgttaattttagaaattatagaagaaaaaatcagcaaggagtgtgggaaaactgcatgccccaggcctcccccgccccaggtgaattggaagccctggaatgggccgaggcacaccaggcagctgatctgggtgcatgtgggccacagaccactctcacaaggttaaatctttaacaagagcctcatgtttgttaggagaaggtgggaccccagcccaagcacttccccattgcagcctggcatgaaatctttgccttttagtggggatcactcctgcccgagtcctggctgtggtggggactctgcaagttgctaacccagcgtccattctctttcctccgtactaacagaaccccggtgcctctgcccagttccaatagcgggcagacgagagccatgtcctgggctcccttgcagcccggggtgtgcagctgtggcgtggaggtgggtggtgctgggagagacttgcagggaagctcctgtgaaggggactcagctgccacatgcaggacccttcccctttgccttcttcctgcctggaacatggatgtgatggctggtgctgggacagctgtcctgagagcgtgaggaaagggtcacaccctaaggacagtggagcagaacacaggaaggaccctgggcctttgctgacgcagaacgcgggaaggaccctgggcctttgctgacataccagccccagactacttaaattcagctttttttttaatgtgagaaaataaatgcacccctctctggtt

SEQ ID NO: 66998 - DNA, 2503 bp, Homo sapiens
cacgagggtgaccagcggcgggtcacgtgacgcggtgcctggcgccgagcctcccaagatggcggtgtgcatcgcggtgattgccaaggagaattaccccctctacattcgcagcacccctacggagaacgagctgaagttccactacatggtgcacacatctctggacgtggtggatgagaagatctccgcaatggggaaggccctggtcgaccagagggagctgtacctgggcctgctctaccccacggaggactacaaggtatacggctacgtcaccaactccaaggtgaagtttgtcatggtggtagattcctccaacacagcccttcgagacaacgaaattcgcagcatgttccggaagctacacaactcctacacagacgtgatgtgcaaccccttctacaacccgggggaccgcatccagtccagggcctttgataacatggtgacgtcgatgatgatacaggtgtgctgagtgagctgtgctgccagccatcgcagaggagcccgcgcacgactgtggtggggccgtcggtctgttctggttgcctcttcctgaatgggacgcctggggctttcagggcaggcagctgtgcatgttctctcaactaaaggtcttgtgagaggagatttggctttttccttccgtgtcagccaaggatttaattaagaagaattcaactaaggacttttctggggtgtgggcagaggtttgggatcagatggcgcaggtagcctgtcctcagttgtcccaaaggggcagaggcaggggtgcctggagccaagagttcctgagcctgcaggacctgtgaccatgtgggtcacccactggctgaacaggtgggctggtctggagggggtggcctcctgagcccagaaccagcctaggatctaggggcacaaggggagccggcgtggcttcccacaggggagggccctcctctttctggacttggcctccattctttgcatctggctcaatgtctggattccgcccggccttaaaaggagcccttgtgaaacctgggaagcctcgtggccccgcggcgttggctcagctgcagccctggtcctaaaccttggagcgcagacttgaggcaccccctcctgcctgttggtgctgagggggttgggtgctgtgtcacttgatgacgtggctgactaccacccagggcagcggccgagcccatagtggcgtcagtgccgccggcgtccttggggtccagcggtcaaggctcagcccgctgaggggacccccccggagttggttccagcactggtccaggactggagagtttctcaaggaccttgaggaccccagaagcccttgcagcaggaaaggctgtaagggggggtcagcctagggcaggacctagggaggggaactttcttgatacgtatttgccttttcatcccatctagcaagcacagtgttaattttagaaattatagaagaaaaaatcagcaaggagtgtgggaaaactgcatgccccaggcctcccccgccccaggtgaattggaagccctggaatgggccgaggcacaccaggcagctgatctgggtgcatgtgggccacagaccactctcacaaggttaaatctttaacaagagcctcatgtttgttaggagaaggtgggaccccagcccaagcacttccccattgcagcctggcatgaaatctttgccttttagtggggatcactcctgcccgagtcctggctgtggtggggactctgcaagttgctaacccagcgtccattctctttcctccgtactaacagaaccccggtgcctctgcccagttccaatagcgggcagacgagagccatgtcctgggctcccttgcagcccggggtgtgcagctgtggcgtggaggtgggtggtgctgggagagacttgcagggaagctcctgtgaaggggactcagctgccacatgcaggacccttcccctttgccttcttcctgcctggaacatggatgtgatggctggtgctgggacagctgtcctgagagcgtgaggaaagggtcacaccctaaggacagtggagcagaacacaggaaggaccctgggcctttgctgacgcagaacgcgggaaggaccctgggcctttgctgacataccagccccagactacttaaattcagctttttttttaatgtgagaaaataaatgcacccctctctggtttaagccactgatttttgggttttctgttaggtgcagccagacccacctgtaagtactttttacatgagggcgttttcacaagccttgttaggcagcatccccattttaagcccaaggaaacagtgcctgatgaggcgctgttagtcgtggaatgctggagtcaggtgtgtgcacataagcagccttgggcttctgcggccgtgcatgcagccagggagcccgactggctgtgctttcagaggggacagtcgtcaaagtgcccaggacagagacctccacttctgcttcctgagcttctgacaagggccag

SEQ ID NO: 66999 - DNA, 2511 bp, Homo sapiens
cacgagggtgaccagcggcgggtcacgtgacgcggtgcctggcgccgagcctcccaagatggcggtgtgcatcgcggtgattgccaaggagaattaccccctctacattcgcagcacccctacggagaacgagctgaagttccactacatggtgcacacatctctggacgtggtggatgagaagatctccgcaatggggaaggccctggtcgaccagagggagctgtacctgggcctgctctaccccacggaggactacaaggtttaactttccgggccaggcattgattcatgaagagggtgaggtgttccagacagacagactcggagtctaggtggttcggctcctggagtgtgaactgggtaaggcttggctgcctgctcttcgcttctcctgcaaacaccagacgtcgccctagcaaagtatttaggcttgtacccagcacggccactgcaggaccagcccagcatgggcatttcctgtgattcaaggttgccacatttctccaaagtgagggcccacagagggccctccaccggcagtccctgtgttacgagtgccttccctaaccagctgtgcagatacggctacgtcaccaactccaaggtgaagtttgtcatggtggtagattcctccaacacagcccttcgagacaacgaaattcgcagcatgttccggaagctacacaactcctacacagacgtgatgtgcaaccccttctacaacccgggggaccgcatccagtccagggcctttgataacatggtgacgtcgatgatgatacaggtgtgctgagtgagctgtgctgccagccatcgcagaggagcccgcgcacgactgtggtggggccgtcggtctgttctggttgcctcttcctgaatgggacgcctggggctttcagggcaggcagctgtgcatgttctctcaactaaaggtcttgtgagaggagatttggctttttccttccgtgtcagccaaggatttaattaagaagaattcaactaaggacttttctggggtgtgggcagaggtttgggatcagatggcgcaggtagcctgtcctcagttgtcccaaaggggcagaggcaggggtgcctggagccaagagttcctgagcctgcaggacctgtgaccatgtgggtcacccactggctgaacaggtgggctggtctggagggggtggcctcctgagcccagaaccagcctaggatctaggggcacaaggggagccggcgtggcttcccacaggggagggccctcctctttctggacttggcctccattctttgcatctggctcaatgtctggattccgcccggccttaaaaggagcccttgtgaaacctgggaagcctcgtggccccgcggcgttggctcagctgcagccctggtcctaaaccttggagcgcagacttgaggcaccccctcctgcctgttggtgctgagggggttgggtgctgtgtcacttgatgacgtggctgactaccacccagggcagcggccgagcccatagtggcgtcagtgccgccggcgtccttggggtccagcggtcaaggctcagcccgctgaggggacccccccggagttggttccagcactggtccaggactggagagtttctcaaggaccttgaggaccccagaagcccttgcagcaggaaaggctgtaagggggggtcagcctagggcaggacctagggaggggaactttcttgatacgtatttgccttttcatcccatctagcaagcacagtgttaattttagaaattatagaagaaaaaatcagcaaggagtgtgggaaaactgcatgccccaggcctcccccgccccaggtgaattggaagccctggaatgggccgaggcacaccaggcagctgatctgggtgcatgtgggccacagaccactctcacaaggttaaatctttaacaagagcctcatgtttgttaggagaaggtgggaccccagcccaagcacttccccattgcagcctggcatgaaatctttgccttttagtggggatcactcctgcccgagtcctggctgtggtggggactctgcaagttgctaacccagcgtccattctctttcctccgtactaacagaaccccggtgcctctgcccagttccaatagcgggcagacgagagccatgtcctgggctcccttgcagcccggggtgtgcagctgtggcgtggaggtgggtggtgctgggagagacttgcagggaagctcctgtgaaggggactcagctgccacatgcaggacccttcccctttgccttcttcctgcctggaacatggatgtgatggctggtgctgggacagctgtcctgagagcgtgaggaaagggtcacaccctaaggacagtggagcagaacacaggaaggaccctgggcctttgctgacgcagaacgcgggaaggaccctgggcctttgctgacataccagccccagactacttaaattcagctttttttttaatgtgagaaaataaatgcacccctctctggtt

SEQ ID NO: 67000 - DNA, 2213 bp, Homo sapiens
cacgagggtgaccagcggcgggtcacgtgacgcggtgcctggcgccgagcctcccaagatggcggtgtgcatcgcggtgattgccaaggagaattaccccctctacattcgcagcacccctacggagaacgagctgaagttccactacatggtgcacacatctctggacgtggtggatgagaagatctccgcaatggggaaggccctggtcgaccagagggagctgtacctgggcctgctctaccccacggaggactacaaggtatacggctacgtcaccaactccaaggtgaagtttgtcatggtggtagattcctccaacacagcccttcgagacaacgaaattcgcagcatgttccggaagctacacaactcctacacagacgtgatgtgcaaccccttctacaacccgggggaccgcatccagtccagtgggtctgtttctcttagcaggcctttgataacatggtgacgtcgatgatgatacaggtgtgctgagtgagctgtgctgccagccatcgcagaggagcccgcgcacgactgtggtggggccgtcggtctgttctggttgcctcttcctgaatgggacgcctggggctttcagggcaggcagctgtgcatgttctctcaactaaaggtcttgtgagaggagatttggctttttccttccgtgtcagccaaggatttaattaagaagaattcaactaaggacttttctggggtgtgggcagaggtttgggatcagatggcgcaggtagcctgtcctcagttgtcccaaaggggcagaggcaggggtgcctggagccaagagttcctgagcctgcaggacctgtgaccatgtgggtcacccactggctgaacaggtgggctggtctggagggggtggcctcctgagcccagaaccagcctaggatctaggggcacaaggggagccggcgtggcttcccacaggggagggccctcctctttctggacttggcctccattctttgcatctggctcaatgtctggattccgcccggccttaaaaggagcccttgtgaaacctgggaagcctcgtggccccgcggcgttggctcagctgcagccctggtcctaaaccttggagcgcagacttgaggcaccccctcctgcctgttggtgctgagggggttgggtgctgtgtcacttgatgacgtggctgactaccacccagggcagcggccgagcccatagtggcgtcagtgccgccggcgtccttggggtccagcggtcaaggctcagcccgctgaggggacccccccggagttggttccagcactggtccaggactggagagtttctcaaggaccttgaggaccccagaagcccttgcagcaggaaaggctgtaagggggggtcagcctagggcaggacctagggaggggaactttcttgatacgtatttgccttttcatcccatctagcaagcacagtgttaattttagaaattatagaagaaaaaatcagcaaggagtgtgggaaaactgcatgccccaggcctcccccgccccaggtgaattggaagccctggaatgggccgaggcacaccaggcagctgatctgggtgcatgtgggccacagaccactctcacaaggttaaatctttaacaagagcctcatgtttgttaggagaaggtgggaccccagcccaagcacttccccattgcagcctggcatgaaatctttgccttttagtggggatcactcctgcccgagtcctggctgtggtggggactctgcaagttgctaacccagcgtccattctctttcctccgtactaacagaaccccggtgcctctgcccagttccaatagcgggcagacgagagccatgtcctgggctcccttgcagcccggggtgtgcagctgtggcgtggaggtgggtggtgctgggagagacttgcagggaagctcctgtgaaggggactcagctgccacatgcaggacccttcccctttgccttcttcctgcctggaacatggatgtgatggctggtgctgggacagctgtcctgagagcgtgaggaaagggtcacaccctaaggacagtggagcagaacacaggaaggaccctgggcctttgctgacgcagaacgcgggaaggaccctgggcctttgctgacataccagccccagactacttaaattcagctttttttttaatgtgagaaaataaatgcacccctctctggtt

SEQ ID NO: 67001 - DNA, 2260 bp, Homo sapiens
cacgagggtgaccagcggcgggtcacgtgacgcggtgcctggcgccgagcctcccaagatggcggtgtgcatcgcggtgattgccaaggagcacccctacggagaacgagctgaagttccactacatggtgcacacatctctggacgtggtggatgagaagatctccgcaatggggaaggccctggtcgaccagagggagctgtacctgggcctgctctaccccacggaggactacaaggtgttgccacatttctccaaagtgagggcccacagagggccctccaccggcagtccctgtgttacgagtgccttccctaaccagctgtgcagatacggctacgtcaccaactccaaggtgaagtttgtcatggtggtagattcctccaacacagcccttcgagacaacgaaattcgcagcatgttccggaagctacacaactcctacacagacgtgatgtgcaaccccttctacaacccgggggaccgcatccagtccagggcctttgataacatggtgacgtcgatgatgatacaggtgtgctgagtgagctgtgctgccagccatcgcagaggagcccgcgcacgactgtggtggggccgtcggtctgttctggttgcctcttcctgaatgggacgcctggggctttcagggcaggcagctgtgcatgttctctcaactaaaggtcttgtgagaggagatttggctttttccttccgtgtcagccaaggatttaattaagaagaattcaactaaggacttttctggggtgtgggcagaggtttgggatcagatggcgcaggtagcctgtcctcagttgtcccaaaggggcagaggcaggggtgcctggagccaagagttcctgagcctgcaggacctgtgaccatgtgggtcacccactggctgaacaggtgggctggtctggagggggtggcctcctgagcccagaaccagcctaggatctaggggcacaaggggagccggcgtggcttcccacaggggagggccctcctctttctggacttggcctccattctttgcatctggctcaatgtctggattccgcccggccttaaaaggagcccttgtgaaacctgggaagcctcgtggccccgcggcgttggctcagctgcagccctggtcctaaaccttggagcgcagacttgaggcaccccctcctgcctgttggtgctgagggggttgggtgctgtgtcacttgatgacgtggctgactaccacccagggcagcggccgagcccatagtggcgtcagtgccgccggcgtccttggggtccagcggtcaaggctcagcccgctgaggggacccccccggagttggttccagcactggtccaggactggagagtttctcaaggaccttgaggaccccagaagcccttgcagcaggaaaggctgtaagggggggtcagcctagggcaggacctagggaggggaactttcttgatacgtatttgccttttcatcccatctagcaagcacagtgttaattttagaaattatagaagaaaaaatcagcaaggagtgtgggaaaactgcatgccccaggcctcccccgccccaggtgaattggaagccctggaatgggccgaggcacaccaggcagctgatctgggtgcatgtgggccacagaccactctcacaaggttaaatctttaacaagagcctcatgtttgttaggagaaggtgggaccccagcccaagcacttccccattgcagcctggcatgaaatctttgccttttagtggggatcactcctgcccgagtcctggctgtggtggggactctgcaagttgctaacccagcgtccattctctttcctccgtactaacagaaccccggtgcctctgcccagttccaatagcgggcagacgagagccatgtcctgggctcccttgcagcccggggtgtgcagctgtggcgtggaggtgggtggtgctgggagagacttgcagggaagctcctgtgaaggggactcagctgccacatgcaggacccttcccctttgccttcttcctgcctggaacatggatgtgatggctggtgctgggacagctgtcctgagagcgtgaggaaagggtcacaccctaaggacagtggagcagaacacaggaaggaccctgggcctttgctgacgcagaacgcgggaaggaccctgggcctttgctgacataccagccccagactacttaaattcagctttttttttaatgtgagaaaataaatgcacccctctctggtt

SEQ ID NO: 67002 - DNA, 2153 bp, Homo sapiens
gagctcggcaccgttgaacccacaaggactacaagttaactttccgggccaggcattgattcatgaagagggtgaggtgttccagacagacagactcggagtctaggtggttcggctcctggagtgtgaactgggttgccacatttctccaaagtgagggcccacagagggccctccaccggcagtccctgtgttacgagtgccttccctaaccagctgtgcagatacggctacgtcaccaactccaaggtgaagtttgtcatggtggtagattcctccaacacagcccttcgagacaacgaaattcgcagcatgttccggaagctacacaactcctacacagacgtgatgtgcaaccccttctacaacccgggggaccgcatccagtccagggcctttgataacatggtgacgtcgatgatgatacaggtgtgctgagtgagctgtgctgccagccatcgcagaggagcccgcgcacgactgtggtggggccgtcggtctgttctggttgcctcttcctgaatgggacgcctggggctttcagggcaggcagctgtgcatgttctctcaactaaaggtcttgtgagaggagatttggctttttccttccgtgtcagccaaggatttaattaagaagaattcaactaaggacttttctggggtgtgggcagaggtttgggatcagatggcgcaggtagcctgtcctcagttgtcccaaaggggcagaggcaggggtgcctggagccaagagttcctgagcctgcaggacctgtgaccatgtgggtcacccactggctgaacaggtgggctggtctggagggggtggcctcctgagcccagaaccagcctaggatctaggggcacaaggggagccggcgtggcttcccacaggggagggccctcctctttctggacttggcctccattctttgcatctggctcaatgtctggattccgcccggccttaaaaggagcccttgtgaaacctgggaagcctcgtggccccgcggcgttggctcagctgcagccctggtcctaaaccttggagcgcagacttgaggcaccccctcctgcctgttggtgctgagggggttgggtgctgtgtcacttgatgacgtggctgactaccacccagggcagcggccgagcccatagtggcgtcagtgccgccggcgtccttggggtccagcggtcaaggctcagcccgctgaggggacccccccggagttggttccagcactggtccaggactggagagtttctcaaggaccttgaggaccccagaagcccttgcagcaggaaaggctgtaagggggggtcagcctagggcaggacctagggaggggaactttcttgatacgtatttgccttttcatcccatctagcaagcacagtgttaattttagaaattatagaagaaaaaatcagcaaggagtgtgggaaaactgcatgccccaggcctcccccgccccaggtgaattggaagccctggaatgggccgaggcacaccaggcagctgatctgggtgcatgtgggccacagaccactctcacaaggttaaatctttaacaagagcctcatgtttgttaggagaaggtgggaccccagcccaagcacttccccattgcagcctggcatgaaatctttgccttttagtggggatcactcctgcccgagtcctggctgtggtggggactctgcaagttgctaacccagcgtccattctctttcctccgtactaacagaaccccggtgcctctgcccagttccaatagcgggcagacgagagccatgtcctgggctcccttgcagcccggggtgtgcagctgtggcgtggaggtgggtggtgctgggagagacttgcagggaagctcctgtgaaggggactcagctgccacatgcaggacccttcccctttgccttcttcctgcctggaacatggatgtgatggctggtgctgggacagctgtcctgagagcgtgaggaaagggtcacaccctaaggacagtggagcagaacacaggaaggaccctgggcctttgctgacgcagaacgcgggaaggaccctgggcctttgctgacataccagccccagactacttaaattcagctttttttttaatgtgagaaaataaatgcacccctctctggtt

SEQ ID NO: 67003 - DNA, 1966 bp, Homo sapiens
tgaacattcgtgtccaccccacggaggactacaaggtatacggctacgtcaccaactccaaggtgaagtttgtcatggtggtagattcctccaacacagcccttcgagacaacgaaattcgcagcatgttccggaagctacacaactcctacacagacgtgatgtgcaaccccttctacaacccgggggaccgcatccagtccagggcctttgataacatggtgacgtcgatgatgatacaggtgtgctgagtgagctgtgctgccagccatcgcagaggagcccgcgcacgactgtggtggggccgtcggtctgttctggttgcctcttcctgaatgggacgcctggggctttcagggcaggcagctgtgcatgttctctcaactaaaggtcttgtgagaggagatttggctttttccttccgtgtcagccaaggatttaattaagaagaattcaactaaggacttttctggggtgtgggcagaggtttgggatcagatggcgcaggtagcctgtcctcagttgtcccaaaggggcagaggcaggggtgcctggagccaagagttcctgagcctgcaggacctgtgaccatgtgggtcacccactggctgaacaggtgggctggtctggagggggtggcctcctgagcccagaaccagcctaggatctaggggcacaaggggagccggcgtggcttcccacaggggagggccctcctctttctggacttggcctccattctttgcatctggctcaatgtctggattccgcccggccttaaaaggagcccttgtgaaacctgggaagcctcgtggccccgcggcgttggctcagctgcagccctggtcctaaaccttggagcgcagacttgaggcaccccctcctgcctgttggtgctgagggggttgggtgctgtgtcacttgatgacgtggctgactaccacccagggcagcggccgagcccatagtggcgtcagtgccgccggcgtccttggggtccagcggtcaaggctcagcccgctgaggggacccccccggagttggttccagcactggtccaggactggagagtttctcaaggaccttgaggaccccagaagcccttgcagcaggaaaggctgtaagggggggtcagcctagggcaggacctagggaggggaactttcttgatacgtatttgccttttcatcccatctagcaagcacagtgttaattttagaaattatagaagaaaaaatcagcaaggagtgtgggaaaactgcatgccccaggcctcccccgccccaggtgaattggaagccctggaatgggccgaggcacaccaggcagctgatctgggtgcatgtgggccacagaccactctcacaaggttaaatctttaacaagagcctcatgtttgttaggagaaggtgggaccccagcccaagcacttccccattgcagcctggcatgaaatctttgccttttagtggggatcactcctgcccgagtcctggctgtggtggggactctgcaagttgctaacccagcgtccattctctttcctccgtactaacagaaccccggtgcctctgcccagttccaatagcgggcagacgagagccatgtcctgggctcccttgcagcccggggtgtgcagctgtggcgtggaggtgggtggtgctgggagagacttgcagggaagctcctgtgaaggggactcagctgccacatgcaggacccttcccctttgccttcttcctgcctggaacatggatgtgatggctggtgctgggacagctgtcctgagagcgtgaggaaagggtcacaccctaaggacagtggagcagaacacaggaaggaccctgggcctttgctgacgcagaacgcgggaaggaccctgggcctttgctgacataccagccccagactacttaaattcagctttttttttaatgtgagaaaataaatgcacccctctctggtt

SEQ ID NO: 67004 - DNA, 1301 bp, Homo sapiens
accttgaggatctcccgactagccgacagatgcaaagaagggagggccctcctctttctggacttggcctccattctttgcatctggctcaatgtctggattccgcccggccttaaaaggagcccttgtgaaacctgggaagcctcgtggccccgcggcgttggctcagctgcagccctggtcctaaaccttggagcgcagacttgaggcaccccctcctgcctgttggtgctgagggggttgggtgctgtgtcacttgatgacgtggctgactaccacccagggcagcggccgagcccatagtggcgtcagtgccgccggcgtccttggggtccagcggtcaaggctcagcccgctgaggggacccccccggagttggttccagcactggtccaggactggagagtttctcaaggaccttgaggaccccagaagcccttgcagcaggaaaggctgtaagggggggtcagcctagggcaggacctagggaggggaactttcttgatacgtatttgccttttcatcccatctagcaagcacagtgttaattttagaaattatagaagaaaaaatcagcaaggagtgtgggaaaactgcatgccccaggcctcccccgccccaggtgaattggaagccctggaatgggccgaggcacaccaggcagctgatctgggtgcatgtgggccacagaccactctcacaaggttaaatctttaacaagagcctcatgtttgttaggagaaggtgggaccccagcccaagcacttccccattgcagcctggcatgaaatctttgccttttagtggggatcactcctgcccgagtcctggctgtggtggggactctgcaagttgctaacccagcgtccattctctttcctccgtactaacagaaccccggtgcctctgcccagttccaatagcgggcagacgagagccatgtcctgggctcccttgcagcccggggtgtgcagctgtggcgtggaggtgggtggtgctgggagagacttgcagggaagctcctgtgaaggggactcagctgccacatgcaggacccttcccctttgccttcttcctgcctggaacatggatgtgatggctggtgctgggacagctgtcctgagagcgtgaggaaagggtcacaccctaaggacagtggagcagaacacaggaaggaccctgggcctttgctgacgcagaacgcgggaaggaccctgggcctttgctgacataccagccccagactacttaaattcagctttttttttaatgtgagaaaataaatgcacccctctctggtt

SEQ ID NO: 67005 - DNA, 819 bp, Homo sapiens
cacgagggtgaccagcggcgggtcacgtgacgcggtgcctggcgccgagcctcccaagatggcggtgtgcatcgcggtgattgccaaggagaattaccccctctacattcgcagcacccctacggagaacgagctgaagttccactacatggtgcacacatctctggacgtggtggatgagaagatctccgcaatggggaaggccctggtcgaccagagggagctgtacctgggcctgctctaccccacggaggactacaaggtttaactttccgggccaggcattgattcatgaagagggtgaggtgttccagacagacagactcggagtctaggtggttcggctcctggagtgtgaactgggttgccacatttctccaaagtgagggcccacagagggccctccaccggcagtccctgtgttacgagtgccttccctaaccagctgtgcagatacggctacgtcaccaactccaaggtgaagtttgtcatggtggtagattcctccaacacagcccttcgagacaacgaaattcgcagcatgttccggaagctacacaactcctacacagacgtgatgtgcaaccccttctacaacccgggggaccgcatccagtccagggcctttgataacatggtgacgtcgatgatgatacaggtgtgctgagtgagctgtgctgccagccatcgcagaggagcccgcgcacgactgtggtggggccgtcggtctgttctggttgcctcttcctgaatgggacgcctggggctttcagggcaggcagctgtgcatgttctctcaactaaaggtcttgtgagagg

SEQ ID NO: 67006 - DNA, 948 bp, Homo sapiens
cacgagggtgaccagcggcgggtcacgtgacgcggtgcctggcgccgagcctcccaagatggcggtgtgcatcgcggtgattgccaaggagaattaccccctctacattcgcagcacccctacggagaacgagctgaagttccactacatggtgcacacatctctggacgtggtggatgagaagatctccgcaatggggaaggccctggtcgaccagagggagctgtacctgggcctgctctaccccacggaggactacaaggtttaactttccgggccaggcattgattcatgaagagggtgaggtgttccagacagacagactcggagtctaggtggttcggctcctggagtgtgaactgggtaaggcttggctgcctgctcttcgcttctcctgcaaacaccagacgtcgccctagcaaagtatttaggcttgtacccagcacggccactgcaggaccagcccagcatgggcatttcctgtgattcaaggttgccacatttctccaaagtgagggcccacagagggccctccaccggcagtccctgtgttacgagtgccttccctaaccagctgtgcagatacggctacgtcaccaactccaaggtgaagtttgtcatggtggtagattcctccaacacagcccttcgagacaacgaaattcgcagcatgttccggaagctacacaactcctacacagacgtgatgtgcaaccccttctacaacccgggggaccgcatccagtccagggcctttgataacatggtgacgtcgatgatgatacaggtgtgctgagtgagctgtgctgccagccatcgcagaggagcccgcgcacgactgtggtggggccgtcggtctgttctggttgcctcttcctgaatgggacgcctggggctttcagggcaggcagctgtgcatgttctctcaactaaaggtcttgtgagagg

SEQ ID NO: 67007 - DNA, 711 bp, Homo sapiens
  misc_feature (644)..(645): n is a, c, g, or t
cacgagggtgaccagcggcgggtcacgtgacgcggtgcctggcgccgagcctcccaagatggcggtgtgcatcgcggtgattgccaaggagaattaccccctctacattcgcagcacccctacggagaacgagctgaagttccactacatggtgcacacatctctggacgtggtggatgagaagatctccgcaatggggaaggccctggtcgaccagagggagctgtacctgggcctgctctaccccacggaggactacaaggtatacggctacgtcaccaactccaaggtgaagtttgtcatggtggtagattcctccaacacagcccttcgagacaacgaaattcgcagcatgttccggaagctacacaactcctacacagacgtgatgtgcaaccccttctacaacccgggggaccgcatccagtccagggcctttgataacatggtgacgtcgatgatgatacaggtgtgctgagtgagctgtgctgccagccatcgcagaggagcccgcgcacgactgtggtggggccgtcggtctgttctggttgcctcttcctgaatgggacgcctggggctttcagggcaggcagctgtgcatgttctctcaactaaaggtcttgtgagagggaaaaaaaaaaaanncttgccgccgaatttcgagctacatgggaccaatcggcctataaggagggcggatacttcctggcc

SEQ ID NO: 67008 - DNA, 960 bp, Homo sapiens
cacgagggtgaccagcggcgggtcacgtgacgcggtgcctggcgccgagcctcccaagatggcggtgtgcatcgcggtgattgccaaggagaattaccccctctacattcgcagcacccctacggagaacgagctgaagttccactacatggtgcacacatctctggacgtggtggatgagaagatctccgcaatggggaaggccctggtcgaccagagggagctgtacctgggcctgctctaccccacggaggactacaaggtatgttccggaagctacacaactcctacacagacgtgatgtgcaaccccttctacaacccgggggaccgcatccagtccagggcctttgataacatggtgacgtcgatgatgatacaggtgtgctgagtgagctgtgctgccagccatcgcagaggagcccgcgcacgactgtggtggggccgtcggtctgttctggttgcctcttcctgaatgggacgcctggggctttcagggcaggcagctgtgcatgttctctcaactaaaggtcttgtgagaggaaaccaaaaaaaaaaaaaaaaacacccacaacacacaggggggagcaagacaacagaaataaccaccagaggcgcgcaaagatcacagtgaccacaagtcagtggaccaagggcgcccaaaaagggagaccagataacaccgcatgcaacagcggccgctccgtaccaacaagccacaagacgggaaaccacgcgcaccagaggaaccccccgtgcaaaagggaacccaatacacccagagggcgggtggacacacaaactggcgcaccaaccaacacccaacccgcacaatctaccaggccccccacagcacacaatataaaaagatcaaacgcgagccaacgggggacaaaacaacgagaaataccccgccaccaagaagagacagacacagggcaatgcacaacacgaatttccg

SEQ ID NO: 67009 - DNA, 2140 bp, Homo sapiens
cacgagggtgaccagcggcgggtcacgtgacgcggtgcctggcgccgagcctcccaagatggcggtgtgcatcgcggtgattgccaaggagaattaccccctctacattcgcagcacccctacggagaacgagctgaagttccactacatggtgcacacatctctggacgtggtggatgagaagatctccgcaatggggaaggccctggtcgaccagagggagctgtacctgggcctgctctaccccacggaggactacaaggtatacggctacgtcaccaactccaaggtgaagtttgtcatggtggtagattcctccaacacagcccttcgagacaacgaaattcgcagcatgttccggaagctacacaactcctacacagacgtgatgtgcaaccccttctacaacccgggggaccgcatccagtccagggcctttgataacatggtgacgtcgatgatgatacaggtgtgctgagtgagctgtgctgccagccatcgcagaggagcccgcgcacgactgtggtggggccgtcggtctgttctggttgcctcttcctgaatgggacgcctggggctttcagggcaggcagctgtgcatgttctctcaactaaaggtcttgtgagaggagatttggctttttccttccgtgtcagccaaggatttaattaagaagaattcaactaaggacttttctggggtgtgggcagaggtttgggatcagatggcgcaggtagcctgtcctcagttgtcccaaaggggcagaggcaggggtgcctggagccaagagttcctgagcctgcaggacctgtgaccatgtgggtcacccactggctgaacaggtgggctggtctggagggggtggcctcctgagcccagaaccagcctaggatctaggggcacaaggggagccggcgtggcttcccacaggggagggccctcctctttctggacttggcctccattctttgcatctggctcaatgtctggattccgcccggccttaaaaggagcccttgtgaaacctgggaagcctcgtggccccgcggcgttggctcagctgcagccctggtcctaaaccttggagcgcagacttgaggcaccccctcctgcctgttggtgctgagggggttgggtgctgtgtcacttgatgacgtggctgactaccacccagggcagcggccgagcccatagtggcgtcagtgccgccggcgtccttggggtccagcggtcaaggctcagcccgctgaggggacccccccggagttggttccagcactggtccaggactggagagtttctcaaggaccttgaggaccccagaagcccttgcagcaggaaaggctgtaagggggggtcagcctagggcaggacctagggaggggaactttcttgatacgtatttgccttttcatcccatctagcaagcacagtgttaattttagaaattatagaagaaaaaatcagcaaggagtgtgggtgggccgaggcacaccaggcagctgatctgggtgcatgtgggccacagaccactctcacaaggttaaatctttaacaagagcctcatgtttgttaggagaaggtgggaccccagcccaagcacttccccattgcagcctggcatgaaatctttgccttttagtggggatcactcctgcccgagtcctggctgtggtggggactctgcaagttgctaacccagcgtccattctctttcctccgtactaacagaaccccggtgcctctgcccagttccaatagcgggcagacgagagccatgtcctgggctcccttgcagcccggggtgtgcagctgtggcgtggaggtgggtggtgctgggagagacttgcagggaagctcctgtgaaggggactcagctgccacatgcaggacccttcccctttgccttcttcctgcctggaacatggatgtgatggctggtgctgggacagctgtcctgagagcgtgaggaaagggtcacaccctaaggacagtggagcagaacacaggaaggaccctgggcctttgctgacgcagaacgcgggaaggaccctgggcctttgctgacataccagccccagactacttaaattcagctttttttttaatgtgagaaaataaatgcacccctctctggtt

SEQ ID NO: 67010 - DNA, 2170 bp, Homo sapiens
cacgagggtgaccagcggcgggtcacgtgacgcggtgcctggcgccgagcctcccaagatggcggtgtgcatcgcggtgattgccaaggagcacccctacggagaacgagctgaagttccactacatggtgcacacatctctggacgtggtggatgagaagatctccgcaatggggaaggccctggtcgaccagagggagctgtacctgggcctgctctaccccacggaggactacaaggtatacggctacgtcaccaactccaaggtgaagtttgtcatggtggtagattcctccaacacagcccttcgagacaacgaaattcgcagcatgttccggaagctacacaactcctacacagacgtgatgtgcaaccccttctacaacccgggggaccgcatccagtccagggcctttgataacatggtgacgtcgatgatgatacaggtgtgctgagtgagctgtgctgccagccatcgcagaggagcccgcgcacgactgtggtggggccgtcggtctgttctggttgcctcttcctgaatgggacgcctggggctttcagggcaggcagctgtgcatgttctctcaactaaaggtcttgtgagaggagatttggctttttccttccgtgtcagccaaggatttaattaagaagaattcaactaaggacttttctggggtgtgggcagaggtttgggatcagatggcgcaggtagcctgtcctcagttgtcccaaaggggcagaggcaggggtgcctggagccaagagttcctgagcctgcaggacctgtgaccatgtgggtcacccactggctgaacaggtgggctggtctggagggggtggcctcctgagcccagaaccagcctaggatctaggggcacaaggggagccggcgtggcttcccacaggggagggccctcctctttctggacttggcctccattctttgcatctggctcaatgtctggattccgcccggccttaaaaggagcccttgtgaaacctgggaagcctcgtggccccgcggcgttggctcagctgcagccctggtcctaaaccttggagcgcagacttgaggcaccccctcctgcctgttggtgctgagggggttgggtgctgtgtcacttgatgacgtggctgactaccacccagggcagcggccgagcccatagtggcgtcagtgccgccggcgtccttggggtccagcggtcaaggctcagcccgctgaggggacccccccggagttggttccagcactggtccaggactggagagtttctcaaggaccttgaggaccccagaagcccttgcagcaggaaaggctgtaagggggggtcagcctagggcaggacctagggaggggaactttcttgatacgtatttgccttttcatcccatctagcaagcacagtgttaattttagaaattatagaagaaaaaatcagcaaggagtgtgggaaaactgcatgccccaggcctcccccgccccaggtgaattggaagccctggaatgggccgaggcacaccaggcagctgatctgggtgcatgtgggccacagaccactctcacaaggttaaatctttaacaagagcctcatgtttgttaggagaaggtgggaccccagcccaagcacttccccattgcagcctggcatgaaatctttgccttttagtggggatcactcctgcccgagtcctggctgtggtggggactctgcaagttgctaacccagcgtccattctctttcctccgtactaacagaaccccggtgcctctgcccagttccaatagcgggcagacgagagccatgtcctgggctcccttgcagcccggggtgtgcagctgtggcgtggaggtgggtggtgctgggagagacttgcagggaagctcctgtgaaggggactcagctgccacatgcaggacccttcccctttgccttcttcctgcctggaacatggatgtgatggctggtgctgggacagctgtcctgagagcgtgaggaaagggtcacaccctaaggacagtggagcagaacacaggaaggaccctgggcctttgctgacgcagaacgcgggaaggaccctgggcctttgctgacataccagccccagactacttaaattcagctttttttttaatgtgagaaaataaatgcacccctctctggtt

SEQ ID NO: 67011 - DNA, 2382 bp, Homo sapiens
cacgagggtgaccagcggcgggtcacgtgacgcggtgcctggcgccgagcctcccaagatggcggtgtgcatcgcggtgattgccaaggagaattaccccctctacattcgcagcacccctacggagaacgagctgaagttccactacatggtgcacacatctctggacgtggtggatgagaagatctccgcaatggggaaggccctggtcgaccagagggagctgtacctgggcctgctctaccccacggaggactacaaggtttaactttccgggccaggcattgattcatgaagagggtgaggtgttccagacagacagactcggagtctaggtggttcggctcctggagtgtgaactgggttgccacatttctccaaagtgagggcccacagagggccctccaccggcagtccctgtgttacgagtgccttccctaaccagctgtgcagatacggctacgtcaccaactccaaggtgaagtttgtcatggtggtagattcctccaacacagcccttcgagacaacgaaattcgcagcatgttccggaagctacacaactcctacacagacgtgatgtgcaaccccttctacaacccgggggaccgcatccagtccagggcctttgataacatggtgacgtcgatgatgatacaggtgtgctgagtgagctgtgctgccagccatcgcagaggagcccgcgcacgactgtggtggggccgtcggtctgttctggttgcctcttcctgaatgggacgcctggggctttcagggcaggcagctgtgcatgttctctcaactaaaggtcttgtgagaggagatttggctttttccttccgtgtcagccaaggatttaattaagaagaattcaactaaggacttttctggggtgtgggcagaggtttgggatcagatggcgcaggtagcctgtcctcagttgtcccaaaggggcagaggcaggggtgcctggagccaagagttcctgagcctgcaggacctgtgaccatgtgggtcacccactggctgaacaggtgggctggtctggagggggtggcctcctgagcccagaaccagcctaggatctaggggcacaaggggagccggcgtggcttcccacaggggagggccctcctctttctggacttggcctccattctttgcatctggctcaatgtctggattccgcccggccttaaaaggagcccttgtgaaacctgggaagcctcgtggccccgcggcgttggctcagctgcagccctggtcctaaaccttggagcgcagacttgaggcaccccctcctgcctgttggtgctgagggggttgggtgctgtgtcacttgatgacgtggctgactaccacccagggcagcggccgagcccatagtggcgtcagtgccgccggcgtccttggggtccagcggtcaaggctcagcccgctgaggggacccccccggagttggttccagcactggtccaggactggagagtttctcaaggaccttgaggaccccagaagcccttgcagcaggaaaggctgtaagggggggtcagcctagggcaggacctagggaggggaactttcttgatacgtatttgccttttcatcccatctagcaagcacagtgttaattttagaaattatagaagaaaaaatcagcaaggagtgtgggaaaactgcatgccccaggcctcccccgccccaggtgaattggaagccctggaatgggccgaggcacaccaggcagctgatctgggtgcatgtgggccacagaccactctcacaaggttaaatctttaacaagagcctcatgtttgttaggagaaggtgggaccccagcccaagcacttccccattgcagcctggcatgaaatctttgccttttagtggggatcactcctgcccgagtcctggctgtggtggggactctgcaagttgctaacccagcgtccattctctttcctccgtactaacagaaccccggtgcctctgcccagttccaatagcgggcagacgagagccatgtcctgggctcccttgcagcccggggtgtgcagctgtggcgtggaggtgggtggtgctgggagagacttgcagggaagctcctgtgaaggggactcagctgccacatgcaggacccttcccctttgccttcttcctgcctggaacatggatgtgatggctggtgctgggacagctgtcctgagagcgtgaggaaagggtcacaccctaaggacagtggagcagaacacaggaaggaccctgggcctttgctgacgcagaacgcgggaaggaccctgggcctttgctgacataccagccccagactacttaaattcagctttttttttaatgtgagaaaataaatgcacccctctctggtt

SEQ ID NO: 67012 - DNA, 2501 bp, Homo sapiens
ctggtttgcagaggaagtgggacacttctgctttgtacctgcaaggatttctttctgtgcttttcagggggagccaccacctttgagcaggggataatagtttcatttatttcattaggccttgcctcttatgtcactagacactcgtctagtcccttgggacaaatcacttgaggccatggaattcaaagaccttcccaaaagtcatcatgtagcctgtccatggtgacatttgctagtagccactattttacttaactttccgggccaggcattgattcatgaagagggtgaggtgttccagacagacagactcggagtctaggtggttcggctcctggagtgtgaactgggtaaggcttggctgcctgctcttcgcttctcctgcaaacaccagacgtcgccctagcaaagtatttaggcttgtacccagcacggccactgcaggaccagcccagcatgggcatttcctgtgattcaaggttgccacatttctccaaagtgagggcccacagagggccctccaccggcagtccctgtgttacgagtgccttccctaaccagctgtgcagatacggctacgtcaccaactccaaggtgaagtttgtcatggtggtagattcctccaacacagcccttcgagacaacgaaattcgcagcatgttccggaagctacacaactcctacacagacgtgatgtgcaaccccttctacaacccgggggaccgcatccagtccagggcctttgataacatggtgacgtcgatgatgatacaggtgtgctgagtgagctgtgctgccagccatcgcagaggagcccgcgcacgactgtggtggggccgtcggtctgttctggttgcctcttcctgaatgggacgcctggggctttcagggcaggcagctgtgcatgttctctcaactaaaggtcttgtgagaggagatttggctttttccttccgtgtcagccaaggatttaattaagaagaattcaactaaggacttttctggggtgtgggcagaggtttgggatcagatggcgcaggtagcctgtcctcagttgtcccaaaggggcagaggcaggggtgcctggagccaagagttcctgagcctgcaggacctgtgaccatgtgggtcacccactggctgaacaggtgggctggtctggagggggtggcctcctgagcccagaaccagcctaggatctaggggcacaaggggagccggcgtggcttcccacaggggagggccctcctctttctggacttggcctccattctttgcatctggctcaatgtctggattccgcccggccttaaaaggagcccttgtgaaacctgggaagcctcgtggccccgcggcgttggctcagctgcagccctggtcctaaaccttggagcgcagacttgaggcaccccctcctgcctgttggtgctgagggggttgggtgctgtgtcacttgatgacgtggctgactaccacccagggcagcggccgagcccatagtggcgtcagtgccgccggcgtccttggggtccagcggtcaaggctcagcccgctgaggggacccccccggagttggttccagcactggtccaggactggagagtttctcaaggaccttgaggaccccagaagcccttgcagcaggaaaggctgtaagggggggtcagcctagggcaggacctagggaggggaactttcttgatacgtatttgccttttcatcccatctagcaagcacagtgttaattttagaaattatagaagaaaaaatcagcaaggagtgtgggaaaactgcatgccccaggcctcccccgccccaggtgaattggaagccctggaatgggccgaggcacaccaggcagctgatctgggtgcatgtgggccacagaccactctcacaaggttaaatctttaacaagagcctcatgtttgttaggagaaggtgggaccccagcccaagcacttccccattgcagcctggcatgaaatctttgccttttagtggggatcactcctgcccgagtcctggctgtggtggggactctgcaagttgctaacccagcgtccattctctttcctccgtactaacagaaccccggtgcctctgcccagttccaatagcgggcagacgagagccatgtcctgggctcccttgcagcccggggtgtgcagctgtggcgtggaggtgggtggtgctgggagagacttgcagggaagctcctgtgaaggggactcagctgccacatgcaggacccttcccctttgccttcttcctgcctggaacatggatgtgatggctggtgctgggacagctgtcctgagagcgtgaggaaagggtcacaccctaaggacagtggagcagaacacaggaaggaccctgggcctttgctgacgcagaacgcgggaaggaccctgggcctttgctgacataccagccccagactacttaaattcagctttttttttaatgtgagaaaataaatgcacccctctctggtt

SEQ ID NO: 67013 - DNA, 325 bp, Homo sapiens
cacgagggtgaccagcggcgggtcacgtgacgcggtgcctggcgccgagcctcccaagatggcggtgtgcatcgcggtgattgccaaggagaattaccccctctacattcgcagcacccctacggagaacgagctgaagttccactacatggtgcacacatctctggacgtggtggatgagaagatctccgcaatggggaaggccctggtcgaccagagggagctgtacctgggcctgctctaccccacggaggactacaaggttgtatctttcagggcagggtgtgtgtcagggaggacctacagttgcaagatgtactttagg

SEQ ID NO: 67014 - DNA, 349 bp, Homo sapiens
ataaaagacacatgtgactcagaagagctatagaacgttgtcactaaaaatggatttgaggaggctgcgggaggggcagatctaagatgacttcccgcacattaaatctggaaaaatgatggcacagtggatggcaacaaggaaactggtgagtggatcctgtttagggcagggttagttttattgtttttatgcttgacttaatggtaataagagttaaactaactgggccaggcgcagtggctcacgcctgtaatcccagcactttgggaggcccaggcgggtggatcacgaggtcaggagatcaagaccatcctggctaacacggtgaaaccccatctctactaaa

SEQ ID NO: 67015 - DNA, 479 bp, Homo sapiens
atacacctatgcttaagtcttgagaggatataaaagagagttgtgggcaggatcaatgaggcagatttgtggagactttctagaagaatgttttcatagtgtttggaaggcagcagtagatatggataagcccagagaaggtgagaatacagggtgggcgataagcgtatcaattacatacagcctggtcctggatcctttaaaagaagcaattcttaaaaaaaaaaaaaaaaaatgagaaagagatctctagtctgactggttgggtgctatttcctattcagctcttcatgcaatacctcactaactgccacccaatttcaagcctcccattcctgggaaacacaatggagagggaggaagttggctaactcgaagaaacacctggagacgaacagcagcttttctcagttatgcttttgacttggacagggagtggaaattctactgagggctcaacaggtgatctcctttgggct

SEQ ID NO: 67016 - DNA, 284 bp, Homo sapiens
ggccctgtacttcctgatgatttcaaaagaatggctcgcagatcattgagaaaaatatccctgcgttgtgggagatacatacatgtctcaaagggacagaggaaggattcaccactataagccctttttaataaatgctctccgaaagagaggtcaaggcctcgcatcaggggctgggaagaacaaatggtaagttccttaggcagccttgggtttttccagacaggaattcaagggtgtggccttggcctgctagaagctatgctggggtttggccaagtctc

SEQ ID NO: 67017 - DNA, 989 bp, Homo sapiens
  misc_feature (2)..(3): n is a, c, g, or t
  misc_feature (176)..(176): n is a, c, g, or t
  misc_feature (368)..(368): n is a, c, g, or t
  misc_feature (579)..(579): n is a, c, g, or t
  misc_feature (638)..(638): n is a, c, g, or t
tnngacagtccccaacttatgacggtttgacttacaattttgaccttactatgggtttatcggggcattgaatgcattttcaacttatgttattttcaatttatgatgggattactaggatgtaacaccattgcaagtcaaggggcatctatacttgctagaataatctcttaaanttataaatcaggtcttgtcgcttccgtatttaaaaccagccaatcactcccatcacactcagagtaaagttaaagtctttccaggctgggtgcagtggttcacgcctgtaatcccagcactttgggaggccaaggtgggcggatcacttgaggccaggagtttgagaccagcctggccaacatggcgaaacnccgtctctactaaaaatacaaaaactagccaggcatggtggtgtgtgcctgtaattctagctacttgggaggctaaagcatgagagtcacttgaacccgggaggcagaggttgcagtgagccgagatggcgccattgcactccagcctgggcaacaaagtgagactctgtctcaaaaaaaaaaaaaaaaaaaaaaaaaaagaaaagaaaangtctttccagcagcccgaaaaactccacacaatctgcccctgcccaactgtgccttccnttcccaccctctccccagttcactctgttccaacagcactggcctcctccctactgtcaaaagatgaggcttggtcctacctcagggcctttgcacttgctgttccctctaccagatgcctcttccccccgatcactatagatcactgcatgcttcttatcattctagctttggctttaatgtcacctgctctttgatgtcacctgcccttagaagtctttcctggcttgttgcggtggctcatgcctgtaatcccagcactttgggaggccaaggcaggtggatcacttgaggtcaggagttcaagaccagcctgaccaacatggtgaaacccgtctctactaaaaatac

SEQ ID NO: 67018 - DNA, 396 bp, Homo sapiens
ttttaaaatgaaagggtgactcatgggagaagcctctggaactgcctttgaaaaacaaccagccaagacatgagaaattagttcctctgccatttgggggtttcctgccaactgctgggttttccttttgcacagcagggaggaaggacgcctgtttcccttggtcccggtgaggccaggcctcagcttcctgcccacccgccactgctgctggggcagggaggcagtttccggctgtggggacccagacaatgcctggccaaggcaccatcgtcctcttcctggacacagctcccgcctcatcccagggtctggcctgggacacgccctagaggccctcagccctgagtcactgcaccatgcagatccaccctgattctggtccctgcagagcag

SEQ ID NO: 67019 - DNA, 437 bp, Homo sapiens
gtgggctcctgttgggctggtatttctaaccaccagttgtcctttgtaccaagttctgtcaactagcttggtagctgaggacatactgcttggcaaagttgaggacctaaagtgcaaaatcctatctgtaaaggctattgctaattatacatgtgtctaacttatatatgttgtacactctaaaatcccccccttttttttttttaagacagtttccttcttccctctgttgcctaggctggagtgcagtggtgtgatctcagctcactgcaacctccagctcccaggctcaagcaattctcatctgtagtcccagctactcaggaggctgagatgagtggatcacctgagctcgggaagtcaagcctccagtgagctgagattgcgctactgtgcccctgcactccagcctgggcgacagaatactctgtctcaaa

SEQ ID NO: 67020 - DNA, 3690 bp, Homo sapiens
actgctggggtccatgtgtacgtgtggcatgtggggcaggaggctctgcagcaggccatgtggatgggcttctaccagctcacccccgaggagctggtgagtgaccactggcggaacctgcagaggttcctcagccataagctggacatcaaacgggctaacattcacttggccagcctccagcctgcagaggccgtggctggtgtggatgtgctcctggtctttgaggggcattctggaaccttctacgagtttcaggagctagcatccatcatcactcactcagccaaggagatggagcattcagtgggggttcagatgcggtcagctatgcccatggtgccctgccaggggccaacctgccagggtcaaatctgccataacacagtgcatctggaccccaaggttgggcccacgtacagcaccgccaggctcagcatcctaaccccgcggcaccacctgcagaggagctgctcctgcaatggtactgctacaaggttcagtggtcagagctatgtgcggtacagggccccagcggctcggaactggcacatccatttctatctgaaaacactccagccacaggccattcttctattcaccaatgaaacagcgtccgtctccctgaagctggccagtggagtgccccagctggaataccactgtctgggtggtttctatggaaacctttcctcccagcgccatgtgaatgaccacgagtggcactccatcctggtggaggagatggacgcttccattcgcctgatggttgacagcatgggcaacacctcccttgtggtcccagagaactgccgtggtctgaggcccgaaaggcacctcttgctgggcggcctcattctgttgcattcttcctcgaatgtctcccagggctttgaaggctgcctggatgctgtcgtggtcaacgaagaggctctagatctgctggcccctggcaagacggtggcaggcttgctggagacacaagccctcacccagtgctgcctccacagtgactactgcagccagaacacatgcctcaatggtgggaagtgctcatggacccacggggcaggctatgtctgcaaatgtcccccacagttctctgggaagcactgtgaacaaggaagggagaactgtacttttgcaccctgcctggaaggtggaacttgcatcctctcccccaaaggagcttcctgtaactgccctcatccttacacaggagacaggtgtgaaatggaggcgaggggttgttcagaaggacactgcctagtcactcccgagatccaaaggggggactgggggcagcaggagttactgatcatcacagtggccgtggcgttcattatcataagcactgtcgggcttctcttctactgccgccgttgcaagtctcacaagcctgtggccatggaggacccagacctcctggccaggagtgttggtgttgacacccaagccatgcctgccatcgagctcaacccattgagtgccagctcctgcaacaacctcaaccaaccggaacccagcaaggcctctgttccaaatgaactcgtcacatttggacccaattctaagcaacggccagtggtctgcagtgtgccccccagactcccgccagctgcggtcccttcccactctgacaatgagcctgtcattaagagaacctggtccagcgaggagatggtgtaccctggcggagccatggtctggccccctacttactccaggaacgaacgctgggaatacccccactccgaagtgactcagggccctctgccgccctcggctcaccgccactcaaccccagtcgtgatgccagagcctaatggcctctatgggggcttccccttccccctggagatggaaaacaagcgggcacctctcccaccccgttacagcaaccagaacctggaagatctgatgccctctcggccccctagtccccgggagcgcctggttgccccctgtctcaatgagtacacggccatcagctactaccactcgcagttccggcagggagggggagggccctgcctggcagacgggggctacaagggggtgggtatgcgcctcagccgagctgggccctcttatgctgtctgtgaggtggagggggcacctcttgcaggccagggccagccccgggtgccccccaactatgagggctctgacatggtggagagtgattatggcagctgtgaggaggtcatgttctagcttcccattcccagagcaaggcaggcgggaggccaaggactggacttggcttatttcttcctgtctcgtagggggtgagttgagtgtggctgggagagtgggagggaagccctcagcccaggctgttgtcccttgaaatgtgctcttccaatcccccacctagtccctgagggtggagggaagctgaggatagagctccagaaacagcactagggtcccaggagaggggcatttctagagcagtgaccctggaaaaccaggaacaattgactcccggggtgggcgagagacaggagggctccctgatctgccggctctcagtccccggggcagagcctgattgactgtgctggctcaacttcaccaagatgcattctcatacctgcccacagctccattttggaggcaggcaggttggtgcctgacagacaaccactacgcgggccgtacagaggagctctagagggctgcgtggcatcctcctaggggctgagaggtgagcagcaggggagcgggcacagtcccctctgcccctgcctcagtcgagcactcactgtgtctttgtcaagtgtctgctccacgtcaggcactgtgctttgcaccggggagaaaatggtgatggagggcaacaaggactccgaggagcaccaccaggcctcgggccccagaggtcccactcctcagcctacacgcagaggaacgggcccacctcagagtcacaccactggctgccagtcagggcctgccaggagtctacacagctctgaaccttctttgttaaagaattcagacctcatggaactctgggttcttcatcccaagtttcccaggcacttttggccaaaggaaggaaggaactaattcttcattttaaaaattcttaggcactttttgaccttgctgtctggatgagtttcctcaatgggatttttcttccctagacacaaggaagtctgaactcctatttagggccggttggaagcagggagctggaccgcagtgtccaggctggacacctgccattgcctcctctccattgcagacgcctgcccatcaagtattacctgcggcgactcaaccctatgcatggagggtcaatgtgggcacatgtctacacatgtgggtgcccatggatagtacgtgtgtacacatgtgtagagtgtatgtagccaggagtggtggggaccagaagcctctgtggcctttggtgacctcaccactccctcccacccagtccctccctctggtccactgccttttcatatgtgttgtttctggagacagaagtcaaaaggaagagcagtggagccttgcccacagggctgctgcttcatgcgagagggagatgtgtgggcgagagccaatttgtgtgagtggtttgtggctgtgtgtgtgactgtgagtgtgagtgacagatacatagtttcattggtcattttttttttaacaataaagtatctttttttactgtta

SEQ ID NO: 67021 - DNA, 3225 bp, Homo sapiens
agcactttgagggtttttatgctctgcaaatgccatgtctaaaacagccaaacacccccctcctacccataaaaatacaaacaacattctttgaactggcagcctcttagcaggtttacaaggactccttggctttgctgatggctgtttggatttcctttgcagctggccagtggagtgccccagctggaataccactgtctgggtggtttctatggaaacctttcctcccagcgccatgtgaatgaccacgagtggcactccatcctggtggaggagatggacgcttccattcgcctgatggttgacagcatgggcaacacctcccttgtggtcccagagaactgccgtggtctgaggcccgaaaggcacctcttgctgggcggcctcattctgttgcattcttcctcgaatgtctcccagggctttgaaggctgcctggatgctgtcgtggtcaacgaagaggctctagatctgctggcccctggcaagacggtggcaggcttgctggagacacaagccctcacccagtgctgcctccacagtgactactgcagccagaacacatgcctcaatggtgggaagtgctcatggacccacggggcaggctatgtctgcaaatgtcccccacagttctctgggaagcactgtgaacaaggaagggagaactgtacttttgcaccctgcctggaaggtggaacttgcatcctctcccccaaaggagcttcctgtaactgccctcatccttacacaggagacaggtgtgaaatggaggcgaggggttgttcagaaggacactgcctagtcactcccgagatccaaaggggggactgggggcagcaggagttactgatcatcacagtggccgtggcgttcattatcataagcactgtcgggcttctcttctactgccgccgttgcaagtctcacaagcctgtggccatggaggacccagacctcctggccaggagtgttggtgttgacacccaagccatgcctgccatcgagctcaacccattgagtgccagctcctgcaacaacctcaaccaaccggaacccagcaaggcctctgttccaaatgaactcgtcacatttggacccaattctaagcaacggccagtggtctgcagtgtgccccccagactcccgccagctgcggtcccttcccactctgacaatgagcctgtcattaagagaacctggtccagcgaggagatggtgtaccctggcggagccatggtctggccccctacttactccaggaacgaacgctgggaatacccccactccgaagtgactcagggccctctgccgccctcggctcaccgccactcaaccccagtcgtgatgccagagcctaatggcctctatgggggcttccccttccccctggagatggaaaacaagcgggcacctctcccaccccgttacagcaaccagaacctggaagatctgatgccctctcggccccctagtccccgggagcgcctggttgccccctgtctcaatgagtacacggccatcagctactaccactcgcagttccggcagggagggggagggccctgcctggcagacgggggctacaagggggtgggtatgcgcctcagccgagctgggccctcttatgctgtctgtgaggtggagggggcacctcttgcaggccagggccagccccgggtgccccccaactatgagggctctgacatggtggagagtgattatggcagctgtgaggaggtcatgttctagcttcccattcccagagcaaggcaggcgggaggccaaggactggacttggcttatttcttcctgtctcgtagggggtgagttgagtgtggctgggagagtgggagggaagccctcagcccaggctgttgtcccttgaaatgtgctcttccaatcccccacctagtccctgagggtggagggaagctgaggatagagctccagaaacagcactagggtcccaggagaggggcatttctagagcagtgaccctggaaaaccaggaacaattgactcccggggtgggcgagagacaggagggctccctgatctgccggctctcagtccccggggcagagcctgattgactgtgctggctcaacttcaccaagatgcattctcatacctgcccacagctccattttggaggcaggcaggttggtgcctgacagacaaccactacgcgggccgtacagaggagctctagagggctgcgtggcatcctcctaggggctgagaggtgagcagcaggggagcgggcacagtcccctctgcccctgcctcagtcgagcactcactgtgtctttgtcaagtgtctgctccacgtcaggcactgtgctttgcaccggggagaaaatggtgatggagggcaacaaggactccgaggagcaccaccaggcctcgggccccagaggtcccactcctcagcctacacgcagaggaacgggcccacctcagagtcacaccactggctgccagtcagggcctgccaggagtctacacagctctgaaccttctttgttaaagaattcagacctcatggaactctgggttcttcatcccaagtttcccaggcacttttggccaaaggaaggaaggaactaattcttcattttaaaaattcttaggcactttttgaccttgctgtctggatgagtttcctcaatgggatttttcttccctagacacaaggaagtctgaactcctatttagggccggttggaagcagggagctggaccgcagtgtccaggctggacacctgccattgcctcctctccattgcagacgcctgcccatcaagtattacctgcggcgactcaaccctatgcatggagggtcaatgtgggcacatgtctacacatgtgggtgcccatggatagtacgtgtgtacacatgtgtagagtgtatgtagccaggagtggtggggaccagaagcctctgtggcctttggtgacctcaccactccctcccacccagtccctccctctggtccactgccttttcatatgtgttgtttctggagacagaagtcaaaaggaagagcagtggagccttgcccacagggctgctgcttcatgcgagagggagatgtgtgggcgagagccaatttgtgtgagtggtttgtggctgtgtgtgtgactgtgagtgtgagtgacagatacatagtttcattggtcattttttttttaacaataaagtatctttttttactgtta

SEQ ID NO: 67022 - DNA, 3740 bp, Homo sapiens
agcactttgagggtttttatgctctgcaaatgccatgtctaaaacagccaaacacccccctcctacccataaaaatacaaacaacattctttgaactggcagcctcttagcaggtttacaaggactccttggctttgctgatggctgtttggatttcctttgcagctggccagtggagtgccccagctggaataccactgtctgggtggtttctatggaaacctttcctcccagcgccatgtgaatgaccacgagtggcactccatcctggtggaggagatggacgcttccattcgcctgatggttgacagcatgggcaacacctcccttgtggtcccagagaactgccgtggtctgaggcccgaaaggcacctcttgctgggcggcctcattctgttgcattcttcctcgaatgtctcccagggctttgaaggctgcctggatgctgtcgtggtcaacgaagaggctctagatctgctggcccctggcaagacggtggcaggcttgctggagacacaagccctcacccagtgctgcctccacagtgactactgcagccagaacacatgcctcaatggtgggaagtgctcatggacccacggggcaggctatgtctgcaaatgtcccccacagttctctgggaagcactgtgaacaaggaagggagaactgtacttttgcaccctgcctggaaggtggaacttgcatcctctcccccaaaggagcttcctgtaactgccctcatccttacacaggagacaggtgtgaaatggaggcgaggggttgttcagaaggacactgcctagtcactcccgagatccaaaggggggactgggggcagcaggagttactgatcatcacagtggccgtggcgttcattatcataagcactgtcgggcttctcttctactgccgccgttgcaagtctcacaagcctgtggccatggaggacccagacctcctggccaggagtgttggtgttgacacccaagccatgcctgccatcgagctcaacccattgagtgccagctcctgcaacaacctcaaccaaccggaacccagcaaggcctctgttccaaatgaactcgtcacatttggacccaattctaagcaacggccagtggtctgcagtgtgccccccagactcccgccagctgcggtcccttcccactctgacaatgagcctgtcattaagagaacctggtccagcgaggagatggtgtaccctggcggagccatggtctggccccctacttactccaggaacgaacgctgggaatacccccactccgaagtgactcagggccctctgccgccctcggctcaccgccactcaaccccagtcgtgatgccagagcctaatggcctctatgggggcttccccttccccctggagatggaaaacaagcgggcacctctcccaccccgttacagcaaccagaacctggaagatctgatgccctctcggccccctagtccccgggagcgcctggttgccccctgtctcaatgagtacacggccatcagctactaccactcgcagttccggcagggagggggagggccctgcctggcagacgggggctacaagggggtgggtatgcgcctcagccgagctgggccctcttatgctgtctgtgaggtggagggggcacctcttgcaggccagggccagccccgggtgccccccaactatgagggctctgacatggtggagagtgattatggcagctgtgaggaggtcatgttctagcttcccattcccagagcaaggcaggcgggaggccaaggactggacttggcttatttcttcctgtctcgtagggggtgagttgagtgtggctgggagagtgggagggaagccctcagcccaggctgttgtcccttgaaatgtgctcttccaatcccccacctagtccctgagggtggagggaagctgaggatagagctccagaaacagcactagggtcccaggagaggggcatttctagagcagtgaccctggaaaaccaggaacaattgactcccggggtgggcgagagacaggagggctccctgatctgccggctctcagtccccggggcagagcctgattgactgtgctggctcaacttcaccaagatgcattctcatacctgcccacagctccattttggaggcaggcaggttggtgcctgacagacaaccactacgcgggccgtacagaggagctctagagggctgcgtggcatcctcctaggggctgagaggtgagcagcaggggagcgggcacagtcccctctgcccctgcctcagtcgagcactcactgtgtctttgtcaagtgtctgctccacgtcaggcactgtgctttgcaccggggagaaaatggtgatggagggcaacaaggactccgaggagcaccaccaggcctcgggccccagaggtcccactcctcagcctacacgcagaggaacgggcccacctcagagtcacaccactggctgccagtcagggcctgccaggagtctacacagctctgaaccttctttgttaaagaattcagacctcatggaactctgggttcttcatcccaagtttcccaggcacttttggccaaaggaaggaaggaactaattcttcattttaaaaattcttaggcactttttgaccttgctgtctggatgagtttcctcaatgggatttttcttccctagacacaaggaagtctgaactcctatttagggccggttggaagcagggagctggaccgcagtgtccaggctggacacctgccattgcctcctctccattgcagacgcctgcccatcaagtattacctgcggcgactcaaccctatgcatggagggtcaatgtgggcacatgtctacacatgtgggtgcccatggatagtacgtgtgtacacatgtgtagagtgtatgtagccaggagtggtggggaccagaagcctctgtggcctttggtgacctcaccactccctcccacccagtccctccctctggtccactgccttttcatatgtgttgtttctggagacagaagtcaaaaggaagagcagtggagccttgcccacagggctgctgcttcatgcgagagggagatgtgtgggcgagagccaatttgtgtgagtggtttgtggctgtgtgtgtgactgtgagtgtgagtgacagatacatagtttcattggtcattttttttttaacaataaagtatctttttttactgttaaaaaaaaaaaaaaaaaaaaaaaaaaaaaaaaaaaaaaaaaaaaagagggggggggggcaaaaagattccccggggggggcccaattctacgggctacaacagaggtttttctttggtaaaagggggggccccataataggggagagccgttattattacaaccgacatgagagaccgggcgccgcgatgtattacaccaaacggttcgagacagactggggaaaacacgtcggtcacgtggggagagaacttgtggggagcaggagccacattaatactatggcgggggggggcgagcaaccataagttgggggagccaacgcctaccccataaccgagggaatactaccacagcccccctataagggggtacaaatacttaaacaatctttcaagggagggcataacgggtggtgtctaaccaccacgagcgggcaaaatatggacgtgcacgggatgagaacaaaattttggggctcccggggggtatttaaccgtgtggcaaacacttattc

SEQ ID NO: 67023 - DNA, 3157 bp, Homo sapiens
agcactttgagggtttttatgctctgcaaatgccatgtctaaaacagccaaacacccccctcctacccataaaaatacaaacaacattctttgaactggcagcctcttagcaggtttacaaggactccttggctttgctgatggctgtttggatttcctttgcagctggccagtggagtgccccagctggaataccactgtctgggtggtttctatggaaacctttcctcccagcgccatgtgaatgaccacgagtggcactccatcctggtggaggagatggacgcttccattcgcctgatggttgacagcatgggcaacacctcccttgtggtcccagagaactgccgtggtctgaggcccgaaaggcacctcttgctgggcggcctcattctgttgcattcttcctcgaatgtctcccagggctttgaaggctgcctggatgctgtcgtggtcaacgaagaggctctagatctgctggcccctggcaagacggtggcaggcttgctggagacacaagccctcacccagtgctgcctccacagtgactactgcagccagaacacatgcctcaatggtgggaagtgctcatggacccacggggcaggctatgtctgcaaatgtcccccacagttctctgggaagcactgtgaacaaggaagggagaactgtacttttgcaccctgcctggaaggtggaacttgcatcctctcccccaaaggagcttcctgtaactgccctcatccttacacaggagacaggtgtgaaatggaggcgaggggttgttcagaaggacactgcctagtcactcccgagatccaaaggggggactgggggcagcaggagttactgatcatcacagtggccgtggcgttcattatcataagcactgtcgggcttctcttctactgccgccgttgcaagtctcacaagcctgtggccatggaggacccagacctcctggccaggagtgttggtgttgacacccaagccatgcctgccatcgagctcaacccattgagtgccagctcctgcaacaacctcaaccaaccggaacccagcaaggcctctgttccaaatgaactcgtcacatttggacccaattctaagcaacggccagtggtctgcagtgtgccccccagactcccgccagctgcggtcccttcccactctgacaatgagcctgtcattaagagaacctggtccagcgaggagatggtgtaccctggcggagccatggtctggccccctacttactccaggaacgaacgctgggaatacccccactccgaagtgactcagggccctctgccgccctcggctcaccgccactcaaccccagtcgtgatgccagagcctaatggcctctatgggggcttccccttccccctggagatggaaaacaagcgggcacctctcccaccccgttacagcaaccagaacctggaagatctgatgccctctcggccccctagtccccgggagcgcctggttgccccctgtctcaatgagtacacggccatcagctactaccactcgcagttccggcagggagggggagggccctgcctggcagacgggggctacaagggggtgggtatgcgcctcagccgagctgggccctcttatgctgtctgtgaggtggagggggcacctcttgcaggccagggccagccccgggtgccccccaactatgagggctctgacatggtggagagtgattatggcagctgtgaggaggtcatgttctagcttcccattcccagagcaaggcaggcgggaggccaaggactggacttggcttatttcttcctgtctcgtagggggtgagttgagtgtggctgggagagtgggagggaagccctcagcccaggctgttgtcccttgaaatgtgctcttccaatcccccacctagtccctgagggtggagggaagctgaggatagagctccagaaacagcactagggtcccaggagaggggcatttctagagcagtgaccctggaaaaccaggaacaattgactcccggggtgggcgagagacaggagggctccctgatctgccggctctcagtccccggggcagagcctgattgactgtgctggctcaacttcaccaagatgcattctcatacctgcccacagctccattttggaggcaggcaggttggtgcctgacagacaaccactacgcgggccgtacagaggagctctagagggctgcgtggcatcctcctaggggctgagaggtgagcagcaggggagcgggcacagtcccctctgcccctgcctcagtcgagcactcactgtgtctttgtcaagtgtctgctccacgtcaggcactgtgctttgcaccggggagaaaatggtgatggagggcaacaaggactccgaggagcaccaccaggcctcgggccccagaggtcccactcctcagcctacacgcagaggaacgggcccacctcagagtcacaccactggctgccagtcagggcctgccaggagtctacacagctctgaaccttctttgttaaagaattcagacctcatggaactctgggttcttcatcccaagtttcccaggcacttttggccaaaggaaggaaggaactaattcttcattttaaaaattcttaggcactttttgaccttgctgtctggatgagtttcctcaatgggatttttcttccctagacacaaggaagtctgaactcctatttagggccggttggaagcagggagctggaccgcagtgtccaggctggacacctgccattgcctcctctccattgcagacgcctgcccatcaagtattacctgcggcgactcaaccctatgcatggagggtcaatgtgggcacatgtctacacatgtgggtgcccatggatagtacgtgtgtacacatgtgtagagtgtatgtagccaggagtggtggggaccagaagcctctgtggcctttggtgacctcaccactccctcccacccagtccctccctctggtccactgccttttcatatgtgttgtttctggagacagaagtcaaaaggaagagcagtggagccttgcccacagggctgctgcttcatgcgagagggagatgtgtgggcgagagccaatttgtgtgatgtgatctcgctcgggatcctctagacgaccc

SEQ ID NO: 67024 - DNA, 1579 bp, Homo sapiens
gtcggtaccggtgtatatcgatgccaccatgtctgtgccccccaactatgagggctctgacatggtggagagtgattatggcagctgtgaggaggtcatgttctagcttcccattcccagagcaaggcaggcgggaggccaaggactggacttggcttatttcttcctgtctcgtagggggtgagttgagtgtggctgggagagtgggagggaagccctcagcccaggctgttgtcccttgaaatgtgctcttccaatcccccacctagtccctgagggtggagggaagctgaggatagagctccagaaacagcactagggtcccaggagaggggcatttctagagcagtgaccctggaaaaccaggaacaattgactcccggggtgggcgagagacaggagggctccctgatctgccggctctcagtccccggggcagagcctgattgactgtgctggctcaacttcaccaagatgcattctcatacctgcccacagctccattttggaggcaggcaggttggtgcctgacagacaaccactacgcgggccgtacagaggagctctagagggctgcgtggcatcctcctaggggctgagaggtgagcagcaggggagcgggcacagtcccctctgcccctgcctcagtcgagcactcactgtgtctttgtcaagtgtctgctccacgtcaggcactgtgctttgcaccggggagaaaatggtgatggagggcaacaaggactccgaggagcaccaccaggcctcgggccccagaggtcccactcctcagcctacacgcagaggaacgggcccacctcagagtcacaccactggctgccagtcagggcctgccaggagtctacacagctctgaaccttctttgttaaagaattcagacctcatggaactctgggttcttcatcccaagtttcccaggcacttttggccaaaggaaggaaggaactaattcttcattttaaaaattcttaggcactttttgaccttgctgtctggatgagtttcctcaatgggatttttcttccctagacacaaggaagtctgaactcctatttagggccggttggaagcagggagctggaccgcagtgtccaggctggacacctgccattgcctcctctccattgcagacgcctgcccatcaagtattacctgcggcgactcaaccctatgcatggagggtcaatgtgggcacatgtctacacatgtgggtgcccatggatagtacgtgtgtacacatgtgtagagtgtatgtagccaggagtggtggggaccagaagcctctgtggcctttggtgacctcaccactccctcccacccagtccctccctctggtccactgccttttcatatgtgttgtttctggagacagaagtcaaaaggaagagcagtggagccttgcccacagggctgctgcttcatgcgagagggagatgtgtgggcgagagccaatttgtgtgagtggtttgtggctgtgtgtgtgactgtgagtgtgagtgacagatacatagtttcattggtcattttttttttaacaataaagtatctttttttactgtta

SEQ ID NO: 67025 - DNA, 934 bp, Homo sapiens
ttagctagtagaggcctgggtgaatcggcagagggttgtccagtcaggcactgtgctttgcaccggggagaaaatggtgatggagggcaacaaggactccgaggagcaccaccaggcctcgggccccagaggtcccactcctcagcctacacgcagaggaacgggcccacctcagagtcacaccactggctgccagtcagggcctgccaggagtctacacagctctgaaccttctttgttaaagaattcagacctcatggaactctgggttcttcatcccaagtttcccaggcacttttggccaaaggaaggaaggaactaattcttcattttaaaaattcttaggcactttttgaccttgctgtctggatgagtttcctcaatgggatttttcttccctagacacaaggaagtctgaactcctatttagggccggttggaagcagggagctggaccgcagtgtccaggctggacacctgccattgcctcctctccattgcagacgcctgcccatcaagtattacctgcggcgactcaaccctatgcatggagggtcaatgtgggcacatgtctacacatgtgggtgcccatggatagtacgtgtgtacacatgtgtagagtgtatgtagccaggagtggtggggaccagaagcctctgtggcctttggtgacctcaccactccctcccacccagtccctccctctggtccactgccttttcatatgtgttgtttctggagacagaagtcaaaaggaagagcagtggagccttgcccacagggctgctgcttcatgcgagagggagatgtgtgggcgagagccaatttgtgtgagtggtttgtggctgtgtgtgtgactgtgagtgtgagtgacagatacatagtttcattggtcattttttttttaacaataaagtatctttttttactgtta

SEQ ID NO: 67026 - DNA, 1090 bp, Homo sapiens
agcactttgagggtttttatgctctgcaaatgccatgtctaaaacagccaaacacccccctcctacccataaaaatacaaacaacattctttgaactggcagcctcttagcaggtttacaaggactccttggctttgctgatggctgtttggatttcctttgcagctggccagtggagtgccccagctggaataccactgtctgggtggtttctatggaaacctttcctcccagcgccatgtgaatgaccacgagtggcactccatcctggtggaggagatggacgcttccattcgcctgatggttgacagcatgggcaacacctcccttgtggtcccagagaactgccgtggtctgaggcccgaaaggcacctcttgctgggcggcctcattctgttgcattcttcctcgaatgtctcccagggctttgaaggctgcctggatgctgtcgtggtcaacgaagaggctctagatctgctggcccctggcaagacggtggcaggcttgctggagacacaagccctcacccagtgctgcctccacagtgactactgcagccagaacacatgcctcaatggtgggaagtgctcatggacccacggggcaggctatgtctgcaaatgtcccccacagttctctgggaagcactgtgaacaaggaagggagaactgtacttttgcaccctgcctggaaggtggaacttgcatcctctcccccaaaggagcttcctgtaactgccctcatccttacacaggagacaggtgtgaaatggaggcgaggggttgttcagaaggacactgcctagtcactcccgagatccaaaggggggactgggggcagcaggagttactgatcatcacagtggccgtggcgttcattatcataagcactgtcgggcttctcttctactgccgccgttgcaagtctcacaagcctgtggccatggaggacccagacctcctggccaggagtgttggtgttgacacccaagccatgcctgccatcgagctcaacccattgagtgccagctcctgcaacaacctcaaccaaccggaacccagcaaagaccccaaaagagcaaagaccccaa

SEQ ID NO: 67027 - DNA, 516 bp, Homo sapiens
ttttaacaataaagtatctttttttactgttattttctgtgtcctttagcctgtttggggtcaggggaacgatgcaagggtccacaggccgttccaagattcatggattttgggagctggaagggatcctagagattgtcaagcaacagagattcccaacctggcaacattacctatcccagacacaaaaccagaacttctgggggtggggcccaggaaactatttggaaaaaaccctctgcctctgatacaactgtctgcagtggttcaagcccctccatttagatggggctctggggctctgaggctctgagtgatgagtccactaactagcaggctagctaaagcccaggacaagacctggggcttcctgcccttgccagcactctttgcactgcatggcattagttacggagaagggacttaactatcagaagtcttgggaagctggccctcctgggacccagagtcagcctctggctgctactccacagcgcacccttagtcgccagctaa

SEQ ID NO: 67028 - DNA, 582 bp, Homo sapiens
ggggggtgaaaaacgggagatggtaggttttggggggagcagtctctatcccatagatctctgtaagaggggacatggaaagggcaatttcatgacttggccccctgactactctgtctccgcaggtgtgaaatggaggcgaggggttgttcagaaggacactgcctagtcactcccgagatccaaaggggggactgggggcagcaggagttactgatcatcacagtggccgtggcgttcattatcataagcactgtcgggcttctcttctactgccgccgttgcaagtctcacaagcctgtggccatggaggacccagacctcctggccaggagtgttggtgttgacacccaagccatgcctgccatcgagctcaacccattgagtgccagctcctgcaacaacctcaaccaaccggaacccagcaaggcctctgttccaaatgaactcgtcacatttggacccaattctaagcaacggccagtggtctgcagtgtgccccccagactcccgccagctgcggtcccttcccactctgacaatgagcctgtcattaagagaacctggtccagcgaggagatg

SEQ ID NO: 67029 - DNA, 631 bp, Homo sapiens
attggattctatgttatcaacgtaagccaacagagacaacctgcacagatgggcctatgcccacccactcccatctccaccactcgctaggttatatatagttgctatagagccagctgaaaccttccggggagaaaatgagctcaccctatcttgctgttccctttcagtgtaccctggcggagccatggtctggccccctacttactccaggaacgaacgctgggaatacccccactccgaagtgactcagggccctctgccgccctcggctcaccgccactcaaccccagtcgtgatgccagagcctaatggcctctatgggggcttccccttccccctggagatggaaaacaagcgggcacctctcccaccccgttacagcaaccagaacctggaagatctgatgccctctcggccccctagtccccgggagcgcctggttgccccctgtctcaatgagtacacggccatcagctactaccactcgcagttccggcagggagggggagggccctgcctggcagacgggggctacaagggggtgggtatgcgcctcagccgagctgggccctcttatgctgtctgtgaggtggagggggcacctcttgcaggccagggccagccccgg

SEQ ID NO: 67030 - DNA, 563 bp, Homo sapiens
tccacttccgcttccggcgctgcggcagtccagatcaaaaatggcggtagttggtgtgtcctcggtttctcggctgctgggtcggtcccgcccacagctggggcggcctatgtcgagtggcgcccatggcgaagagggctcagctcgcatgtggaagactctcaccttcttcgtcgcgctccccggggtggcagtcagcatgctgaatgtgtacctgaagtcgcaccacggagagcacgagagacccgagttcatcgcctacccccatctccgcatcaggaccaagccgtttccctggggagatggtaaccatactctattccataaccctcatgtgaatccacttccaactggctacgaagatgaataaagagaatctggaccactacccgggcaccagggaccacagcactggtttggaccgttactctgcacatggaccagaaaaagtatatgggaccttaagctcaccttctttacttgtatcaaatgatgactggtatactggtctcccatccctttgcttgtggcaggagatggcttaaataaataacttaaactta

SEQ ID NO: 67031 - DNA, 552 bp, Homo sapiens
caacttaggctagggtacgaggcctgggttgtcgggtagttggtgtgtcctcggtttctcggctgctgggtcggtcccgcccacagctggggcggcctatgtcgagtggcgcccatggcgaagagggctcagctcgcatgtggaagactctcaccttcttcgtcgcgctccccggggtggcagtcagcatgctgaatgtgtacctgaagtcgcaccacggagagcacgagagacccgagttcatcgcctacccccatctccgcatcaggaccaagccgtttccctggggagatggtaaccatactctattccataaccctcatgtgaatccacttccaactggctacgaagatgaataaagagaatctggaccactacccgggcaccagggaccacagcactggtttggaccgttactctgcacatggaccagaaaaagtatatgggaccttaagctcaccttctttacttgtatcaaatgatgactggtatactggtctcccatccctttgcttgtggcaggagatggcttaaataaataacttaaactta

SEQ ID NO: 67032 - DNA, 540 bp, Homo sapiens
caggctggagtgcagtggcatgatctcagctcactgcaacttgccctgccaggggcaagcgattcctgtgcctcagccacccgggtagctgggattacaggtgtgcgccaccatgcccagctcgcatgtggaagactctcaccttcttcgtcgcgctccccggggtggcagtcagcatgctgaatgtgtacctgaagtcgcaccacggagagcacgagagacccgagttcatcgcctacccccatctccgcatcaggaccaagccgtttccctggggagatggtaaccatactctattccataaccctcatgtgaatccacttccaactggctacgaagatgaataaagagaatctggaccactacccgggcaccagggaccacagcactggtttggaccgttactctgcacatggaccagaaaaagtatatgggaccttaagctcaccttctttacttgtatcaaatgatgactggtatactggtctcccatccctttgcttgtggcaggagatggcttaaataaataacttaaactta

SEQ ID NO: 67033 - DNA, 512 bp, Homo sapiens
atccatatttgtttctggaattaaaactgtcctgtagccaggataactttaagggctcccctggtagttataagagctccttaaataatgggaaggttgaactacaccagtagataaaggactaatttccattttgtttttatatatgatctgtcaccccgttataagcagttcatgacggtgttctttctaaattattttctggaattatctaactgacatcttcactccacagccgtttccctggggagatggtaaccatactctattccataaccctcatgtgaatccacttccaactggctacgaagatgaataaagagaatctggaccactacccgggcaccagggaccacagcactggtttggaccgttactctgcacatggaccagaaaaagtatatgggaccttaagctcaccttctttacttgtatcaaatgatgactggtatactggtctcccatccctttgcttgtggcaggagatggcttaaataaataacttaaactta

SEQ ID NO: 67034 - DNA, 1009 bp, Homo sapiens
  misc_feature (786)..(786): n is a, c, g, or t
tccacttccgcttccggcgctgcggcagtccagatcaaaaatggcggtagttggtgtgtcctcggtttctcggctgctgggtcggtcccgcccacagctggggcggcctatgtcgagtggcgcccatggcgaagagggctcagctcgcatgtggaagactctcaccttcttcgtcgcgctccccggggtggcagtcagcatgctgaatgtgtacctgaagtcgcaccacggagagcacgagagacccgagttcatcgcctacccccatctccgcatcaggaccaagccgtttccctggggagatggtaaccatactctattccataaccctcatgtgaatccacttccaactggctacgaagatgaataaagagaatctggaccactacccgggcaccagggaccacagcactggtttggaccgttactctgcacatggaccagaaaaagtatatgggaccttaagctcaccttctttacttgtatcaaatgatgactggtatactggtctcccatccctttgcttgtggcaggagatggcttaaataaataacttaaacttaaaaaaaaaacaaaaaaaaaaaaaaaaaaaaaaaaaaaaaaaaaaaaaagggggggttttttggggggggggaaaaaagggtgtaaaaggggcaggggtcacaaagtgtcgttccccggaccccccgtcttttggcaccaggggggagaatcgcggggggcccccaaaagggggggggcataaatcggagaacgcgggtacctgtaatatccggcgacagcacnccctcacagcatcagcgacaacaccacaccaacaggacgcccaccgatcgtacaccaacagcccgacacaacacgaaccacatacacaaccatacacatagtcacccacacaacccaacgacatcctccctaagcacaacgaccaacgccactacacactactaaccacaccgcaccactaccccacacatcatcccaaacctacgcagctcacacgcgacgc

SEQ ID NO: 67035 - DNA, 916 bp, Homo sapiens
tccacttccgcttccggcgctgcggcagtccagatcaaaaatggcggtagttggtgtgtcctcggtttctcggctgctgggtcggtcccgcccacagctggggcggcctatgtcgagtggcgcccatggcgaagagggctcagctcgcatgtggaagactctcaccttcttcgtcgcgctccccggggtggcagtcagcatgctgaatgtgtacctgaagtcgcaccacggagagcacgagagacccgagttcatcgcctacccccatctccgcatcaggaccaagccgtttccctggggagatggtaaccatactctattccataaccctcatgtgaatccacttccaactggctacgaagatgaataaagagaatctggaccactacccgggcaccagggaccacagcactggtttggaccgttactctgcacatggaccagaaaaagtatatgggaccttaagctcaccttctttacttgtatcaaatgatgactggtatactggtctcccatccctttgcttgtggcaggagatggcttaaataaataacttaaacttaaaaaaaaaacaaaaaaaaaaaaaaaaaaaaaaaaaaaaaaaaaaaaaacctccggcggaccctactcttgcggggggcgagaaaaaggagcacacgaatgggcacagggtgaccacagttgtttcctgaccccagttttctgtcaccagagggggggaaatactcggcggggcccccaaagaaaggggggcagagaaaagctgcggaaccaccgcggggtcacccgataatactgccgagcagaaacaggcggagaacgcacccgcgcagcagggcggcccaagttgcaacagcaggcctatcgaacaaccattctaggaaaacacagcgtgacaccaaaacacgcaacacgt

SEQ ID NO: 67036 - DNA, 1181 bp, Homo sapiens
tccacttccgcttccggcgctgcggcagtccagatcaaaaatggcggtagttggtgtgtcctcggtttctcggctgctgggtcggtcccgcccacagctggggcggcctatgtcgagtggcgcccatggcgaagagggctcagctcgcatgtggaagactctcaccttcttcgtcgcgctccccggggtggcagtcagcatgctgaatgtgtacctgaagtcgcaccacggagagcacgagagacccgagttcatcgcctacccccatctccgcatcaggaccaagccgtttccctggggagatggtaaccatactctattccataaccctcatgtgaatccacttccaactggctacgaagatgaataaagagaatctggaccactacccgggcaccagggaccacagcactggtttggaccgttactctgcacatggaccagaaaaagtatatgggaccttaagctcaccttctttacttgtatcaaatgatgactggtatactggtctcccatccctttgcttgtggcaggagatggcttaaataaataacttaaacttaaggaaacaaaaaaacaaacaaacaaaaaaaaaaaaacaaaaaaaaaaaaaaaaaaaaaaaaaaaaaaaaacaaaaagggggcgcgcgcgcgcccatcagaaaatatctctcccccggggggccccacacattcagcgcgcgtacccccacacattgtttctataagaaaacaagagggtgcccccactataaatgagaagcagggttatatatatataaatacccaaggacgacgagcacctgggcgagcagtagttataataaaaaacgacgtgcaagaaaggagcgacaaacacagtgtagacgagagaggaagattctttgagaagaaggcaccatactatttcgggagggggaggagaccaaaccagtgggagcgacaacccatcccaccactgaggatatatttaagagactgctacataggggagaataatcatataaatatataaacggaggtgtataatgggggggtgataaaacaataagaggcaattatatatgagatggcgaggctaggaagagaaactgttgggaggacacaaggggggattgtaaattttggtgagagagaattttttttatagaggagagggagatattgctaataaaaaaggg

SEQ ID NO: 67037 - DNA, 5919 bp, Homo sapiens
  misc_feature (3053)..(3053): n is a, c, g, or t
ccaactcctggagtcccctgggagctgccgctgcaggcccccgagccgctaggccccgccgccaggccaccgctgctgcggcagccatggcggaagttcatagacgtcagcatgctcgggttaaaggagaagcccccgcgaaatcctccacactccgagatgaggaggagctggggatggcgtcggccgaaacgctgaccgtgtttctgaagctgctggccgccggcttttacggcgtgagctccttcctgatcgtggtggtgaataagagcgtgctcaccaattacagatttccctcctcactatgtgttggacttggccagatggtggccacagtggcagttctctgggtgggaaaggcgctcagagtagtcaagtttcctgaccttgacagaaatgtacctcgaaagacgtttccactacctctactatattttgggaaccaaatcacgggactgttcagcacaaagaaactgaacttgccaatgtttacagttctgagaaggttctccatcctgtttacaatgtttgctgaaggagttttactcaagaagactttttcttggggtattaaaatgactgtatttgcaatgattattggagcctttgtagctgccagctctgacttggcatttgatctggaaggatatgcttttattctgataaacgatgtcctaacagcagcaaatggtgcatacgtaaaacaaaaattagattcaaaagagctgggaaaatatggactgctctattacaatgcactgttcatgattctgcccaccctggccattgcgtatttcacaggagatgcacaaaaggctgtggagtttgaaggctgggctgacaccctctttcttctgcagttcaccctctcctgtgtgatggggtttatcttaatgtacgccacagtactctgcacgcagtataattctgctcttacaactacaatagttggctgtattaagaatatattaataacttatattggaatggtctttggtggagattatattttcacgtggacaaacttcattggtttaaatatcagcattgctgggagcctggtatattcctatatcactttcactgaagagcagctgagcaaacagtcagaggctaataacaagctggacattaaggggaaaggagcagtgtgaccagaggattgcttcatctgatacgtaggcctaagtttttaatcaactcagaacactggcagttcctacagagacactgaggtgtcttgattatggaggaaataaccattcctttgcacttgtacaatctgaggattgattgctgccttttaaaattttatgaagagagaaacttataattgactctattttaaatatgttgtttgaattaatttatatcagactggaaaaggtactgggctttttaatttatttttcttatatgccgacagtgaaacatcagtgttttgaaagtattttatttcataatttgatatccaggtgtccctgagagctgcatatgtaatgtttgccaactggagcttcatcattcaaattgttgctgcatctggaggcagtttagcctttcctctgctggaaatgcagacgaatatgtgaaatttctcttctttgaatcttatttcttatgattgcattgtcttcatcatatcatcattccatttgccaaggaaaacaactttggcactataaaaatatgtggggctttgaagtgtattgctatctatgttggcttccctgactttcataggatgagcagagtgcattccttgaaaacatgttctttttttgttgtgtagaatggggataatgaagggggtgagaaagtaggccttttactaatttttcatctatttgacttattgattcaactaaaatgttttaagtatatgtgccaggcattgtgctaaatgctggggatacagagatgtttgcagaggtagttgaaacatctcactcctgccatagtgactcaggtaaggttgagaatttagctctgttaatctattcagaagatgtcactaagagtaagttgtttcagcactcaaaagccgcaaatctgtaaattggattaagaacacctgccctacctacccggcaatagtgtgaatccaaatgctgcaatgtgagatgaggtacaagtaaagagctgtgttttgtaaaccagtgcagctcagcattgactccctctctaagtgaaaattgcagacaggcaagtctgttttcccttgccaccttcctttgggtttggttgctctttggatgaatatgatgaggtcccacatttctgaatttattggtttgaggggaaaggctggttagacgtctttgtattgtcaatggttggtttttctctggcagtgtcagtgttagagctatcatcttccttcttaaatggcatgagcaatgagcaaacttccctcctttcaacattctcacctacatcatgtgccccttggctcacctactgagcttgccaacttctctcaaaaccaatgctgcattttgggagagcagctgtgaatgggcactgcctaaattgcctcttggggtaatctggagggtggaggtgttaactcaaacataaccctatgacttgactcagagatatccattgactttgaggattagtgtgtttgctcaggccagttgtacagccagtgtgcaagagatttggtacctttgcactaatgcacacaccagtgtctatttcattgggtttggaatccactggactctgttgacctaaacagttagggttttgattttttttgatatgcaaatttatattgagatcattttcatattcctgtcttttggtttgtctttactaaagcttggctggtggtgctgtgtccctagaattatccctgcaaccaactcccaagttacaagcttcattaagagccttagactcacttttttctagcatcttctgacctgagaaaattccactgggagtaaaggatagtatcttgtgtcatatgggtcttactctccctattttaccaatgagaaaacaaaactcagagaaagatgacttgctaatacatcaaaccnatgtcctttttattgaactatgctgccatttaattaaccgcccttcccctctgagggagtaaggaaacagatcctgagttcacttgagcactttcaaaaaagcaagcagttgattgaatttggtgtcagagaggagcatactttgcaaatcaggaagagtgacagcttaccctgtcctggaacccttatcccacttccaggctgactttagttgataatgcacttctggctgtaaatgttgccaacacttcctggttttgcttaggtacagtgaaagggcatagtgagagctatttttagtgattctgttctttctgtcagcaacatgaaggagggacgtttgaataatttttgttgtagaatatttcttcatgaaaggcttttgggtgtctttaacaggtgttgggctagagccccaccaggagttgaactgcctcttgggggtcaggttccctaggagatctgtcacctcttcaggagtatttgagaacattgtgtagttacagcttcactaaatgcacgtgacaggcttctgtgccttgggagccctggcttatgctgaaacttctggctgaccagagcagtacagcaactttgccctgtctgtgttctgcttcctggatgcatccttcagccactaaccagcattgcaagatggagcagggtgaacaagctggagactgaatagtcttttggagtttgcgttttgattattgcaggcgtgttacaatatactggtgatttacctggtactgtggcacctcccagaaagtctggtttttgccccatgtttgatatttactaggcagaaattctttgtcctgttaactgcctcctgggagaaaaagaggcaatacagagttaaatccttaatttgcccactgagacagatgagctgtggtattccaaaagacaaattctatgactagtgtctcctgttcaatgtaagtgagaccctctttggccaatctgcttctagtcaaggctaaatggattggaataaccctagttggccaggctacacattgccagcatgtcccgttgagttttaattgcctcatgtggctgtggactttatgagtcaatcatttgtaggctccagtttgcacctagtttttttttttaaaaagtgcatttacacgcttttggtagtcctgttttatcaagaatccatggagggttttggtcagtacagctggtgcaggatcctcacggagaaacagtggagtttcacattgagttggtttgaaatggcaccccaggactttgggcctgccttacttgatagcctcgttcagtgagcaaagacttagtgagcagctcttgtatgccaagtattttgctaagctctggaaaaaagataaacaagacatggttcttgctttcaaggagtgtgtaattctttagccagatatggaaacctggaccctgagtgggagaaaggagacagatgaaaggagtccgtgattttgtaaccaagagctgcctgcatggttatgagtatcactgattttagggacgccccacagagctaaagcatttttttaatccgagaggacttttgtaactcatattagttaatcttctagctctgagatagcaacacagctcttagaattctgtaagtagcttgaggcctcctcctctactgtacatgttcttgctttcccaaaattgtaagtttggtttttcctatgaacaagactgtaattgatttttctctccctgaggaaaaaagttcggaataaatgagacatggatatgaaactacttagcacaatgcctggtacatattaggccctcagcaaatgtggctaccgtgtcattatttcatggtgagactcaaggcaaaacaagattcttaatttatgctccgtaaatgctagaggcttgggcaatacggtctgtcctgaaaaacaggactctgtgtctcattgcctctagaatccttaggtagcagtttctgttcactgtcttttcttttttaaaaatatctgctggacacaattacggccattacatgatgcaggtgattctacctattttttaaaaagaacaaaatttcttttatattgtgacagtacattttaataaaggaaaattattttcttccccctactccccctccttttttttttctggtaaagacagggtctcactctgttgccagactggtctcaaactcctggcctcaagtaacccttctgtctcagcctcccaaagtgctgggattacaggtgtgtgccacatgtccggccaggaaaattattttctatcttaaagaaacatagttacattttagaatgtcaattcagttaaatctttctcagtttttacctttagatggctcctggaaaggccagcgttccttttcccctctctgaattgaaagcacttgaccccatgctgcccctgcttccaggcctgtctcagttgtcatatattgtgagtccctggcaccattactgttttctaagccagtcttctaggtcttactttcaggatgctgcttcatggcatgaggatatagtttacagtgttgtagtttttttttttttaaagctttgttctttaaaaatactttttaaaaagaaatctactggttagatttattgtctcacaaaaatgtttttagagattatttttttcacaaatgttttctttctcatgctgatgatcaactgatttttgtctacaggtgttagcttctcacagtattttttcattttagagtctatttaccaaatgaccatttttagtgttaaaaggtactgaggaattgaggtatgtaaatcaggtgacataaacatgaaaattatgtgcctaaatatttttgtaatggtgtaaaataaatactttttcctga

SEQ ID NO: 67038 - DNA, 5898 bp, Homo sapiens
  misc_feature (3053)..(3053): n is a, c, g, or t
ccaactcctggagtcccctgggagctgccgctgcaggcccccgagccgctaggccccgccgccaggccaccgctgctgcggcagccatggcggaagttcatagacgtcagcatgctcgggttaaaggagaagcccccgcgaaatcctccacactccgagatgaggaggagctggggatggcgtcggccgaaacgctgaccgtgtttctgaagctgctggccgccggcttttacggcgtgagctccttcctgatcgtggtggtgaataagagcgtgctcaccaattacagatttccctcctcactatgtgttggacttggccagatggtggccacagtggcagttctctgggtgggaaaggcgctcagagtagtcaagtttcctgaccttgacagaaatgtacctcgaaagacgtttccactacctctactatattttgggaaccaaatcacgggactgttcagcacaaagaaactgaacttgccaatgtttacagttctgagaaggttctccatcctgtttacaatgtttgctgaaggagttttactcaagaagactttttcttggggtattaaaatgactgtatttgcaatgattattggagcctttgtagctgccagctctgacttggcatttgatctggaaggatatgcttttattctgataaacgatgtcctaacagcagcaaatggtgcatacgtaaaacaaaaattagattcaaaagagctgggaaaatatggactgctctattacaatgcactgttcatgattctgcccaccctggccattgcgtatttcacaggagatgcacaaaaggctgtggagtttgaaggctgggctgacaccctctttcttctgcagttcaccctctcctgtgtgatggggtttatcttaatgtacgccacagtactctgcacgcagtataattctgctcttacaactacaatagttggctgtattaagaatatattaataacttatattggaatggtctttggtggagattatattttcacgtggacaaacttcattggtttaaatatcagcattgctgggagcctggtatattcctatatcactttcactgaagagcagctgagcaaacagtcagaggctaataacaagctggacattaaggggaaaggagcagtgtgaccagaggattgcttcatctgatacgtaggcctaagtttttaatcaactcagaacactggcagttcctacagagacactgaggtgtcttgattatggaggaaataaccattcctttgcacttgtacaatctgaggattgattgctgccttttaaaattttatgaagagagaaacttataattgactctattttaaatatgttgtttgaattaatttatatcagactggaaaaggtactgggctttttaatttatttttcttatatgccgacagtgaaacatcagtgttttgaaagtattttatttcataatttgatatccaggtgtccctgagagctgcatatgtaatgtttgccaactggagcttcatcattcaaattgttgctgcatctggaggcagtttagcctttcctctgctggaaatgcagacgaatatgtgaaatttctcttctttgaatcttatttcttatgattgcattgtcttcatcatatcatcattccatttgccaaggaaaacaactttggcactataaaaatatgtggggctttgaagtgtattgctatctatgttggcttccctgactttcataggatgagcagagtgcattccttgaaaacatgttctttttttgttgtgtagaatggggataatgaagggggtgagaaagtaggccttttactaatttttcatctatttgacttattgattcaactaaaatgttttaagtatatgtgccaggcattgtgctaaatgctggggatacagagatgtttgcagaggtagttgaaacatctcactcctgccatagtgactcaggtaaggttgagaatttagctctgttaatctattcagaagatgtcactaagagtaagttgtttcagcactcaaaagccgcaaatctgtaaattggattaagaacacctgccctacctacccggcaatagtgtgaatccaaatgctgcaatgtgagatgaggtacaagtaaagagctgtgttttgtaaaccagtgcagctcagcattgactccctctctaagtgaaaattgcagacaggcaagtctgttttcccttgccaccttcctttgggtttggttgctctttggatgaatatgatgaggtcccacatttctgaatttattggtttgaggggaaaggctggttagacgtctttgtattgtcaatggttggtttttctctggcagtgtcagtgttagagctatcatcttccttcttaaatggcatgagcaatgagcaaacttccctcctttcaacattctcacctacatcatgtgccccttggctcacctactgagcttgccaacttctctcaaaaccaatgctgcattttgggagagcagctgtgaatgggcactgcctaaattgcctcttggggtaatctggagggtggaggtgttaactcaaacataaccctatgacttgactcagagatatccattgactttgaggattagtgtgtttgctcaggccagttgtacagccagtgtgcaagagatttggtacctttgcactaatgcacacaccagtgtctatttcattgggtttggaatccactggactctgttgacctaaacagttagggttttgattttttttgatatgcaaatttatattgagatcattttcatattcctgtcttttggtttgtctttactaaagcttggctggtggtgctgtgtccctagaattatccctgcaaccaactcccaagttacaagcttcattaagagccttagactcacttttttctagcatcttctgacctgagaaaattccactgggagtaaaggatagtatcttgtgtcatatgggtcttactctccctattttaccaatgagaaaacaaaactcagagaaagatgacttgctaatacatcaaaccnatgtcctttttattgaactatgctgccatttaattaaccgcccttcccctctgagggagtaaggaaacagatcctgagttcacttgagcactttcaaaaaagcaagcagttgattgaatttggtgtcagagaggagcatactttgcaaatcaggaagagtgacagcttaccctgtcctggaacccttatcccacttccaggctgactttagttgataatgcacttctggctgtaaatgttgccaacacttcctggttttgcttaggtacagtgaaagggcatagtgagagctatttttagtgattctgttctttctgtcagcaacatgaaggagggacgtttgaataatttttgttgtagaatatttcttcatgaaaggcttttgggtgtctttaacaggtgttgggctagagccccaccaggagttgaactgcctcttgggggtcaggttccctaggagatctgtcacctcttcaggagtatttgagaacattgtgtagttacagcttcactaaatgcacgtgacaggcttctgtgccttgggagccctggcttatgctgaaacttctggctgaccagagcagtacagcaactttgccctgtctgtgttctgcttcctggatgcatccttcagccactaaccagcattgcaagatggagcagggtgaacaagctggagactgaatagtcttttggagtttgcgttttgattattgcaggcgtgttacaatatactggtgatttacctggtactgtggcacctcccagaaagtctggtttttgccccatgtttgatatttactaggcagaaattctttgtcctgttaactgcctcctgggagaaaaagaggcaatacagagttaaatccttaatttgcccactgagacagatgagctgtggtattccaaaagacaaattctatgactagtgtctcctgttcaatgtaagtgagaccctctttggccaatctgcttctagtcaaggctaaatggattggaataaccctagttggccaggctacacattgccagcatgtcccgttgagttttaattgcctcatgtggctgtggactttatgagtcaatcatttgtaggctccagtttgcacctagtttttttttttaaaaagtgcatttacacgcttttggtagtcctgttttatcaagaatccatggagggttttggtcagtacagctggtgcaggatcctcacggagaaacagtggagtttcacattgagttggtttgaaatggcaccccaggactttgggcctgccttacttgatagcctcgttcagtgagcaaagacttagtgagcagctcttgtatgccaagtattttgctaagctctggaaaaatatggaaacctggaccctgagtgggagaaaggagacagatgaaaggagtccgtgattttgtaaccaagagctgcctgcatggttatgagtatcactgattttagggacgccccacagagctaaagcatttttttaatccgagaggacttttgtaactcatattagttaatcttctagctctgagatagcaacacagctcttagaattctgtaagtagcttgaggcctcctcctctactgtacatgttcttgctttcccaaaattgtaagtttggtttttcctatgaacaagactgtaattgatttttctctccctgaggaaaaaagttcggaataaatgagacatggatatgaaactacttagcacaatgcctggtacatattaggccctcagcaaatgtggctaccgtgtcattatttcatggtgagactcaaggcaaaacaagattcttaatttatgctccgtaaatgctagaggcttgggcaatacggtctgtcctgaaaaacaggactctgtgtctcattgcctctagaatccttaggtagcagtttctgttcactgtcttttcttttttaaaaatatctgctggacacaattacggccattacatgatgcaggtgattctacctattttttaaaaagaacaaaatttcttttatattgtgacagtacattttaataaaggaaaattattttcttccccctactccccctccttttttttttctggtaaagacagggtctcactctgttgccagactggtctcaaactcctggcctcaagtaacccttctgtctcagcctcccaaagtgctgggattacaggtgtgtgccacatgtccggccaggaaaattattttctatcttaaagaaacatagttacattttagaatgtcaattcagttaaatctttctcagtttttacctttagatggctcctggaaaggccagcgttccttttcccctctctgaattgaaagcacttgaccccatgctgcccctgcttccaggcctgtctcagttgtcatatattgtgagtccctggcaccattactgttttctaagccagtcttctaggtcttactttcaggatgctgcttcatggcatgaggatatagtttacagtgttgtagtttttttttttttaaagctttgttctttaaaaatactttttaaaaagaaatctactggttagatttattgtctcacaaaaatgtttttagagattatttttttcacaaatgttttctttctcatgctgatgatcaactgatttttgtctacaggtgttagcttctcacagtattttttcattttagagtctatttaccaaatgaccatttttagtgttaaaaggtactgaggaattgaggtatgtaaatcaggtgacataaacatgaaaattatgtgcctaaatatttttgtaatggtgtaaaataaatactttttcctgaaaacaagtattaaaattcctttgtaactgcata

SEQ ID NO: 67039 - DNA, 6147 bp, Homo sapiens
  misc_feature (3053)..(3053): n is a, c, g, or t
ccaactcctggagtcccctgggagctgccgctgcaggcccccgagccgctaggccccgccgccaggccaccgctgctgcggcagccatggcggaagttcatagacgtcagcatgctcgggttaaaggagaagcccccgcgaaatcctccacactccgagatgaggaggagctggggatggcgtcggccgaaacgctgaccgtgtttctgaagctgctggccgccggcttttacggcgtgagctccttcctgatcgtggtggtgaataagagcgtgctcaccaattacagatttccctcctcactatgtgttggacttggccagatggtggccacagtggcagttctctgggtgggaaaggcgctcagagtagtcaagtttcctgaccttgacagaaatgtacctcgaaagacgtttccactacctctactatattttgggaaccaaatcacgggactgttcagcacaaagaaactgaacttgccaatgtttacagttctgagaaggttctccatcctgtttacaatgtttgctgaaggagttttactcaagaagactttttcttggggtattaaaatgactgtatttgcaatgattattggagcctttgtagctgccagctctgacttggcatttgatctggaaggatatgcttttattctgataaacgatgtcctaacagcagcaaatggtgcatacgtaaaacaaaaattagattcaaaagagctgggaaaatatggactgctctattacaatgcactgttcatgattctgcccaccctggccattgcgtatttcacaggagatgcacaaaaggctgtggagtttgaaggctgggctgacaccctctttcttctgcagttcaccctctcctgtgtgatggggtttatcttaatgtacgccacagtactctgcacgcagtataattctgctcttacaactacaatagttggctgtattaagaatatattaataacttatattggaatggtctttggtggagattatattttcacgtggacaaacttcattggtttaaatatcagcattgctgggagcctggtatattcctatatcactttcactgaagagcagctgagcaaacagtcagaggctaataacaagctggacattaaggggaaaggagcagtgtgaccagaggattgcttcatctgatacgtaggcctaagtttttaatcaactcagaacactggcagttcctacagagacactgaggtgtcttgattatggaggaaataaccattcctttgcacttgtacaatctgaggattgattgctgccttttaaaattttatgaagagagaaacttataattgactctattttaaatatgttgtttgaattaatttatatcagactggaaaaggtactgggctttttaatttatttttcttatatgccgacagtgaaacatcagtgttttgaaagtattttatttcataatttgatatccaggtgtccctgagagctgcatatgtaatgtttgccaactggagcttcatcattcaaattgttgctgcatctggaggcagtttagcctttcctctgctggaaatgcagacgaatatgtgaaatttctcttctttgaatcttatttcttatgattgcattgtcttcatcatatcatcattccatttgccaaggaaaacaactttggcactataaaaatatgtggggctttgaagtgtattgctatctatgttggcttccctgactttcataggatgagcagagtgcattccttgaaaacatgttctttttttgttgtgtagaatggggataatgaagggggtgagaaagtaggccttttactaatttttcatctatttgacttattgattcaactaaaatgttttaagtatatgtgccaggcattgtgctaaatgctggggatacagagatgtttgcagaggtagttgaaacatctcactcctgccatagtgactcaggtaaggttgagaatttagctctgttaatctattcagaagatgtcactaagagtaagttgtttcagcactcaaaagccgcaaatctgtaaattggattaagaacacctgccctacctacccggcaatagtgtgaatccaaatgctgcaatgtgagatgaggtacaagtaaagagctgtgttttgtaaaccagtgcagctcagcattgactccctctctaagtgaaaattgcagacaggcaagtctgttttcccttgccaccttcctttgggtttggttgctctttggatgaatatgatgaggtcccacatttctgaatttattggtttgaggggaaaggctggttagacgtctttgtattgtcaatggttggtttttctctggcagtgtcagtgttagagctatcatcttccttcttaaatggcatgagcaatgagcaaacttccctcctttcaacattctcacctacatcatgtgccccttggctcacctactgagcttgccaacttctctcaaaaccaatgctgcattttgggagagcagctgtgaatgggcactgcctaaattgcctcttggggtaatctggagggtggaggtgttaactcaaacataaccctatgacttgactcagagatatccattgactttgaggattagtgtgtttgctcaggccagttgtacagccagtgtgcaagagatttggtacctttgcactaatgcacacaccagtgtctatttcattgggtttggaatccactggactctgttgacctaaacagttagggttttgattttttttgatatgcaaatttatattgagatcattttcatattcctgtcttttggtttgtctttactaaagcttggctggtggtgctgtgtccctagaattatccctgcaaccaactcccaagttacaagcttcattaagagccttagactcacttttttctagcatcttctgacctgagaaaattccactgggagtaaaggatagtatcttgtgtcatatgggtcttactctccctattttaccaatgagaaaacaaaactcagagaaagatgacttgctaatacatcaaaccnatgtcctttttattgaactatgctgccatttaattaaccgcccttcccctctgagggagtaaggaaacagatcctgagttcacttgagcactttcaaaaaagcaagcagttgattgaatttggtgtcagagaggagcatactttgcaaatcaggaagagtgacagcttaccctgtcctggaacccttatcccacttccaggctgactttagttgataatgcacttctggctgtaaatgttgccaacacttcctggttttgcttaggtacagtgaaagggcatagtgagagctatttttagtgattctgttctttctgtcagcaacatgaaggagggacgtttgaataatttttgttgtagaatatttcttcatgaaaggcttttgggtgtctttaacaggtgttgggctagagccccaccaggagttgaactgcctcttgggggtcaggttccctaggagatctgtcacctcttcaggagtatttgagaacattgtgtagttacagcttcactaaatgcacgtgacaggcttctgtgccttgggagccctggcttatgctgaaacttctggctgaccagagcagtacagcaactttgccctgtctgtgttctgcttcctggatgcatccttcagccactaaccagcattgcaagatggagcagggtgaacaagctggagactgaatagtcttttggagtttgcgttttgattattgcaggcgtgttacaatatactggtgatttacctggtactgtggcacctcccagaaagtctggtttttgccccatgtttgatatttactaggcagaaattctttgtcctgttaactgcctcctgggagaaaaagaggcaatacagagttaaatccttaatttgcccactgagacagatgagctgtggtattccaaaagacaaattctatgactagtgtctcctgttcaatgtaagtgagaccctctttggccaatctgcttctagtcaaggctaaatggattggaataaccctagttggccaggctacacattgccagcatgtcccgttgagttttaattgcctcatgtggctgtggactttatgagtcaatcatttgtaggctccagtttgcacctagtttttttttttaaaaagtgcatttacacgcttttggtagtcctgttttatcaagaatccatggagggttttggtcagtacagctggtgcaggatcctcacggagaaacagtggagtttcacattgagttggtttgaaatggcaccccaggactttgggcctgccttacttgatagcctcgttcagtgagcaaagacttagtgagcagctcttgtatgccaagtattttgctaagctctggaaaaaagataaacaagacatggttcttgctttcaaggagtgtgtaattctttagccagatatggaaacctggaccctgagtgggagaaaggagacagatgaaaggagtccgtgattttgtaaccaagagctgcctgcatggttatgagtatcactgattttagggacgccccacagagctaaagcatttttttaatccgagaggacttttgtaactcatattagttaatcttctagctctgagatagcaacacagctcttagaattctgtaagtagcttgaggcctcctcctctactgtacatgttcttgctttcccaaaattgtaagtttggtttttcctatgaacaagactgtaattgatttttctctccctgaggaaaaaagttcggaataaatgagacatggatatgaaactacttagcacaatgcctggtacatattaggccctcagcaaatgtggctaccgtgtcattatttcatggtgagactcaaggcaaaacaagattcttaatttatgctccgtaaatgctagaggcttgggcaatacggtctgtcctgaaaaacaggactctgtgtctcattgcctctagaatccttaggtagcagtttctgttcactgtcttttcttttttaaaaatatctgctggacacaattacggccattacatgatgcaggtgattctacctattttttaaaaagaacaaaatttcttttatattgtgacagtacattttaataaaggaaaattattttcttccccctactccccctcctttttttaaaaaaaaaaaaaaaaaaagaaagaaggtcttgctctgtcgccagccaggctggagtgtaatggcgtaatcatagcagctcaccacagtctcaaactcctaggctcaagtgatcctcctgccttagcctgctaagtagctacgactatagggcatgtgccattacgcctggctcgtttcttccttttcttttttttttctggtaaagacagggtctcactctgttgccagactggtctcaaactcctggcctcaagtaacccttctgtctcagcctcccaaagtgctgggattacaggtgtgtgccacatgtccggccaggaaaattattttctatcttaaagaaacatagttacattttagaatgtcaattcagttaaatctttctcagtttttacctttagatggctcctggaaaggccagcgttccttttcccctctctgaattgaaagcacttgaccccatgctgcccctgcttccaggcctgtctcagttgtcatatattgtgagtccctggcaccattactgttttctaagccagtcttctaggtcttactttcaggatgctgcttcatggcatgaggatatagtttacagtgttgtagtttttttttttttaaagctttgttctttaaaaatactttttaaaaagaaatctactggttagatttattgtctcacaaaaatgtttttagagattatttttttcacaaatgttttctttctcatgctgatgatcaactgatttttgtctacaggtgttagcttctcacagtattttttcattttagagtctatttaccaaatgaccatttttagtgttaaaaggtactgaggaattgaggtatgtaaatcaggtgacataaacatgaaaattatgtgcctaaatatttttgtaatggtgtaaaataaatactttttcctgaaaacaagtattaaaattcctttgtaactgcata

SEQ ID NO: 67040 - DNA, 995 bp, Homo sapiens
ccaactcctggagtcccctgggagctgccgctgcaggcccccgagccgctaggccccgccgccaggccaccgctgctgcggcagccatggcggaagttcatagacgtcagcatgctcgggttaaaggagaagcccccgcgaaatcctccacactccgagatgaggaggagctggggatggcgtcggccgaaacgctgaccgtgtttctgaagctgctggccgccggcttttacggcgtgagctccttcctgatcgtggtggtgaataagagcgtgctcaccaattacagatttccctcctcactatgtgttggacttggccagatggtggccacagtggcagttctctgggtgggaaaggcgctcagagtagtcaagtttcctgaccttgacagaaatgtacctcgaaagacgtttccactacctctactatattttgggaaccaaatcacgggactgttcagcacaaagaaactgaacttgccaatgtttacagttctgagaaggttctccatcctgtttacaatgtttgctgaaggagttttactcaagaagactttttcttggggtattaaaatgactgtatttgcaatgattattggagcctttgtagctgccagctctgacttggcatttgatctggaaggatatgcttttattctgataaacgatgtcctaacagcagcaaatggtgcatacgtaaaacaaaaattagattcaaaagagctgggaaaatatggactgctctattacaatgcactgttcatgattctgcccaccctggccattgcgtatttcacaggagatgcacaaaaggctgtggagtttgaaggctgggctgacaccctctttcttctgcagttcaccctctcctgtgtgatggggtttatcttaatgtacgccacagtactctgcacgcagtataattctgctcttacatgaaaattatgtgcctaaatatttttgtaatggtgtaaaataaatactttttcctga

SEQ ID NO: 67041 - DNA, 460 bp, Homo sapiens
gcctcatccttttggttttcttgtctatgaaattgagctctgcctgcttctgcctgcttcacagatgtacttaatggtaatttggtgcttgttgtcatctggctttgaatgcagagcggtgtgctattaaatgacatgaatgaccgttgctaattatgtgtttaaatgttagtgcctcttatttctgaggaatcccttattgaggtgaaattgcaaactatgaccagaaatcaagaaatactagtagctgataaaatgcctaatattcacttccctagatgagaatatgttcttgtaaatattttagcttatatctatttaaaattaaatgcatgttctttaagttgttcttaaagtgttgcttatgttttgcagctctgacttggcatttgatctggaaggatatgcttttattctgataaacgatgtcctaacagcagcaaatggtgcatacgtaaaa

SEQ ID NO: 67042 - DNA, 5952 bp, Homo sapiens
  misc_feature (3053)..(3053): n is a, c, g, or t
ccaactcctggagtcccctgggagctgccgctgcaggcccccgagccgctaggccccgccgccaggccaccgctgctgcggcagccatggcggaagttcatagacgtcagcatgctcgggttaaaggagaagcccccgcgaaatcctccacactccgagatgaggaggagctggggatggcgtcggccgaaacgctgaccgtgtttctgaagctgctggccgccggcttttacggcgtgagctccttcctgatcgtggtggtgaataagagcgtgctcaccaattacagatttccctcctcactatgtgttggacttggccagatggtggccacagtggcagttctctgggtgggaaaggcgctcagagtagtcaagtttcctgaccttgacagaaatgtacctcgaaagacgtttccactacctctactatattttgggaaccaaatcacgggactgttcagcacaaagaaactgaacttgccaatgtttacagttctgagaaggttctccatcctgtttacaatgtttgctgaaggagttttactcaagaagactttttcttggggtattaaaatgactgtatttgcaatgattattggagcctttgtagctgccagctctgacttggcatttgatctggaaggatatgcttttattctgataaacgatgtcctaacagcagcaaatggtgcatacgtaaaacaaaaattagattcaaaagagctgggaaaatatggactgctctattacaatgcactgttcatgattctgcccaccctggccattgcgtatttcacaggagatgcacaaaaggctgtggagtttgaaggctgggctgacaccctctttcttctgcagttcaccctctcctgtgtgatggggtttatcttaatgtacgccacagtactctgcacgcagtataattctgctcttacaactacaatagttggctgtattaagaatatattaataacttatattggaatggtctttggtggagattatattttcacgtggacaaacttcattggtttaaatatcagcattgctgggagcctggtatattcctatatcactttcactgaagagcagctgagcaaacagtcagaggctaataacaagctggacattaaggggaaaggagcagtgtgaccagaggattgcttcatctgatacgtaggcctaagtttttaatcaactcagaacactggcagttcctacagagacactgaggtgtcttgattatggaggaaataaccattcctttgcacttgtacaatctgaggattgattgctgccttttaaaattttatgaagagagaaacttataattgactctattttaaatatgttgtttgaattaatttatatcagactggaaaaggtactgggctttttaatttatttttcttatatgccgacagtgaaacatcagtgttttgaaagtattttatttcataatttgatatccaggtgtccctgagagctgcatatgtaatgtttgccaactggagcttcatcattcaaattgttgctgcatctggaggcagtttagcctttcctctgctggaaatgcagacgaatatgtgaaatttctcttctttgaatcttatttcttatgattgcattgtcttcatcatatcatcattccatttgccaaggaaaacaactttggcactataaaaatatgtggggctttgaagtgtattgctatctatgttggcttccctgactttcataggatgagcagagtgcattccttgaaaacatgttctttttttgttgtgtagaatggggataatgaagggggtgagaaagtaggccttttactaatttttcatctatttgacttattgattcaactaaaatgttttaagtatatgtgccaggcattgtgctaaatgctggggatacagagatgtttgcagaggtagttgaaacatctcactcctgccatagtgactcaggtaaggttgagaatttagctctgttaatctattcagaagatgtcactaagagtaagttgtttcagcactcaaaagccgcaaatctgtaaattggattaagaacacctgccctacctacccggcaatagtgtgaatccaaatgctgcaatgtgagatgaggtacaagtaaagagctgtgttttgtaaaccagtgcagctcagcattgactccctctctaagtgaaaattgcagacaggcaagtctgttttcccttgccaccttcctttgggtttggttgctctttggatgaatatgatgaggtcccacatttctgaatttattggtttgaggggaaaggctggttagacgtctttgtattgtcaatggttggtttttctctggcagtgtcagtgttagagctatcatcttccttcttaaatggcatgagcaatgagcaaacttccctcctttcaacattctcacctacatcatgtgccccttggctcacctactgagcttgccaacttctctcaaaaccaatgctgcattttgggagagcagctgtgaatgggcactgcctaaattgcctcttggggtaatctggagggtggaggtgttaactcaaacataaccctatgacttgactcagagatatccattgactttgaggattagtgtgtttgctcaggccagttgtacagccagtgtgcaagagatttggtacctttgcactaatgcacacaccagtgtctatttcattgggtttggaatccactggactctgttgacctaaacagttagggttttgattttttttgatatgcaaatttatattgagatcattttcatattcctgtcttttggtttgtctttactaaagcttggctggtggtgctgtgtccctagaattatccctgcaaccaactcccaagttacaagcttcattaagagccttagactcacttttttctagcatcttctgacctgagaaaattccactgggagtaaaggatagtatcttgtgtcatatgggtcttactctccctattttaccaatgagaaaacaaaactcagagaaagatgacttgctaatacatcaaaccnatgtcctttttattgaactatgctgccatttaattaaccgcccttcccctctgagggagtaaggaaacagatcctgagttcacttgagcactttcaaaaaagcaagcagttgattgaatttggtgtcagagaggagcatactttgcaaatcaggaagagtgacagcttaccctgtcctggaacccttatcccacttccaggctgactttagttgataatgcacttctggctgtaaatgttgccaacacttcctggttttgcttaggtacagtgaaagggcatagtgagagctatttttagtgattctgttctttctgtcagcaacatgaaggagggacgtttgaataatttttgttgtagaatatttcttcatgaaaggcttttgggtgtctttaacaggtgttgggctagagccccaccaggagttgaactgcctcttgggggtcaggttccctaggagatctgtcacctcttcaggagtatttgagaacattgtgtagttacagcttcactaaatgcacgtgacaggcttctgtgccttgggagccctggcttatgctgaaacttctggctgaccagagcagtacagcaactttgccctgtctgtgttctgcttcctggatgcatccttcagccactaaccagcattgcaagatggagcagggtgaacaagctggagactgaatagtcttttggagtttgcgttttgattattgcaggcgtgttacaatatactggtgatttacctggtactgtggcacctcccagaaagtctggtttttgccccatgtttgatatttactaggcagaaattctttgtcctgttaactgcctcctgggagaaaaagaggcaatacagagttaaatccttaatttgcccactgagacagatgagctgtggtattccaaaagacaaattctatgactagtgtctcctgttcaatgtaagtgagaccctctttggccaatctgcttctagtcaaggctaaatggattggaataaccctagttggccaggctacacattgccagcatgtcccgttgagttttaattgcctcatgtggctgtggactttatgagtcaatcatttgtaggctccagtttgcacctagtttttttttttaaaaagtgcatttacacgcttttggtagtcctgttttatcaagaatccatggagggttttggtcagtacagctggtgcaggatcctcacggagaaacagtggagtttcacattgagttggtttgaaatggcaccccaggactttgggcctgccttacttgatagcctcgttcagtgagcaaagacttagtgagcagctcttgtatgccaagtattttgctaagctctggaaaaaagataaacaagacatggttcttgctttcaaggagtgtgtaattctttagccagatatggaaacctggaccctgagtgggagaaaggagacagatgaaaggagtccgtgattttgtaaccaagagctgcctgcatggttatgagtatcactgattttagggacgccccacagagctaaagcatttttttaatccgagaggacttttgtaactcatattagttaatcttctagctctgagatagcaacacagctcttagaattctgtaagtagcttgaggcctcctcctctactgtacatgttcttgctttcccaaaattgtaagtttggtttttcctatgaacaagactgtaattgatttttctctccctgaggaaaaaagttcggaataaatgagacatggatatgaaactacttagcacaatgcctggtacatattaggccctcagcaaatgtggctaccgtgtcattatttcatggtgagactcaaggcaaaacaagattcttaatttatgctccgtaaatgctagaggcttgggcaatacggtctgtcctgaaaaacaggactctgtgtctcattgcctctagaatccttaggtagcagtttctgttcactgtcttttcttttttaaaaatatctgctggacacaattacggccattacatgatgcaggtgattctacctattttttaaaaagaacaaaatttcttttatattgtgacagtacattttaataaaggaaaattattttcttccccctactccccctccttttttttttctggtaaagacagggtctcactctgttgccagactggtctcaaactcctggcctcaagtaacccttctgtctcagcctcccaaagtgctgggattacaggtgtgtgccacatgtccggccaggaaaattattttctatcttaaagaaacatagttacattttagaatgtcaattcagttaaatctttctcagtttttacctttagatggctcctggaaaggccagcgttccttttcccctctctgaattgaaagcacttgaccccatgctgcccctgcttccaggcctgtctcagttgtcatatattgtgagtccctggcaccattactgttttctaagccagtcttctaggtcttactttcaggatgctgcttcatggcatgaggatatagtttacagtgttgtagtttttttttttttaaagctttgttctttaaaaatactttttaaaaagaaatctactggttagatttattgtctcacaaaaatgtttttagagattatttttttcacaaatgttttctttctcatgctgatgatcaactgatttttgtctacaggtgttagcttctcacagtattttttcattttagagtctatttaccaaatgaccatttttagtgttaaaaggtactgaggaattgaggtatgtaaatcaggtgacataaacatgaaaattatgtgcctaaatatttttgtaatggtgtaaaataaatactttttcctgaaaacaagtattaaaattcctttgtaactgcata

SEQ ID NO: 67043 - DNA, 1578 bp, Homo sapiens
ccaactcctggagtcccctgggagctgccgctgcaggcccccgagccgctaggccccgccgccaggccaccgctgctgcggcagccatggcggaagttcatagacgtcagcatgctcgggttaaaggagaagcccccgcgaaatcctccacactccgagatgaggaggagctggggatggcgtcggccgaaacgctgaccgtgtttctgaagctgctggccgccggcttttacggcgtgagctccttcctgatcgtggtggtgaataagagcgtgctcaccaattacagatttccctcctcactatgtgttggacttggccagatggtggccacagtggcagttctctgggtgggaaaggcgctcagagtagtcaagtttcctgaccttgacagaaatgtacctcgaaagacgtttccactacctctactatattttgggaaccaaatcacgggactgttcagcacaaagaaactgaacttgccaatgtttacagttctgagaaggttctccatcctgtttacaatgtttgctgaaggagttttactcaagaagactttttcttggggtattaaaatgactgtatttgcaatgattattggagcctttgtagctgccagctctgacttggcatttgatctggaaggatatgcttttattctgataaacgatgtcctaacagcagcaaatggtgcatacgtaaaacaaaaattagattcaaaagagctgggaaaatatggactgctctattacaatgcactgttcatgattctgcccaccctggccattgcgtatttcacaggagatgcacaaaaggctgtggagtttgaaggctgggctgacaccctctttcttctgcagttcaccctctcctgtgtgatggggtttatcttaatgtacgccacagtactctgcacgcagtataattctgctcttacaactacaatagttggctgtattaagattccacagggagaaagaggtctggagcctggctggtaagaaatttttatccttatgctggctggtgaggtcctggattatctttgctgcagcttccaaaagagcagaacagctttggtgaccctgcttactgcatcaaaactgtagggatgaagggaaaatttgcttaaaaatcagctcacaaaagacagactagtaaaagaaaaggtatctaatttattgatgtgtatatggagaatattgcagagtgactacctaaacccccagtggagtgtagaagcttatatactatcttgaagttacagaaaaaatgggggcttagattgggcaaaataggttatgggagggagagaagaggaggcttggctagctaaagtggtcttgttatacagatgaaacctcacaggtagcagcccttggagagaatagatgataaatgcttttttagaccttgaaaggtgttagactctcagttagtgtttcctagatctggacaaggggaggcctggctacagtcagtgtagatttttctacaaatgtaaatttccctcacaaaagacagctttgcagagctacttctttttgctggctttctgacagctatcttaattactgt

SEQ ID NO: 67044 - DNA, 398 bp, Homo sapiens
ctggagggcataagattataggaatagagtgtcatactttatcaatacaggttttattataaatgtggaattatgaaaattagaaggaggccgggcgcagtggctcacacctataatcccatcactttgggaggctgaggcaggcggatcacgaggtcagtagatcaagaccatcctggctaacgtggtgaaaccccgtctctactaaaaatacaaaatattagccgggcgtggtagtgggcgcctgtagtcccagctactcgggaggctgaggcaggagaatggcgtgaacccgggaggcggagcttgcagtgagccgagatcgcgccattgcactccagcctgggcaacagagcaagactccgtctcaaaaaaaaaaaaaaaaaaaaaagaaaatc

SEQ ID NO: 67045 - DNA, 465 bp, Homo sapiens
gtagggttggctttttatgaaggctataaggaagaatctgcttgatacctctttgctaaaaaaaaagttctgtaaaaaaaggcattccttggcaggtagactcatgtctagagtaactgcagctatttgaccaaaagtgtaagtccaaattatgtttgtatctgaataatatgcttttataattcctcagcccacagccaattgagttgatggtagtaacctatgagagagccacccatgaaatgtgagttaaaaacaaagatttaggccaggtgcggtggctccgcctcggcctcccaaagtggtgggattacaggcctgagccaccatgcccggcctgtttgagttaattttaagtgattttttttttccttttctcactgtttcaagcaatgaaaatttatttttaaagtgcttactcaacttccctattaactgcctagaacatgtttatagatttcattt

SEQ ID NO: 67046 - DNA, 465 bp, Homo sapiens
tcagtttcaatgcactgttgttaaaaatactactaatgaatatatgcttttttttttacattaagaaatgagtgtctcactttatcgcccagggtagagtgcagtgatgagttcataactcaattgcaacctgaacttgtgggcttgaacaattctcctacctcagccaagtgagtagctgggattacaggcacccaccaccacacctgccctctcctgcttcttaaatgaagcagtatattatgaatatgttgcagattaacactgggactgtaggtaagtgtgttttggggccactttcactttttatcttaaacactttcatagtgttttattttatttttacaacgcaaatggttacttttgtcatttgaaaagcaatagaggcgccaggcacgatggctcacacctgtaatcccagcacttctggaggcctaaggtgggtggaccacctgaggtcaggag

SEQ ID NO: 67047 - DNA, 410 bp, Homo sapiens
tgcttaccataactcatataatatagaaaaataaagatgagctaatacaatcaggatgaagaaaaagaaaagtcagaataaaatgaaaggccaggaataagaacacagataagcaggccataggggcttacatagttattaaaattgcatcataaatttggctctgagcttcctggtggccaacactaaaaggaaaacagatgtatgtgctttttctcactgtctttaagaagaaacacagtgttcttggagattttcagtgtttccctggttgcagctttcaatttttcaggggctttatatagtgattttgagtaataagcaatatccttgtattcgttatctattcttgggtaaaaatcaccccaaatttagcagttaataaacaataaacttttttttccctcaca

SEQ ID NO: 67048 - DNA, 1117 bp, Homo sapiens
acccggaagtgaacaccacgagctagcgtgtctacttcacaggccaggtcgtcaactcaactgtcaaggtgtccattgtaccagctgggccatggatccctcccgcctgaaatctgactccacctgccaagagtctgagcctgcaggcctagatttcgactctgctggccaagattatttctctgcagcccaataattcgactctttctaccaagaattggacctggactctcttaacgaagatcttctttcccagtccatgccacatgccaggacagagacctctgtgggcacatatgaatcccactcgacttctgaactggaggatctgacagagcccgagcaaagagagctcaaaaccaaactcactaaattggaggctgaaattgtaaccctacgccacgtactagcagccaaagagagacgctgtggggaactcaagaggaagttaggcctcaccgccttggtagggctgagacagaatctgtccaagagctggcttgatgttcaggtctccaacacctatgtgaaacagaagacatcagctgctctgtccaccatgggcactctcatctgcaggaagcttggaggcgtgaagaagtcggccacactcagatcttttgaaggaaaccctaaaggagaaggaagcagaatataaccctctggagagctcaagacagtaggaacctggacggtgcttgtttgaattttctgatatctgattttcacacgaatatactttttgtttgttttccttttccattttcaaaatgccaagatctgggagcctctttcactcctctagacacactgcctgagatagaagtttgcatcttattggctgtgggcagagactaggacccttatgggtacatttcagtaatctctcactgcctaaaatggtaatccctccagcctaagaggatgattctgttttgttgactcttgaatgctcccccaacattcctttggttttcctataagcaaaaccaaataccactataaatacaaaagcatctggtaaactgtaaagttactcatgtatcccaaccctccacagatttctgaagacaaagttttgcttggattaaaacaagatgttttactattaaaaaaa

SEQ ID NO: 67049 - DNA, 850 bp, Homo sapiens
ataccttgcactgttgacgccaggttgaggactctgattgcctgacttgcaggccacgtgtttattcaaagccaatctgagaccctactctgtatcaagaactgtcccaggttctgaaagcatagaattagacatcgtatgtgccctctaagaaacacttagaactttcaaatcattataattcaatgagtcctaaaatagagctgtgtgccagagataaaagaagtcctgaggaaggggtgttcaactctgtcttggtaggtcagtaaagactttagagagacagaaagtcttagaggactaggagaagtttgccagacagacaagaatagaacattccagacaacatgcagaggaactgagtcacaaaggaatgtataagaatggcatattctaggaactaacactgtggctagagaggaaggggaaatggtgttacatgagtgagggaggggaaatggtgttacgtgagtaagaaaaaataagcagggggcaaaatcataagtagtcttacatactacattagatatcaatatttaagcctgtaggaaatgggaggcattgaagcacttaagtaaaaaagtaactatcaaatttttgttttagattactctggtcatcagagaaatagattaagtatttaagaggtagaatctctcagacttaggaaccaactgcatgaggcggggcttggggggataaatttgcaagataataaggatgtagaattgaaaaggcctgatattattgaagctggagttgcacattcattttgctttggcttttttgtatcagtggtcatgggcaccaaataaaatgcttccatgaacatttggattctggctctaaa

SEQ ID NO: 67050 - DNA, 1663 bp, Homo sapiens
  misc_feature (1552)..(1552): n is a, c, g, or t
acccggaagtgaacaccacgagctagcgtgtctacttcacaggccaggtcgtcaactcaactgtcaaggtgtccattgtaccagctgggccatggatccctcccgcctgaaatctgactccacctgccaagagtctgagcctgcaggcctagatttcgactctgctggccaagattatttctctgcagcccaataattcgactctttctaccaagaattggacctggactctcttaacgaagatcttctttcccagtccatgccacatgccaggacagagacctctgtgggcacatatgaatcccactcgacttctgaactggaggatctgacagagcccgagcaaagagagctcaaaaccaaactcactaaattggaggctgaaattgtaaccctacgccacgtactagcagccaaagagagacgctgtggggaactcaagaggaagttaggcctcaccgccttggtagggctgagacagaatctgtccaagagctggcttgatgttcaggtctccaacacctatgtgaaacagaagacatcagctgctctgtccaccatgggcactctcatctgcaggaagcttggaggcgtgaagaagtcggccacactcagatcttttgaaggtctgatggggacaatcaagtccaaagtctcagggggcaaaagagcttggccctgactgtctttcttctgcggagggtggggttgatctgctctcagttttggggtgtggggaagacccactccagattccggggagtgggaatgagccactcccagttctggagagtgaggatgaccatctccactttctggaaccagaatgagcccccttggtaaccttgcctggtactaaaccagtgcaaggacccccttcccttattacatttgcaactctgcccaacaaaaacaagcaagcaaaccacaatggtaaagtggttaattcaggaaattgacagaatccagttttgagaaaagaacacagatatttgctgcttttaagatagagaacccaaagttttgtacctggttatttttcacttaagtttgtagacgaaatgtgccattatattagctttcctgagactgtatctaatgggcaagtcagtggctccagaggggtcttaggccaaagcccaaactctcttttggaaaactagcttattagaaagccaaagtagagttctgtttaagcttgaaagaggtatgaagtaatctgtagtgtttttttggtttgtttgtttgttttcccttccccatttccttccttccctcagtctcaaagtcaccttgaaagcttcacctggcctacaacttttattttaaaaagatgatcaagaaaacttcatcttctctgagactcagaaaaagaggggaaaatagtggtagtgcactaattgttacattactaatatagcttttgtaaaactcgtttgttttcaaaggtctggactaagcaaaacaacagtgtcagtttaggaaattattactactttgaacacaaactgaaattgcaactttgccttgtgctttgtttataatttctttntatatcaaaatgagtgttttaaagtttaacccttgaagcagcatgtctttgccatagcagcacttcacttaaaaggaagaaattgcctctctggcagcaattcctagttag

SEQ ID NO: 67051 - DNA, 1557 bp, Homo sapiens
acccggaagtgaacaccacgagctagcgtgtctacttcacaggccaggtcgtcaactcaactgtcaaggtgtccattgtaccagctgggccatggatccctcccgcctgaaatctgactccacctgccaagagtctgagcctgcaggcctagatttcgactctgctggccaagattatttctctgcagcccaataattcgactctttctaccaagaattggacctggactctcttaacgaagatcttctttcccagtccatgccacatgccaggacagagacctctgtgggcacatatgaatcccactcgacttctgaactggaggatctgacagagcccgagcaaagagagctcaaaaccaaactcactaaattggaggctgaaattgtaaccctacgccacgtactagcagccaaagagagacgctgtggggaactcaagaggaagttaggcctcaccgccttggtagggctgagacagaatctgtccaagagctggcttgatgttcaggtctccaacacctatgtgaaacagaagacatcagctgctctgtccaccatgggcactctcatctgcaggaagcttggaggcgtgaagaagtcggccacactcagatcttttgaaggattgatcttcaataaatacacgttaaatcaaggaaggaattaacatcatatacttcagacatcaaatatggaatccaagagactatcaacaacatgaacttgttcacaagttccttctgcttttaaacaaaaatatcgtgtttattcaaagccaatctgagaccctactctgtatcaagaactgtcccaggttctgaaagcatagaattagacatcgtatgtgccctctaagaaacacttagaactttcaaatcattataattcaatgagtcctaaaatagagctgtgtgccagagataaaagaagtcctgaggaaggggtgttcaactctgtcttggtaggtcagtaaagactttagagagacagaaagtcttagaggactaggagaagtttgccagacagacaagaatagaacattccagacaacatgcagaggaactgagtcacaaaggaatgtataagaatggcatattctaggaactaacactgtggctagagaggaaggggaaatggtgttacatgagtgagggaggggaaatggtgttacgtgagtaagaaaaaataagcagggggcaaaatcataagtagtcttacatactacattagatatcaatatttaagcctgtaggaaatgggaggcattgaagcacttaagtaaaaaagtaactatcaaatttttgttttagattactctggtcatcagagaaatagattaagtatttaagaggtagaatctctcagacttaggaaccaactgcatgaggcggggcttggggggataaatttgcaagataataaggatgtagaattgaaaaggcctgatattattgaagctggagttgcacattcattttgctttggcttttttgtatcagtggtcatgggcaccaaataaaatgcttccatgaacatttggattctggctctaaa

SEQ ID NO: 67052 - DNA, 382 bp, Homo sapiens
  misc_feature (257)..(257): n is a, c, g, or t
agcacatacactaaaattggaacaatacagagattagcctggcccctgtgcaaggatgacatgcaaattcgtgaagtgtttcatatttattttattaaaaaaaaaaaaaaagaccgggcacggtggtttacacctataatcctgacactttgggaggccgaggtgggtgggtcatgagttcaggagatcgagaccatcctggccaatatggtgatccccgtctctactagaatacggaagattggctgggcatggtngtgcgcacctgtattcccggccaatatggtgaaaccccgtctctactaaaatacaaaaaattagctgggcatggtggtgcgcacctgtattcccagctactcaggaggctgaggcaagggaatca

SEQ ID NO: 67053 - DNA, 873 bp, Homo sapiens
gacagagtaagctgagagaggatatgtaacttacttaggtcacacagacagtgaatggtagaaccagaaataaaactcaaatctggctgatctcaaagtcatgctttcaacaatgctatataccatccaaaaaaaaataataatccctgtggtgtcctactagccataatattcactttacatttcattgagcgttacctgtgtgctaggaaatgtgacaagtgccttaagtagagtatctcatttcatttgaagaaacacattgtaagattgaactaggtgttctagagattatagtatgaggttgtagctccaagagtatgtagatctcagaccatagaaatttcactcttttcccagaagggaaaaaagaaatgacagatataaaagaattttttccaagctggtaagtggtttctggaaaattagcaagttgtgatatgtaggttgagcatcccaaatccaaaaaatgaaatccagtgagcttcaaaatctgaaacttcttgagtgctggcagcatttaaaggagatgcttattagggcatttcagattttggtttctggatttagggatgctgaaccagtaaattataatgcagacacttcaaattttgaaaaaaatcggccacctgtaatcccagcacttcggaaggccaaggtggttggatcatttgcatccaggagttcaagaccaccctaggcaacaaaaaatgtaaaaattaaaaaaaaaaaaaacaaaaacaaaaaacagaaaaaatccgaaacacttatgatccttagcgtttcggagaaggagtactcaacctgtactgtgttttaatctcctaggaacatattctttaagagccaggtattcttgagttaagcaaaccc

SEQ ID NO: 67054 - DNA, 542 bp, Homo sapiens
ggtgccgcaggtgtctggaattcaccttgccaaggattgagctcatgccccgtgccaccctcacgccttctacctgctcctttctcagttctttctctggaataagggcccctaattttccaaaccagaacggtgggagttatgccagattccattttcttacaaaccccaacagttaccgcatcccgttgggtccgtttcctgagtatctgtcctgttctttccgtggcgtctgccactgctgtggtcttagattactaacagagagctggatttcagaggcctccggacggtttccactgcctgctgtctcatttcagtgcaccttgcacaatgctcccactgcgataatacaaatccagccacatcactgtccccatcatctaaggacctgggcctggtccttctggtggggttagtataaactctccccttcttagggcttaccccatccctcctaacactctcagttcctgaacaggctggtcgggtgcatgtgctgcttgtgtcttgggaatacctggggactctcttttctgggt

SEQ ID NO: 67055 - DNA, 377 bp, Homo sapiens
gaatttatgctttctcaagatgttgaacatgagcgtctctttgacctcattcagaaaatgttggagtatgatccagccaaaagaattactctcagagaagccttaaagcatcctttctttgaccttctgaagaaaagtatatagatctgtaattggacagctctctcgaagagatcttacagactgtatcagtctaatttttaaattttaagttattttgtacagctttgtaaattcttaacatttttatattgccatgtttattttgtttgggtaatttggttcattaagtacatagctaaggtaatgaacatctttttcagtaattgtaaagtgatttattcagaataaattttttgtgcttatgaagttgatat

SEQ ID NO: 67056 - DNA, 365 bp, Homo sapiens
gatgtggggaggtgttggcttccggagttaaagtccgtagtgctgaattagagggaggaatatggagaaaaatgttttcaacacaatggaactttcatacatgggagatgattaggaagtcatgattgcttcctgtggttgagaaatacgaactttatgcatttactattgtttattttaaaataatgtcctcttcatttagaaagagtttgtgtgtataaatcatatttatctttcagccttgcatatggagctctaagagtggcagtttggttattcacagttttttacctaccaaaactctgaatagaaaaagatgtttaacccataaagcaatgtgtggtacctgaagcctgttttaaatg

SEQ ID NO: 67057 - DNA, 3059 bp, Homo sapiens
ccgggcctcatgttgcgccgcctgcgcaagggcaacctgcccatccgctccatcatccccaaccacgccgacaaggagcgcttcgccacgcgctgcaaggcggccaccgtgctgctctacgacgaggccacggccgagtggcagcccgagcccggcgctcccgcctccgtgctcggcctgctcctacagaagctgcgcgacgacggctgccaggcctactacctccaaggtggtttcaacaagtttcaaacagagtactctgagcactgcgagaccaacgtggacagctcttcctcgccgagcagctcgccacccacctcagtgctgggcctggggggcctgcgcatcagctctgactgctccgacggcgagtcggaccgagagctgcccagcagtgccaccgagtcagacggcagccctgtgccatccagccaaccagccttccctgtccagatcctgccctacctctacctcggctgcgccaaggactccaccaacctggacgtgctcggcaagtatggcatcaagtatatcctcaatgtcacacccaacctacccaacgccttcgagcacggcggcgagttcacctacaagcagatccccatctctgaccactggagccagaacctctcccagttcttccctgaggccatcagcttcattgacgaagcccgctccaagaagtgtggtgtcctggtgcactgcctggcaggcatcagccgctcagtgacggtcactgtggcctatctgatgcagaagatgaacctgtcactcaacgacgcctacgactttgtcaagaggaaaaagtccaacatctcgcccaacttcaacttcatggggcagctgctggactttgagcggacgctggggctaagcagcccgtgcgacaaccacgcgtcgagtgagcagctctacttttccacgcccaccaaccacaacctgttcccactcaatacgctggagtccacgtgaggcctggtgcacggggggcatggcaccaggcccctgctcggctctccacagggctaggtgggagagcccaagcccgccacctctggcctgaggaacccccagatgtcacctgtgcccagaggcccaggctgatcggtgtcggagcgcccctcaccatccttgggggcagggcccgcaggcaaggtctcccactgcagggcttgctggagaggcctcggctcttggacacgtggctttgggcgtccaccagggcctcatcctgtccaggacgctcctttctgctgacagcccagccagtttggctgttttttaaagacacatccacggacctgagtttactttttacttttggcaggtaaatccaagctccctggagcacaaagagtgtttgagctcttcttgatttttctttttttttttttttttaacaaaaagtgttattttcaggctacatgcaacagtggattgtataacccagtatttcatccctttcctgatcctgcaagagagagaaatgttcagttttgtttttcgttcaatttcaaaaagcaagtatcgtgtttgtttttgtttttgttttttaatggaaaagacagacgccatgttgaccttgaccaaatgcgttttgcacatgtgtgaagcctctgtttcctcagcgggcccttcttgaaggggtggcttactgctcttcaggtattgggacccccagtcgtgccgcctcccacccttggcccagtctgacttagctctgcattcgcctgtgatgactgctgcaagttgtgattggtgggctggatggtggtctttgcattttctgccgtctcatccatccctctggtggtccctgcagacctccctgaggcagaaggtggggaccctggggccctgccgctgtcccccaggaggtgggccgcagggggctgccaggcagtagcattagccctctggggtcagcccctaagaaggcctgggctctgagcccttttatatacttagccactacttctgtctgtctgtctgtctctctctcttcctctccctctctctctttctctctctccctctctctctctttctttctctctccccccctccctctctcttcctttcctctctcttgttgtaactgggagtggaggcccagtggctggggagacattaggtggtggggcccagcccgacctccaggttcttccttctccctagctgttgctttggtctggccactcccagcccccttgtccccttggaagcttgccctgccctcatcttgcccatgccttctactgccaggagacttgcacccatttcaaccctagggcgggggcaagtggggcaaggatggaccagcagaaggggggtaaggctctgttcacttccccctgcctccacagaacgaagccacggattccgttatcttcctccagttttgttccttctccagcctcagttccaccaggtgtcaggactgcatgggggcctggggcaggcagaggagtcaggccagggtccctgacggagcagcactcagcatgtgagtgaggccacagaaaaactctgccccactgcttcttacctcacgggggtggctttcagggattctttagcgcagcagattaaaatcttgccacagtcgagaaattgacaacaagcttccatgctgtacatggttctctttttctctcttttatttttaaaaagaaaacccagaaagatgtaccagatttgtgtaaatgagggtatgccagaaggtggccagttttgctttatgatcttatgaaggaagatttgtgaccctacgtatatatatacacacacatacatatatatatatatcccgaaccaacaacgggactttgtttatattgcaaataaatattattttttctttaaaatgagtcgtgtccgataagggcttggggcctgggaaggaggggaaggagtgctgtcgacaggcatcctagtgcctgctctgtgtgaggcactggcctggttctgcttggggtctgctggccacttagactaatcaaggtgccccgcagatgggagggagcagccacagtttctggatgaagctggggcaggtg

SEQ ID NO: 67058 - DNA, 1662 bp, Homo sapiens
tcctgatcctgcaagagagagaaatggatgaaatactggattgtataacccagtatttcatccctttcctgatcctgcaagagagagaaatgttcagttttgtttttcgttcaatttcaaaaagcaagtatcgtgtttgtttttgtttttgttttttaatggaaaagacagacgccatgttgaccttgaccaaatgcgttttgcacatgtgtgaagcctctgtttcctcagcgggcccttcttgaaggggtggcttactgctcttcaggtattgggacccccagtcgtgccgcctcccacccttggcccagtctgacttagctctgcattcgcctgtgatgactgctgcaagttgtgattggtgggctggatggtggtctttgcattttctgccgtctcatccatccctctggtggtccctgcagacctccctgaggcagaaggtggggaccctggggccctgccgctgtcccccaggaggtgggccgcagggggctgccaggcagtagcattagccctctggggtcagcccctaagaaggcctgggctctgagcccttttatatacttagccactacttctgtctgtctgtctgtctctctctcttcctctccctctctctctttctctctctccctctctctctctttctttctctctccccccctccctctctcttcctttcctctctcttgttgtaactgggagtggaggcccagtggctggggagacattaggtggtggggcccagcccgacctccaggttcttccttctccctagctgttgctttggtctggccactcccagcccccttgtccccttggaagcttgccctgccctcatcttgcccatgccttctactgccaggagacttgcacccatttcaaccctagggcgggggcaagtggggcaaggatggaccagcagaaggggggtaaggctctgttcacttccccctgcctccacagaacgaagccacggattccgttatcttcctccagttttgttccttctccagcctcagttccaccaggtgtcaggactgcatgggggcctggggcaggcagaggagtcaggccagggtccctgacggagcagcactcagcatgtgagtgaggccacagaaaaactctgccccactgcttcttacctcacgggggtggctttcagggattctttagcgcagcagattaaaatcttgccacagtcgagaaattgacaacaagcttccatgctgtacatggttctctttttctctcttttatttttaaaaagaaaacccagaaagatgtaccagatttgtgtaaatgagggtatgccagaaggtggccagttttgctttatgatcttatgaaggaagatttgtgaccctacgtatatatatacacacacatacatatatatatatatcccgaaccaacaacgggactttgtttatattgcaaataaatattattttttctttaaaatgagtcgtgtccgataagggcttggggcctgggaaggaggggaaggagtgctgtcgacaggcatcctagtgcctgctctgtgtgaggcactggcctggttctgcttggggtctgctggccacttagactaatcaaggtgccccgcagatgggagggagcagccacagtttctggatgaagctggggcaggtg

SEQ ID NO: 67059 - DNA, 517 bp, Homo sapiens
gatgaggaaacagacacgggtgtccagtgccttggggctaaagtgtgcagagccctctccacagcagtgctgttgacctctattccaagttgctgccctacccacactgggcttggccaggtccctcaggggtcgggcaagaccagccagccaccatgctgccctctgtgccccagccccacctgcccacccatgtgggaaggctccttgaaggaggcacctccctgacccatgccaatgtgtttcagacgaagcccgctccaagaagtgtggtgtcctggtgcactgcctggcaggcatcagccgctcagtgacggtcactgtggcctatctgatgcagaagatgaacctgtcactcaacgacgcctacgactttgtcaagaggaaaaagtccaacatctcgcccaacttcaacttcatggggcagctgctggactttgagcggacgctggggctaagcagcccgtgcgacaaccacgcgtcgagtgagcagctctacttttccacgcccaccaac

SEQ ID NO: 67060 - DNA, 313 bp, Homo sapiens
ggggtggctttcagggattctttagcgcagcagattaaaatcttgccacagtcgagaaattgacaacaagcttccatgctgtacatggttctctttttctctcttttatttttaaaaagaaaacccagaaagatgtaccagatttgtgtaaatgagggtatgccagaaggtggccagttttgctttatgatcttatgaaggaagatttgtgaccctacgtatatatatacacacacatacatatatatatatatcccgaaccaacaacgggactttgtttatattgcaaataaatattattttttctttaaaa

SEQ ID NO: 67061 - DNA, 1809 bp, Homo sapiens
actcagttgcctctggccagtgcagggctcagccagggatggcttctagctgacagtgggaggaattaattcatctgaccggaatattcttttctcttctgggctgttggtttttcaagtgcaacaaagattccatacagctccaaggaaggagccaagaaaaacattctgtgccaaagtgagatcctggaagtgaaaccccggaataaagctgaaaaacgggctccagttgggtgccaggaaatgcaggactggaatgtgacttgacttccggcagcgcgcaggtgctcccgggtcacctgctttgaggtccagcctcctgccctgcctcaggtgaccacatgaccactgtggactttgccctgaaaccttctgggaggagaagaggcctgaccttggcgctggggtccagtgggcattgctctggtccgaggctgctgctcttgacctctgctctgcggctgttttccattggagtagaggctcctcctgtcctgtcctgcctgtggagggaagcaaaccttcccctggaccagagagaggagaaagcggagacaggtagcaacgctgtggactggtgatgacaggctcttcagctccctgcaagtgaccgggcctggggaacagggcatggcacaggcacacaggaccccccagcccagggctgcccccagccagccccgtgtgttcaagctggttctcctgggaagtggctccgtgggtaagtccagcttggctcttcggtacgtgaagaacgacttcaagagtatcctgcctacggtgggctgattccttcctcaaggctcagcagtggctgaaggacctggaggaggagctgcacccaggagaagtcctggtgatgctggtgggcaacaagacggacctcagccaggagcgggaggtgaccttccaggaagggaaggagtttgccgacagccagaagttgctgttcatggaaacttcggccaaactgaaccaccaggtgtcggaggtgttcaatacagtggcccaagagctactgcagagaagcgacgaggagggccaggctctacggggggatgcagctgtggctctgaacaaggggcccgcgaggcaggccaaatgctgcgcccactaggtgcagccactcctgggggctgtggggaagacaccccctgcctgggccatggccagctctaggtggattctgattcactgtcaatgctgggttgctcccgagccctagatgttcctggaagttggccccctttatgaaaaccacttcccacagccagtgggaactgccagaggaagatctggcgtcacatggctcccaggaaagtgctgtgccctatccccactgataccatctgattccccgatgcctgtgcctgttccacctggacggtggccccctcagcctggcagcctctggacagagaggaaggaaggattggaaaagtccccgcagcacagcgacggtgggaagatgccttacgtctgatcttgatgggggcactggcctggagcctgggcccacctgcttctggggggttggggagcaggccagatggaggtggtggtgccaggaagaaatggagcgatgactgactgtggggtgggcccaggatttccacatcttggtgaagttgcccctgggaagggcagctgggggcagtggcgccagttcccttccatggtctcccggctggcaatgtggtgaagctgagtttctgtccaatgagcaggaagattctgagacatttcgcctgagatataagttgtactgcgtatgcagtttttcctccaaaaattaaattgcttttgaca

SEQ ID NO: 67062 - DNA, 276 bp, Homo sapiens
tctcttgcacaaagtggtcctttgaggacagctaggcgtgggagattcaggagctcgaggcctgacctgaaataccccgtggctggcagtctcctgggcctggtcagggtgaaggatctgatgtgtgtcctagcagttttctgcctggccgcacaggtcacccaggacaggaacgtgccctcctcagaggaacggagcagccctgcaggtgcgcccatggccagttggattctgtgacattttacacaacgtgatcagcaacactggcttccccct

SEQ ID NO: 67063 - DNA, 1603 bp, Homo sapiens
ttaacggctagtagagccccgctgaatcggccgaggcttggcgctggggtccagtgggcattgctctggtccgaggctgctgctcttgacctctgctctgcggctgttttccattggagtagaggctcctcctgtcctgtcctgcctgtggagggaagcaaaccttcccctggaccagagagaggagaaagcggagacaggtagcaacgctgtggactggtgatgacaggctcttcagctccctgcaagtgaccgggcctggggaacagggcatggcacaggcacacaggaccccccagcccagggctgcccccagccagccccgtgtgttcaagctggttctcctgggaagtggctccgtgggtaagtccagcttggctcttcggtacgtgaagaacgacttcaagagtatcctgcctacggtgggctgtgcgttcttcacaaaggtggtggatgtgggtgccacctctctgaagcttgagatctgggacacagctggccaggagaagtaccacagcgtctgccacctctacttcaggggtgccaacgctgcgcttctggtgtacgacatcaccaggaaggattccttcctcaaggctcagcagtggctgaaggacctggaggaggagctgcacccaggagaagtcctggtgatgctggtgggcaacaagacggacctcagccaggagcgggaggtgaccttccaggaagggaaggagtttgccgacagccagaagttgctgttcatggaaacttcggccaaactgaaccaccaggtgtcggaggtgttcaatacagtggcccaagagctactgcagagaagcgacgaggagggccaggctctacggggggatgcagctgtggctctgaacaaggggcccgcgaggcaggccaaatgctgcgcccactaggtgcagccactcctgggggctgtggggaagacaccccctgcctgggccatggccagctctaggtggattctgattcactgtcaatgctgggttgctcccgagccctagatgttcctggaagttggccccctttatgaaaaccacttcccacagccagtgggaactgccagaggaagatctggcgtcacatggctcccaggaaagtgctgtgccctatccccactgataccatctgattccccgatgcctgtgcctgttccacctggacggtggccccctcagcctggcagcctctggacagagaggaaggaaggattggaaaagtccccgcagcacagcgacggtgggaagatgccttacgtctgatcttgatgggggcactggcctggagcctgggcccacctgcttctggggggttggggagcaggccagatggaggtggtggtgccaggaagaaatggagcgatgactgactgtggggtgggcccaggatttccacatcttggtgaagttgcccctgggaagggcagctgggggcagtggcgccagttcccttccatggtctcccggctggcaatgtggtgaagctgagtttctgtccaatgagcaggaagattctgagacatttcgcctgagatataagttgtactgcgtatgcagtttttcctccaaaaattaaattgcttttgaca

SEQ ID NO: 67064 - DNA, 1917 bp, Homo sapiens
actcagttgcctctggccagtgcagggctcagccagggatggcttctagctgacagtgggaggaattaattcatctgaccggaatattcttttctcttctgggctgttggtttttcaagtgcaacaaagattccatacagctccaaggaaggagccaagaaaaacattctgtgccaaagtgagatcctggaagtgaaaccccggaataaagctgaaaaacgggctccagttgggtgccaggaaatgcaggactggaatgtgacttgacttccggcagcgcgcaggtgctcccgggtcacctgctttgaggtccagcctcctgccctgcctcaggtgaccacatgaccactgtggactttgccctgaaaccttctgggaggagaagaggcctgaccttggcgctggggtccagtgggcattgctctggtccgaggctgctgctcttgacctctgctctgcggctgttttccattggagtagaggctcctcctgtcctgtcctgcctgtggagggaagcaaaccttcccctggaccagagagaggagaaagcggagacaggtagcaacgctgtggactggtgatgacaggctcttcagctccctgcaagtgaccgggcctggggaacagggcatggcacaggcacacaggaccccccagcccagggctgcccccagccagccccgtgtgttcaagctggttctcctgggaagtggctccgtgggtaagtccagcttggctcttcggtgcgttcttcacaaaggtggtggatgtgggtgccacctctctgaagcttgagatctgggacacagctggccaggagaagtaccacagcgtctgccacctctacttcaggggtgccaacgctgcgcttctggtgtacgacatcaccaggaaggattccttcctcaaggctcagcagtggctgaaggacctggaggaggagctgcacccaggagaagtcctggtgatgctggtgggcaacaagacggacctcagccaggagcgggaggtgaccttccaggaagggaaggagtttgccgacagccagaagttgctgttcatggaaacttcggccaaactgaaccaccaggtgtcggaggtgttcaatacagtggcccaagagctactgcagagaagcgacgaggagggccaggctctacggggggatgcagctgtggctctgaacaaggggcccgcgaggcaggccaaatgctgcgcccactaggtgcagccactcctgggggctgtggggaagacaccccctgcctgggccatggccagctctaggtggattctgattcactgtcaatgctgggttgctcccgagccctagatgttcctggaagttggccccctttatgaaaaccacttcccacagccagtgggaactgccagaggaagatctggcgtcacatggctcccaggaaagtgctgtgccctatccccactgataccatctgattccccgatgcctgtgcctgttccacctggacggtggccccctcagcctggcagcctctggacagagaggaaggaaggattggaaaagtccccgcagcacagcgacggtgggaagatgccttacgtctgatcttgatgggggcactggcctggagcctgggcccacctgcttctggggggttggggagcaggccagatggaggtggtggtgccaggaagaaatggagcgatgactgactgtggggtgggcccaggatttccacatcttggtgaagttgcccctgggaagggcagctgggggcagtggcgccagttcccttccatggtctcccggctggcaatgtggtgaagctgagtttctgtccaatgagcaggaagattctgagacatttcgcctgagatataagttgtactgcgtatgcagtttttcctccaaaaattaaattgcttttgaca

SEQ ID NO: 67065 - DNA, 1570 bp, Homo sapiens
actcagttgcctctggccagtgcagggctcagccagggatggcttctagctgacagtgggaggaattaattcatctgaccggaatattcttttctcttctgggctgttggtttttcaagtgcaacaaagattccatacagctccaaggaaggagccaagaaaaacattctgtgccaaagtgagatcctggaagtgaaaccccggaataaagctgaaaaacgggctccagttgggtgccaggaaatgcaggactggaatgtgacttgacttccggcagcgcgcaggtgctcccgggtcacctgctttgaggtccagcctcctgccctgcctcaggtgaccacatgaccactgtggactttgccctgaaaccttctgggaggagaagaggcctgaccttggcgctggggtccagtgggcattgctctggtccgaggctgctgctcttgacctctgctctgcggctgttttccattggagtagaggctcctcctgtcctgtcctgcctgtggagggaagcaaaccttcccctggaccagagagaggagaaagcggagacaggtagcaacgctgtggactggtgatgacaggctcttcagctccctgcaagtgaccgggcctggggaacagggcatggcacaggcacacaggaccccccagcccagggctgcccccagccagccccgtgtgttcaagctggttctcctgggaagtggctccgtgggtaagtccagcttggctcttcggtacgtgaagaacgacttcaagagtatcctgcctacggtgggctgtgcgttcttcacaaaggtggtggatgtgggtgccacctctctgaagcttgagatctgggacacagctggccaggagaagtaccacagcgtctgccacctctacttcaggggtgccaacgctgcgcttctggtgtacgacatcaccaggaaggattccttcctcaaggctcagcagtggctgaaggacctggaggaggagctgcacccaggagaagtcctggtgatgctggtgggcaacaagacggacctcagccaggagcgggaggtgaccttccaggaagggaaggagtttgccgacagccagaagttgctgttcatggaaacttcggccaaactgaaccaccaggtgtcggaggtgttcaatacagtggcccaagagctactgcagagaagcgacgaggagggccaggctctacggggggatgcagctgtggctctgaacaaggggcccgcgaggcaggccaaatgctgcgcccactaggtgcagccactcctgggggctgtggggaagacaccccctgcctgggccatggccagctctaggtggattctgattcactgtcaatgctgggttgctcccgagccctagatgttcctggaattgcccctgggaagggcagctgggggcagtggcgccagttcccttccatggtctcccggctggcaatgtggtgaagctgagtttctgtccaatgagcaggaagattctgagacatttcgcctgagatataagttgtactgcgtatgcagtttttcctccaaaaattaaattgcttttgaca

SEQ ID NO: 67066 - DNA, 1828 bp, Homo sapiens
actcagttgcctctggccagtgcagggctcagccagggatggcttctagctgacagtgggaggaattaattcatctgaccggaatattcttttctcttctgggctgttggtttttcaagtgcaacaaagattccatacagctccaaggaaggagccaagaaaaacattctgtgccaaagtgagatcctggaagtgaaaccccggaataaagctgaaaaacgggctccagttgggtgccaggaaatgcaggactggaatgtgacttgacttccggcagcgcgcaggtgctcccgggtcacctgctttgaggtccagcctcctgccctgcctcaggtgaccacatgaccactgtggactttgccctgaaaccttctgggaggagaagaggcctgaccttggcgctggggtccagtgggcattgctctggtccgaggctgctgctcttgacctctgctctgcggctgttttccattggagtagaggctcctcctgtcctgtcctgcctgtggagggaagcaaaccttcccctggaccagagagaggagaaagcggagacaggtagcaacgctgtggactggtgatgacaggctcttcagctccctgcaagtgaccgggcctggggaacagggcatggcacaggcacacaggaccccccagcccagggctgcccccagccagccccgtgtgttcaagctggttctcctgggaagtggctccgtgggtaagtccagcttggctcttcggtacgtgaagaacgacttcaagagtatcctgcctacggtgggctgtgcgttcttcacaaaggtggtggatgtgggtgccacctctctgaagcttgagatctgggacacagctggccaggagaagtaccacagcgtctgccacctctacttcaggggtgccaacgctgcgcttctggtgtacgacatcaccaggaaggattccttcctcaaggctcagcagtggctgaaggacctggaggaggagctgcacccaggagaagtcctggtgatgctggtgggcaacaagacggacctcagccaggagcgggaggtgaccttccaggaagggaaggagtttgccgacagccagaagttgctgttcatggaaacttcggccaaactgaaccaccaggtgtcggaggtgttcaatacagtgggtgagtcacgtccccgtgggccagacaagggggaggtgcttgtccctgaccaacttccctgggtccctgttgctggtgacgtggtatcccatagaatgtctttagggactggatggtgaccaggaggggcaggaggcccttgttctatggttcagggtaaacacaggaggggcgggtcctggggtggctggtctgcagggctgtgctgggctgggcgacttccctccctagccagccccctcctcttgctgttcacagcccaagagctactgcagagaagcgacgaggagggccaggctctacggggggatgcagctgtggctctgaacaaggggcccgcgaggcaggccaaatgctgcgcccactaggtgcagccactcctgggggctgtggggaagacaccccctgcctgggccatggccagctctaggtggattctgattcactgtcaatgctgggttgctcccgagccctagatgttcctggaattgcccctgggaagggcagctgggggcagtggcgccagttcccttccatggtctcccggctggcaatgtggtgaagctgagtttctgtccaatgagcaggaagattctgagacatttcgcctgagatataagttgtactgcgtatgcagtttttcctccaaaaattaaattgcttttgaca

SEQ ID NO: 67067 - DNA, 895 bp, Homo sapiens
actcagttgcctctggccagtgcagggctcagccagggatggcttctagctgacagtgggaggaattaattcatctgaccggaatattcttttctcttctgggctgttggtttttcaagtgcaacaaagattccatacagctccaaggaaggagccaagaaaaacattctgtgccaaagtgagatcctggaagtgaaaccccggaataaagctgaaaaacgggctccagttgggtgccaggaaatgcaggactggaatgtgacttgacttccggcagcgcgcaggtgctcccgggtcacctgctttgaggtccagcctcctgccctgcctcaggtgaccacatgaccactgtggactttgccctgaaaccttctgggaggagaagaggcctgaccttggcgctggggtccagtgggcattgctctggtccgaggctgctgctcttgacctctgctctgcggctgttttccattggagtagaggctcctcctgtcctgtcctgcctgtggagggaagcaaaccttcccctggaccagagagaggagaaagcggagacaggtagcaacgctgtggactggtgatgacaggctcttcagctccctgcaagtgaccgggcctggggaacagcaggccagatggaggtggtggtgccaggaagaaatggagcgatgactgactgtggggtgggcccaggatttccacatcttggtgaagttgcccctgggaagggcagctgggggcagtggcgccagttcccttccatggtctcccggctggcaatgtggtgaagctgagtttctgtccaatgagcaggaagattctgagacatttcgcctgagatataagttgtactgcgtatgcagtttttcctccaaaaattaaattgcttttgaca

SEQ ID NO: 67068 - DNA, 1106 bp, Homo sapiens
actcagttgcctctggccagtgcagggctcagccagggatggcttctagctgacagtgggaggaattaattcatctgaccggaatattcttttctcttctgggctgttggtttttcaagtgcaacaaagattccatacagctccaaggaaggagccaagaaaaacattctgtgccaaagtgagatcctggaagtgaaaccccggaataaagctgaaaaacgggctccagttgggtgccaggaaatgcaggactggaatgtgacttgacttccggcagcgcgcaggtgctcccgggtcacctgctttgaggtccagcctcctgccctgcctcaggtgaccacatgaccactgtggactttgccctgaaaccttctgggaggagaagaggcctgaccttggcgctggggtccagtgggcattgctctggtccgaggctgctgctcttgacctctgctctgcggctgttttccattggagtagaggctcctcctgtcctgtcctgcctgtggagggaagcaaaccttcccctggaccagagagaggagaaagcggagacaggtagcaacgctgtggactggtgatgacaggctcttcagctccctgcaagtgaccgggcctggggaacagggcatggcacaggcacacaggaccccccagcccagggctgcccccagccagccccgtgtgttcaagctggttctcctgggaagtggctccgtgggtgcgttcttcacaaaggtggtggatgtgggtgccacctctctgaagcttgagatctgggacacagctggccaggagaagtaccacagcgtctgccacctctacttcaggggtgccaacgctgcgcttctggtgtacgacatcaccaggaaggattccttcctcaaggctcagcagtggctgaaggacctggaggaggagctgcacccaggagaagtcctggtgatgctggtgggcaacaagacggacctcagccaggagcgggaggtgaccttccaggacgaagaccgtgtaaacagctgcagacaagtggctgatggggagaccccacacacactagaggctggcgcaggggaagacccaactcagggcttagaccgacgggc

SEQ ID NO: 67069 - DNA, 299 bp, Homo sapiens
cacacaggaccccccagcccagggctgcccccagccagccccgtgtgttcaagctggttctcctgggaagtggctccgtgggtaagtccagcttggctcttcggtacgtgaagaacgacttcaagagtatcctgcctacggtgggctgtaagtgagggcagagcacccctttgttggtcttcagtgcagaagtctgggctgctgacccacacctggggcagatggggacgaggcccacctaggaatccccatgctgggaccttgagctgcctgtgtccagtgcgtgaggggagggggtg

SEQ ID NO: 67070 - DNA, 369 bp, Homo sapiens
gcagttttctgcctggccgcacaggtcacccaggacaggaacgtgccctcctcagaggaacggagcagccctgcaggtgcgcccatggccagttggattctgtgacattttacacaacgtgatcagcaacactggcttccccctcccggaatagctaatgaccacctataagttttgtttgatgttactttttttcttcttttctaggattccttcctcaaggctcagcagtggctgaaggacctggaggaggagctgcacccaggagaagtcctggtgatgctggtgggcaacaagacggacctcagccaggagcgggaggtgaccttccaggtaccgcccaggagaccctgctctgctcttccacag

SEQ ID NO: 67071 - DNA, 1961 bp, Homo sapiens
actcagttgcctctggccagtgcagggctcagccagggatggcttctagctgacagtgggaggaattaattcatctgaccggaatattcttttctcttctgggctgttggtttttcaagtgcaacaaagattccatacagctccaaggaaggagccaagaaaaacattctgtgccaaagtgagatcctggaagtgaaaccccggaataaagctgaaaaacgggctccagttgggtgccaggaaatgcaggactggaatgtgacttgacttccggcagcgcgcaggtgctcccgggtcacctgctttgaggtccagcctcctgccctgcctcaggtgaccacatgaccactgtggactttgccctgaaaccttctgggaggagaagaggcctgaccttggcgctggggtccagtgggcattgctctggtccgaggctgctgctcttgacctctgctctgcggctgttttccattggagtagaggctcctcctgtcctgtcctgcctgtggagggaagcaaaccttcccctggaccagagagaggagaaagcggagacaggtagcaacgctgtggactggtgatgacaggctcttcagctccctgcaagtgaccgggcctggggaacagggcatggcacaggcacacaggaccccccagcccagggctgcccccagccagccccgtgtgttcaagctggttctcctgggaagtggctccgtgggtaagtccagcttggctcttcggtacgtgaagaacgacttcaagagtatcctgcctacggtgggctgtgcgttcttcacaaaggtggtggatgtgggtgccacctctctgaagcttgagatctgggacacagctggccaggagaagtaccacagcgtctgccacctctacttcaggggtgccaacgctgcgcttctggtgtacgacatcaccaggaaggattccttcctcaaggctcagcagtggctgaaggacctggaggaggagctgcacccaggagaagtcctggtgatgctggtgggcaacaagacggacctcagccaggagcgggaggtgaccttccaggaagggaaggagtttgccgacagccagaagttgctgttcatggaaacttcggccaaactgaaccaccaggtgtcggaggtgttcaatacagtggcccaagagctactgcagagaagcgacgaggagggccaggctctacggggggatgcagctgtggctctgaacaaggggcccgcgaggcaggccaaatgctgcgcccactaggtgcagccactcctgggggctgtggggaagacaccccctgcctgggccatggccagctctaggtggattctgattcactgtcaatgctgggttgctcccgagccctagatgttcctggaagttggccccctttatgaaaaccacttcccacagccagtgggaactgccagaggaagatctggcgtcacatggctcccaggaaagtgctgtgccctatccccactgataccatctgattccccgatgcctgtgcctgttccacctggacggtggccccctcagcctggcagcctctggacagagaggaaggaaggattggaaaagtccccgcagcacagcgacggtgggaagatgccttacgtctgatcttgatgggggcactggcctggagcctgggcccacctgcttctggggggttggggagcaggccagatggaggtggtggtgccaggaagaaatggagcgatgactgactgtggggtgggcccaggatttccacatcttggtgaagttgcccctgggaagggcagctgggggcagtggcgccagttcccttccatggtctcccggctggcaatgtggtgaagctgagtttctgtccaatgagcaggaagattctgagacatttcgcctgagatataagttgtactgcgtatgcagtttttcctccaaaaattaaattgcttttgaca

SEQ ID NO: 67072 - DNA, 1895 bp, Homo sapiens
actcagttgcctctggccagtgcagggctcagccagggatggcttctagctgacagtgggaggaattaattcatctgaccggaatattcttttctcttctgggctgttggtttttcaagtgcaacaaagattccatacagctccaaggaaggagccaagaaaaacattctgtgccaaagtgagatcctggaagtgaaaccccggaataaagctgaaaaacgggctccagttgggtgccaggaaatgcaggactggaatgtgacttgacttccggcagcgcgcaggtgctcccgggtcacctgctttgaggtccagcctcctgccctgcctcaggtgaccacatgaccactgtggactttgccctgaaaccttctgggaggagaagaggcctgaccttggcgctggggtccagtgggcattgctctggtccgaggctgctgctcttgacctctgctctgcggctgttttccattggagtagaggctcctcctgtcctgtcctgcctgtggagggaagcaaaccttcccctggaccagagagaggagaaagcggagacaggtagcaacgctgtggactggtgatgacaggctcttcagctccctgcaagtgaccgggcctggggaacagggcatggcacaggcacacaggaccccccagcccagggctgcccccagccagccccgtgtgttcaagctggttctcctgggaagtggctccgtgggtgcgttcttcacaaaggtggtggatgtgggtgccacctctctgaagcttgagatctgggacacagctggccaggagaagtaccacagcgtctgccacctctacttcaggggtgccaacgctgcgcttctggtgtacgacatcaccaggaaggattccttcctcaaggctcagcagtggctgaaggacctggaggaggagctgcacccaggagaagtcctggtgatgctggtgggcaacaagacggacctcagccaggagcgggaggtgaccttccaggaagggaaggagtttgccgacagccagaagttgctgttcatggaaacttcggccaaactgaaccaccaggtgtcggaggtgttcaatacagtggcccaagagctactgcagagaagcgacgaggagggccaggctctacggggggatgcagctgtggctctgaacaaggggcccgcgaggcaggccaaatgctgcgcccactaggtgcagccactcctgggggctgtggggaagacaccccctgcctgggccatggccagctctaggtggattctgattcactgtcaatgctgggttgctcccgagccctagatgttcctggaagttggccccctttatgaaaaccacttcccacagccagtgggaactgccagaggaagatctggcgtcacatggctcccaggaaagtgctgtgccctatccccactgataccatctgattccccgatgcctgtgcctgttccacctggacggtggccccctcagcctggcagcctctggacagagaggaaggaaggattggaaaagtccccgcagcacagcgacggtgggaagatgccttacgtctgatcttgatgggggcactggcctggagcctgggcccacctgcttctggggggttggggagcaggccagatggaggtggtggtgccaggaagaaatggagcgatgactgactgtggggtgggcccaggatttccacatcttggtgaagttgcccctgggaagggcagctgggggcagtggcgccagttcccttccatggtctcccggctggcaatgtggtgaagctgagtttctgtccaatgagcaggaagattctgagacatttcgcctgagatataagttgtactgcgtatgcagtttttcctccaaaaattaaattgcttttgaca

SEQ ID NO: 67073 - DNA, 1119 bp, Homo sapiens
  misc_feature (45)..(45): n is a, c, g, or t
  misc_feature (60)..(60): n is a, c, g, or t
  misc_feature (85)..(85): n is a, c, g, or t
  misc_feature (142)..(142): n is a, c, g, or t
  misc_feature (221)..(221): n is a, c, g, or t
ccagacatctgttagaagcgagaggaggacaggctccacgggggnatcagtgtggctctnaacaaggggccgcgaggcaggccanatgctgtgcccactaggtgcagccactcctgggggctgtggggaagacaccccctgnctgggccatggccagctctaggtggattctgattcactgtcaatgctgggttgctcccgagccctagatgttcccatgnaagaagggaaggagtttgccgacagccagaagttgctgttcatggaaacttcggccaaactgaaccaccaggtgtcggaggtgttcaatacagtggcccaagagctactgcagagaagcgacgaggagggccaggctctacggggggatgcagctgtggctctgaacaaggggcccgcgaggcaggccaaatgctgcgcccactaggtgcagccactcctgggggctgtggggaagacaccccctgcctgggccatggccagctctaggtggattctgattcactgtcaatgctgggttgctcccgagccctagatgttcctggaagttggccccctttatgaaaaccacttcccacagccagtgggaactgccagaggaagatctggcgtcacatggctcccaggaaagtgctgtgccctatccccactgataccatctgattccccgatgcctgtgcctgttccacctggacggtggccccctcagcctggcagcctctggacagagaggaaggaaggattggaaaagtccccgcagcacagcgacggtgggaagatgccttacgtctgatcttgatgggggcactggcctggagcctgggcccacctgcttctggggggttggggagcaggccagatggaggtggtggtgccaggaagaaatggagcgatgactgactgtggggtgggcccaggatttccacatcttggtgaagttgcccctgggaagggcagctgggggcagtggcgccagttcccttccatggtctcccggctggcaatgtggtgaagctgagtttctgtccaatgagcaggaagattctgagacatttcgcctgagatataagttgtactgcgtatgcagtttttcctccaaaaattaaattgcttttgaca

SEQ ID NO: 67074 - DNA, 1904 bp, Homo sapiens
actcagttgcctctggccagtgcagggctcagccagggatggcttctagctgacagtgggaggaattaattcatctgaccggaatattcttttctcttctgggctgttggtttttcaagtgcaacaaagattccatacagctccaaggaaggagccaagaaaaacattctgtgccaaagtgagatcctggaagtgaaaccccggaataaagctgaaaaacgggctccagttgggtgccaggaaatgcaggactggaatgtgacttgacttccggcagcgcgcaggtgctcccgggtcacctgctttgaggtccagcctcctgccctgcctcaggtgaccacatgaccactgtggactttgccctgaaaccttctgggaggagaagaggcctgaccttggcgctggggtccagtgggcattgctctggtccgaggctgctgctcttgacctctgctctgcggctgttttccattggagtagaggctcctcctgtcctgtcctgcctgtggagggaagcaaaccttcccctggaccagagagaggagaaagcggagacaggtagcaacgctgtggactggtgatgacaggctcttcagctccctgcaagtgaccgggcctggggaacagggcatggcacaggcacacaggaccccccagcccagggctgcccccagccagccccgtgtgttcaagctggttctcctgggaagtggctccgtgggtaagtccagcttggctcttcggtacgtgaagaacgacttcaagagtatcctgcctacggtgggctgtgcgttcttcacaaaggtggtggatgtgggtgccacctctctgaagcttgagatctgggacacagctggccaggagaagtaccacagcgtctgccacctctacttcaggggtgccaacgctgcgcttctggtgtacgacatcaccaggaaggattccttcctcaaggctcagcagtggctgaaggacctggaggaggagctgcacccaggagaagtcctggtgatgctggtgggcaacaagacggacctcagccaggagcgggaggtgaccttccaggaagggaaggagtttgccgacagccagaagttgctgttcatggaaacttcggccaaactgaaccaccaggtgtcggaggtgttcaatacagtggcccaagagctactgcagagaagcgacgaggagggccaggctctacggggggatgcagctgtggctctgaacaaggggcccgcgaggcaggccaaatgctgcgcccactaggtgcagccactcctgggggctgtggggaagacaccccctgcctgggccatggccagctctaggtggattctgattcactgtcaatgctgggttgctcccgagccctagatgttcctggaagttggccccctttatgaaaaccacttcccacagccagtgggaactgccagaggaagatctggcgtcacatggctcccaggaaagtgctgtgccctatccccactgataccatctgattccccgatgcctgtgcctgttccacctggacggtggccccctcagcctggcagcctctggacagagaggaaggaaggattggggcactggcctggagcctgggcccacctgcttctggggggttggggagcaggccagatggaggtggtggtgccaggaagaaatggagcgatgactgactgtggggtgggcccaggatttccacatcttggtgaagttgcccctgggaagggcagctgggggcagtggcgccagttcccttccatggtctcccggctggcaatgtggtgaagctgagtttctgtccaatgagcaggaagattctgagacatttcgcctgagatataagttgtactgcgtatgcagtttttcctccaaaaattaaattgcttttgaca

SEQ ID NO: 67075 - DNA, 1243 bp, Homo sapiens
ggttccccagaagaagggcccaggtgggtgccgtccaggggcctccctctgcctcatgtttcctgggttctcagttggttctttgcccagcatcaaagcccacaggtgccaacaggcatgatgggaggggaacctgggggtggggacttggctttccaggccctgcaggaggaggaaggccgcaccccgccagctagaggaagagcctcttccagggagcacaccccgcccctccctggtcctggctgctcaggagtgccaagaaacacaacttggacacgaaacgtggaggagtgcgggctccacggctgcagctttctcggatcttactgttggaagtgaaccaggtgtccttaggaaactctcttataaacagcgctggattttgtggctgtttccttcaggaagggaaggagtttgccgacagccagaagttgctgttcatggaaacttcggccaaactgaaccaccaggtgtcggaggtgttcaatacagtggcccaagagctactgcagagaagcgacgaggagggccaggctctacggggggatgcagctgtggctctgaacaaggggcccgcgaggcaggccaaatgctgcgcccactaggtgcagccactcctgggggctgtggggaagacaccccctgcctgggccatggccagctctaggtggattctgattcactgtcaatgctgggttgctcccgagccctagatgttcctggaagttggccccctttatgaaaaccacttcccacagccagtgggaactgccagaggaagatctggcgtcacatggctcccaggaaagtgctgtgccctatccccactgataccatctgattccccgatgcctgtgcctgttccacctggacggtggccccctcagcctggcagcctctggacagagaggaaggaaggattggggcactggcctggagcctgggcccacctgcttctggggggttggggagcaggccagatggaggtggtggtgccaggaagaaatggagcgatgactgactgtggggtgggcccaggatttccacatcttggtgaagttgcccctgggaagggcagctgggggcagtggcgccagttcccttccatggtctcccggctggcaatgtggtgaagctgagtttctgtccaatgagcaggaagattctgagacatttcgcctgagatataagttgtactgcgtatgcagtttttcctccaaaaattaaattgcttttgaca

SEQ ID NO: 67076 - DNA, 1368 bp, Homo sapiens
  misc_feature (743)..(743): n is a, c, g, or t
  misc_feature (989)..(989): n is a, c, g, or t
cacactgaggatatagaataaatggtcccttctgatctaactaggaagaaagaaagtatacacttataatgcaatttgataaagataaactcaggttgatattaaaacaggtgggccaggtaagaatatctgataaaatcaggtatagcgctctatacagaaaaacacagatcagaacaacacaaggaaacaaaaagcacttgggtttttatctttccagtctttctccccattatcactaacaatgggcattgaattaccctaaaaatctttgccaattttattggcaaaaatgaaaccccatttatatttctccaggaaatataaattaaatttgaacatttcactataaaaaaatcttttattttctttgacctctttctaatatagtgttggcacacctcttattatatgttcttcatttagggtatgatttttatctataatgctttttgctaatgtatttccagcttgtttgccttctaactttgcatataacattttttgatatgcaatgatttttgaattattaggtagtcaaatatttttcttggagtttttttccactgctttatttcttagaagttactttttctttcagaaatcagctaattgtcaaggccaggcaaagtgactaatgcctgtaattccagcactttgggaggccaaggaggatggatcatttgaggccaggagttcaagaccaacctagccaacatggcaaaaacctgtctctactaaanatacaaaaattagccaagcatggtggcacatgcctgtaatcccagctactcgggaggccgaggcaagagaatcgcttcaatccaggaggcagaggttgcagtgagccgagctggcaccactccactccagtctgggcaacagtgagaccccgtgtcaaaaaaacaacaaaaaaagaaaaagtcagctaattgttatgtgtcatttctttctagattttgtagtttttgtttgtttgttttacattnaatgatttagaagatttggggcttattgtggtttcttaaatattataactctatttcaaaactattctgctatgttgagctatcttatttcatactgtattttaatatgttaggacagttctctccttacgactttcttttgcaaaaattttctagctacactcatttggatattcttcatgatgaactctgagataattttaacacattccaaaagacatatttttgagacttattagaattttgttaaagatactgatttatttccaaagaattacagaatctaatcttttcatctatgtatctctattgaagcatttgtttatgtctcttagaatagatacattctttaaaataaaatataagctttgtgcatttt

SEQ ID NO: 67077 - DNA, 106 bp, Homo sapiens
tttctgtcaatttcaagactttttaaatattagctagattaaccttctatctgctgcaaacattgtctcccaatattttacttgtattttgctgtcatttatggtg

SEQ ID NO: 67078 - DNA, 600 bp, Homo sapiens
tagaagtttggattttttttctgattttggagtatttgcatcatatatactttactggttaatcaccccaaatgcaaaaatcccaaatctgaaacattccgatgaaaatttcctttgagcaccttgtcagcaatcaaaaagtttgggattttcgaacatttcaaatttgggatgctcaaactgtgtatctacatcttatgtttacacacaatatatatataccaattggaaaacaatgtctaaaatggttactgtaatatgctgaataaattaagttctaaagaaaacatgtccaaatgtaaatgctttatatggtcatatttgttcagaatttatcatctagcaaactaatacctgattatttcaatttgtgaaaaaactactatggtagtcccctcttattctcaggggatatattccatgaaccccagtggatgcctgaaaccacgtgtagtacaaaacaatatatatattttttcctatacatacctatcctaaagtttaatttataaattaggtacaataagagattaatgataataataaaatacaattataataatatgccataataaaagttatgtgaatgtagtctttctc

SEQ ID NO: 67079 - DNA, 445 bp, Homo sapiens
gaccataaatagtcacgggaaattatagtcgtgtgtgctacagagaaggaaataaaggtcactcctgcagtttctgaaatggttttgaagtaggaaggaaacaagtttcagcaacatagttgtttaccatcgctgtttagagtatttttatgagtctgtttctttagatcccatttagaccaccttatttcctgttaagaatttctttagtgtagcattagaataaattacaatgtaagaaataaattttattgccctaaaatatcatggactagtgttggctgggaaactatataaaataatttcattaaaatagaattctcagctgggcgcagtggctcacacctgtaatcccagcactttgggtggctgaggcgggtggatcacctgaggtcaggagttcgagaccagcctggccaacatggtgaaacccccctcctctact

SEQ ID NO: 67080 - DNA, 1900 bp, Homo sapiens
gaggcggggcgcgggcgtgcagcggcgcaggctccgccccggggccgtctccagccgggggcgccgagccgctccagtccccggcgcgccgcgggctggtgggctcagcggcggcgccggcactgggaaatgaccctgcccgggggcccaacgggcatggcgcggccggggggcgcgaggccctgcagcccggggctggagcgggccccgcgccggagtgtcggggagctgcgcctgctcttcgaggcgcgctgtgcggcggtcgctgcggccgccgccgcgggggagccccgggcccgcggggccaagcggcgtgggggacaggtccccaacgggcttccgcgggctcccccggccccggtgatccctcagctgaccgtgacagccgaggagcccgacgtgcccccgaccagccctgggccgccggagcgggagagggactgcctcccggcagcgggctcttcgcacctgcagcagccgcgccgcctttccacctcgtcggtctcctccactggctcctcgtcgctgctcgaggactcggaggacgacctgctgagcgacagtgagagccggagccgcggcaacgtgcagctggaagcgggcgaggacgtgggtcagaaaaaccactggcagaagatccggaccatggtcaatctgccggtcataagccctttcaagaagcgctacgcctgggtgcagctggcagggcacactgggagttttaaggcggcgggcaccagcgggctgatcctgaagcgctgctcggagccggagcgctactgcctggcgcggctgatggctgacgcgctgcgcggctgcgtgcctgccttccacggcgtggtggagcgcgacggcgaaagctacctgcagctgcaggacctgctcgatggcttcgacggaccttgtgtgctcgactgcaaaatgggcgtcaggacttacctagaggaggagctgaccaaggcccgtgagcggcccaagctgcggaaggacatgtacaagaaaatgctggcggtggatcctgaagctcccacggaggaggagcacgcgcagcgcgccgtcaccaagccgcgctacatgcagtggcgggaaggcatcagctccagcaccaccctcggcttccgcatcgagggcatcaagaaagcggacggctcctgcagcaccgacttcaagactacgcgaagccgagagcaggtgcttcgcgtctttgaagagtttgtgcaaggagatgaggaagtgctgaggcggtatctgaaccgcctgcagcagatccgggacaccctggaggtatccgagttcttcaggaggcacgaggtgatcggcagctcgctcctctttgtgcacgatcactgccatcgcgccggcgtgtggctcatcgacttcggcaagaccacgcccctccccgatggccagatcctggaccaccggcggccctgggaggagggcaaccgcgaggacggctatttgctggggctggacaatctcattggcatcctggccagcctggctgagagatgaggctggactcctgtccccgcgggccgctcacctgacatgtggacctgcagctttgtccccactgtgcatgccggcttgagactggagccccgcggtgcagggcagttcaccgggtcctgcaggaccaggtgccagccactaagggggggcaccgccgatgccaggggttttgcccacccgggccccagcgttcccagagccaaatgacactaacttatagaaggggagggggcaaagggcttcttcctcaggccagctcttctgaggaggctctgccctctccagaggtgccagaccgcggattttatttagcaagcccagaccttccggtctaacgtctcacaccacgacggactccccttcctaataaaactcaaagacaaga

SEQ ID NO: 67081 - DNA, 1530 bp, Homo sapiens
cgggggccttcaactctgctcaggagctcgggccggagaaaggccccgagacttgaagcccttgcccgggagggatgaacacgcaaaggaacccgaggaacgggcagccgcgccgcctttccacctcgtcggtctcctccactggctcctcgtcgctgctcgaggactcggaggacgacctgctgagcgacagtgagagccggagccgcggcaacgtgcagctggaagcgggcgaggacgtgggtcagaaaaaccactggcagaagatccggaccatggtcaatctgccggtcataagccctttcaagaagcgctacgcctgggtgcagctggcagggcacactgggagttttaaggcggcgggcaccagcgggctgatcctgaagcgctgctcggagccggagcgctactgcctggcgcggctgatggctgacgcgctgcgcggctgcgtgcctgccttccacggcgtggtggagcgcgacggcgaaagctacctgcagctgcaggacctgctcgatggcttcgacggaccttgtgtgctcgactgcaaaatgggcgtcaggacttacctagaggaggagctgaccaaggcccgtgagcggcccaagctgcggaaggacatgtacaagaaaatgctggcggtggatcctgaagctcccacggaggaggagcacgcgcagcgcgccgtcaccaagccgcgctacatgcagtggcgggaaggcatcagctccagcaccaccctcggcttccgcatcgagggcatcaagaaagcggacggctcctgcagcaccgacttcaagactacgcgaagccgagagcaggtgcttcgcgtctttgaagagtttgtgcaaggagatgaggaagtgctgaggcggtatctgaaccgcctgcagcagatccgggacaccctggaggtatccgagttcttcaggaggcacgaggtgatcggcagctcgctcctctttgtgcacgatcactgccatcgcgccggcgtgtggctcatcgacttcggcaagaccacgcccctccccgatggccagatcctggaccaccggcggccctgggaggagggcaaccgcgaggacggctatttgctggggctggacaatctcattggcatcctggccagcctggctgagagatgaggctggactcctgtccccgcgggccgctcacctgacatgtggacctgcagctttgtccccactgtgcatgccggcttgagactggagccccgcggtgcagggcagttcaccgggtcctgcaggaccaggtgccagccactaagggggggcaccgccgatgccaggggttttgcccacccgggccccagcgttcccagagccaaatgacactaacttatagaaggggagggggcaaagggcttcttcctcaggccagctcttctgaggaggctctgccctctccagaggtgccagaccgcggattttatttagcaagcccagaccttccggtctaacgtctcacaccacgacggactccccttcctaataaaactcaaagacaaga

SEQ ID NO: 67082 - DNA, 856 bp, Homo sapiens
catccctctggctccagagctcagagccacccacagccgcagccatgctgtgcctcctgctcaccctgggcgtggccctggtctgtggtgtcccggccatggacatcccccagaccaagcaggacctggagctcccaaagttggcagggacctggcactccatggccatggcgaccaacaacatctccctcatggcgacactgaaggcccctctgagggtccacatcacctcactgttgcccacccccgaggacaacctggagatcgttctgcacagatgggagaacaacagctgtgttgagaagaaggtccttggagagaagactgagaatccaaagaagttcaagatcaactatacggtggcgaacgaggccacgctgctcgatactgactacgacaatttcctgtttctctgcctacaggacaccaccacccccatccagagcatgatgtgccagtacctggccagagtcctggtggaggacgatgagatcatgcagggattcatcagggctttcaggcccctgcccaggcacctatggtacttgctggacttgaaacagatggaagagccgtgccgtttctagccgtgccgtttctaggtgagctcctgcctggtcctgcctcctgggctcacctccgcctccaggaagaccagactcccacccttccacacctccagagcagtgggacttcctcctgccctttcaaagaataaccacagctcagaagacgatgacgtggtcatctgtgtcgccatccccttcctgctgcacacctgcaccacggccatggggaggctgctccctgggggcagagtctctggcagaggttattaataaacccttggagcatg

SEQ ID NO: 67083 - DNA, 993 bp, Homo sapiens
catccctctggctccagagctcagagccacccacagccgcagccatgctgtgcctcctgctcaccctgggcgtggccctggtctgtggtgtcccggccatggacatcccccagaccaagcaggacctggagctcccaaagttggcagggacctggcactccatggccatggcgaccaacaacatctccctcatggcgacactgaaggcccctctgagggtccacatcacctcactgttgcccacccccgaggacaacctggagatcgttctgcacagatgggagaacaacagctgtgttgagaagaaggtccttggagagaagactgagaatccaaagaagttcaagatcaactatacggtggcgaacgaggccacgctgctcgatactgactacgacaatttcctgtttctctgcctacaggacaccaccacccccatccagagcatgatgtgccagtacctggccagagtcctggtggaggacgatgagatcatgcagggattcatcagggctttcaggcccctgcccaggcacctatggtacttgctggacttgaaacagatggaagagccgtgccgtttctgctcacctccgcctccaggaagaccagactcccacccttccacacctccagagcagtgggacttcctcctgccctttcaaagaataaccacagctcagaagacgatgacgtggtcatctgtgtcgccatccccttcctgctgcacacctgcaccacggccatggggaggctgctccctgggggcagagtctctggcagaggttattaataaacccttggagcatgatcctgtctggatgcgcagccactgctgggtgtgggattcagggacgagggcctggggtcggggcaggcccaggccaccgcctggcagaaccggagctcctacagacccatgggcagcttctggtggagaaaatacctcaagtttcttatctacaaaataaaagggtccactttcacaaactt

SEQ ID NO: 67084 - DNA, 1170 bp, Homo sapiens
catccctctggctccagagctcagagccacccacagccgcagccatgctgtgcctcctgctcaccctgggcgtggccctggtctgtggtgtcccggccatggacatcccccagaccaagcaggacctggagctcccaaagttggcagggacctggcactccatggccatggcgaccaacaacatctccctcatggcgacactgaaggcccctctgagggtccacatcacctcactgttgcccacccccgaggacaacctggagatcgttctgcacagatgggagaacaacagctgtgttgagaagaaggtccttggagagaagactgagaatccaaagaagttcaagatcaactatacggtggcgaacgaggccacgctgctcgatactgactacgacaatttcctgtttctctgcctacaggacaccaccacccccatccagagcatgatgtgccagtacctggccagagtcctggtggaggacgatgagatcatgcagggattcatcagggctttcaggcccctgcccaggcacctatggtacttgctggacttgaaacagatggaagagccgtgccgtttctatggagtctcgctctgtcaccaggctggagtgcagtggcacaatctcagctcactgcaacctcgacctcctgggttcaagcgattctcctgcctcaaccccccgagttgctggaaccacaggcgtgtgccaccatgcccagctaatttttgtatttttaatagaaacggggtttcaccatgttggccacgatggtctcaatctcttgacctcatgatccccccgctttagcctcccaaagtgctgggatttcagtgccacattcttaagggggtgtcctcaagcccaccacatccttccagggctcccccgaaacaccctgctcttcctccctctacttaagtgacctgtaaacccaacagctcacctccgcctccaggaagaccagactcccacccttccacacctccagagcagtgggacttcctcctgccctttcaaagaataaccacagctcagaagacgatgacgtggtcatctgtgtcgccatccccttcctgctgcacacctgcaccacggccatggggaggctgctccctgggggcagagtctctggcagaggttattaataaacccttggagcatg

SEQ ID NO: 67085 - DNA, 928 bp, Homo sapiens
catccctctggctccagagctcagagccacccacagccgcagccatgctgtgcctcctgctcaccctgggcgtggccctggtctgtggtgtcccggccatggacatcccccagaccaagcaggacctggagctcccaaagttggcagggacctggcactccatggccatggcgaccaacaacatctccctcatggcgacactgaaggcccctctgagggtccacatcacctcactgttgcccacccccgaggacaacctggagatcgttctgcacagatgggagaacaacagctgtgttgagaagaaggtccttggagagaagactgagaatccaaagaagttcaagatcaactccagagtcctggtggaggacgatgagatcatgcagggattcatcagggctttcaggcccctgcccaggcacctatggtacttgctggacttgaaacagatggaagagccgtgccgtttctagccgtgccgtttctaggtgagctcctgcctggtcctgcctcctgggctcacctccgcctccaggaagaccagactcccacccttccacacctccagagcagtgggacttcctcctgccctttcaaagaataaccacagctcagaagacgatgacgtggtcatctgtgtcgccatccccttcctgctgcacacctgcaccacggccatggggaggctgctccctgggggcagagtctctggcagaggttattaataaacccttggagcatgatcctgtctggatgcgcagccactgctgggtgtgggattcagggacgagggcctggggtcggggcaggcccaggccaccgcctggcagaaccggagctcctacagacccatgggcagcttctggtggagaaaatacctcaagtttcttatctacaaaataaaagggtccactttcacaaactt

SEQ ID NO: 67086 - DNA, 810 bp, Homo sapiens
catccctctggctccagagctcagagccacccacagccgcagccatgctgtgcctcctgctcaccctgggcgtggccctggtctgtggtgtcccggccatggacatcccccagaccaagcaggacctggagctcccaaagttggcagggacctggcactccatggccatggcgaccaacaacatctccctcatggcgacactgaaggcccctctgagggtccacatcacctcactgttgcccacccccgaggacaacctggagatcgttctgcacagatgggagaacaacagctgtgttgagaagaaggtccttggagagaagactgagaatccaaagaagttcaagatcaactatacggtggcgaacgaggccacgctgctcgatactgactacgacaatttcctgtttctctgcctacaggacaccaccacccccatccagagcatgatgtgccagtacctggccagagtcctggtggaggacgatgagatcatgcagggattcatcagggctttcaggcccctgcccaggcacctatggtacttgctggacttgaaacagatggaagagccgtgccgtttctgctcacctccgcctccaggaagaccagactcccacccttccacacctccagagcagtgggacttcctcctgccctttcaaagaataaccacagctcagaagacgatgacgtggtcatctgtgtcgccatccccttcctgctgcacacctgcaccacggccatggggaggctgctccctgggggcagagtctctggcagaggttattaataaacccttggagcatg

SEQ ID NO: 67087 - DNA, 1039 bp, Homo sapiens
catccctctggctccagagctcagagccacccacagccgcagccatgctgtgcctcctgctcaccctgggcgtggccctggtctgtggtgtcccggccatggacatcccccagaccaagcaggacctggagctcccaaagttggcagggacctggcactccatggccatggcgaccaacaacatctccctcatggcgacactgaaggcccctctgagggtccacatcacctcactgttgcccacccccgaggacaacctggagatcgttctgcacagatgggagaacaacagctgtgttgagaagaaggtccttggagagaagactgagaatccaaagaagttcaagatcaactatacggtggcgaacgaggccacgctgctcgatactgactacgacaatttcctgtttctctgcctacaggacaccaccacccccatccagagcatgatgtgccagtacctggccagagtcctggtggaggacgatgagatcatgcagggattcatcagggctttcaggcccctgcccaggcacctatggtacttgctggacttgaaacagatggaagagccgtgccgtttctagccgtgccgtttctaggtgagctcctgcctggtcctgcctcctgggctcacctccgcctccaggaagaccagactcccacccttccacacctccagagcagtgggacttcctcctgccctttcaaagaataaccacagctcagaagacgatgacgtggtcatctgtgtcgccatccccttcctgctgcacacctgcaccacggccatggggaggctgctccctgggggcagagtctctggcagaggttattaataaacccttggagcatgatcctgtctggatgcgcagccactgctgggtgtgggattcagggacgagggcctggggtcggggcaggcccaggccaccgcctggcagaaccggagctcctacagacccatgggcagcttctggtggagaaaatacctcaagtttcttatctacaaaataaaagggtccactttcacaaactt

SEQ ID NO: 67088 - DNA, 1353 bp, Homo sapiens
catccctctggctccagagctcagagccacccacagccgcagccatgctgtgcctcctgctcaccctgggcgtggccctggtctgtggtgtcccggccatggacatcccccagaccaagcaggacctggagctcccaaagttggcagggacctggcactccatggccatggcgaccaacaacatctccctcatggcgacactgaaggcccctctgagggtccacatcacctcactgttgcccacccccgaggacaacctggagatcgttctgcacagatgggagaacaacagctgtgttgagaagaaggtccttggagagaagactgagaatccaaagaagttcaagatcaactatacggtggcgaacgaggccacgctgctcgatactgactacgacaatttcctgtttctctgcctacaggacaccaccacccccatccagagcatgatgtgccagtacctggccagagtcctggtggaggacgatgagatcatgcagggattcatcagggctttcaggcccctgcccaggcacctatggtacttgctggacttgaaacagatggaagagccgtgccgtttctatggagtctcgctctgtcaccaggctggagtgcagtggcacaatctcagctcactgcaacctcgacctcctgggttcaagcgattctcctgcctcaaccccccgagttgctggaaccacaggcgtgtgccaccatgcccagctaatttttgtatttttaatagaaacggggtttcaccatgttggccacgatggtctcaatctcttgacctcatgatccccccgctttagcctcccaaagtgctgggatttcagtgccacattcttaagggggtgtcctcaagcccaccacatccttccagggctcccccgaaacaccctgctcttcctccctctacttaagtgacctgtaaacccaacagctcacctccgcctccaggaagaccagactcccacccttccacacctccagagcagtgggacttcctcctgccctttcaaagaataaccacagctcagaagacgatgacgtggtcatctgtgtcgccatccccttcctgctgcacacctgcaccacggccatggggaggctgctccctgggggcagagtctctggcagaggttattaataaacccttggagcatgatcctgtctggatgcgcagccactgctgggtgtgggattcagggacgagggcctggggtcggggcaggcccaggccaccgcctggcagaaccggagctcctacagacccatgggcagcttctggtggagaaaatacctcaagtttcttatctacaaaataaaagggtccactttcacaaactt

SEQ ID NO: 67089 - DNA, 499 bp, Homo sapiens
tgggttttcccagagccctctcaccctcacgcatctgctgtctggagggatggttggtaccgttctagggcagttcatgtgtccgctgtcctcagggcttcaggacatcaggtggggtctcgtgttcccagtgcagaggtagggcccagggcaaggggctggtgtcctgcacagctagtgtaggtgtagacagggccaccccagcgggtggctctgaagccagcccccctcacctcgcccccaaccatggccagagctcccttgttcttcagtctcccagtgatggtgtctgcaggcagcagtggagaatcctggcctggtgctgagtccaagttggcccctcctagtgctcggcacaccgagggcactttgctttcagaggaggacttgggactgaatcttacacctagagggtgaggaaccctttgcatgtttgtttgtttgtttgtttgttttttaattaaattttacagtacctattttgccttaaaaaaaaaaa

SEQ ID NO: 67090 - DNA, 938 bp, Homo sapiens
tgggttttcccagagccctctcaccctcacgcatctgctgtctggagggatggttggtaccgttctagggcagttcatgtgtccgctgtcctcagggcttcaggacatcaggtggggtctcgtgttcccagtgcagaggtagggcccagggcaaggggctggtgtcctgcacagctagtgtaggtgtagacagggccaccccagcgggtggctctgaagccagcccccctcacctcgcccccaaccatggccagagctcccttgttcttcagtctcccagtgatggtgtctgcaggcagcagtggagaatcctggcctggtgctgagtccaagttggcccctcctagtgctcggcacaccgagggcactttgctttcagaggaggacttgggactgaatcttacacctagagggtgaggaaccctttgcatgtttgtttgtttgtttgtttgttttttaattaaattttacagtacctattttgccttaaaaaaaaaaatctgttgaagggcatctgtcctccagcgttcgccacggcactgctcccagcagccaggatagaatcaacccaggtgtctgaccgcagatggatggataaggaaagtggggtgcacacactcagcagagtgctgttcagccttagaaagaatgagatcctggccaggcgtggtggctgtcgcctgtaatcccagcactttgtgaggccgaggcgggtggatcacctgaggtcaggagtttcagaccagcctggtcaacacggtgaaaccctttctctactaaaatacaaaaagtagccaggcgtggtggcgggcatctataattccagctactcaggaggctgaggcaggagaatcgcttgaacctaggaggttgaggctgcagtgagctgagtttgtaccactacgctccagcctgggcgacaacagcaagactccatc

SEQ ID NO: 67091 - DNA, 577 bp, Homo sapiens
ggaaccctttgcatgtttgtttgtttgtttgtttgttttttaattaaattttacagtacctattttgccttaaaaaaaaaaaaaaaaactaccttattcccactgctgggtgtgtttccagaagaaaggaagttactctgttgaagggcatctgtcctccagcgttcgccacggcactgctcccagcagccaggatagaatcaacccaggtgtctgaccgcagatggatggataaggaaagtggggtgcacacactcagcagagtgctgttcagccttagaaagaatgagatcctggccaggcgtggtggctgtcgcctgtaatcccagcactttgtgaggccgaggcgggtggatcacctgaggtcaggagtttcagaccagcctggtcaacacggtgaaaccctttctctactaaaatacaaaaagtagccaggcgtggtggcgggcatctataattccagctactcaggaggctgaggcaggagaatcgcttgaacctaggaggttgaggctgcagtgagctgagtttgtaccactacgctccagcctgggcgacaacagcaagactccatctc

SEQ ID NO: 67092 - DNA, 1094 bp, Homo sapiens
tttttttttgagaagagccagccttttgagagagcatatgactcttcctggactacaacagcttcttgtgtgaatcacagcccggcttttgccagttagtctgagtagataactacccacccccactcccccaagctgataattattaccctggtttatcctctgtctcatttcccctctcaagctgttagagaatgaatactgaatactgtggtgcactgctccatggatataaatgtaacagcagtaatatttacaaccaatgtctaattggctgtagcttgctttcagtgttcagtctaaaccataggactatatatttgtcttagcataatgccgaacatgcaagtctgcttaaactatagtcttaagatttgtgtgttttgggtttcctctacttcctctatttcctgtcttttttgggttataggtcagatgggttctactttttattcccatttcagactgtggagagcttctaaaaataccagtgtccatccctgcccctaggatctagttaatttttaaaagctctctgtgtttcaaatttgcatgtgtttctgtatgtttgcagtatctccgtgtgttttcaaatcttctgatggagcacttcgtgtactttaacccttggtctttccattgcctgtcccatttttaaattccctttttagtcttaatagctgcttgagttaggacctctggaagcaaaagtgggataggatgctgacggggaattgtaggcttgatggaagaggatgtttctatattaaatgtcatggcagatccagttctaggcatacctttaaaatgtatacacaggctgggcgtggtagctcactcctgtaatcccagcagtttgggaggcccaggcaggcggatcacttgaggtagggagttcgagaacagcctggccaacatggtgaaaccctgtctctactaaaaatacaaagattagctggacatgatggtgggtgcctgtagtcccagctgcttgggaggctgaggccggacaatctcctgaagctgggaggcggaggttgcagttagatgaactgacacaccactgcactccagcctgggagacagggtgacca

SEQ ID NO: 67093 - DNA, 447 bp, Homo sapiens
aggatgaagtaagtaaagagaaaatacgttgaatataatattttactgtggtaaaaaaacagcagaaataatctttggattcactggtatgattacttagatcctgaaatcctttacactttagattgctgttcaaaaagaaaaataatcacatgaaatcagtgaaaacctacaaagtacattctaatttttaaccataaatacagagtgtaaaaattgatgccagttatatttggaaatgtcaaaatacttatctaacaactaggaatgtgaatgtattttttgatgttaatttttcatatctttggggatttgggagccacattttattgataaaaactcatcaccggaacactttaaaataatgtttattttccaggccacaaatattgtatttcatttctatcagtaatcagatttattaaagacagcattatattaccatat

SEQ ID NO: 67094 - DNA, 307 bp, Homo sapiens
ccgcgcccggctgtctttcattttttagagacagggtctggttatgttgcccaggctggtctccaactcctggcctcaagtgatcctcccgccttgtcctcccaaagctctgggattataggcatgagctgctgtgcccagcttgttatttatttatttatagcctgagagagacttgaacatttatataagctgcagggaatggagaagtagatatactgaaaaccatgcaggccgggcacagtggctcacacctgtaaacccagcacattgggaggctgaggcgggtggatcacctgaggtcagg

SEQ ID NO: 67095 - DNA, 717 bp, Homo sapiens
ttctctctcactctctcactatgcatattgttcttttgtttttccacccgatccgtttaagagccaattacagacattacccaaagtatttctgtatttcctgaaaacaaggatatattctatgtcacagccacagtacaacccagcaaaatcaagaaattaataaatacaataataccatgtaacttacaatctcattcagctttcatcaaccattccagttgggtggaggctgatcatctctctgccattttcataagttatgtcatagattttcacatctgtcacatcattcatttctccaaagagccttagttccttttagtaaggaatggtatttagaagccaagtttggatgctaggtgtgtttattgctactgagatgtcattatttccagtctatttcagtgactagacctagcaaataaatgaatattgatatacacacccattcatctatatttctatgaaatatatttaaatatgtgtgcatatagatgtgtatatgtatatatagatctatgtatatgtgagcatatatatgtgcacatatatcaaaatatatatgtatatataaaatatgagttcacaccaatacctcaaattccaatccaataccacatattttcctctagtcttcctcttctctataattttacctcccttctgcaatagtaggaaacttgattctcattttccacaatatacttgtattct

SEQ ID NO: 67096 - DNA, 1790 bp, Homo sapiens
  misc_feature (1778)..(1778): n is a, c, g, or t
  misc_feature (1782)..(1784): n is a, c, g, or t
  misc_feature (1788)..(1790): n is a, c, g, or t
tgctatgaaaggatggggacctcaccagagaggactggtctcagcaatgtccttaagtggtcaaaacatgctgcggttgagtctccacccacatttgcacaaaggaccatcacctgtccttcctggaatctctaaagttttctgctttccttctgtcctgatggccagctctgctaagtcagctgagatgcccaccatctccaaaacccttaaccctactcctgatcctcatcaagaatatctggaccctaggattaccattgccttattcgaaattggatcacattccccttcctcctggggctctctccctttcctaaagaatagcagccatcaagttacagaacaacagactgcacagaagtttaacaatctcttaaaagaaattaaagatattcttaaaaatatggcaggttttgaagagaagatcacagaagcaaaagaactttttgaggaaaccaatattactgaggatgtgtcagcccacaaagaaaatatcagaggacttgacaaaatcaatgaaatgttatcaacaaacctgcctgttagtttagccccagagaaagaagacaatgaaaagaaacaggagatgatattggaaaccaatattactgaggatgtgtcagcccacaaagaaaatatcagaggacttgacaaaatcaatgaaatgttatcaacaaacctgcctgttagtttagccccagagaaagaagacaatgaaaagaaacagcagatgataatggaaaaccagaactctgagaacaccgcacaagtttttgcaagagatttggtaaatcgtttagaagaaaaaaaagtccttaacgaaactcaacaaagtcaggaaaaagcaaaaaacagacttaatgttcaagaagaaactatgaaaattaggaacaacatggagcagttactacaggaagcagaacactggagtaaacaacatactgagctcagtaaactgataaaatcctatcagaaatctcagaaagacataagtgaaactcttggaaataatggagtcggtttccaaacccagccaaataatgaagtgtcggctaagcatgagctggaggaacaggtgaagaaactgagccatgacacctattcattgcagttgatggcagctttgctagagaatgaatgccaaatcttacagcagagagtagagattctcaaggaactccatcatcagaaacagggaactctgcaagagaagccaattcagataaactataaacaggacaagaaaaatcagaagccatcagaagcaaagaaagtagaaatgtataagcagaacaagcaagcaatgaagggtacattttggaaaaaagacagatcctgtagaagcctggatgtttgtcttaataagaaagcttgcaatacccagttcaatattcatgttgcaagaaaagctcttaggggaaaaatgaggtcagctagcagcctaagatagaaaataccaaaagcagatgaaaaggtgaatccttaaaaaactacatctgttacctccaacttgtcagtcatgatcaatcatcaaaccttgggcagatctgctggttcaaccaagaaagagctatagaataaggagattgacacttatattactcattacttcagcagttatgtaagtctggtctttaatgaccattgtgtctacatcaagttcataacttttcacctttacaatctgcttgttttttttgtaattattagatagacagcctagagtgagaagttaaaggtccaattaagtaaagatctaaataaaaaccagaatncaannnaaannn

SEQ ID NO: 67097 - DNA, 1884 bp, Homo sapiens
  misc_feature (1872)..(1872): n is a, c, g, or t
  misc_feature (1876)..(1878): n is a, c, g, or t
  misc_feature (1882)..(1884): n is a, c, g, or t
agggccagagaataaacaccgggtgcctagaggagaagagatggagccccagccttggtcccctttcccacccttcctccccacaaggctgtctgagatgccaccttccacctaaacatcatctcccaaattttaatccttaactttggtctctgacttctgcttgattccacagtctccacccacatttgcacaaaggaccatcacctgtccttcctggaatctctaaagttttctgctttccttctgtcctgatggccagctctgctaagtcagctgagatgcccaccatctccaaaacccttaaccctactcctgatcctcatcaagaatatctggaccctaggattaccattgccttattcgaaattggatcacattccccttcctcctggggctctctccctttcctaaagaatagcagccatcaagttacagaacaacagactgcacagaagtttaacaatctcttaaaagaaattaaagatattcttaaaaatatggcaggttttgaagagaagatcacagaagcaaaagaactttttgaggaaaccaatattactgaggatgtgtcagcccacaaagaaaatatcagaggacttgacaaaatcaatgaaatgttatcaacaaacctgcctgttagtttagccccagagaaagaagacaatgaaaagaaacaggagatgatattggaaaccaatattactgaggatgtgtcagcccacaaagaaaatatcagaggacttgacaaaatcaatgaaatgttatcaacaaacctgcctgttagtttagccccagagaaagaagacaatgaaaagaaacagcagatgataatggaaaaccagaactctgagaacaccgcacaagtttttgcaagagatttggtaaatcgtttagaagaaaaaaaagtccttaacgaaactcaacaaagtcaggaaaaagcaaaaaacagacttaatgttcaagaagaaactatgaaaattaggaacaacatggagcagttactacaggaagcagaacactggagtaaacaacatactgagctcagtaaactgataaaatcctatcagaaatctcagaaagacataagtgaaactcttggaaataatggagtcggtttccaaacccagccaaataatgaagtgtcggctaagcatgagctggaggaacaggtgaagaaactgagccatgacacctattcattgcagttgatggcagctttgctagagaatgaatgccaaatcttacagcagagagtagagattctcaaggaactccatcatcagaaacagggaactctgcaagagaagccaattcagataaactataaacaggacaagaaaaatcagaagccatcagaagcaaagaaagtagaaatgtataagcagaacaagcaagcaatgaagggtacattttggaaaaaagacagatcctgtagaagcctggatgtttgtcttaataagaaagcttgcaatacccagttcaatattcatgttgcaagaaaagctcttaggggaaaaatgaggtcagctagcagcctaagatagaaaataccaaaagcagatgaaaaggtgaatccttaaaaaactacatctgttacctccaacttgtcagtcatgatcaatcatcaaaccttgggcagatctgctggttcaaccaagaaagagctatagaataaggagattgacacttatattactcattacttcagcagttatgtaagtctggtctttaatgaccattgtgtctacatcaagttcataacttttcacctttacaatctgcttgttttttttgtaattattagatagacagcctagagtgagaagttaaaggtccaattaagtaaagatctaaataaaaaccagaatncaannnaaannn

SEQ ID NO: 67098 - DNA, 306 bp, Homo sapiens
agtagtcagtcactcagaacaaagtgaagtcttttacaggggtgcagaatcataagcctggtccacaagaatcaaatgggccagactttgaattcagtcacccatttttagattatctgagccatcatgaaattgtttgtatttgtgtactacggaagatggggatttgctaatttcaagagacctcctggaattcatccacctccatccagctattcctgacctccttgtggggaagggagaagggaaggtcttaggaattaatctccagtaacatcactaccgaggtgagcaaggcaaacctgt

SEQ ID NO: 67099 - DNA, 672 bp, Homo sapiens
tttgtactgggatttaagacacccctgatggaatgaaagccaactgaaccacgtaaagctcgaaccacgtggcaagtggtggacaaaacttcaacgcatgatatttattggcacttcctcacctccctttgccctgcagctgtttttatgcttctttttctctccttgctaattactgactccccaagtggcaagttccgcagatagctgggttagaagagagacaggggagtgagctagtcaaatgtgaaaaatgctctcccagcaaagctgagacaaaattggagaagctgcagcctcacgcaccatccccctctttccaccagatggatgttgacttggtgtctgggagttcccgaaccctagagccaggatgttctgtttaatcaacagctcagccagctgcctgggagttttggcattaagccccgccttgaagggcgagctttaagtttttcccagttctggaactttctaccgagtatccaccacccttagacacaatcccagtgctacccgtctgacctgcactgctcatctgctttgtgtaacatgacccctgataagatgttgaaactgttattcacaaagactccgtgtttgggcaacatcaagactgtaagtgtagaattgagcaactgtcttctatcaataaaggctgaatggcaaaaa

SEQ ID NO: 67100 - DNA, 2871 bp, Homo sapiens
ttttttttgctttttgcagatttgaaatttaattaagctattaacttcttaatcatcacatcctccaactctgttttaactcccccctccccctcccctttttttttaaggaataaagggattcattcctcattttaactgatgttacagtgaagatgggttcttgaactcttggaagcctggatgagccacctaatctcaaagataaaaaccaaagaccaatgcgtattggggaaaagaatgcttagtactgcaagactgttgaatacctgttgaatattcctattgaggttttttcctaaacatacttcagtaacatcttaccggacaattgcactggagaaatgttgatccctggctggaatgtcataccattgacccatttgaagagttaaagctggatttgactgctctattctaccaggaatattgttagggtagccttttccagtttctaaacaattgtaatcatttattgactcagcaattcctcagataacaggtcaaaagatgtacagatacattctgaagttttcttgctattaaaggcacaagagtttccttgtattttgactgacaatgtagcatgtttccatttagtttgttagtgaggtggttttccctttgaaagccatttggtatattcaccataacaattagtttaatatgattacataagaaaactatgataaaacccagcaattttagtagttgtgaaaatacgttttttaaatcatgtttaagaagaattgcaagacttgaaaccaaatcctgatgggggaattctgtttaatcctgtttaatctgtttaatttctgtttaatccttagtttcttaacctgcatagcttatcctgtattgtactttttttcttttttaaactcccaaacaagaagcttgaaactttttctgtattttaaaattgaaatttggtcacagggtatagtcagatttttattaaggtttggtttgacaacctttaaagaaaggtttacctcgctaatacttcttaataacatgcatcaaatgatattccctatggtgaagtatatctcaaagttatgtatctttcatttttggcatttggtgcttatggacttagtacccaggcaacaaagatctattatcacctactctcttgtattcgctattatttcccaaaaaaaaaaaaggggcatatatcataagaataatattagaattattttgtttctcccacaagcccatggtagagatttctatgttcccattctccctttcactcagagttatgttgactgggggcggtggctcatttgggaagccaaggcgggtgaatcacttgaggtcaggagttcaagaccagctagccaatcacggcgaaactccgtctctactaaaaatataaaaattagtcccgtctctactaaaaatataaaaattagtcagacgtggtacctgtttggtggtgtgcatctgctagtcccaactactcgggacgctgaggcaggtgaattgcatgatccaggaggcagaggctgcaatgagctgagatcatgccactgcactccagcctgggtgacaagtgagactgtctcaaaaaaaaaaaaaaaaaaaaaaaaaaaaaaaacaagggtccttacttgcattaatgcatccacattattccatgtactcaccaggattttttgttataaacaaaaatacccactctggttacttattaaaagattatcagtcaatttacaaaaacaacaggaagatttacaaagaaaaaaaaaacaaaggaagcaagaacatccagaactcacagcacagaatactgtgcttaaaatgctgctgcaaggagtattaattaacttataccctactgtgacacttaacaggccaggtgtggtggctcacgcctgtatcccagcactttgggctgaaggcggagtacacttgaacccaggacagcctgggcaacatggtgagaccccgtgtctacaaaaaataaaaaagccgggagtggtggcaagctcctatagttccagctacttgggagactgaggtggagggatcacttcagcctgggaggtcaaggtcacagtgagctataatcaagccaccgcactctggcctgggcaacagagacagtctcaaaaagaaaaaaaaaaaagcacttaacacactttatgaatacaatatggcacatctatctgcccattagagtgagactcctgagtattttactcatctttccattctcaaatgcaaagagtatgtggcatataataactgtccgaatgtacgactgacatcttaaagcgtgtcggtcggcaaactttttcgtaaagggccaggtaagtaaacattataagctttgtaatccacacagtctctgttcaaaccattctactgttgtagcaggaaagcagccatggataatatgtaaacaagtcagctacgatgtgttcaaataaaactttataaaaacaggcagtaggctgggtttagcccatggaccacaatttgccaagtatttaacaagaatcaacacttttcctttcataatttaattgaagttggtacctacaaagatatgagctcactactacatatgactatctgtaatggatcaattttggatatgactttgggtgggggtaaaaaaagaaccgaagacatgtaatatagatgaataatgaaaataacagggctgggtgcagttgcctgcactttaggaggctgaggcaggagcatctctggaacctgggaggcagaggttgcagtgagccaagattgcgccattgcactccagccaaggggacaagagcaaaaacaaaaacaaaaacaaaaacctttaaggtaccagcctggctaagcagttaacatacctcactttatcag

SEQ ID NO: 67101 - DNA, 972 bp, Homo sapiens
cagtgagcggaaatcgcgccactgctcccccagcccgagaccctgtgtccctccctcgccccgtttctcccagcggtaacctccaaggagcggtaatggggggcccgcaggcccacatccgtgccggggaggccggtccgcacctgtgcgttcacagccccgcccctcccctcgcgccggggttacctggccgccactgaccactcatttctgtaacgtcatttcaaaatgttctgaaactggaatcgcagttatgtggcccacccagtatcttttgagtttggcttatttcattcagcatagaatgtggacgtgccccgggattgtatcagtgctttgcccctctgttgctgagccagtccgtggaatccatggaccaccctctctctagccaaggcctcaccccgcaaagagcatctaacgttttctttctttctttcttttctttccagaagccgccaccacgactggctaatttttttgtgtttcccttaccaataaagctgccataatgcccaggagtgcggttgctgggtcagatggtagatatatatatatgcctctctgtctctctctctctttctatgtatatatgtatgtttgtgtgtgtgtatatatatatatacacctatatagatatatgtgtgtgtatatgtatacacctatatagatgtatgtgtgtgtatatatacatatatatattatatatatactttttttttttttaaagaaactgtctaattgtttttcagagtggctgggccattttgcatccctacggtgatgcagattttccgcatcctcaccagcatttggtggagttgctgtttttcattttagccgcgtcctggtagggatgtgctggcagggtgctgtggtcctcattcgcgtttccctgttggccagtgacgtggagcatctttctttgtgcttatttgccatctgtgggttttcttggtgaaatctctctta

SEQ ID NO: 67102 - DNA, 1860 bp, Homo sapiens
taggctaggtagaggccgggtgtgaatcggccgagtgtggagctggggtcactgcgcggtgggaccatggcctcggagaagccgctggcggcagtcacttgtacagcgccggtcaacatcgcggtcatcaagtactggggcaagcgcgatgaagagctggttctgcccatcaactcctccctgagcgtcactctgcaccaggaccagttaaaaaccaccacaacagccgtcatcagcaaggacttcaccgaggaccggatttggctgaatggccgggaggaggatgtggggcagccgaggctgcaggcctgcctgcgggagatccgctgcctggcccggaagcggaggaactcacgggatggggacccgctgccctccagcctcagctgcaaggtgcacgtggcatcggtgaacaacttccccacggctgcgggcctggcctcctcagcggcgggctatgcctgcctagcctacaccctggcccgtgtctacggcgtggagagtgacctctcagaagtggctcgccggggctcaggcagcgcctgccggagcctgtatgggggctttgtggagtggcagatgggagagcaggccgacgggaaggacagcatcgctcggcaagtggcccccgagtcacactggcctgaactccgcgtgctcatccttgtggtgagcgctgagaagaagctgacaggcagtaccgtgggcatgcgggccagtgtggagaccagccccctgcttcggttccgggccgagtccgtggtgcccgcgcgcatggcggagatggcccgctgcatccgggagcgagacttccccagcttcgcccagctgaccatgaaggacagcaaccagttccacgccacctgcctcgacaccttcccgcccatctcttacctcaatgccatctcctggcgcatcatccacctggtgcaccgcttcaacgcccaccacggggacaccaaggtggcgtacacctttgacgcgggccccaatgccgtgatcttcaccctggacgacactgtggctgagtttgtggctgctgtgtggcacggctttcccccaggctcgaatggagacacgtttctgaaggggctgcaggtgaggccggcccctctctcagctgagcttcaggctgcgctggccatggagccgacccccggtggggtcaaatacatcattgtcactcaggtggggccagggcctcaaatcctggatgacccctgcgcccacctcctgggtcctgacggcctgccgaagccagctgcctgactgcctcagcagggaccgcatgccgcttggagaaggggtggcctcgccggagctagggagcggatgtggtgggctggccggactcctgggacatgtgggtggtggcttgaccccgggcccatgggcagcttgctgtggggcagtgcagggagtcctgcggccgcccaggtgtcaggagaggtccccgccgagtgcttcagctgccctaagctgcaccagcgctttgccaagatgggatggggagggggtatgagaactggcagagcctcggtgcagcagggctgaagggctttctcaccccagctctggctatgcccagttctctgagaaaggagctcagtggggaggtggtccctccagcggaccagggaaggggtcactgtgctgggagcagcctccttgggcctcaggaaaccaccaagtgcctcggatggtggctgcccacggcgcttctgctgagaccctgcccccggcccaggtgtctcggagggtggctgcccacggcctgggtgtggctggaatggtggcaggagtgggcaccagtgcggccccggtggccatggggaataaaccagcattgctgcctccgga

SEQ ID NO: 67103 - DNA, 2067 bp, Homo sapiens
taggctaggtagaggccgggtgtgaatcggccgagtgtggagctggggtcactgcgcggtgggaccatggcctcggagaagccgctggcggcagtcacttgtacagcgccggtcaacatcgcggtcatcaagtactagatggggtttcaccgtgttggccaggctggtctgaagctcctgacctcgtgatctgcccacctcagcctcccaaagtgctgggattacagactgtcactgcgacacccaggctggagtgcaatggcgtgatctcggctcactgcaacctccgcttcccgggttcaaccgattctcctgcctcagcctctcgagtagctgggactacggggcaagcgcgatgaagagctggttctgcccatcaactcctccctgagcgtcactctgcaccaggaccagttaaaaaccaccacaacagccgtcatcagcaaggacttcaccgaggaccggatttggctgaatggccgggaggaggatgtggggcagccgaggctgcaggcctgcctgcgggagatccgctgcctggcccggaagcggaggaactcacgggatggggacccgctgccctccagcctcagctgcaaggtgcacgtggcatcggtgaacaacttccccacggctgcgggcctggcctcctcagcggcgggctatgcctgcctagcctacaccctggcccgtgtctacggcgtggagagtgacctctcagaagtggctcgccggggctcaggcagcgcctgccggagcctgtatgggggctttgtggagtggcagatgggagagcaggccgacgggaaggacagcatcgctcggcaagtggcccccgagtcacactggcctgaactccgcgtgctcatccttgtggtgagcgctgagaagaagctgacaggcagtaccgtgggcatgcgggccagtgtggagaccagccccctgcttcggttccgggccgagtccgtggtgcccgcgcgcatggcggagatggcccgctgcatccgggagcgagacttccccagcttcgcccagctgaccatgaaggacagcaaccagttccacgccacctgcctcgacaccttcccgcccatctcttacctcaatgccatctcctggcgcatcatccacctggtgcaccgcttcaacgcccaccacggggacaccaaggtggcgtacacctttgacgcgggccccaatgccgtgatcttcaccctggacgacactgtggctgagtttgtggctgctgtgtggcacggctttcccccaggctcgaatggagacacgtttctgaaggggctgcaggtgaggccggcccctctctcagctgagcttcaggctgcgctggccatggagccgacccccggtggggtcaaatacatcattgtcactcaggtggggccagggcctcaaatcctggatgacccctgcgcccacctcctgggtcctgacggcctgccgaagccagctgcctgactgcctcagcagggaccgcatgccgcttggagaaggggtggcctcgccggagctagggagcggatgtggtgggctggccggactcctgggacatgtgggtggtggcttgaccccgggcccatgggcagcttgctgtggggcagtgcagggagtcctgcggccgcccaggtgtcaggagaggtccccgccgagtgcttcagctgccctaagctgcaccagcgctttgccaagatgggatggggagggggtatgagaactggcagagcctcggtgcagcagggctgaagggctttctcaccccagctctggctatgcccagttctctgagaaaggagctcagtggggaggtggtccctccagcggaccagggaaggggtcactgtgctgggagcagcctccttgggcctcaggaaaccaccaagtgcctcggatggtggctgcccacggcgcttctgctgagaccctgcccccggcccaggtgtctcggagggtggctgcccacggcctgggtgtggctggaatggtggcaggagtgggcaccagtgcggccccggtggccatggggaataaaccagcattgctgcctccgga

SEQ ID NO: 67104 - DNA, 2057 bp, Homo sapiens
cgtgggtcactgcacccgtcgtatcctggggtcaagcaattctcctgccttagtcttccgagtatttcgggactacatgcacgtgccaccagcacttgagctaacttatttgtatttattagatagagatggggtttcaccgtgttggccaggctggtctgaagctcctgacctcgtgatctgcccacctcagcctcccaaagtgctgggattacagactgtcactgcgacacccaggctggagtgcaatggcgtgatctcggctcactgcaacctccgcttcccgggttcaaccgattctcctgcctcagcctctcgagtagctgggactacggggcaagcgcgatgaagagctggttctgcccatcaactcctccctgagcgtcactctgcaccaggaccagttaaaaaccaccacaacagccgtcatcagcaaggacttcaccgaggaccggatttggctgaatggccgggaggaggatgtggggcagccgaggctgcaggcctgcctgcgggagatccgctgcctggcccggaagcggaggaactcacgggatggggacccgctgccctccagcctcagctgcaaggtgcacgtggcatcggtgaacaacttccccacggctgcgggcctggcctcctcagcggcgggctatgcctgcctagcctacaccctggcccgtgtctacggcgtggagagtgacctctcagaagtggctcgccggggctcaggcagcgcctgccggagcctgtatgggggctttgtggagtggcagatgggagagcaggccgacgggaaggacagcatcgctcggcaagtggcccccgagtcacactggcctgaactccgcgtgctcatccttgtggtgagcgctgagaagaagctgacaggcagtaccgtgggcatgcgggccagtgtggagaccagccccctgcttcggttccgggccgagtccgtggtgcccgcgcgcatggcggagatggcccgctgcatccgggagcgagacttccccagcttcgcccagctgaccatgaaggacagcaaccagttccacgccacctgcctcgacaccttcccgcccatctcttacctcaatgccatctcctggcgcatcatccacctggtgcaccgcttcaacgcccaccacggggacaccaaggtggcgtacacctttgacgcgggccccaatgccgtgatcttcaccctggacgacactgtggctgagtttgtggctgctgtgtggcacggctttcccccaggctcgaatggagacacgtttctgaaggggctgcaggtgaggccggcccctctctcagctgagcttcaggctgcgctggccatggagccgacccccggtggggtcaaatacatcattgtcactcaggtggggccagggcctcaaatcctggatgacccctgcgcccacctcctgggtcctgacggcctgccgaagccagctgcctgactgcctcagcagggaccgcatgccgcttggagaaggggtggcctcgccggagctagggagcggatgtggtgggctggccggactcctgggacatgtgggtggtggcttgaccccgggcccatgggcagcttgctgtggggcagtgcagggagtcctgcggccgcccaggtgtcaggagaggtccccgccgagtgcttcagctgccctaagctgcaccagcgctttgccaagatgggatggggagggggtatgagaactggcagagcctcggtgcagcagggctgaagggctttctcaccccagctctggctatgcccagttctctgagaaaggagctcagtggggaggtggtccctccagcggaccagggaaggggtcactgtgctgggagcagcctccttgggcctcaggaaaccaccaagtgcctcggatggtggctgcccacggcgcttctgctgagaccctgcccccggcccaggtgtctcggagggtggctgcccacggcctgggtgtggctggaatggtggcaggagtgggcaccagtgcggccccggtggccatggggaataaaccagcattgctgcctccgga

SEQ ID NO: 67105 - DNA, 2056 bp, Homo sapiens
taggctaggtagaggccgggtgtgaatcggccgagtgtggagctggggtcactgcgcggtgggaccatggcctcggagaagccgctggcggcagtcacttgtacagcgccggtcaacatcgcggtcatcaagtactggcctcgacagacggggaaactgaggctcagggaggggcgcggcggtggtcgggcggggccgcgcgctccttcgcgtgacaagctcggcgccacccgttcccccgcgacggctgccgcccctgcagggtcgcccggcgcctgcccattagcgattaccgaactatcgaaatcatcaatcatcgattcccatgaatcggggcaagcgcgatgaagagctggttctgcccatcaactcctccctgagcgtcactctgcaccaggaccagttaaaaaccaccacaacagccgtcatcagcaaggacttcaccgaggaccggatttggctgaatggccgggaggaggatgtggggcagccgaggctgcaggcctgcctgcgggagatccgctgcctggcccggaagcggaggaactcacgggatggggacccgctgccctccagcctcagctgcaaggtgcacgtggcatcggtgaacaacttccccacggctgcgggcctggcctcctcagcggcgggctatgcctgcctagcctacaccctggcccgtgtctacggcgtggagagtgacctctcagaagtggctcgccggggctcaggcagcgcctgccggagcctgtatgggggctttgtggagtggcagatgggagagcaggccgacgggaaggacagcatcgctcggcaagtggcccccgagtcacactggcctgaactccgcgtgctcatccttgtggtgagcgctgagaagaagctgacaggcagtaccgtgggcatgcgggccagtgtggagaccagccccctgcttcggttccgggccgagtccgtggtgcccgcgcgcatggcggagatggcccgctgcatccgggagcgagacttccccagcttcgcccagctgaccatgaaggacagcaaccagttccacgccacctgcctcgacaccttcccgcccatctcttacctcaatgccatctcctggcgcatcatccacctggtgcaccgcttcaacgcccaccacggggacaccaaggtggcgtacacctttgacgcgggccccaatgccgtgatcttcaccctggacgacactgtggctgagtttgtggctgctgtgtggcacggctttcccccaggctcgaatggagacacgtttctgaaggggctgcaggtgaggccggcccctctctcagctgagcttcaggctgcgctggccatggagccgacccccggtggggtcaaatacatcattgtcactcaggtggggccagggcctcaaatcctggatgacccctgcgcccacctcctgggtcctgacggcctgccgaagccagctgcctgactgcctcagcagggaccgcatgccgcttggagaaggggtggcctcgccggagctagggagcggatgtggtgggctggccggactcctgggacatgtgggtggtggcttgaccccgggcccatgggcagcttgctgtggggcagtgcagggagtcctgcggccgcccaggtgtcaggagaggtccccgccgagtgcttcagctgccctaagctgcaccagcgctttgccaagatgggatggggagggggtatgagaactggcagagcctcggtgcagcagggctgaagggctttctcaccccagctctggctatgcccagttctctgagaaaggagctcagtggggaggtggtccctccagcggaccagggaaggggtcactgtgctgggagcagcctccttgggcctcaggaaaccaccaagtgcctcggatggtggctgcccacggcgcttctgctgagaccctgcccccggcccaggtgtctcggagggtggctgcccacggcctgggtgtggctggaatggtggcaggagtgggcaccagtgcggccccggtggccatggggaataaaccagcattgctgcctccgga

SEQ ID NO: 67106 - DNA, 2482 bp, Homo sapiens
taggctaggtagaggccgggtgtgaatcggccgagtgtggagctggggtcactgcgcggtgggaccatggcctcggagaagccgctggcggcagtcacttgtacagcgccggtcaacatcgcggtcatcaagtactggggcaagcgcgatgaagagctggttctgcccatcaactcctccctgagcgtcactctgcaccaggaccagttaaaaaccaccacaacagccgtcatcagcaaggacttcaccgaggaccggatttggctgaatggccgggaggaggatgtggggcagccgaggctgcaggcctgcctgcgggagagtgagctggggtccccataagcccatccctccctgttgtcagcagggtccgagcatccagaaagtgcttctgcctctgtgcccctcctgaggcagcaggcggggtggctgggaaccagacatgcccgctgggccgccagctccagggcagtggcccacctcaatgaccagctgggcttgggtcagtctggggttttcccgggtaagaaactctccacgaggagtctggcaggcagaggcctggtgttcagctgtgaccccgggcaggtgggcaggagcagggcgggcagggtgctgacggctgggccacacgctgtctcattgtctctgcagtccgctgcctggcccggaagcggaggaactcacgggatggggacccgctgccctccagcctcagctgcaaggtgcacgtggcatcggtgaacaacttccccacggctgcgggcctggcctcctcagcggcgggctatgcctgcctaggtgggtgcccacagagacccgcaggggttctgggctgtgggcgcaggagccacttcatgctcttcccgggtcagggagcccactgctgggcgtggctaaaagagcatcccctcaccccaggcctccctggcctctctggagttgttcagtctcttcccagagcacatctgaacattttcatcttccagttgcagctggcgtggggctctcgcctgtaatcccagtacttaagaggctgatgggggagaagcactgtaggccaggagttcaagaccagcctgggcaacatacctacaccctggcccgtgtctacggcgtggagagtgacctctcagaagtggctcgccggggctcaggcagcgcctgccggagcctgtatgggggctttgtggagtggcagatgggagagcaggccgacgggaaggacagcatcgctcggcaagtggcccccgagtcacactggcctgaactccgcgtgctcatccttgtggtgagcgctgagaagaagctgacaggcagtaccgtgggcatgcgggccagtgtggagaccagccccctgcttcggttccgggccgagtccgtggtgcccgcgcgcatggcggagatggcccgctgcatccgggagcgagacttccccagcttcgcccagctgaccatgaaggacagcaaccagttccacgccacctgcctcgacaccttcccgcccatctcttacctcaatgccatctcctggcgcatcatccacctggtgcaccgcttcaacgcccaccacggggacaccaaggtggcgtacacctttgacgcgggccccaatgccgtgatcttcaccctggacgacactgtggctgagtttgtggctgctgtgtggcacggctttcccccaggctcgaatggagacacgtttctgaaggggctgcaggtgaggccggcccctctctcagctgagcttcaggctgcgctggccatggagccgacccccggtggggtcaaatacatcattgtcactcaggtggggccagggcctcaaatcctggatgacccctgcgcccacctcctgggtcctgacggcctgccgaagccagctgcctgactgcctcagcagggaccgcatgccgcttggagaaggggtggcctcgccggagctagggagcggatgtggtgggctggccggactcctgggacatgtgggtggtggcttgaccccgggcccatgggcagcttgctgtggggcagtgcagggagtcctgcggccgcccaggtgtcaggagaggtccccgccgagtgcttcagctgccctaagctgcaccagcgctttgccaagatgggatggggagggggtatgagaactggcagagcctcggtgcagcagggctgaagggctttctcaccccagctctggctatgcccagttctctgagaaaggagctcagtggggaggtggtccctccagcggaccagggaaggggtcactgtgctgggagcagcctccttgggcctcaggaaaccaccaagtgcctcggatggtggctgcccacggcgcttctgctgagaccctgcccccggcccaggtgtctcggagggtggctgcccacggcctgggtgtggctggaatggtggcaggagtgggcaccagtgcggccccggtggccatggggaataaaccagcattgctgcctccgga

SEQ ID NO: 67107 - DNA, 1962 bp, Homo sapiens
taggctaggtagaggccgggtgtgaatcggccgagtgtggagctggggtcactgcgcggtgggaccatggcctcggagaagccgctggcggcagtcacttgtacagcgccggtcaacatcgcggtcatcaagtactggggcaagcgcgatgaagagctggttctgcccatcaactcctccctgagcgtcactctgcaccaggaccagttaaaaaccaccacaacagccgtcatcagcaaggacttcaccgaggaccggatttggctgaatggccgggaggaggatgtggggcagccgaggctgcaggcctgcctgcgggagatccgctgcctggcccggaagcggaggaactcacgggatggggacccgctgccctccagcctcagctgcaaggtgcacgtggcatcggtgaacaacttccccacggctgcgggcctggcctcctcagcggcgggctatgcctgcctagttgcagctggcgtggggctctcgcctgtaatcccagtacttaagaggctgatgggggagaagcactgtaggccaggagttcaagaccagcctgggcaacatacctacaccctggcccgtgtctacggcgtggagagtgacctctcagaagtggctcgccggggctcaggcagcgcctgccggagcctgtatgggggctttgtggagtggcagatgggagagcaggccgacgggaaggacagcatcgctcggcaagtggcccccgagtcacactggcctgaactccgcgtgctcatccttgtggtgagcgctgagaagaagctgacaggcagtaccgtgggcatgcgggccagtgtggagaccagccccctgcttcggttccgggccgagtccgtggtgcccgcgcgcatggcggagatggcccgctgcatccgggagcgagacttccccagcttcgcccagctgaccatgaaggacagcaaccagttccacgccacctgcctcgacaccttcccgcccatctcttacctcaatgccatctcctggcgcatcatccacctggtgcaccgcttcaacgcccaccacggggacaccaaggtggcgtacacctttgacgcgggccccaatgccgtgatcttcaccctggacgacactgtggctgagtttgtggctgctgtgtggcacggctttcccccaggctcgaatggagacacgtttctgaaggggctgcaggtgaggccggcccctctctcagctgagcttcaggctgcgctggccatggagccgacccccggtggggtcaaatacatcattgtcactcaggtggggccagggcctcaaatcctggatgacccctgcgcccacctcctgggtcctgacggcctgccgaagccagctgcctgactgcctcagcagggaccgcatgccgcttggagaaggggtggcctcgccggagctagggagcggatgtggtgggctggccggactcctgggacatgtgggtggtggcttgaccccgggcccatgggcagcttgctgtggggcagtgcagggagtcctgcggccgcccaggtgtcaggagaggtccccgccgagtgcttcagctgccctaagctgcaccagcgctttgccaagatgggatggggagggggtatgagaactggcagagcctcggtgcagcagggctgaagggctttctcaccccagctctggctatgcccagttctctgagaaaggagctcagtggggaggtggtccctccagcggaccagggaaggggtcactgtgctgggagcagcctccttgggcctcaggaaaccaccaagtgcctcggatggtggctgcccacggcgcttctgctgagaccctgcccccggcccaggtgtctcggagggtggctgcccacggcctgggtgtggctggaatggtggcaggagtgggcaccagtgcggccccggtggccatggggaataaaccagcattgctgcctccgga

SEQ ID NO: 67108 - DNA, 2040 bp, Homo sapiens
taggctaggtagaggccgggtgtgaatcggccgagtgtggagctggggtcactgcgcggtgggaccatggcctcggagaagccgctggcggcagtcacttgtacagcgccggtcaacatcgcggtcatcaagtactggggcaagcgcgatgaagagctggttctgcccatcaactcctccctgagcgtcactctgcaccaggaccagttaaaaaccaccacaacagccgtcatcagcaaggacttcaccgaggaccggatttggctgaatggccgggaggaggatgtggggcagccgaggctgcaggcctgcctgcgggagagtgagctggggtccccataagcccatccctccctgttgtcagcagggtccgagcatccagaaagtgcttctgcctctgtgcccctcctgaggcagcaggcggggtggctgggaaccagacatgcccgctgggccgccagctccagggcagtggcccacctcaatgaccagctgggcttggtccgctgcctggcccggaagcggaggaactcacgggatggggacccgctgccctccagcctcagctgcaaggtgcacgtggcatcggtgaacaacttccccacggctgcgggcctggcctcctcagcggcgggctatgcctgcctagcctacaccctggcccgtgtctacggcgtggagagtgacctctcagaagtggctcgccggggctcaggcagcgcctgccggagcctgtatgggggctttgtggagtggcagatgggagagcaggccgacgggaaggacagcatcgctcggcaagtggcccccgagtcacactggcctgaactccgcgtgctcatccttgtggtgagcgctgagaagaagctgacaggcagtaccgtgggcatgcgggccagtgtggagaccagccccctgcttcggttccgggccgagtccgtggtgcccgcgcgcatggcggagatggcccgctgcatccgggagcgagacttccccagcttcgcccagctgaccatgaaggacagcaaccagttccacgccacctgcctcgacaccttcccgcccatctcttacctcaatgccatctcctggcgcatcatccacctggtgcaccgcttcaacgcccaccacggggacaccaaggtggcgtacacctttgacgcgggccccaatgccgtgatcttcaccctggacgacactgtggctgagtttgtggctgctgtgtggcacggctttcccccaggctcgaatggagacacgtttctgaaggggctgcaggtgaggccggcccctctctcagctgagcttcaggctgcgctggccatggagccgacccccggtggggtcaaatacatcattgtcactcaggtggggccagggcctcaaatcctggatgacccctgcgcccacctcctgggtcctgacggcctgccgaagccagctgcctgactgcctcagcagggaccgcatgccgcttggagaaggggtggcctcgccggagctagggagcggatgtggtgggctggccggactcctgggacatgtgggtggtggcttgaccccgggcccatgggcagcttgctgtggggcagtgcagggagtcctgcggccgcccaggtgtcaggagaggtccccgccgagtgcttcagctgccctaagctgcaccagcgctttgccaagatgggatggggagggggtatgagaactggcagagcctcggtgcagcagggctgaagggctttctcaccccagctctggctatgcccagttctctgagaaaggagctcagtggggaggtggtccctccagcggaccagggaaggggtcactgtgctgggagcagcctccttgggcctcaggaaaccaccaagtgcctcggatggtggctgcccacggcgcttctgctgagaccctgcccccggcccaggtgtctcggagggtggctgcccacggcctgggtgtggctggaatggtggcaggagtgggcaccagtgcggccccggtggccatggggaataaaccagcattgctgcctccgga

SEQ ID NO: 67109 - DNA, 1444 bp, Homo sapiens
gcctaggtgaggctggtgttaatcggcgagggtcaagacagcctgggcacatacctacaccctggcccgtgtctacggcgtggagagtgacctctcagaagtggctcgccggggctcaggcagcgcctgccggagcctgtatgggggctttgtggagtggcagatgggagagcaggccgacgggaaggacagcatcgctcggcaagtggcccccgagtcacactggcctgaactccgcgtgctcatccttgtggtgagcgctgagaagaagctgacaggcagtaccgtgggcatgcgggccagtgtggagaccagccccctgcttcggttccgggccgagtccgtggtgcccgcgcgcatggcggagatggcccgctgcatccgggagcgagacttccccagcttcgcccagctgaccatgaaggacagcaaccagttccacgccacctgcctcgacaccttcccgcccatctcttacctcaatgccatctcctggcgcatcatccacctggtgcaccgcttcaacgcccaccacggggacaccaaggtggcgtacacctttgacgcgggccccaatgccgtgatcttcaccctggacgacactgtggctgagtttgtggctgctgtgtggcacggctttcccccaggctcgaatggagacacgtttctgaaggggctgcaggtgaggccggcccctctctcagctgagcttcaggctgcgctggccatggagccgacccccggtggggtcaaatacatcattgtcactcaggtggggccagggcctcaaatcctggatgacccctgcgcccacctcctgggtcctgacggcctgccgaagccagctgcctgactgcctcagcagggaccgcatgccgcttggagaaggggtggcctcgccggagctagggagcggatgtggtgggctggccggactcctgggacatgtgggtggtggcttgaccccgggcccatgggcagcttgctgtggggcagtgcagggagtcctgcggccgcccaggtgtcaggagaggtccccgccgagtgcttcagctgccctaagctgcaccagcgctttgccaagatgggatggggagggggtatgagaactggcagagcctcggtgcagcagggctgaagggctttctcaccccagctctggctatgcccagttctctgagaaaggagctcagtggggaggtggtccctccagcggaccagggaaggggtcactgtgctgggagcagcctccttgggcctcaggaaaccaccaagtgcctcggatggtggctgcccacggcgcttctgctgagaccctgcccccggcccaggtgtctcggagggtggctgcccacggcctgggtgtggctggaatggtggcaggagtgggcaccagtgcggccccggtggccatggggaataaaccagcattgctgcctccgga

SEQ ID NO: 67110 - DNA, 1223 bp, Homo sapiens
taggctaggtagaggccgggtgtgaatcggccgagtgtggagctggggtcactgcgcggtgggaccatggcctcggagaagccgctggcggcagtcacttgtacagcgccggtcaacatcgcggtcatcaagtactggggcaagcgcgatgaagagctggttctgcccatcaactcctccctgagcgtcactctgcaccaggaccagttaaaaaccaccacaacagccgtcatcagcaaggacttcaccgaggaccggatttggctgaatggccgggaggaggatgtggggcagccgaggctgcaggcctgcctgcgggagatccgctgcctggcccggaagcggaggaactcacgggatggggacccgctgccctccagcctcagctgcaaggtgcacgtggcatcggtgaacaacttccccacggctgcgggcctggcctcctcagcggcgggctatgcctgcctagcctacaccctggcccgtgtctacggcgtggagagtgacctctcagaagtggctcgccggggctcaggcagcgcctgccggagcctgtatgggggctttgtggagtggcagatgggagagcaggccgacgggaaggacagcatcgctcggcaagtggcccccgagtcacactggcctgaactccgcgtgctcatccttgtggtgagcgctgagaagaagctgacaggcagtaccgtgggcatgcgggccagtgtggagaccagccccctgcttcggttccgggccgagtccgtggtgcccgcgcgcatggcggagatggcccgctgcatccgggagcgagacttccccagcttcgcccagctgaccatgaaggacagcaaccagttccacgccacctgcctcgacaccttcccgcccatctcttacctcaatgccatctcctggcgcatcatccacctggtgcaccgcttcaacgcccaccacggggacaccaaggtggcgtacacctttgacgcgggccccaatgccgtgatcttcaccctggacgacactgtggctgagtttgtggctgctgtgtggcacggctttcccccaggctcgaatggagacacgtttctgaaggggctgcagaacatggaggtcaccgatgcttgaacattcctgcctccctatttgccaggctttcatttctgtctgctgagatctcagagcctgcccaacagcagggtaaggctcccgaaggatcctcaatcacc

SEQ ID NO: 67111 - DNA, 1382 bp, Homo sapiens
cccgatagcccgacagtaggagggtcggtgtgagttatccttgaagcttaagactcgggcccgagatggagtcagatgtcaggtgcggatcttggctcgagtattagcaaatattctaacgagaacttagaatgtggaatgggataacgggttccaagtgaacagtcatggaacttggttctgtcggtctagtcggggccccgactagcctgacaggcagtaccgtgggcatgcgggccagtgtggagaccagccccctgcttcggttccgggccgagtccgtggtgcccgcgcgcatggcggagatggcccgctgcatccgggagcgagacttccccagcttcgcccagctgaccatgaaggacagcaaccagttccacgccacctgcctcgacaccttcccgcccatctcttacctcaatgccatctcctggcgcatcatccacctggtgcaccgcttcaacgcccaccacggggacaccaaggtggcgtacacctttgacgcgggccccaatgccgtgatcttcaccctggacgacactgtggctgagtttgtggctgctgtgtggcacggctttcccccaggctcgaatggagacacgtttctgaaggggctgcaggtgaggccggcccctctctcagctgagcttcaggctgcgctggccatggagccgacccccggtggggtcaaatacatcattgtcactcaggtggggccagggcctcaaatcctggatgacccctgcgcccacctcctgggtcctgacggcctgccgaagccagctgcctgactgcctcagcagggaccgcatgccgcttggagaaggggtggcctcgccggagctagggagcggatgtggtgggctggccggactcctgggacatgtgggtggtggcttgaccccgggcccatgggcagcttgctgtggggcagtgcagggagtcctgcggccgcccaggtgtcaggagaggtccccgccgagtgcttcagctgccctaagctgcaccagcgctttgccaagatgggatggggagggggtatgagaactggcagagcctcggtgcagcagggctgaagggctttctcaccccagctctggctatgcccagttctctgagaaaggagctcagtggggaggtggtccctccagcggaccagggaaggggtcactgtgctgggagcagcctccttgggcctcaggaaaccaccaagtgcctcggatggtggctgcccacggcgcttctgctgagaccctgcccccggcccaggtgtctcggagggtggctgcccacggcctgggtgtggctggaatggtggcaggagtgggcaccagtgcggccccggtggccatggggaataaaccagcattgctgcctccgga

SEQ ID NO: 67112 - DNA, 941 bp, Homo sapiens
taggctaggtagaggccgggtgtgaatcggccgagtgtggagctggggtcactgcgcggtgggaccatggcctcggagaagccgctggcggcagtcacttgtacagcgccggtcaacatcgcggtcatcaagtactggggcaagcgcgatgaagagctggttctgcccatcaactcctccctgagcgtcactctgcaccaggaccagttaaaaaccaccacaacagccgtcatcagcaaggacttcaccgaggaccggatttggctgaatggccgggaggaggatgtggggcagccgaggctgcaggcctgcctgcgggagatccgctgcctggcccggaagcggaggaactcacgggatggggacccgctgccctccagcctcagctgcaaggtgcacgtggcatcggtgaacaacttccccacggctgcgggcctggcctcctcagcggcgggctatgcctgcctagcctacaccctggcccgtgtctacggcgtggagagtgacctctcagaagtggctcgccggggctcaggcagcgcctgccggagcctgtatgggggctttgtggagtggcagatgggagagcaggccgacgggaaggacagcatcgctcggcaagtggcccccgagtcacactggcctgaactccgcgtgctcatccttgtggtgagtggggtggggcgggtggagcagcagcccggtggcctctgtccctagtcagggctgctgccgggagcaggagcgaaggcgtccatccaggctttgcttggctcctggggtcagcgggggctgaaggaacagaagcgtggttgagtgctcaggaaccgctcccatgcggcgggcgccaccacccgctgggatctggaagttgcccctgcgtcacccctgctgtggccgggaggcctctgtggtcaggcaggtggcactgactcccaccc

SEQ ID NO: 67113 - DNA, 957 bp, Homo sapiens
actttttcatcacccctaaaagaaacctgtccccacagcagccacctgccgtctccccctccctgagccctgacggccaggaatgcacttcccatctctggacttgcctgttgtagactgttgtagacgcttagagaaacggatgcattcaccgtgcccctgccctgcttttccaggtttctgaaggggctgcaggtgaggccggcccctctctcagctgagcttcaggctgcgctggccatggagccgacccccggtggggtcaaatacatcattgtcactcaggtggggccagggcctcaaatcctggatgacccctgcgcccacctcctgggtcctgacggcctgccgaagccagctgcctgactgcctcagcagggaccgcatgccgcttggagaaggggtggcctcgccggagctagggagcggatgtggtgggctggccggactcctgggacatgtgggtggtggcttgaccccgggcccatgggcagcttgctgtggggcagtgcagggagtcctgcggccgcccaggtgtcaggagaggtccccgccgagtgcttcagctgccctaagctgcaccagcgctttgccaagatgggatggggagggggtatgagaactggcagagcctcggtgcagcagggctgaagggctttctcaccccagctctggctatgcccagttctctgagaaaggagctcagtggggaggtggtccctccagcggaccagggaaggggtcactgtgctgggagcagcctccttgggcctcaggaaaccaccaagtgcctcggatggtggctgcccacggcgcttctgctgagaccctgcccccggcccaggtgtctcggagggtggctgcccacggcctgggtgtggctggaatggtggcaggagtgggcaccagtgcggccccggtggccatggggaataaaccagcattgctgcctccgga

SEQ ID NO: 67114 - DNA, 656 bp, Homo sapiens
taggctaggtagaggccgggtgtgaatcggccgagtgtggagctggggtcactgcgcggtgggaccatggcctcggagaagccgctggcggcagtcacttgtacagcgccggtcaacatcgcggtcatcaagtactaagccgccaccacgactggctaatttttttgtgtttcccttaccaataaagctgccataatgcccaggagtgcggttgctgggtcagatggtagatatatatatatgcctctctgtctctctctctctttctatgtatatatgtatgtttgtgtgtgtgtatatatatatatacacctatatagatatatgtgtgtgtatatgtatacacctatatagatgtatgtgtgtgtatatatacatatatatattatatatatactttttttttttttaaagaaactgtctaattgtttttcagagtggctgggccattttgcatccctacggtgatgcagattttccgcatcctcaccagcatttggtggagttgctgtttttcattttagccgcgtcctggtagggatgtgctggcagggtgctgtggtcctcattcgcgtttccctgttggccagtgacgtggagcatctttctttgtgcttatttgccatctgtgggttttcttggtgaaatctctctta

SEQ ID NO: 67115 - DNA, 476 bp, Homo sapiens
catggaccaccctctctctagccaaggcctcaccccgcaaagagcatctaacgttttctttctttctttcttttctttccagaagccgccaccacgactggctaatttttttgtgtttcccttaccaataaagctgccataaaatgttgtatacaggtttttgtgtgaacatacatttccattcttctgggataaatgcccaagagtgcggttgctgggtcacatggtagatatatatatatgcctctctgtctctctctctctttctatgtatatatgtatgtttgtgtgtgtgtatatatatatatacacctatatagatatatgtgtgtgtatatgtatacacctatatagatgtatgtgtgtgtatatatacatatatatattatatatatactttttttttttttaaagaaactgtctaattgtttttcagagtggctgggccattttgcatccctacggtgatgcagatt

SEQ ID NO: 67116 - DNA, 938 bp, Homo sapiens
taggctaggtagaggccgggtgtgaatcggccgagtgtggagctggggtcactgcgcggtgggaccatggcctcggagaagccgctggcggcagtcacttgtacagcgccggtcaacatcgcggtcatcaagtactggggcaagcgcgatgaagagctggttctgcccatcaactcctccctgagcgtcactctgcaccaggaccagttaaaaaccaccacaacagccgtcatcagcaaggacttcaccgaggaccggatttggctgaatggccgggaggaggatgtggggcagccgaggctgcaggcctgcctgcgggagatccgctgcctggcccggaagcggaggaactcacgggatggggacccgctgccctccagcctcagctgcaaggtgcacgtggcatcggtgaacaacttccccacggctgcgggcctggcctcctcagcggcgggctatgcctgcctagcctacaccctggcccgtgtctacggcgtggagagtgacctctcagaagtggctcgccggggctcaggcagcgcctgccggagcctgtatgggggctttgtggagtggcagatgggagagcaggccgacgggaaggacagcatcgctcggcaagtggcccccgagtcacactggcctgaactccgcgtgctcatccttgtggtgagcgctgagaagaagctgacaggcagtaccgtgggcatgcgggccagtgtggagaccagccccctgcttcggttccgggccgagtccgtggtgcccgcgcgcatggcggagatggcccgctgcatccgggagcgagacttccccagcttcgcccagctgacctgaggccaggaccggtcatgcactgcttcgaacttccggcatttttattcatgctctccgggctcttcccgggccggtccccccacggcccacgggggtctttg

SEQ ID NO: 67117 - DNA, 1979 bp, Homo sapiens
cagaggcctctggggtgggatcgcgggccgtaagtggctgtggagctggggtcactgcgcggtgggaccatggcctcggagaagccgctggcggcagtcacttgtacagcgccggtcaacatcgcggtcatcaagtactactgtcactgcgacacccaggctggagtgcaatggcgtgatctcggctcactgcaacctccgcttcccgggttcaaccgattctcctgcctcagcctctcgagtagctgggactacggggcaagcgcgatgaagagctggttctgcccatcaactcctccctgagcgtcactctgcaccaggaccagttaaaaaccaccacaacagccgtcatcagcaaggacttcaccgaggaccggatttggctgaatggccgggaggaggatgtggggcagccgaggctgcaggcctgcctgcgggagatccgctgcctggcccggaagcggaggaactcacgggatggggacccgctgccctccagcctcagctgcaaggtgcacgtggcatcggtgaacaacttccccacggctgcgggcctggcctcctcagcggcgggctatgcctgcctagcctacaccctggcccgtgtctacggcgtggagagtgacctctcagaagtggctcgccggggctcaggcagcgcctgccggagcctgtatgggggctttgtggagtggcagatgggagagcaggccgacgggaaggacagcatcgctcggcaagtggcccccgagtcacactggcctgaactccgcgtgctcatccttgtggtgagcgctgagaagaagctgacaggcagtaccgtgggcatgcgggccagtgtggagaccagccccctgcttcggttccgggccgagtccgtggtgcccgcgcgcatggcggagatggcccgctgcatccgggagcgagacttccccagcttcgcccagctgaccatgaaggacagcaaccagttccacgccacctgcctcgacaccttcccgcccatctcttacctcaatgccatctcctggcgcatcatccacctggtgcaccgcttcaacgcccaccacggggacaccaaggtggcgtacacctttgacgcgggccccaatgccgtgatcttcaccctggacgacactgtggctgagtttgtggctgctgtgtggcacggctttcccccaggctcgaatggagacacgtttctgaaggggctgcaggtgaggccggcccctctctcagctgagcttcaggctgcgctggccatggagccgacccccggtggggtcaaatacatcattgtcactcaggtggggccagggcctcaaatcctggatgacccctgcgcccacctcctgggtcctgacggcctgccgaagccagctgcctgactgcctcagcagggaccgcatgccgcttggagaaggggtggcctcgccggagctagggagcggatgtggtgggctggccggactcctgggacatgtgggtggtggcttgaccccgggcccatgggcagcttgctgtggggcagtgcagggagtcctgcggccgcccaggtgtcaggagaggtccccgccgagtgcttcagctgccctaagctgcaccagcgctttgccaagatgggatggggagggggtatgagaactggcagagcctcggtgcagcagggctgaagggctttctcaccccagctctggctatgcccagttctctgagaaaggagctcagtggggaggtggtccctccagcggaccagggaaggggtcactgtgctgggagcagcctccttgggcctcaggaaaccaccaagtgcctcggatggtggctgcccacggcgcttctgctgagaccctgcccccggcccaggtgtctcggagggtggctgcccacggcctgggtgtggctggaatggtggcaggagtgggcaccagtgcggccccggtggccatggggaataaaccagcattgctgcctccgga

SEQ ID NO: 67118 - DNA, 2192 bp, Homo sapiens
taggctaggtagaggccgggtgtgaatcggccgagtgtggagctggggtcactgcgcggtgggaccatggcctcggagaagccgctggcggcagtcacttgtacagcgccggtcaacatcgcggtcatcaagtactggggcaagcgcgatgaagagctggttctgcccatcaactcctccctgagcgtcactctgcaccaggaccagttaaaaaccaccacaacagccgtcatcagcaaggacttcaccgaggaccggatttggctgaatggccgggaggaggatgtggggcagccgaggctgcaggcctgcctgcgggagagtgagctggggtccccataagcccatccctccctgttgtcagcagggtccgagcatccagaaagtgcttctgcctctgtgcccctcctgaggcagcaggcggggtggctgggaaccagacatgcccgctgggccgccagctccagggcagtggcccacctcaatgaccagctgggcttgggtcagtctggggttttcccgggtaagaaactctccacgaggagtctggcaggcagaggcctggtgttcagctgtgaccccgggcaggtgggcaggagcagggcgggcagggtgctgacggctgggccacacgctgtctcattgtctctgcagtccgctgcctggcccggaagcggaggaactcacgggatggggacccgctgccctccagcctcagctgcaaggtgcacgtggcatcggtgaacaacttccccacggctgcgggcctggcctcctcagcggcgggctatgcctgcctagcctacaccctggcccgtgtctacggcgtggagagtgacctctcagaagtggctcgccggggctcaggcagcgcctgccggagcctgtatgggggctttgtggagtggcagatgggagagcaggccgacgggaaggacagcatcgctcggcaagtggcccccgagtcacactggcctgaactccgcgtgctcatccttgtggtgagcgctgagaagaagctgacaggcagtaccgtgggcatgcgggccagtgtggagaccagccccctgcttcggttccgggccgagtccgtggtgcccgcgcgcatggcggagatggcccgctgcatccgggagcgagacttccccagcttcgcccagctgaccatgaaggacagcaaccagttccacgccacctgcctcgacaccttcccgcccatctcttacctcaatgccatctcctggcgcatcatccacctggtgcaccgcttcaacgcccaccacggggacaccaaggtggcgtacacctttgacgcgggccccaatgccgtgatcttcaccctggacgacactgtggctgagtttgtggctgctgtgtggcacggctttcccccaggctcgaatggagacacgtttctgaaggggctgcaggtgaggccggcccctctctcagctgagcttcaggctgcgctggccatggagccgacccccggtggggtcaaatacatcattgtcactcaggtggggccagggcctcaaatcctggatgacccctgcgcccacctcctgggtcctgacggcctgccgaagccagctgcctgactgcctcagcagggaccgcatgccgcttggagaaggggtggcctcgccggagctagggagcggatgtggtgggctggccggactcctgggacatgtgggtggtggcttgaccccgggcccatgggcagcttgctgtggggcagtgcagggagtcctgcggccgcccaggtgtcaggagaggtccccgccgagtgcttcagctgccctaagctgcaccagcgctttgccaagatgggatggggagggggtatgagaactggcagagcctcggtgcagcagggctgaagggctttctcaccccagctctggctatgcccagttctctgagaaaggagctcagtggggaggtggtccctccagcggaccagggaaggggtcactgtgctgggagcagcctccttgggcctcaggaaaccaccaagtgcctcggatggtggctgcccacggcgcttctgctgagaccctgcccccggcccaggtgtctcggagggtggctgcccacggcctgggtgtggctggaatggtggcaggagtgggcaccagtgcggccccggtggccatggggaataaaccagcattgctgcctccgga

SEQ ID NO: 67119 - DNA, 2289 bp, Homo sapiens
ttggctaatttttgtatttttaatagagatggggtttcaccgtgttggccaggctggtctgaagctcctgacctcgtgatctgcccacctcagcctcccaaagtgctgggattacagactgtcactgcgacacccaggctggagtgcaatggcgtgatctcggctcactgcaacctccgcttcccgggttcaaccgattctcctgcctcagcctctcgagtagctgggactacggggcaagcgcgatgaagagctggttctgcccatcaactcctccctgagcgtcactctgcaccaggaccagttaaaaaccaccacaacagccgtcatcagcaaggacttcaccgaggaccggatttggctgaatggccgggaggaggatgtggggcagccgaggctgcaggcctgcctgcgggagagtgagctggggtccccataagcccatccctccctgttgtcagcagggtccgagcatccagaaagtgcttctgcctctgtgcccctcctgaggcagcaggcggggtggctgggaaccagacatgcccgctgggccgccagctccagggcagtggcccacctcaatgaccagctgggcttgggtcagtctggggttttcccgggtaagaaactctccacgaggagtctggcaggcagaggcctggtgttcagctgtgaccccgggcaggtgggcaggagcagggcgggcagggtgctgacggctgggccacacgctgtctcattgtctctgcagtccgctgcctggcccggaagcggaggaactcacgggatggggacccgctgccctccagcctcagctgcaaggtgcacgtggcatcggtgaacaacttccccacggctgcgggcctggcctcctcagcggcgggctatgcctgcctagcctacaccctggcccgtgtctacggcgtggagagtgacctctcagaagtggctcgccggggctcaggcagcgcctgccggagcctgtatgggggctttgtggagtggcagatgggagagcaggccgacgggaaggacagcatcgctcggcaagtggcccccgagtcacactggcctgaactccgcgtgctcatccttgtggtgagcgctgagaagaagctgacaggcagtaccgtgggcatgcgggccagtgtggagaccagccccctgcttcggttccgggccgagtccgtggtgcccgcgcgcatggcggagatggcccgctgcatccgggagcgagacttccccagcttcgcccagctgaccatgaaggacagcaaccagttccacgccacctgcctcgacaccttcccgcccatctcttacctcaatgccatctcctggcgcatcatccacctggtgcaccgcttcaacgcccaccacggggacaccaaggtggcgtacacctttgacgcgggccccaatgccgtgatcttcaccctggacgacactgtggctgagtttgtggctgctgtgtggcacggctttcccccaggctcgaatggagacacgtttctgaaggggctgcaggtgaggccggcccctctctcagctgagcttcaggctgcgctggccatggagccgacccccggtggggtcaaatacatcattgtcactcaggtggggccagggcctcaaatcctggatgacccctgcgcccacctcctgggtcctgacggcctgccgaagccagctgcctgactgcctcagcagggaccgcatgccgcttggagaaggggtggcctcgccggagctagggagcggatgtggtgggctggccggactcctgggacatgtgggtggtggcttgaccccgggcccatgggcagcttgctgtggggcagtgcagggagtcctgcggccgcccaggtgtcaggagaggtccccgccgagtgcttcagctgccctaagctgcaccagcgctttgccaagatgggatggggagggggtatgagaactggcagagcctcggtgcagcagggctgaagggctttctcaccccagctctggctatgcccagttctctgagaaaggagctcagtggggaggtggtccctccagcggaccagggaaggggtcactgtgctgggagcagcctccttgggcctcaggaaaccaccaagtgcctcggatggtggctgcccacggcgcttctgctgagaccctgcccccggcccaggtgtctcggagggtggctgcccacggcctgggtgtggctggaatggtggcaggagtgggcaccagtgcggccccggtggccatggggaataaaccagcattgctgcctccgga

SEQ ID NO: 67120 - DNA, 2117 bp, Homo sapiens
taggctaggtagaggccgggtgtgaatcggccgagtgtggagctggggtcactgcgcggtgggaccatggcctcggagaagccgctggcggcagtcacttgtacagcgccggtcaacatcgcggtcatcaagtactggggcaagcgcgatgaagagctggttctgcccatcaactcctccctgagcgtcactctgcaccaggaccagttaaaaaccaccacaacagccgtcatcagcaaggacttcaccgaggaccggatttggctgaatggccgggaggaggatgtggggcagccgaggctgcaggcctgcctgcgggagatccgctgcctggcccggaagcggaggaactcacgggatggggacccgctgccctccagcctcagctgcaaggtgcacgtggcatcggtgaacaacttccccacggctgcgggcctggcctcctcagcggcgggctatgcctgcctaggtaccttttgttgcccttgtcgcgggccgcaagctctgcaggccgtgaacagagagtgtccgagagtggaactagcggaggtgggggacagacggctgggccggtgaatgctggcctcaaaggctgatggcccagaagccctgtcatctggaaatccccatttgccgtggggtgtgggacgttcctggggcggtgagctgtcagggagcacagcgcaggcagctctgaggaccctccctgaatccgcatgcctgcagcctacaccctggcccgtgtctacggcgtggagagtgacctctcagaagtggctcgccggggctcaggcagcgcctgccggagcctgtatgggggctttgtggagtggcagatgggagagcaggccgacgggaaggacagcatcgctcggcaagtggcccccgagtcacactggcctgaactccgcgtgctcatccttgtggtgagcgctgagaagaagctgacaggcagtaccgtgggcatgcgggccagtgtggagaccagccccctgcttcggttccgggccgagtccgtggtgcccgcgcgcatggcggagatggcccgctgcatccgggagcgagacttccccagcttcgcccagctgaccatgaaggacagcaaccagttccacgccacctgcctcgacaccttcccgcccatctcttacctcaatgccatctcctggcgcatcatccacctggtgcaccgcttcaacgcccaccacggggacaccaaggtggcgtacacctttgacgcgggccccaatgccgtgatcttcaccctggacgacactgtggctgagtttgtggctgctgtgtggcacggctttcccccaggctcgaatggagacacgtttctgaaggggctgcaggtgaggccggcccctctctcagctgagcttcaggctgcgctggccatggagccgacccccggtggggtcaaatacatcattgtcactcaggtggggccagggcctcaaatcctggatgacccctgcgcccacctcctgggtcctgacggcctgccgaagccagctgcctgactgcctcagcagggaccgcatgccgcttggagaaggggtggcctcgccggagctagggagcggatgtggtgggctggccggactcctgggacatgtgggtggtggcttgaccccgggcccatgggcagcttgctgtggggcagtgcagggagtcctgcggccgcccaggtgtcaggagaggtccccgccgagtgcttcagctgccctaagctgcaccagcgctttgccaagatgggatggggagggggtatgagaactggcagagcctcggtgcagcagggctgaagggctttctcaccccagctctggctatgcccagttctctgagaaaggagctcagtggggaggtggtccctccagcggaccagggaaggggtcactgtgctgggagcagcctccttgggcctcaggaaaccaccaagtgcctcggatggtggctgcccacggcgcttctgctgagaccctgcccccggcccaggtgtctcggagggtggctgcccacggcctgggtgtggctggaatggtggcaggagtgggcaccagtgcggccccggtggccatggggaataaaccagcattgctgcctccgga

SEQ ID NO: 67121 - DNA, 1416 bp, Homo sapiens
  misc_feature (1226)..(1226): n is a, c, g, or t
  misc_feature (1228)..(1228): n is a, c, g, or t
taggctaggtagaggccgggtgtgaatcggccgagtgtggagctggggtcactgcgcggtgggaccatggcctcggagaagccgctggcggcagtcacttgtacagcgccggtcaacatcgcggtcatcaagtactggggcaagcgcgatgaagagctggttctgcccatcaactcctccctgagcgtcactctgcaccaggaccagttaaaaaccaccacaacagccgtcatcagcaaggacttcaccgaggaccggatttggctgaatggccgggaggaggatgtggggcagccgaggctgcaggcctgcctgcgggagatccgctgcctggcccggaagcggaggaactcacgggatggggacccgctgccctccagcctcagctgcaaggtgcacgtggcatcggtgaacaacttccccacggctgcgggcctggcctcctcagcggcgggctatgcctgcctagcctacaccctggcccgtgtctacggcgtggagagtgacctctcagaagtggctcgccggggctcaggcagcgcctgccggagcctgtatgggggctttgtggagtggcagatgggagagcaggccgacgggaaggacagcatcgctcggcaagtggcccccgagtcacactggcctgaactccgcgtgctcatccttgtggtgagcgctgagaagaagctgacaggcagtaccgtgggcatgcgggccagtgtggagaccagccccctgcttcggttccgggccgagtccgtggtgcccgcgcgcatggcggagatggcccgctgcatccgggagcgagacttccccagcttcgcccagctgaccatgaaggacagcaaccagttccacgccacctgcctcgacaccttcccgcccatctcttacctcaatgccatctcctggcgcatcatccacctggtgcaccgcttcaacgcccaccacggggacaccaaggtggcgtacacctttgacgcgggccccaatgccgtgatcttcaccctggacgacactgtggctgagtttgtggctgctgtgtggcacggctttcccccaggctcgaatggagacacgtttctgaaggggctgcaggtgaggccggcccctctctcagctgagcttcaggctgcgctggccatggagccgacccccggtggggtcaaatacatcattgtcactcaggtggggccagggcctcagggctaatctggtgacctggncnctctggcctgagctcgaagcagtgctgatgctcaaggacgatgcgtgggaagggggccccgggtgggggtgtgggtgcggccggactttggtggtccggctggttttgggggggagtgtgcgaaaccggagcgcgcttagcgcgttaagggggacgaggttgcgttcggtttttgtttgttacggttg

SEQ ID NO: 67122 - DNA, 1053 bp, Homo sapiens
taggctaggtagaggccgggtgtgaatcggccgagtgtggagctggggtcactgcgcggtgggaccatggcctcggagaagccgctggcggcagtcacttgtacagcgccggtcaacatcgcggtcatcaagtactggggcaagcgcgatgaagagctggttctgcccatcaactcctccctgagcgtcactctgcaccaggaccagttaaaaaccaccacaacagccgtcatcagcaaggacttcaccgaggaccggatttggctgaatggccgggaggaggatgtggggcagccgaggctgcaggcctgcctgcgggagatccgctgcctggcccggaagcggaggaactcacgggatggggacccgctgccctccagcctcagctgcaaggtgcacgtggcatcggtgaacaacttccccacggctgcgggcctggcctcctcagcggcgggctatgcctgcctagcctacaccctggcccgtgtctacggcgtggagagtgacctctcagaagtggctcgccggggctcaggcagcgcctgccggagcctgtatgggggctttgtggagtggcagatgggagagcaggccgacgggaaggacagcatcgctcggcaagtggcccccgagtcacactggcctgaactccgcgtgctcatccttgtggtgagcgctgagaagaagctgacaggcagtaccgtgggcatgcgggccagtgtggagaccagccccctgcttcggttccgggccgagtccgtggtgcccgcgcgcatggcggagatggcccgctgcatccgggagcgagacttccccagcttcgcccagctgaccatgaaggacagcaaccagttccacgccacctgcctcaggaaaccaccaagtgcctcggatggtggctgcccacggcgcttctgctgagaccctgcccccggcccaggtgtctcggagggtggctgcccacggcctgggtgtggctggaatggtggcaggagtgggcaccagtgcggccccggtggccatggggaataaaccagcattgctgcctccgga

SEQ ID NO: 67123 - DNA, 1075 bp, Homo sapiens
ggttcacaggcagacgtgtcaagtaccaggcacttggggtcacagctccactccagtgtggccctgagggcctagactgagctcttggagagcccaaggccgcctggcagaccagagggttggggagacaagggtcaggcaccacgtgaatagccagggtgactgctgtgggttccaggtggcgtacacctttgacgcgggccccaatgccgtgatcttcaccctggacgacactgtggctgagtttgtggctgctgtgtggcacggctttcccccaggctcgaatggagacacgtttctgaaggggctgcaggtgaggccggcccctctctcagctgagcttcaggctgcgctggccatggagccgacccccggtggggtcaaatacatcattgtcactcaggtggggccagggcctcaaatcctggatgacccctgcgcccacctcctgggtcctgacggcctgccgaagccagctgcctgactgcctcagcagggaccgcatgccgcttggagaaggggtggcctcgccggagctagggagcggatgtggtgggctggccggactcctgggacatgtgggtggtggcttgaccccgggcccatgggcagcttgctgtggggcagtgcagggagtcctgcggccgcccaggtgtcaggagaggtccccgccgagtgcttcagctgccctaagctgcaccagcgctttgccaagatgggatggggagggggtatgagaactggcagagcctcggtgcagcagggctgaagggctttctcaccccagctctggctatgcccagttctctgagaaaggagctcagtggggaggtggtccctccagcggaccagggaaggggtcactgtgctgggagcagcctccttgggcctcaggaaaccaccaagtgcctcggatggtggctgcccacggcgcttctgctgagaccctgcccccggcccaggtgtctcggagggtggctgcccacggcctgggtgtggctggaatggtggcaggagtgggcaccagtgcggccccggtggccatggggaataaaccagcattgctgcctccgga

SEQ ID NO: 67124 - DNA, 852 bp, Homo sapiens
taggctaggtagaggccgggtgtgaatcggccgagtgtggagctggggtcactgcgcggtgggaccatggcctcggagaagccgctggcggcagtcacttgtacagcgccggtcaacatcgcggtcatcaagtactggcctcgacagacggggaaactgaggctcagggaggggcgcggcggtggtcgggcggggccgcgcgctccttcgcgtgacaagctcggcgccacccgttcccccgcgacggctgccgcccctgcagggtcgcccggcgcctgcccattagcgattaccgaactatcgaaatcatcaatcatcgattcccatgaatcaagccgccaccacgactggctaatttttttgtgtttcccttaccaataaagctgccataatgcccaggagtgcggttgctgggtcagatggtagatatatatatatgcctctctgtctctctctctctttctatgtatatatgtatgtttgtgtgtgtgtatatatatatatacacctatatagatatatgtgtgtgtatatgtatacacctatatagatgtatgtgtgtgtatatatacatatatatattatatatatactttttttttttttaaagaaactgtctaattgtttttcagagtggctgggccattttgcatccctacggtgatgcagattttccgcatcctcaccagcatttggtggagttgctgtttttcattttagccgcgtcctggtagggatgtgctggcagggtgctgtggtcctcattcgcgtttccctgttggccagtgacgtggagcatctttctttgtgcttatttgccatctgtgggttttcttggtgaaatctctctta

SEQ ID NO: 67125 - DNA, 472 bp, Homo sapiens
agctgttggggacctccctgggggtggccttgcttacccagctgtgcggaacaggcttggttgggagtgcctggcctcaccctttgtggggaaaccagattctctgggcagcagtggtaaatggtgtctgagtctgtgtttcgttggatgtgtctgaggtccgctgctgccagctgggttatgctgtctccaaagctatctgcagtgggggaggccctgagcctgggcaggggagggtacagaggcctcaacccatgggacctgggggtgatctgaactctgcacttcactttttttcaggatttcccccgccccaccctaaaggaggaggaaatagagtctgtcccaccctaagccccagtccctctccccaggtctctttggcatctcccagctgggctggggctgaaggcccttctctggggttggccacagtgaggccaggatctggctgggcaggtggcagtgttca

SEQ ID NO: 67126 - DNA, 732 bp, Homo sapiens
agcatattagtctatcaaatccaactacccttaatgccagtgaatgttaaaagtaaaactttcttagcactgacaatttaataagtaaaaataaatggtactaagcttacaaaaattagctgaattggggaaattgttgataaggccacaagtattaacatgttatacttgcttgctttgagggtatatagcatcttttggcaaagtgttacattattgtgaatttaacagtgaaagtttaagccagtctaggatttcaaagtttataactttactaccaggaaattaatttacttaaatatgttctttgtttccatcaatgtcaacatctgaaattccactggagaagtattagctttggcctactaaaagcaaaatgacaagaagcaagaatgcaagccagcatcaaaaattggtctcctgttttgagattaccccgagtctttctgggggtatcatttatataagtctaattttcgggattcaggcaagagctggccattgttgtgctagctgggcctccagtggaatgtaaaatgataatgaagattgaactgaggtagaaaaatgaatttaccttagaaaggacaccaaagatttgattagtattccacatagttgccatacgtatttaattgcagactaggaatttttcttgctttaaactattagattcttttacagacaaagatataagcaagccaagcattaaaaagccaaaaaggtgctgct

SEQ ID NO: 67127 - DNA, 363 bp, Homo sapiens
caggcatggtggcaggtgcctgtagtcccagctactcgagaggctgaggcaggagaatggcatgaacccgggaggcagagtttgcagtgagctgagatcgcaccactgcactccagctggggcaacagagtgagactccacctcaaaaaaaaaaagaaaagaaaagaatcagtgaacttgaagacagacaatagggattcctgtgtttgtttcttattgttctcacaacaaattacctcaaatttagaagcttaaagtattacacattttttatcttacagttctgtaggtcagaagtgctaaaatcaaggtgttggaagggctgtattcttttctggagacaccaggaaagaatccttttca

SEQ ID NO: 67128 - DNA, 1033 bp, Homo sapiens
tccattggtcttcaccagtagttctgcagtggggatctgcacttctgggcttcagcacacatcagtgtggttcacgtgtttcctgctgttatgaaagagattggagaggactaagcttggaattgcctgtcccacagcaagaggctatggagctgggccacggagcagggcccatctgaatgacaaggagggccaacaggacttggacccctggaaagcggcctacagttccttggacacctccaagttcaagaaccagggtctgtcatccccacagcccctgcccctgggatccagcactcaaggcagctccctagggcagtgccacttgaaggagattccccctccacccccgactgctgccagcagggattctctgggcatggacccacagtccaggtccctgaagaatgcgggctctcgatcctcctcgagagagaacagggccacctcgggagagggggctcagccatgccaggggacggatgacggtcccagacttgggggctcaggaccagaggagcacgcccacgaaccagaagggcagcatcattcctaacaacattcgccacaagtttgggagcaatgtggtggaccagctggtctccgaggagcaggctcaaaaggctattgatgaagtcttcgagggccagaaaagggcaagctcatggcccagcaggacccagaatcctgtggaaatctcctccgtcttctcagactactatgacctcggctacaacatgcggtcaaacttgtttcgaggggctgctgaggagacaaagagcctcatgaaggcttcttacacaccagaggtcattgagaaatcagtgagggacttagaacactggcatggcaggaagacggatgatctggggcggtggcaccagaaaaatgctatgaacctgaacttgcagaaagcactggaagagaaatatggagaaaacagcaaatccaagagctccaagtactagttttgacacagtagaggtgtcttctactcaaataaagtgctaacaataaggaaaggctcaaa

SEQ ID NO: 67129 - DNA, 865 bp, Homo sapiens
accagtagttctgcagtggggatctgcacttctgggcttcagcacacatcagtgtggttcacgtgtttcctgctgttatgaaagagattggagaggtgaggcagagacttatgaagggccagggttcttccaggacatggggtttcatcttccttctccccattcagagttgcttgtgagtgaagactgcctagactggacttaccttcccgccctctttgaccaaagtctcttgggatctctctctctgggtcagaaactggaagtgagtccacacttccattgtagcccgtccagactgctgtggactggcagtgcactgggacgtacagagctgccgtgggcacgtcaggttggtggctggggataggaggagaaagaaaacttggagctaacttgaacttcacctagcttgaagatgtgcaatttaattttagccccacctggtgaagtcctgtgtcttttcggagcctcattttctccatctgtgaaagaagataaattagtagtgtctccgaacaccttactgggtatttgtgaagaccagactaatttaccagatgtgagaatgcttgacatggacttgtgttagttatctcttgctgcacaacaaatcaccccaaaacttagtgggcttaagacaacatttactatctcacagtttctgtgagttgggaataccggtggagtgttggtgatttttctgtcccagggtctctcacaggctgcaatcaaggtgttgcttgggtctctagtctcatctcaaagctcgaccagagaaggaacccattcacatggcaggatccagctactctggagctgttggcaagaggccactctgagttccttgccctgtggacctctc

SEQ ID NO: 67130 - DNA, 1052 bp, Homo sapiens
tccattggtcttcaccagtagttctgcagtggggatctgcacttctgggcttcagcacacatcagtgtggttcacgtgtttcctgctgttatgaaagagattggagaggactaagcttggaattgcctgtcccacagcaagaggctatggagctgggccacggagcaggtacaaccactttcaccagggcccatctgaatgacaaggagggccaacaggacttggacccctggaaagcggcctacagttccttggacacctccaagttcaagaaccagggtctgtcatccccacagcccctgcccctgggatccagcactcaaggcagctccctagggcagtgccacttgaaggagattccccctccacccccgactgctgccagcagggattctctgggcatggacccacagtccaggtccctgaagaatgcgggctctcgatcctcctcgagagagaacagggccacctcgggagagggggctcagccatgccaggggacggatgacggtcccagacttgggggctcaggaccagaggagcacgcccacgaaccagaagggcagcatcattcctaacaacattcgccacaagtttgggagcaatgtggtggaccagctggtctccgaggagcaggctcaaaaggctattgatgaagtcttcgagggccagaaaagggcaagctcatggcccagcaggacccagaatcctgtggaaatctcctccgtcttctcagactactatgacctcggctacaacatgcggtcaaacttgtttcgaggggctgctgaggagacaaagagcctcatgaaggcttcttacacaccagaggtcattgagaaatcagtgagggacttagaacactggcatggcaggaagacggatgatctggggcggtggcaccagaaaaatgctatgaacctgaacttgcagaaagcactggaagagaaatatggagaaaacagcaaatccaagagctccaagtactagttttgacacagtagaggtgtcttctactcaaataaagtgctaacaataaggaaaggctcaaa

SEQ ID NO: 67131 - DNA, 695 bp, Homo sapiens
tccattggtcttcaccagtagttctgcagtggggatctgcacttctgggcttcagcacacatcagtgtggttcacgtgtttcctgctgttatgaaagagattggagaggactaagcttggaattgcctgtcccacagcaagaggctatggagctgggccacggagcaggtacaaccactttcaccagggcccatctgaatgacaaggagggccaacaggacttggacccctggaaagcggcctacagttccttggacacctccaagttcaagaaccagggctcaaaaggctattgatgaagtcttcgagggccagaaaagggcaagctcatggcccagcaggacccagaatcctgtggaaatctcctccgtcttctcagactactatgacctcggctacaacatgcggtcaaacttgtttcgaggggctgctgaggagacaaagagcctcatgaaggcttcttacacaccagaggtcattgagaaatcagtgagggacttagaacactggcatggcaggaagacggatgatctggggcggtggcaccagaaaaatgctatgaacctgaacttgcagaaagcactggaagagaaatatggagaaaacagcaaatccaagagctccaagtactagttttgacacagtagaggtgtcttctactcaaataaagtgctaacaataaggaaaggctcaaa

SEQ ID NO: 67132 - DNA, 495 bp, Homo sapiens
ttccgggggggaggggcggcgaggcgaggcctgcggagcggaggaagacaaacataaagatgaagtgcttaattcaaggtcacacaatgtcggggatggacctccagatttccttactgaaaacaagctcagggctcccactgattgtacattatggtgagacgtggtcttgtaacacagtggttaagaatgtgactttggagccagcctgctaggggctgaattctgactcagccatttactaactgtgtgaccttaggtaagtcatttaccttctttgtccctcagtttcatctcggttaagtagggataatgatagcacctattttatagggttattgtgaggaataaatccaagtaaaatgcttagaatagtaactgaaacatagcactcattaggaatgctttaattttcatttatttgagtattaaaggttgaattttcagaggtattttggacctttgtattttttctttaaatcacttattcatgac

SEQ ID NO: 67133 - DNA, 3820 bp, Homo sapiens
ttccgggggggaggggcggcgaggcgaggcctgcggagcgggtgcgcgcgggcgggcacgtggggccctttcgtccccggcgtccgggcgccctgcatggatcccccaccccagctcctgctccccggcggcggccggtgggcagaaagaccgaaacccactcacggccgcctgccgaatcgcggctctgctgtttgtggggcgtgctagaaacgtggtcctaaaaagaatggcgtccatttacataatgctttgtttgcgtttcgcaagtttctttcggttaaagccacagaaaccccacctcctgcccttgtgtcgtttccaccgcggcacccttttccgacattagaaacaatagtgtacgcctgtggaggcctcgtttgttcaggggctgccggccagggcttcaggacgtttctgcggctttccccgcgcggcctgggctcccgcggctgcttttcgggcccatgggcgcagccactgcgccaggctcaaggggggcggccccgtcagggcccgccatcttggaaggccttttttgccggttcttcccgctgaggaagtgtcgctcaagacgctggcctatgagttgtgatttctgccttttccccttcctccttgggctaagccagaccagaaagggccccgtgcgcaacgtgcttcacaatctctcagggaaagcggctaacgtggcgctactccgcctcccctgttccttacccttggggcggccgccatgtttcctgaacacaaaatggcgacacgtggttagcattcgtcgccaacgagaaattggggtcggcccgaaagctctagaatgcacccctcttcctccccggggccttccacctccgcgagttttatgacttaaaaaagcccacaggctggtctgaaggtcggaggcctaattttaacgcgttttcctccctttaatttgaaacgggaacgcgaatgactgtaaaatgtgggcacaatatttaatctctcgcctttttaaagcttaatagtggataataggggggcagtatcaagggataatttgggtccccacagtaccaaagcatttagaaacctctgtttaatttaaggaatgagataagttactgcttttctagacttcctagcatgggctgttgtgctggagagaacgagagctacgaagagactacagtgcctctgactttttcataggacagttggccggtgaatcttattaatagtttaccacaattaagtgttcatttttagtctagaagggacaggcgtttattgtgcattggccagtgccagcacatccgatgcaaggcagttcaccgtattctatctttaatttttaccatggtcctctgaggtaggtgttcttatctctctctctctctctctcttttaaacaaggaagacaaacataaagatgaagtgcttaattcaaggtcacacaatgtcggggatggacctccagatttccttactgacctgcattatcttgtggatacctgagtgaattccacaccacccattttatagatgaaaccactgagacatggagcaattgactgagtagtcactgccccacccctgcctggagcctcacacatgactcgcctcctctcagtgaccacaggttggttgaggggtttaacaaggctaagaaggtgagacgtggtcttgtaacacagtggttaagaatgtgactttggagccagcctgctaggggctgaattctgactcagccatttactaactgtgtgaccttagggaggaggacctggttgatagaagaatttatctcgtagtcttaacatccactgtaattccaaactttgaggacgatagagatcagtgggctttgactgcccagcatgcagtctccattcttaggtgggttcccaagcctgtaaaatgtaagccttatgctgctgagggccatcttgccaccctgagggaaacgctgcctgagaatgaaacaagcataagtaaaagctgagctgtgagatggagcaagatgaaggccacatgacatctttggagcacctggatctaactgtgccttaagctagtctaaccctgaacatttcatcatttcattgacatgagcccaggttttctttttttttggatggagtcttgctctgtcgcccaggctggagtgcagtagctcaatctcggctcactgcaagctccacctcccgggttcacgccattctcctgccttagcctcccaagtagctgggacaacaggcgcccaccaccactcccagctaattttttgtatttttagtagagacggggttttaccatgttagccgggatggtcttgatctcctgacctcatgatccgcccgcctcggcctcccaaagtgctgggattacaggtgtgagccactgcacccagccctcaggttttccctttttttacccctccttttgaaaatttgatgtggaattttgccacctgcagccagaagagttttaactaatcagtgccataaattttatatagttctccttgcaaaatgtggatcagcctttctcagcaaatcctttgtcataaagtgctgaattgtaagtttgtcatgagaatcacatgagatcatgcatgtgaagaacctggcattatcctcctcatagaaaaaaaccagtaaatattaactacaggaagcaaggaaggagtggggtgaggggaagaagaaggggtactgatttaaaagaaccctggagtcctaaggataatctaggaaccctcagacccaatccgatacccctattctaaatgctcctagtgccctgtaccttcccctcataagccttcattatcattgtaatgatatgtttatgtaatattttgattaatgtctctccttcactgacctagcagttctagcagggcagtgattttgctgtgttgcatccccagcacctagtctggtatgtggcattcagcatatgtttattgaatgaatggccatgtggttattcagatcctccttgattattggggttaggattgtggcagaagtggcaaaatcagggagagtagtccctgtcccctctgtatcttatacactgcccacactcccaacacacatacacatacagagaattttgtctcaattagataattaacttctgcttggttgtaaaccaaaccactggttcttaaactttcattggatcattttattgaagaattaaatagtgtggttctggcctaatgtctggaaagccttgcagaggagtggattaggtctttgtgataacaggcagccttccctgctcctgtgtctttataaaatctatttaactggagtagtccaccctccctcaggctcttacaggaatatgttggaggctgtaggaaggtgggaaaccgagagggaaaggactgggccgctggagacttcactcattccctagcaagaaacaaaagcagtaaaaggtggcccgaggacaacctgaagctcactccttcagcacttttggctggaggtcacttgttggagccccactcagagctcagcacaccaccccaccagcagcctcctcctcccagctgaggctgcatttcatcccttcccccagcctgctttccctgagataggggagtgtttcccagggcccatgtgacttccactggcaagtgacgattaccaatggtttactagtcagtgaaactaccaaaggcttttgtgctgtagtaatccttttcctgtttaaaactctggggattttctaatgttgccaatagtttttcaagtcagcaattactgtgtggattatgtaatggctcggtattaaaaatagaaaagacaaaaaaaagcat

SEQ ID NO: 67134 - DNA, 3766 bp, Homo sapiens
ttccgggggggaggggcggcgaggcgaggcctgcggagcgggtgcgcgcgggcgggcacgtggggccctttcgtccccggcgtccgggcgccctgcatggatcccccaccccagctcctgctccccggcggcggccggtgggcagaaagaccgaaacccactcacggccgcctgccgaatcgcggctctgctgtttgtggggcgtgctagaaacgtggtcctaaaaagaatggcgtccatttacataatgctttgtttgcgtttcgcaagtttctttcggttaaagccacagaaaccccacctcctgcccttgtgtcgtttccaccgcggcacccttttccgacattagaaacaatagtgtacgcctgtggaggcctcgtttgttcaggggctgccggccagggcttcaggacgtttctgcggctttccccgcgcggcctgggctcccgcggctgcttttcgggcccatgggcgcagccactgcgccaggctcaaggggggcggccccgtcagggcccgccatcttggaaggccttttttgccggttcttcccgctgaggaagtgtcgctcaagacgctggcctatgagttgtgatttctgccttttccccttcctccttgggctaagccagaccagaaagggccccgtgcgcaacgtgcttcacaatctctcagggaaagcggctaacgtggcgctactccgcctcccctgttccttacccttggggcggccgccatgtttcctgaacacaaaatggcgacacgtggttagcattcgtcgccaacgagaaattggggtcggcccgaaagctctagaatgcacccctcttcctccccggggccttccacctccgcgagttttatgacttaaaaaagcccacaggctggtctgaaggtcggaggcctaattttaacgcgttttcctccctttaatttgaaacgggaacgcgaatgactgtaaaatgtgggcacaatatttaatctctcgcctttttaaagcttaatagtggataataggggggcagtatcaagggataatttgggtccccacagtaccaaagcatttagaaacctctgtttaatttaaggaatgagataagttactgcttttctagacttcctagcatgggctgttgtgctggagagaacgagagctacgaagagactacagtgcctctgactttttcataggacagttggccggtgaatcttattaatagtttaccacaattaagtgttcatttttagtctagaagggacaggcgtttattgtgcattggccagtgccagcacatccgatgcaaggcagttcaccgtattctatctttaatttttaccatggtcctctgaggtaggtgttcttatctctctctctctctctctcttttaaacaaggaagacaaacataaagatgaagtgcttaattcaaggtcacacaatgtcggggatggacctccagatttccttactgacctgcattatcttgtggatacctgagtgaattccacaccacccattttatagatgaaaccactgagacatggagcaattgactgagtagtcactgccccacccctgcctggagcctcacacatgactcgcctcctctcagtgaccacaggttggttgaggggtttaacaaggctaagaaggtgagacgtggtcttgtaacacagtggttaagaatgtgactttggagccagcctgctaggggctgaattctgactcagccatttactaactgtgtgaccttagggaggaggacctggttgatagaagaatttatctcgtagtcttaacatccactgtaattccaaactttgaggacgatagagatcagtgggctttgactgcccagcatgcagtctccattcttaggtgggttcccaagcctgtaaaatgtaagccttatgctgctgagggccatcttgccaccctgagggaaacgctgcctgagaatgaaacaagcataagtaaaagctgagctgtgagatggagcaagatgaaggccacatgacatctttggagcacctggatctaactgtgccttaagctagtctaaccctgaacatttcatcatttcattgacatgagcccaggttttctttttttttggatggagtcttgctctgtcgcccaggctggagtgcagtagctcaatctcggctcactgcaagctccacctcccgggttcacgccattctcctgccttagcctcccaagtagctgggacaacaggcgcccaccaccactcccagctaattttttgtatttttagtagagacggggttttaccatgttagccgggatggtcttgatctcctgacctcatgatccgcccgcctcggcctcccaaagtgctgggattacaggtgtgagccactgcacccagccctcaggttttccctttttttacccctccttttgaaaatttgatgtggaattttgccacctgcagccagaagagttttaactaatcagtgccataaattttatatagttctccttgcaaaatgtggatcagcctttctcagcaaatcctttgtcataaagtgctgaattgtaagtttgtcatgagaatcacatgagatcatgcatgtgaagaacctggcattatcctcctcatagaaaaaaaccagtaaatattaactacaggaagcaaggaaggagtggggtgaggggaagaagaaggggtactgatttaaaagaaccctggagtcctaaggataatctaggaaccctcagacccaatccgatacccctattctaaatgctcctagtgccctgtaccttcccctcataagccttcattatcattgtaatgatatgtttatgtaatattttgattaatgtctctccttcactgacctagcagttctagcagggcagtgattttgctgtgttgcatccccagcacctagtctggtatgtggcattcagcatatgtttattgaatgaatggccatgtggttattcagatcctccttgattattggggttaggattgtggcagaagtggcaaaatcagggagagtagtccctgtcccctctgtatcttatacactgcccacactcccaacacacatacacatacagagaattttgtctcaattagataattaacttctgcttggttgtaaaccaaaccactggttcttaaactttcattggatcattttattgaagaattaaatagtgtggttctggcctaatgtctggaaagccttgcagaggagtggattaggtctttgtgataacaggcagccttccctgctcctgtgtctttatttggaggctgtaggaaggtgggaaaccgagagggaaaggactgggccgctggagacttcactcattccctagcaagaaacaaaagcagtaaaaggtggcccgaggacaacctgaagctcactccttcagcacttttggctggaggtcacttgttggagccccactcagagctcagcacaccaccccaccagcagcctcctcctcccagctgaggctgcatttcatcccttcccccagcctgctttccctgagataggggagtgtttcccagggcccatgtgacttccactggcaagtgacgattaccaatggtttactagtcagtgaaactaccaaaggcttttgtgctgtagtaatccttttcctgtttaaaactctggggattttctaatgttgccaatagtttttcaagtcagcaattactgtgtggattatgtaatggctcggtattaaaaatagaaaagacaaaaaaaagcat

SEQ ID NO: 67135 - DNA, 3630 bp, Homo sapiens
ttccgggggggaggggcggcgaggcgaggcctgcggagcgggtgcgcgcgggcgggcacgtggggccctttcgtccccggcgtccgggcgccctgcatggatcccccaccccagctcctgctccccggcggcggccggtgggcagaaagaccgaaacccactcacggccgcctgccgaatcgcggctctgctgtttgtggggcgtgctagaaacgtggtcctaaaaagaatggcgtccatttacataatgctttgtttgcgtttcgcaagtttctttcggttaaagccacagaaaccccacctcctgcccttgtgtcgtttccaccgcggcacccttttccgacattagaaacaatagtgtacgcctgtggaggcctcgtttgttcaggggctgccggccagggcttcaggacgtttctgcggctttccccgcgcggcctgggctcccgcggctgcttttcgggcccatgggcgcagccactgcgccaggctcaaggggggcggccccgtcagggcccgccatcttggaaggccttttttgccggttcttcccgctgaggaagtgtcgctcaagacgctggcctatgagttgtgatttctgccttttccccttcctccttgggctaagccagaccagaaagggccccgtgcgcaacgtgcttcacaatctctcagggaaagcggctaacgtggcgctactccgcctcccctgttccttacccttggggcggccgccatgtttcctgaacacaaaatggcgacacgtggttagcattcgtcgccaacgagaaattggggtcggcccgaaagctctagaatgcacccctcttcctccccggggccttccacctccgcgagttttatgacttaaaaaagcccacaggctggtctgaaggtcggaggcctaattttaacgcgttttcctccctttaatttgaaacgggaacgcgaatgactgtaaaatgtgggcacaatatttaatctctcgcctttttaaagcttaatagtggataataggggggcagtatcaagggataatttgggtccccacagtaccaaagcatttagaaacctctgtttaatttaaggaatgagataagttactgcttttctagacttcctagcatgggctgttgtgctggagagaacgagagctacgaagagactacagtgcctctgactttttcataggacagttggccgaggaagacaaacataaagatgaagtgcttaattcaaggtcacacaatgtcggggatggacctccagatttccttactgacctgcattatcttgtggatacctgagtgaattccacaccacccattttatagatgaaaccactgagacatggagcaattgactgagtagtcactgccccacccctgcctggagcctcacacatgactcgcctcctctcagtgaccacaggttggttgaggggtttaacaaggctaagaaggtgagacgtggtcttgtaacacagtggttaagaatgtgactttggagccagcctgctaggggctgaattctgactcagccatttactaactgtgtgaccttagggaggaggacctggttgatagaagaatttatctcgtagtcttaacatccactgtaattccaaactttgaggacgatagagatcagtgggctttgactgcccagcatgcagtctccattcttaggtgggttcccaagcctgtaaaatgtaagccttatgctgctgagggccatcttgccaccctgagggaaacgctgcctgagaatgaaacaagcataagtaaaagctgagctgtgagatggagcaagatgaaggccacatgacatctttggagcacctggatctaactgtgccttaagctagtctaaccctgaacatttcatcatttcattgacatgagcccaggttttctttttttttggatggagtcttgctctgtcgcccaggctggagtgcagtagctcaatctcggctcactgcaagctccacctcccgggttcacgccattctcctgccttagcctcccaagtagctgggacaacaggcgcccaccaccactcccagctaattttttgtatttttagtagagacggggttttaccatgttagccgggatggtcttgatctcctgacctcatgatccgcccgcctcggcctcccaaagtgctgggattacaggtgtgagccactgcacccagccctcaggttttccctttttttacccctccttttgaaaatttgatgtggaattttgccacctgcagccagaagagttttaactaatcagtgccataaattttatatagttctccttgcaaaatgtggatcagcctttctcagcaaatcctttgtcataaagtgctgaattgtaagtttgtcatgagaatcacatgagatcatgcatgtgaagaacctggcattatcctcctcatagaaaaaaaccagtaaatattaactacaggaagcaaggaaggagtggggtgaggggaagaagaaggggtactgatttaaaagaaccctggagtcctaaggataatctaggaaccctcagacccaatccgatacccctattctaaatgctcctagtgccctgtaccttcccctcataagccttcattatcattgtaatgatatgtttatgtaatattttgattaatgtctctccttcactgacctagcagttctagcagggcagtgattttgctgtgttgcatccccagcacctagtctggtatgtggcattcagcatatgtttattgaatgaatggccatgtggttattcagatcctccttgattattggggttaggattgtggcagaagtggcaaaatcagggagagtagtccctgtcccctctgtatcttatacactgcccacactcccaacacacatacacatacagagaattttgtctcaattagataattaacttctgcttggttgtaaaccaaaccactggttcttaaactttcattggatcattttattgaagaattaaatagtgtggttctggcctaatgtctggaaagccttgcagaggagtggattaggtctttgtgataacaggcagccttccctgctcctgtgtctttataaaatctatttaactggagtagtccaccctccctcaggctcttacaggaatatgttggaggctgtaggaaggtgggaaaccgagagggaaaggactgggccgctggagacttcactcattccctagcaagaaacaaaagcagtaaaaggtggcccgaggacaacctgaagctcactccttcagcacttttggctggaggtcacttgttggagccccactcagagctcagcacaccaccccaccagcagcctcctcctcccagctgaggctgcatttcatcccttcccccagcctgctttccctgagataggggagtgtttcccagggcccatgtgacttccactggcaagtgacgattaccaatggtttactagtcagtgaaactaccaaaggcttttgtgctgtagtaatccttttcctgtttaaaactctggggattttctaatgttgccaatagtttttcaagtcagcaattactgtgtggattatgtaatggctcggtattaaaaatagaaaagacaaaaaaaagcat

SEQ ID NO: 67136 - DNA, 3410 bp, Homo sapiens
ttccgggggggaggggcggcgaggcgaggcctgcggagcgggtgcgcgcgggcgggcacgtggggccctttcgtccccggcgtccgggcgccctgcatggatcccccaccccagctcctgctccccggcggcggccggtgggcagaaagaccgaaacccactcacggccgcctgccgaatcgcggctctgctgtttgtggggcgtgctagaaacgtggtcctaaaaagaatggcgtccatttacataatgctttgtttgcgtttcgcaagtttctttcggttaaagccacagaaaccccacctcctgcccttgtgtcgtttccaccgcggcacccttttccgacattagaaacaatagtgtacgcctgtggaggcctcgtttgttcaggggctgccggccagggcttcaggacgtttctgcggctttccccgcgcggcctgggctcccgcggctgcttttcgggcccatgggcgcagccactgcgccaggctcaaggggggcggccccgtcagggcccgccatcttggaaggccttttttgccggttcttcccgctgaggaagtgtcgctcaagacgctggcctatgagttgtgatttctgccttttccccttcctccttgggctaagccagaccagaaagggccccgtgcgcaacgtgcttcacaatctctcagggaaagcggctaacgtggcgctactccgcctcccctgttccttacccttggggcggccgccatgtttcctgaacacaaaatggcgacacgtggttagcattcgtcgccaacgagaaattggggtcggcccgaaagctctagaatgcacccctcttcctccccggggccttccacctccgcgagttttatgacttaaaaaagcccacaggctggtctgaagacttcctagcatgggctgttgtgctggagagaacgagagctacgaagagactacagtgcctctgactttttcataggacagttggccgaggaagacaaacataaagatgaagtgcttaattcaaggtcacacaatgtcggggatggacctccagatttccttactgacctgcattatcttgtggatacctgagtgaattccacaccacccattttatagatgaaaccactgagacatggagcaattgactgagtagtcactgccccacccctgcctggagcctcacacatgactcgcctcctctcagtgaccacaggttggttgaggggtttaacaaggctaagaaggtgagacgtggtcttgtaacacagtggttaagaatgtgactttggagccagcctgctaggggctgaattctgactcagccatttactaactgtgtgaccttagggaggaggacctggttgatagaagaatttatctcgtagtcttaacatccactgtaattccaaactttgaggacgatagagatcagtgggctttgactgcccagcatgcagtctccattcttaggtgggttcccaagcctgtaaaatgtaagccttatgctgctgagggccatcttgccaccctgagggaaacgctgcctgagaatgaaacaagcataagtaaaagctgagctgtgagatggagcaagatgaaggccacatgacatctttggagcacctggatctaactgtgccttaagctagtctaaccctgaacatttcatcatttcattgacatgagcccaggttttctttttttttggatggagtcttgctctgtcgcccaggctggagtgcagtagctcaatctcggctcactgcaagctccacctcccgggttcacgccattctcctgccttagcctcccaagtagctgggacaacaggcgcccaccaccactcccagctaattttttgtatttttagtagagacggggttttaccatgttagccgggatggtcttgatctcctgacctcatgatccgcccgcctcggcctcccaaagtgctgggattacaggtgtgagccactgcacccagccctcaggttttccctttttttacccctccttttgaaaatttgatgtggaattttgccacctgcagccagaagagttttaactaatcagtgccataaattttatatagttctccttgcaaaatgtggatcagcctttctcagcaaatcctttgtcataaagtgctgaattgtaagtttgtcatgagaatcacatgagatcatgcatgtgaagaacctggcattatcctcctcatagaaaaaaaccagtaaatattaactacaggaagcaaggaaggagtggggtgaggggaagaagaaggggtactgatttaaaagaaccctggagtcctaaggataatctaggaaccctcagacccaatccgatacccctattctaaatgctcctagtgccctgtaccttcccctcataagccttcattatcattgtaatgatatgtttatgtaatattttgattaatgtctctccttcactgacctagcagttctagcagggcagtgattttgctgtgttgcatccccagcacctagtctggtatgtggcattcagcatatgtttattgaatgaatggccatgtggttattcagatcctccttgattattggggttaggattgtggcagaagtggcaaaatcagggagagtagtccctgtcccctctgtatcttatacactgcccacactcccaacacacatacacatacagagaattttgtctcaattagataattaacttctgcttggttgtaaaccaaaccactggttcttaaactttcattggatcattttattgaagaattaaatagtgtggttctggcctaatgtctggaaagccttgcagaggagtggattaggtctttgtgataacaggcagccttccctgctcctgtgtctttataaaatctatttaactggagtagtccaccctccctcaggctcttacaggaatatgttggaggctgtaggaaggtgggaaaccgagagggaaaggactgggccgctggagacttcactcattccctagcaagaaacaaaagcagtaaaaggtggcccgaggacaacctgaagctcactccttcagcacttttggctggaggtcacttgttggagccccactcagagctcagcacaccaccccaccagcagcctcctcctcccagctgaggctgcatttcatcccttcccccagcctgctttccctgagataggggagtgtttcccagggcccatgtgacttccactggcaagtgacgattaccaatggtttactagtcagtgaaactaccaaaggcttttgtgctgtagtaatccttttcctgtttaaaactctggggattttctaatgttgccaatagtttttcaagtcagcaattactgtgtggattatgtaatggctcggtattaaaaatagaaaagacaaaaaaaagcat

SEQ ID NO: 67137 - DNA, 3330 bp, Homo sapiens
ttccgggggggaggggcggcgaggcgaggcctgcggagcgggtgcgcgcgggcgggcacgtggggccctttcgtccccggcgtccgggcgccctgcatggatcccccaccccagctcctgctccccggcggcggccggtgggcagaaagaccgaaacccactcacggccgcctgccgaatcgcggctctgctgtttgtggggcgtgctagaaacgtggtcctaaaaagaatggcgtccatttacataatgctttgtttgcgtttcgcaagtttctttcggttaaagccacagaaaccccacctcctgcccttgtgtcgtttccaccgcggcacccttttccgacattagaaacaatagtgtacgcctgtggaggcctcgtttgttcaggggctgccggccagggcttcaggacgtttctgcggctttccccgcgcggcctgggctcccgcggctgcttttcgggcccatgggcgcagccactgcgccaggctcaaggggggcggccccgtcagggcccgccatcttggaaggccttttttgccggttcttcccgctgaggaagtgtcgctcaagacgctggcctatgagttgtgatttctgccttttccccttcctccttgggctaagccagaccagaaagggccccgtgcgcaacgtgcttcacaatctctcagggaaagcggctaacgtggcgctactccgcctcccctgttccttacccttggggcggccgccatgtttcctgaacacaaaatggcgacacgtggttagcattcgtcgccaacgagaaattggggtcggcccgaaagctctagaatgcacccctcttcctccccggggccttccacctccgcgagttttatgacttaaaaaagcccacaggctggtctgaaggtcggaggcctaattttaacgcgttttcctccctttaatttgaaacgggaacgcgaatgactgtaaaatgtgggcacaatatttaatctctcgcctttttaaagcttaatagtggataataggggggcagtatcaagggataatttgggtccccacagtaccaaagcatttagaaacctctgtttaatttaaggaatgagataagttactgcttttctagacttcctagcatgggctgttgtgctggagagaacgagagctacgaagagactacagtgcctctgactttttcataggacagttggccggtgaatcttattaatagtttaccacaattaagtgttcatttttagtctagaagggacaggcgtttattgtgcattggccagtgccagcacatccgatgcaaggcagttcaccgtattctatctttaatttttaccatggtcctctgaggtaggtgttcttatctctctctctctctctctcttttaaacaaggaagacaaacataaagatgaagtgcttaattcaaggtcacacaatgtcggggatggacctccagatttccttactgacctgcattatcttgtggatacctgagtgaattccacaccacccattttatagatgaaaccactgagacatggagcaattgactgagtagtcactgccccacccctgcctggagcctcacacatgactcgcctcctctcagtgaccacaggttggttgaggggtttaacaaggctaagaaggtgagacgtggtcttgtaacacagtggttaagaatgtgactttggagccagcctgctaggggctgaattctgactcagccatttactaactgtgtgaccttaggctggagtgcaatggcatgatctcggctcatcacaacctctgcttcctgggttcaagcgattctcctgcctcagcctcccgagtacctgggactacaggcactcgccaccatgcccggctgatttttgtatttttaatagagatggtttcactatgttggccaggctggtctcgaactcctgaccttgtgatctgcccacctcagcctcgaaaagtgctgggattacaggcgtgagccactgcgcccagccttgtattttttttcagtttgggtagctgtccctaattcatttgttaaaggagaagcaagagcaagaacctttaatctgttctcctcttccctaatttgaaagtagcttgttattttgaatatcactttctctgaaatagcacatctccatctcagagaatggatttaatgtttggatacagccaaaagtcatttcattaccaaaccatggggtgaatataccatgtaaagcagtttgggatcagaactcacagtctgaattgtaagtgatgagactgctgtctctctgctacagcttcttggctggctctgaaggctctttgaaggcagatcctaacaaggggactgctttgaagggccattgttcatttggaatgataaagtctatgttgttcaaaaaacaaatgcttgtagcaggtattttttcactccagactgagaatattggtgggatattgataaggggtactgaatggtaataaacatgtgctctagctctgtgctagtcagcttatttcagaactctagtttgattcagtttcttgcctctgactcaaaatggagggagagtgatttttacataagagaacacacccacatatccttttggcagcagctacctgccagagatgttgaagaagagtagccaacctttacacagcagatattgtgtgccagtcatagtcctaagtataataccttacatgtataaacttcttataaggttggtgctctgtaccgaattgaatagtatcccccaaaattcatgttgtcccagaacctatgaaagtgatcttacttgagggaggggggaggggggagggatagcattaggagatatacctaatgctaaatgacgagttaatgggtgtagcacaccagcatggcacatgtatacatatgtaactaacctgcacattgtgcacatgtaccctaaaacttaaagtataataataataaaataaaaaaaaaaaagaaagtgatcttacttggaaataaggtctttgcacatatgatcaagttgagatgaagttgtactggaaagtctgtctagtgactggtgttgtcataagaagagagggacacagagggaagatggccacatgaagatggaggcagagattgcagttatgctgctgcaaactaaggaatggctctggccctccaaggattgctgataaccaccagaaactagaagagacaaggaaggattcttccctagagccttcagagggagcatggccctactgacacctggatttcaaacttgtagcttcctaaactgcaagagaataaatttctgttgttttaagccaaataaaaag

SEQ ID NO: 67138 - DNA, 2570 bp, Homo sapiens
ttccgggggggaggggcggcgaggcgaggcctgcggagcgggtgcgcgcgggcgggcacgtggggccctttcgtccccggcgtccgggcgccctgcatggatcccccaccccagctcctgctccccggcggcggccgaggaagacaaacataaagatgaagtgcttaattcaaggtcacacaatgtcggggatggacctccagatttccttactgacctgcattatcttgtggatacctgagtgaattccacaccacccattttatagatgaaaccactgagacatggagcaattgactgagtagtcactgccccacccctgcctggagcctcacacatgactcgcctcctctcagtgaccacagaaaacaagctcagggctcccactgattgtacattatggtgagacgtggtcttgtaacacagtggttaagaatgtgactttggagccagcctgctaggggctgaattctgactcagccatttactaactgtgtgaccttagggaggaggacctggttgatagaagaatttatctcgtagtcttaacatccactgtaattccaaactttgaggacgatagagatcagtgggctttgactgcccagcatgcagtctccattcttaggtgggttcccaagcctgtaaaatgtaagccttatgctgctgagggccatcttgccaccctgagggaaacgctgcctgagaatgaaacaagcataagtaaaagctgagctgtgagatggagcaagatgaaggccacatgacatctttggagcacctggatctaactgtgccttaagctagtctaaccctgaacatttcatcatttcattgacatgagcccaggttttctttttttttggatggagtcttgctctgtcgcccaggctggagtgcagtagctcaatctcggctcactgcaagctccacctcccgggttcacgccattctcctgccttagcctcccaagtagctgggacaacaggcgcccaccaccactcccagctaattttttgtatttttagtagagacggggttttaccatgttagccgggatggtcttgatctcctgacctcatgatccgcccgcctcggcctcccaaagtgctgggattacaggtgtgagccactgcacccagccctcaggttttccctttttttacccctccttttgaaaatttgatgtggaattttgccacctgcagccagaagagttttaactaatcagtgccataaattttatatagttctccttgcaaaatgtggatcagcctttctcagcaaatcctttgtcataaagtgctgaattgtaagtttgtcatgagaatcacatgagatcatgcatgtgaagaacctggcattatcctcctcatagaaaaaaaccagtaaatattaactacaggaagcaaggaaggagtggggtgaggggaagaagaaggggtactgatttaaaagaaccctggagtcctaaggataatctaggaaccctcagacccaatccgatacccctattctaaatgctcctagtgccctgtaccttcccctcataagccttcattatcattgtaatgatatgtttatgtaatattttgattaatgtctctccttcactgacctagcagttctagcagggcagtgattttgctgtgttgcatccccagcacctagtctggtatgtggcattcagcatatgtttattgaatgaatggccatgtggttattcagatcctccttgattattggggttaggattgtggcagaagtggcaaaatcagggagagtagtccctgtcccctctgtatcttatacactgcccacactcccaacacacatacacatacagagaattttgtctcaattagataattaacttctgcttggttgtaaaccaaaccactggttcttaaactttcattggatcattttattgaagaattaaatagtgtggttctggcctaatgtctggaaagccttgcagaggagtggattaggtctttgtgataacaggcagccttccctgctcctgtgtctttataaaatctatttaactggagtagtccaccctccctcaggctcttacaggaatatgttggaggctgtaggaaggtgggaaaccgagagggaaaggactgggccgctggagacttcactcattccctagcaagaaacaaaagcagtaaaaggtggcccgaggacaacctgaagctcactccttcagcacttttggctggaggtcacttgttggagccccactcagagctcagcacaccaccccaccagcagcctcctcctcccagctgaggctgcatttcatcccttcccccagcctgctttccctgagataggggagtgtttcccagggcccatgtgacttccactggcaagtgacgattaccaatggtttactagtcagtgaaactaccaaaggcttttgtgctgtagtaatccttttcctgtttaaaactctggggattttctaatgttgccaatagtttttcaagtcagcaattactgtgtggattatgtaatggctcggtattaaaaatagaaaagacaaaaaaaagcat

SEQ ID NO: 67139 - DNA, 2596 bp, Homo sapiens
ttccgggggggaggggcggcgaggcgaggcctgcggagcggaggaagacaaacataaagatgaagtgcttaattcaaggtcacacaatgtcggggatggacctccagatttccttactgacctgcattatcttgtggatacctgagtgaattccacaccacccattttatagatgaaaccactgagacatggagcaattgactgagtagtcactgccccacccctgcctggagcctcacacatgactcgcctcctctcagtgaccacagatggagtcttgctgtgtcaccaggatggagtgcagtggcgcaatctcggctcactgcaacctctgcttcccgggttcaagtgattctcctgcctcagcaacccgagtagctggcactacaggaaaacaagctcagggctcccactgattgtacattatggtgagacgtggtcttgtaacacagtggttaagaatgtgactttggagccagcctgctaggggctgaattctgactcagccatttactaactgtgtgaccttagggaggaggacctggttgatagaagaatttatctcgtagtcttaacatccactgtaattccaaactttgaggacgatagagatcagtgggctttgactgcccagcatgcagtctccattcttaggtgggttcccaagcctgtaaaatgtaagccttatgctgctgagggccatcttgccaccctgagggaaacgctgcctgagaatgaaacaagcataagtaaaagctgagctgtgagatggagcaagatgaaggccacatgacatctttggagcacctggatctaactgtgccttaagctagtctaaccctgaacatttcatcatttcattgacatgagcccaggttttctttttttttggatggagtcttgctctgtcgcccaggctggagtgcagtagctcaatctcggctcactgcaagctccacctcccgggttcacgccattctcctgccttagcctcccaagtagctgggacaacaggcgcccaccaccactcccagctaattttttgtatttttagtagagacggggttttaccatgttagccgggatggtcttgatctcctgacctcatgatccgcccgcctcggcctcccaaagtgctgggattacaggtgtgagccactgcacccagccctcaggttttccctttttttacccctccttttgaaaatttgatgtggaattttgccacctgcagccagaagagttttaactaatcagtgccataaattttatatagttctccttgcaaaatgtggatcagcctttctcagcaaatcctttgtcataaagtgctgaattgtaagtttgtcatgagaatcacatgagatcatgcatgtgaagaacctggcattatcctcctcatagaaaaaaaccagtaaatattaactacaggaagcaaggaaggagtggggtgaggggaagaagaaggggtactgatttaaaagaaccctggagtcctaaggataatctaggaaccctcagacccaatccgatacccctattctaaatgctcctagtgccctgtaccttcccctcataagccttcattatcattgtaatgatatgtttatgtaatattttgattaatgtctctccttcactgacctagcagttctagcagggcagtgattttgctgtgttgcatccccagcacctagtctggtatgtggcattcagcatatgtttattgaatgaatggccatgtggttattcagatcctccttgattattggggttaggattgtggcagaagtggcaaaatcagggagagtagtccctgtcccctctgtatcttatacactgcccacactcccaacacacatacacatacagagaattttgtctcaattagataattaacttctgcttggttgtaaaccaaaccactggttcttaaactttcattggatcattttattgaagaattaaatagtgtggttctggcctaatgtctggaaagccttgcagaggagtggattaggtctttgtgataacaggcagccttccctgctcctgtgtctttataaaatctatttaactggagtagtccaccctccctcaggctcttacaggaatatgttggaggctgtaggaaggtgggaaaccgagagggaaaggactgggccgctggagacttcactcattccctagcaagaaacaaaagcagtaaaaggtggcccgaggacaacctgaagctcactccttcagcacttttggctggaggtcacttgttggagccccactcagagctcagcacaccaccccaccagcagcctcctcctcccagctgaggctgcatttcatcccttcccccagcctgctttccctgagataggggagtgtttcccagggcccatgtgacttccactggcaagtgacgattaccaatggtttactagtcagtgaaactaccaaaggcttttgtgctgtagtaatccttttcctgtttaaaactctggggattttctaatgttgccaatagtttttcaagtcagcaattactgtgtggattatgtaatggctcggtattaaaaatagaaaagacaaaaaaaagcat

SEQ ID NO: 67140 - DNA, 2203 bp, Homo sapiens
gtgagccaccacacttggtcttaagcaaatattaactccaatcactatcctaagccaaggtgtctgagcagctgagggaggaccagagtgaatgcagctagtgccacactgaacaaaccactcttgctcattccttagggaggaggacctggttgatagaagaatttatctcgtagtcttaacatccactgtaattccaaactttgaggacgatagagatcagtgggctttgactgcccagcatgcagtctccattcttaggtgggttcccaagcctgtaaaatgtaagccttatgctgctgagggccatcttgccaccctgagggaaacgctgcctgagaatgaaacaagcataagtaaaagctgagctgtgagatggagcaagatgaaggccacatgacatctttggagcacctggatctaactgtgccttaagctagtctaaccctgaacatttcatcatttcattgacatgagcccaggttttctttttttttggatggagtcttgctctgtcgcccaggctggagtgcagtagctcaatctcggctcactgcaagctccacctcccgggttcacgccattctcctgccttagcctcccaagtagctgggacaacaggcgcccaccaccactcccagctaattttttgtatttttagtagagacggggttttaccatgttagccgggatggtcttgatctcctgacctcatgatccgcccgcctcggcctcccaaagtgctgggattacaggtgtgagccactgcacccagccctcaggttttccctttttttacccctccttttgaaaatttgatgtggaattttgccacctgcagccagaagagttttaactaatcagtgccataaattttatatagttctccttgcaaaatgtggatcagcctttctcagcaaatcctttgtcataaagtgctgaattgtaagtttgtcatgagaatcacatgagatcatgcatgtgaagaacctggcattatcctcctcatagaaaaaaaccagtaaatattaactacaggaagcaaggaaggagtggggtgaggggaagaagaaggggtactgatttaaaagaaccctggagtcctaaggataatctaggaaccctcagacccaatccgatacccctattctaaatgctcctagtgccctgtaccttcccctcataagccttcattatcattgtaatgatatgtttatgtaatattttgattaatgtctctccttcactgacctagcagttctagcagggcagtgattttgctgtgttgcatccccagcacctagtctggtatgtggcattcagcatatgtttattgaatgaatggccatgtggttattcagatcctccttgattattggggttaggattgtggcagaagtggcaaaatcagggagagtagtccctgtcccctctgtatcttatacactgcccacactcccaacacacatacacatacagagaattttgtctcaattagataattaacttctgcttggttgtaaaccaaaccactggttcttaaactttcattggatcattttattgaagaattaaatagtgtggttctggcctaatgtctggaaagccttgcagaggagtggattaggtctttgtgataacaggcagccttccctgctcctgtgtctttataaaatctatttaactggagtagtccaccctccctcaggctcttacaggaatatgttggaggctgtaggaaggtgggaaaccgagagggaaaggactgggccgctggagacttcactcattccctagcaagaaacaaaagcagtaaaaggtggcccgaggacaacctgaagctcactccttcagcacttttggctggaggtcacttgttggagccccactcagagctcagcacaccaccccaccagcagcctcctcctcccagctgaggctgcatttcatcccttcccccagcctgctttccctgagataggggagtgtttcccagggcccatgtgacttccactggcaagtgacgattaccaatggtttactagtcagtgaaactaccaaaggcttttgtgctgtagtaatccttttcctgtttaaaactctggggattttctaatgttgccaatagtttttcaagtcagcaattactgtgtggattatgtaatggctcggtattaaaaatagaaaagacaaaaaaaagcat

SEQ ID NO: 67141 - DNA, 2168 bp, Homo sapiens
agttacactctctacaagggtaaagcaaactgggaggtgctggttctggctccagagggactggggtctggggcctgtcacctggtcctgcctgtgtttcctgggaggaggacctggttgatagaagaatttatctcgtagtcttaacatccactgtaattccaaactttgaggacgatagagatcagtgggctttgactgcccagcatgcagtctccattcttaggtgggttcccaagcctgtaaaatgtaagccttatgctgctgagggccatcttgccaccctgagggaaacgctgcctgagaatgaaacaagcataagtaaaagctgagctgtgagatggagcaagatgaaggccacatgacatctttggagcacctggatctaactgtgccttaagctagtctaaccctgaacatttcatcatttcattgacatgagcccaggttttctttttttttggatggagtcttgctctgtcgcccaggctggagtgcagtagctcaatctcggctcactgcaagctccacctcccgggttcacgccattctcctgccttagcctcccaagtagctgggacaacaggcgcccaccaccactcccagctaattttttgtatttttagtagagacggggttttaccatgttagccgggatggtcttgatctcctgacctcatgatccgcccgcctcggcctcccaaagtgctgggattacaggtgtgagccactgcacccagccctcaggttttccctttttttacccctccttttgaaaatttgatgtggaattttgccacctgcagccagaagagttttaactaatcagtgccataaattttatatagttctccttgcaaaatgtggatcagcctttctcagcaaatcctttgtcataaagtgctgaattgtaagtttgtcatgagaatcacatgagatcatgcatgtgaagaacctggcattatcctcctcatagaaaaaaaccagtaaatattaactacaggaagcaaggaaggagtggggtgaggggaagaagaaggggtactgatttaaaagaaccctggagtcctaaggataatctaggaaccctcagacccaatccgatacccctattctaaatgctcctagtgccctgtaccttcccctcataagccttcattatcattgtaatgatatgtttatgtaatattttgattaatgtctctccttcactgacctagcagttctagcagggcagtgattttgctgtgttgcatccccagcacctagtctggtatgtggcattcagcatatgtttattgaatgaatggccatgtggttattcagatcctccttgattattggggttaggattgtggcagaagtggcaaaatcagggagagtagtccctgtcccctctgtatcttatacactgcccacactcccaacacacatacacatacagagaattttgtctcaattagataattaacttctgcttggttgtaaaccaaaccactggttcttaaactttcattggatcattttattgaagaattaaatagtgtggttctggcctaatgtctggaaagccttgcagaggagtggattaggtctttgtgataacaggcagccttccctgctcctgtgtctttataaaatctatttaactggagtagtccaccctccctcaggctcttacaggaatatgttggaggctgtaggaaggtgggaaaccgagagggaaaggactgggccgctggagacttcactcattccctagcaagaaacaaaagcagtaaaaggtggcccgaggacaacctgaagctcactccttcagcacttttggctggaggtcacttgttggagccccactcagagctcagcacaccaccccaccagcagcctcctcctcccagctgaggctgcatttcatcccttcccccagcctgctttccctgagataggggagtgtttcccagggcccatgtgacttccactggcaagtgacgattaccaatggtttactagtcagtgaaactaccaaaggcttttgtgctgtagtaatccttttcctgtttaaaactctggggattttctaatgttgccaatagtttttcaagtcagcaattactgtgtggattatgtaatggctcggtattaaaaatagaaaagacaaaaaaaagcat

SEQ ID NO: 67142 - DNA, 3326 bp, Homo sapiens
  misc_feature (3174)..(3174): n is a, c, g, or t
  misc_feature (3184)..(3184): n is a, c, g, or t
  misc_feature (3326)..(3326): n is a, c, g, or t
ttccgggggggaggggcggcgaggcgaggcctgcggagcgggtgcgcgcgggcgggcacgtggggccctttcgtccccggcgtccgggcgccctgcatggatcccccaccccagctcctgctccccggcggcggccggtgggcagaaagaccgaaacccactcacggccgcctgccgaatcgcggctctgctgtttgtggggcgtgctagaaacgtggtcctaaaaagaatggcgtccatttacataatgctttgtttgcgtttcgcaagtttctttcggttaaagccacagaaaccccacctcctgcccttgtgtcgtttccaccgcggcacccttttccgacattagaaacaatagtgtacgcctgtggaggcctcgtttgttcaggggctgccggccagggcttcaggacgtttctgcggctttccccgcgcggcctgggctcccgcggctgcttttcgggcccatgggcgcagccactgcgccaggctcaaggggggcggccccgtcagggcccgccatcttggaaggccttttttgccggttcttcccgctgaggaagtgtcgctcaagacgctggcctatgagttgtgatttctgccttttccccttcctccttgggctaagccagaccagaaagggccccgtgcgcaacgtgcttcacaatctctcagggaaagcggctaacgtggcgctactccgcctcccctgttccttacccttggggcggccgccatgtttcctgaacacaaaatggcgacacgtggttagcattcgtcgccaacgagaaattggggtcggcccgaaagctctagaatgcacccctcttcctccccggggccttccacctccgcgagttttatgacttaaaaaagcccacaggctggtctgaaggtcggaggcctaattttaacgcgttttcctccctttaatttgaaacgggaacgcgaatgactgtaaaatgtgggcacaatatttaatctctcgcctttttaaagcttaatagtggataataggggggcagtatcaagggataatttgggtccccacagtaccaaagcatttagaaacctctgtttaatttaaggaatgagataagttactgcttttctagacttcctagcatgggctgttgtgctggagagaacgagagctacgaagagactacagtgcctctgactttttcataggacagttggccggtgaatcttattaatagtttaccacaattaagtgttcatttttagtctagaagggacaggcgtttattgtgcattggccagtgccagcacatccgatgcaaggcagttcaccgtattctatctttaatttttaccatggtcctctgaggtaggtgttcttatctctctctctctctctctcttttaaacaaggaagacaaacataaagatgaagtgcttaattcaaggtcacacaatgtcggggatggacctccagatttccttactgacctgcattatcttgtggatacctgagtgaattccacaccacccattttatagatgaaaccactgagacatggagcaattgactgagtagtcactgccccacccctgcctggagcctcacacatgactcgcctcctctcagtgaccacaggttggttgaggggtttaacaaggctaagaaggtgagacgtggtcttgtaacacagtggttaagaatgtgactttggagccagcctgctaggggctgaattctgactcagccatttactaactgtgtgaccttagggaggaggacctggttgatagaagaatttatctcgtagtcttaacatccactgtaattccaaactttgaggacgatagagatcagtgggctttgactgcccagcatgcagtctccattcttaggtgggttcccaagcctgtaaaatgtaagccttatgctgctgagggccatcttgccaccctgagggaaacgctgcctgagaatgaaacaagcataagtaaaagctgagctgtgagatggagcaagatgaaggccacatgacatctttggagcacctggatctaactgtgccttaagctagtctaaccctgaacatttcatcatttcattgacatgagcccaggttttctttttttttggatggagtcttgctctgtcgcccaggctggagtgcagtagctcaatctcggctcactgcaagctccacctcccgggttcacgccattctcctgccttagcctcccaagtagctgggacaacaggcgcccaccaccactcccagctaattttttgtatttttagtagagacggggttttaccatgttagccgggatggtcttgatctcctgacctcatgatccgcccgcctcggcctcccaaagtgctgggattacaggtgtgagccactgcacccagccctcaggttttccctttttttacccctccttttgaaaatttgatgtggaattttgccacctgcagccagaagagttttaactaatcagtgccataaattttatatagttctccttgcaaaatgtggatcagcctttctcagcaaatcctttgtcataaagtgctgaattgtaagtttgtcatgagaatcacatgagatcatgcatgtgaagaacctggcattatcctcctcatagaaaaaaaccagtaaatattaactacaggaagcaaggaaggagtggggtgaggggaagaagaaggggtactgatttaaaagaaccctggagtcctaaggataatctaggaaccctcagacccaatccgatacccctattctaaatgctcctagtgccctgtaccttcccctcataagccttcattatcattgtaatgatatgtttatgtaatattttgattaatgtctctccttcactgacctagcagttctagcagggcagtgattttgctgtgttgcatccccagcacctagtctggtatgtggcattcagcatatgtttattgaatgaatggccatgtggttattcagatcctccttgattattggggttaggattgtggcagaagtggctcccaacacacatacacatacagagaattttgtctcaattagataattaacttctgcttggttgtaaaccaaaccactggttcttaaactttcattggatcattttattgaagaattaaatagtgtggttctggcctaatgtctgaagcttcanagagtgatangcttgtataacagcagcttcctgtctggcttataatcataactgagagcaacttctagcctacagattgtgagctagaagtgaaccgaggaagactgcgtgaactctatctacagacaagcgtgtgcagcactactatctcn

SEQ ID NO: 67143 - DNA, 2004 bp, Homo sapiens
ttccgggggggaggggcggcgaggcgaggcctgcggagcgggtgcgcgcgggcgggcacgtggggccctttcgtccccggcgtccgggcgccctgcatggatcccccaccccagctcctgctccccggcggcggccggtgggcagaaagaccgaaacccactcacggccgcctgccgaatcgcggctctgctgtttgtggggcgtgctagaaacgtggtcctaaaaagaatggcgtccatttacataatgctttgtttgcgtttcgcaagtttctttcggttaaagccacagaaaccccacctcctgcccttgtgtcgtttccaccgcggcacccttttccgacattagaaacaatagtgtacgcctgtggaggcctcgtttgttcaggggctgccggccagggcttcaggacgtttctgcggctttccccgcgcggcctgggctcccgcggctgcttttcgggcccatgggcgcagccactgcgccaggctcaaggggggcggccccgtcagggcccgccatcttggaaggccttttttgccggttcttcccgctgaggaagtgtcgctcaagacgctggcctatgagttgtgatttctgccttttccccttcctccttgggctaagccagaccagaaagggccccgtgcgcaacgtgcttcacaatctctcagggaaagcggctaacgtggcgctactccgcctcccctgttccttacccttggggcggccgccatgtttcctgaacacaaaatggcgacacgtggttagcattcgtcgccaacgagaaattggggtcggcccgaaagctctagaatgcacccctcttcctccccggggccttccacctccgcgagttttatgacttaaaaaagcccacaggctggtctgaaggtcggaggcctaattttaacgcgttttcctccctttaatttgaaacgggaacgcgaatgactgtaaaatgtgggcacaatatttaatctctcgcctttttaaagcttaatagtggataataggggggcagtatcaagggataatttgggtccccacagtaccaaagcatttagaaacctctgtttaatttaaggaatgagataagttactgcttttctagacttcctagcatgggctgttgtgctggagagaacgagagctacgaagagactacagtgcctctgactttttcataggacagttggccggtgaatcttattaatagtttaccacaattaagtgttcatttttagtctagaagggacaggcgtttattgtgcattggccagtgccagcacatccgatgcaaggcagttcaccgtattctatctttaatttttaccatggtcctctgaggtaggtgttcttatctctctctctctctctctcttttaaacaaggaagacaaacataaagatgaagtgcttaattcaaggtcacacaatgtcggggatggacctccagatttccttactgacctgcattatcttgtggatacctgagtgaattccacaccacccattttatagatgaaaccactgagacatggagcaattgactgagtagtcactgccccacccctgcctggagcctcacacatgactcgcctcctctcagtgaccacaggtgagacgtggtcttgtaacacagtggttaagaatgtgactttggagccagcctgctaggggctgaattctgactcagccatttactaactgtgtgaccttagtctgtctagtgactggtgttgtcataagaagagagggacacagagggaagatggccacatgaagatggaggcagagattgcagttatgctgctgcaaactaaggaatggctctggccctccaaggattgctgataaccaccagaaactagaagagacaaggaaggattcttccctagagccttcagagggagcatggccctactgacacctggatttcaaacttgtagcttcctaaactgcaagagaataaatttctgttgttttaagccaaataaaaag

SEQ ID NO: 67144 - DNA, 2015 bp, Homo sapiens
ttcggcacagggcgaggctgcggagaggaagacaaacataaagatgaagtgcttaattcaaggtcacacaatgtcggggatggacctccagatttccttactgaaaacaagctcagggctcccactgattgtacattatgagacggagtcttgctatgttgcccaggctggtcttgaactcctcacctcaagcgatcctcccgtcttggcctcccaagtgtcaggattacgggcatgtgctatcacacccaacctgatacattgcctttataaatttttttttctttattctaaaaaccagaaaaaacaaaactggatacatgtgcagaacatgcaggtgagacgtggtcttgtaacacagtggttaagaatgtgactttggagccagcctgctaggggctgaattctgactcagccatttactaactgtgtgaccttaggctggagtgcaatggcatgatctcggctcatcacaacctctgcttcctgggttcaagcgattctcctgcctcagcctcccgagtacctgggactacaggcactcgccaccatgcccggctgatttttgtatttttaatagagatggtttcactatgttggccaggctggtctcgaactcctgaccttgtgatctgcccacctcagcctcgaaaagtgctgggattacaggcgtgagccactgcgcccagccttgtattttttttcagtttgggtagctgtccctaattcatttgttaaaggagaagcaagagcaagaacctttaatctgttctcctcttccctaatttgaaagtagcttgttattttgaatatcactttctctgaaatagcacatctccatctcagagaatggatttaatgtttggatacagccaaaagtcatttcattaccaaaccatggggtgaatataccatgtaaagcagtttgggatcagaactcacagtctgaattgtaagtgatgagactgctgtctctctgctacagcttcttggctggctctgaaggctctttgaaggcagatcctaacaaggggactgctttgaagggccattgttcatttggaatgataaagtctatgttgttcaaaaaacaaatgcttgtagcaggtattttttcactccagactgagaatattggtgggatattgataaggggtactgaatggtaataaacatgtgctctagctctgtgctagtcagcttatttcagaactctagtttgattcagtttcttgcctctgactcaaaatggagggagagtgatttttacataagagaacacacccacatatccttttggcagcagctacctgccagagatgttgaagaagagtagccaacctttacacagcagatattgtgtgccagtcatagtcctaagtataataccttacatgtataaacttcttataaggttggtgctctgtaccgaattgaatagtatcccccaaaattcatgttgtcccagaacctatgaaagtgatcttacttgagggaggggggaggggggagggatagcattaggagatatacctaatgctaaatgacgagttaatgggtgtagcacaccagcatggcacatgtatacatatgtaactaacctgcacattgtgcacatgtaccctaaaacttaaagtataataataataaaataaaaaaaaaaaagaaagtgatcttacttggaaataaggtctttgcacatatgatcaagttgagatgaagttgtactggaaagtctgtctagtgactggtgttgtcataagaagagagggacacagagggaagatggccacatgaagatggaggcagagattgcagttatgctgctgcaaactaaggaatggctctggccctccaaggattgctgataaccaccagaaactagaagagacaaggaaggattcttccctagagccttcagagggagcatggccctactgacacctggatttcaaacttgtagcttcctaaactgcaagagaataaatttctgttgttttaagccaaataaaaag

SEQ ID NO: 67145 - DNA, 1404 bp, Homo sapiens
ttccgggggggaggggcggcgaggcgaggcctgcggagcgggtgcgcgcgggcgggcacgtggggccctttcgtccccggcgtccgggcgccctgcatggatcccccaccccagctcctgctccccggcggcggccggtgggcagaaagaccgaaacccactcacggccgcctgccgaatcgcggctctgctgtttgtggggcgtgctagaaacgtggtcctaaaaagaatggcgtccatttacataatgctttgtttgcgtttcgcaagtttctttcggttaaagccacagaaaccccacctcctgcccttgtgtcgtttccaccgcggcacccttttccgacattagaaacaatagtgtacgcctgtggaggcctcgtttgttcaggggctgccggccagggcttcaggacgtttctgcggctttccccgcgcggcctgggctcccgcggctgcttttcgggcccatgggcgcagccactgcgccaggctcaaggggggcggccccgtcagggcccgccatcttggaaggccttttttgccggttcttcccgctgaggaagtgtcgctcaagacgctggcctatgagttgtgatttctgccttttccccttcctccttgggctaagccagaccagaaagggccccgtgcgcaacgtgcttcacaatctctcagggaaagcggctaacgtggcgctactccgcctcccctgttccttacccttggggcggccgccatgtttcctgaacacaaaatggcgacacgtggttagcattcgtcgccaacgagaaattggggtcggcccgaaagctctagaatgcacccctcttcctccccggggccttccacctccgcgagttttatgacttaaaaaagcccacaggctggtctgaagacttcctagcatgggctgttgtgctggagagaacgagagctacgaagagactacagtgcctctgactttttcataggacagttggccgaggaagacaaacataaagatgaagtgcttaattcaaggtcacacaatgtcggggatggacctccagatttccttactgaaaacaagctcagggctcccactgattgtacattatgagacggagtcttgctatgttgcccaggctggtcttgaactcctcacctcaagcgatcctcccgtcttggcctcccaagtgtcaggattacgggcatgtgctatcacacccaacctgatacattgcctttataaatttttttttctttattctaaaaaccagaaaaaacaaaactggatacatgtgcagaacatgcaggtttgttacatagctgtacgtgtgccatggtggtttgctgcacctattgacctatcctgtaagttccctcccctcacccccaccccccaacagccctgaagtgtcaacg

SEQ ID NO: 67146 - DNA, 247 bp, Homo sapiens
ttccttttgggtaccacatccttccccactctcagaccagattctggtgggataagtcccttggaggacacatgactgtggtcagagaatagcaattgacgtgggcatggttccaaatccaggccaatcacgactctggatttctgttggaactgttaagaaagtgacctcatttcttttccaggtgggttcccaagcctgtaaaatgtaagccttatgctgctgagggccatcttgccaccctgag

SEQ ID NO: 67147 - DNA, 3767 bp, Homo sapiens
ttccgggggggaggggcggcgaggcgaggcctgcggagcgggtgcgcgcgggcgggcacgtggggccctttcgtccccggcgtccgggcgccctgcatggatcccccaccccagctcctgctccccggcggcggccggtgggcagaaagaccgaaacccactcacggccgcctgccgaatcgcggctctgctgtttgtggggcgtgctagaaacgtggtcctaaaaagaatggcgtccatttacataatgctttgtttgcgtttcgcaagtttctttcggttaaagccacagaaaccccacctcctgcccttgtgtcgtttccaccgcggcacccttttccgacattagaaacaatagtgtacgcctgtggaggcctcgtttgttcaggggctgccggccagggcttcaggacgtttctgcggctttccccgcgcggcctgggctcccgcggctgcttttcgggcccatgggcgcagccactgcgccaggctcaaggggggcggccccgtcagggcccgccatcttggaaggccttttttgccggttcttcccgctgaggaagtgtcgctcaagacgctggcctatgagttgtgatttctgccttttccccttcctccttgggctaagccagaccagaaagggccccgtgcgcaacgtgcttcacaatctctcagggaaagcggctaacgtggcgctactccgcctcccctgttccttacccttggggcggccgccatgtttcctgaacacaaaatggcgacacgtggttagcattcgtcgccaacgagaaattggggtcggcccgaaagctctagaatgcacccctcttcctccccggggccttccacctccgcgagttttatgacttaaaaaagcccacaggctggtctgaaggtcggaggcctaattttaacgcgttttcctccctttaatttgaaacgggaacgcgaatgactgtaaaatgtgggcacaatatttaatctctcgcctttttaaagcttaatagtggataataggggggcagtatcaagggataatttgggtccccacagtaccaaagcatttagaaacctctgtttaatttaaggaatgagataagttactgcttttctagacttcctagcatgggctgttgtgctggagagaacgagagctacgaagagactacagtgcctctgactttttcataggacagttggccggtgaatcttattaatagtttaccacaattaagtgttcatttttagtctagaagggacaggcgtttattgtgcattggccagtgccagcacatccgatgcaaggcagttcaccgtattctatctttaatttttaccatggtcctctgaggtaggtgttcttatctctctctctctctctctcttttaaacaaggaagacaaacataaagatgaagtgcttaattcaaggtcacacaatgtcggggatggacctccagatttccttactgacctgcattatcttgtggatacctgagtgaattccacaccacccattttatagatgaaaccactgagacatggagcaattgactgagtagtcactgccccacccctgcctggagcctcacacatgactcgcctcctctcagtgaccacaggttggttgaggggtttaacaaggctaagaaggtgagacgtggtcttgtaacacagtggttaagaatgtgactttggagccagcctgctaggggctgaattctgactcagccatttactaactgtgtgaccttagggaggaggacctggttgatagaagaatttatctcgtagtcttaacatccactgtaattccaaactttgaggacgatagagatcagtgggctttgactgcccagcatgcagtctccattcttaggtgggttcccaagcctgtaaaatgtaagccttatgctgctgagggccatcttgccaccctgagggaaacgctgcctgagaatgaaacaagcataagtaaaagctgagctgtgagatggagcaagatgaaggccacatgacatctttggagcacctggatctaactgtgccttaagctagtctaaccctgaacatttcatcatttcattgacatgagcccaggttttctttttttttggatggagtcttgctctgtcgcccaggctggagtgcagtagctcaatctcggctcactgcaagctccacctcccgggttcacgccattctcctgccttagcctcccaagtagctgggacaacaggcgcccaccaccactcccagctaattttttgtatttttagtagagacggggttttaccatgttagccgggatggtcttgatctcctgacctcatgatccgcccgcctcggcctcccaaagtgctgggattacaggtgtgagccactgcacccagccctcaggttttccctttttttacccctccttttgaaaatttgatgtggaattttgccacctgcagccagaagagttttaactaatcagtgccataaattttatatagttctccttgcaaaatgtggatcagcctttctcagcaaatcctttgtcataaagtgctgaattgtaagtttgtcatgagaatcacatgagatcatgcatgtgaagaacctggcattatcctcctcatagaaaaaaaccagtaaatattaactacaggaagcaaggaaggagtggggtgaggggaagaagaaggggtactgatttaaaagaaccctggagtcctaaggataatctaggaaccctcagacccaatccgatacccctattctaaatgctcctagtgccctgtaccttcccctcataagccttcattatcattgtaatgatatgtttatgtaatattttgattaatgtctctccttcactgacctagcagttctagcagggcagtgattttgctgtgttgcatccccagcacctagtctggtatgtggcattcagcatatgtttattgaatgaatggccatgtggttattcagatcctccttgattattggggttaggattgtggcagaagtggctcccaacacacatacacatacagagaattttgtctcaattagataattaacttctgcttggttgtaaaccaaaccactggttcttaaactttcattggatcattttattgaagaattaaatagtgtggttctggcctaatgtctggaaagccttgcagaggagtggattaggtctttgtgataacaggcagccttccctgctcctgtgtctttataaaatctatttaactggagtagtccaccctccctcaggctcttacaggaatatgttggaggctgtaggaaggtgggaaaccgagagggaaaggactgggccgctggagacttcactcattccctagcaagaaacaaaagcagtaaaaggtggcccgaggacaacctgaagctcactccttcagcacttttggctggaggtcacttgttggagccccactcagagctcagcacaccaccccaccagcagcctcctcctcccagctgaggctgcatttcatcccttcccccagcctgctttccctgagataggggagtgtttcccagggcccatgtgacttccactggcaagtgacgattaccaatggtttactagtcagtgaaactaccaaaggcttttgtgctgtagtaatccttttcctgtttaaaactctggggattttctaatgttgccaatagtttttcaagtcagcaattactgtgtggattatgtaatggctcggtattaaaaatagaaaagacaaaaaaaagcat

SEQ ID NO: 67148 - DNA, 3322 bp, Homo sapiens
ttccgggggggaggggcggcgaggcgaggcctgcggagcgggtgcgcgcgggcgggcacgtggggccctttcgtccccggcgtccgggcgccctgcatggatcccccaccccagctcctgctccccggcggcggccggtgggcagaaagaccgaaacccactcacggccgcctgccgaatcgcggctctgctgtttgtggggcgtgctagaaacgtggtcctaaaaagaatggcgtccatttacataatgctttgtttgcgtttcgcaagtttctttcggttaaagccacagaaaccccacctcctgcccttgtgtcgtttccaccgcggcacccttttccgacattagaaacaatagtgtacgcctgtggaggcctcgtttgttcaggggctgccggccagggcttcaggacgtttctgcggctttccccgcgcggcctgggctcccgcggctgcttttcgggcccatgggcgcagccactgcgccaggctcaaggggggcggccccgtcagggcccgccatcttggaaggccttttttgccggttcttcccgctgaggaagtgtcgctcaagacgctggcctatgagttgtgatttctgccttttccccttcctccttgggctaagccagaccagaaagggccccgtgcgcaacgtgcttcacaatctctcagggaaagcggctaacgtggcgctactccgcctcccctgttccttacccttggggcggccgccatgtttcctgaacacaaaatggcgacacgtggttagcattcgtcgccaacgagaaattggggtcggcccgaaagctctagaatgcacccctcttcctccccggggccttccacctccgcgagttttatgacttaaaaaagcccacaggctggtctgaagaggaagacaaacataaagatgaagtgcttaattcaaggtcacacaatgtcggggatggacctccagatttccttactgacctgcattatcttgtggatacctgagtgaattccacaccacccattttatagatgaaaccactgagacatggagcaattgactgagtagtcactgccccacccctgcctggagcctcacacatgactcgcctcctctcagtgaccacaggttggttgaggggtttaacaaggctaagaaggtgagacgtggtcttgtaacacagtggttaagaatgtgactttggagccagcctgctaggggctgaattctgactcagccatttactaactgtgtgaccttagggaggaggacctggttgatagaagaatttatctcgtagtcttaacatccactgtaattccaaactttgaggacgatagagatcagtgggctttgactgcccagcatgcagtctccattcttaggtgggttcccaagcctgtaaaatgtaagccttatgctgctgagggccatcttgccaccctgagggaaacgctgcctgagaatgaaacaagcataagtaaaagctgagctgtgagatggagcaagatgaaggccacatgacatctttggagcacctggatctaactgtgccttaagctagtctaaccctgaacatttcatcatttcattgacatgagcccaggttttctttttttttggatggagtcttgctctgtcgcccaggctggagtgcagtagctcaatctcggctcactgcaagctccacctcccgggttcacgccattctcctgccttagcctcccaagtagctgggacaacaggcgcccaccaccactcccagctaattttttgtatttttagtagagacggggttttaccatgttagccgggatggtcttgatctcctgacctcatgatccgcccgcctcggcctcccaaagtgctgggattacaggtgtgagccactgcacccagccctcaggttttccctttttttacccctccttttgaaaatttgatgtggaattttgccacctgcagccagaagagttttaactaatcagtgccataaattttatatagttctccttgcaaaatgtggatcagcctttctcagcaaatcctttgtcataaagtgctgaattgtaagtttgtcatgagaatcacatgagatcatgcatgtgaagaacctggcattatcctcctcatagaaaaaaaccagtaaatattaactacaggaagcaaggaaggagtggggtgaggggaagaagaaggggtactgatttaaaagaaccctggagtcctaaggataatctaggaaccctcagacccaatccgatacccctattctaaatgctcctagtgccctgtaccttcccctcataagccttcattatcattgtaatgatatgtttatgtaatattttgattaatgtctctccttcactgacctagcagttctagcagggcagtgattttgctgtgttgcatccccagcacctagtctggtatgtggcattcagcatatgtttattgaatgaatggccatgtggttattcagatcctccttgattattggggttaggattgtggcagaagtggcaaaatcagggagagtagtccctgtcccctctgtatcttatacactgcccacactcccaacacacatacacatacagagaattttgtctcaattagataattaacttctgcttggttgtaaaccaaaccactggttcttaaactttcattggatcattttattgaagaattaaatagtgtggttctggcctaatgtctggaaagccttgcagaggagtggattaggtctttgtgataacaggcagccttccctgctcctgtgtctttataaaatctatttaactggagtagtccaccctccctcaggctcttacaggaatatgttggaggctgtaggaaggtgggaaaccgagagggaaaggactgggccgctggagacttcactcattccctagcaagaaacaaaagcagtaaaaggtggcccgaggacaacctgaagctcactccttcagcacttttggctggaggtcacttgttggagccccactcagagctcagcacaccaccccaccagcagcctcctcctcccagctgaggctgcatttcatcccttcccccagcctgctttccctgagataggggagtgtttcccagggcccatgtgacttccactggcaagtgacgattaccaatggtttactagtcagtgaaactaccaaaggcttttgtgctgtagtaatccttttcctgtttaaaactctggggattttctaatgttgccaatagtttttcaagtcagcaattactgtgtggattatgtaatggctcggtattaaaaatagaaaagacaaaaaaaagcat

SEQ ID NO: 67149 - DNA, 3013 bp, Homo sapiens
ttccgggggggaggggcggcgaggcgaggcctgcggagcgggtgcgcgcgggcgggcacgtggggccctttcgtccccggcgtccgggcgccctgcatggatcccccaccccagctcctgctccccggcggcggccggtgggcagaaagaccgaaacccactcacggccgcctgccgaatcgcggctctgctgtttgtggggcgtgctagaaacgtggtcctaaaaagaatggcgtccatttacataatgctttgtttgcgtttcgcaagtttctttcggttaaagccacagaaaccccacctcctgcccttgtgtcgtttccaccgcggcacccttttccgacattagaaacaatagtgtacgcctgtggaggcctcgtttgttcaggggctgccggccagggcttcaggacgtttctgcggctttccccgcgcggcctgggctcccgcggctgcttttcgggcccatgggcgcagccactgcgccaggctcaaggggggcggccccgtcagggcccgccatcttggaaggccttttttgccggttcttcccgctgaggaagtgtcgctcaagacgctggcctatgagttgtgatttctgccttttccccttcctccttgggctaagccagaccagaaagggccccgtgcgcaacgtgcttcacaatctctcagggaaagcggctaacgtggcgctactccgcctcccctgttccttacccttggggcggccgccatgtttcctgaacacaaaatggcgacacgtgaggaagacaaacataaagatgaagtgcttaattcaaggtcacacaatgtcggggatggacctccagatttccttactggtgagacgtggtcttgtaacacagtggttaagaatgtgactttggagccagcctgctaggggctgaattctgactcagccatttactaactgtgtgaccttagggaggaggacctggttgatagaagaatttatctcgtagtcttaacatccactgtaattccaaactttgaggacgatagagatcagtgggctttgactgcccagcatgcagtctccattcttaggtgggttcccaagcctgtaaaatgtaagccttatgctgctgagggccatcttgccaccctgagggaaacgctgcctgagaatgaaacaagcataagtaaaagctgagctgtgagatggagcaagatgaaggccacatgacatctttggagcacctggatctaactgtgccttaagctagtctaaccctgaacatttcatcatttcattgacatgagcccaggttttctttttttttggatggagtcttgctctgtcgcccaggctggagtgcagtagctcaatctcggctcactgcaagctccacctcccgggttcacgccattctcctgccttagcctcccaagtagctgggacaacaggcgcccaccaccactcccagctaattttttgtatttttagtagagacggggttttaccatgttagccgggatggtcttgatctcctgacctcatgatccgcccgcctcggcctcccaaagtgctgggattacaggtgtgagccactgcacccagccctcaggttttccctttttttacccctccttttgaaaatttgatgtggaattttgccacctgcagccagaagagttttaactaatcagtgccataaattttatatagttctccttgcaaaatgtggatcagcctttctcagcaaatcctttgtcataaagtgctgaattgtaagtttgtcatgagaatcacatgagatcatgcatgtgaagaacctggcattatcctcctcatagaaaaaaaccagtaaatattaactacaggaagcaaggaaggagtggggtgaggggaagaagaaggggtactgatttaaaagaaccctggagtcctaaggataatctaggaaccctcagacccaatccgatacccctattctaaatgctcctagtgccctgtaccttcccctcataagccttcattatcattgtaatgatatgtttatgtaatattttgattaatgtctctccttcactgacctagcagttctagcagggcagtgattttgctgtgttgcatccccagcacctagtctggtatgtggcattcagcatatgtttattgaatgaatggccatgtggttattcagatcctccttgattattggggttaggattgtggcagaagtggcaaaatcagggagagtagtccctgtcccctctgtatcttatacactgcccacactcccaacacacatacacatacagagaattttgtctcaattagataattaacttctgcttggttgtaaaccaaaccactggttcttaaactttcattggatcattttattgaagaattaaatagtgtggttctggcctaatgtctggaaagccttgcagaggagtggattaggtctttgtgataacaggcagccttccctgctcctgtgtctttataaaatctatttaactggagtagtccaccctccctcaggctcttacaggaatatgttggaggctgtaggaaggtgggaaaccgagagggaaaggactgggccgctggagacttcactcattccctagcaagaaacaaaagcagtaaaaggtggcccgaggacaacctgaagctcactccttcagcacttttggctggaggtcacttgttggagccccactcagagctcagcacaccaccccaccagcagcctcctcctcccagctgaggctgcatttcatcccttcccccagcctgctttccctgagataggggagtgtttcccagggcccatgtgacttccactggcaagtgacgattaccaatggtttactagtcagtgaaactaccaaaggcttttgtgctgtagtaatccttttcctgtttaaaactctggggattttctaatgttgccaatagtttttcaagtcagcaattactgtgtggattatgtaatggctcggtattaaaaatagaaaagacaaaaaaaagcat

SEQ ID NO: 67150 - DNA, 2612 bp, Homo sapiens
ttccgggggggaggggcggcgaggcgaggcctgcggagcgggtgcgcgcgggcgggcacgtggggccctttcgtccccggcgtccgggcgccctgcatggatcccccaccccagctcctgctccccggcggcggccggtgggcagaaagaccgaaacccactcacggccgcctgccgaatcgcggctctgctgtttgtggggcgtgctagaaacgtggtcctaaaaagaatggcgtccatttacataatgctttgtttgcgtttcgcaagtttctttcggttaaagccacagaaaccccacctcctgcccttgtgtcgtttccaccgcggcacccttttccgacattagaaacaatagtgtacgcctgtggaggcctcgtttgttcaggggctgccggccagggcttcaggacgtttctgcggctttccccgcgcggcctgggctcccgcggctgcttttcgggcccatgggcgcagccactgcgccaggctcaaggggggcggccccgtcagggcccgccatcttggaaggccttttttgccggttcttcccgctgaggaagtgtcgctcaagacgctggcctatgagttgtgatttctgccttttccccttcctccttgggctaagccagaccagaaagggccccgtgcgcaacgtgcttcacaatctctcagggaaagcggctaacgtggcgctactccgcctcccctgttccttacccttggggcggccgccatgtttcctgaacacaaaatggcgacacgtggttagcattcgtcgccaacgagaaattggggtcggcccgaaagctctagaatgcacccctcttcctccccggggccttccacctccgcgagttttatgacttaaaaaagcccacaggctggtctgaaggtcggaggcctaattttaacgcgttttcctccctttaatttgaaacgggaacgcgaatgactgtaaaatgtgggcacaatatttaatctctcgcctttttaaagcttaatagtggataataggggggcagtatcaagggataatttgggtccccacagtaccaaagcatttagaaacctctgtttaatttaaggaatgagataagttactgcttttctagacttcctagcatgggctgttgtgctggagagaacgagagctacgaagagactacagtgcctctgactttttcataggacagttggccggtgaatcttattaatagtttaccacaattaagtgttcatttttagtctagaagggacaggcgtttattgtgcattggccagtgccagcacatccgatgcaaggcagttcaccgtattctatctttaatttttaccatggtcctctgaggtaggtgttcttatctctctctctctctctctcttttaaacaaggaagacaaacataaagatgaagtgcttaattcaaggtcacacaatgtcggggatggacctccagatttccttactgacctgcattatcttgtggatacctgagtgaattccacaccacccattttatagatgaaaccactgagacatggagcaattgactgagtagtcactgccccacccctgcctggagcctcacacatgactcgcctcctctcagtgaccacaggttggttgaggggtttaacaaggctaagaaggtgagacgtggtcttgtaacacagtggttaagaatgtgactttggagccagcctgctaggggctgaattctgactcagccatttactaactgtgtgaccttaggctggagtgcaatggcatgatctcggctcatcacaacctctgcttcctgggttcaagcgattctcctgcctcagcctcccgagtacctgggactacaggcactcgccaccatgcccggctgatttttgtatttttaatagagatggtttcactatgttggccaggctggtctcgaactcctgaccttgtgatctgcccacctcagcctcgaaaagtgctgggattacaggcgtgagccactgcgcccagccttgtattttttttcagtttgggtagctgtccctaattcatttgttaaaggagaagcaagagcaagaacctttaatctgttctcctcttccctaatttgaaagtagcttgttattttgaatatcactttctctgaaatagcacatctccatctcagagaatggatttaatgtttggatacagccaaaagtcatttcattaccaaaccatggggtgaatataccatgtaaagcagtttgggatcagaactcacagtctgaattgtaagtgatgagactgctgtctctctgctacagcttcttggctggctctgaaggctctttgaaggcagatcctaacaaggggactgctttgaagggccattgttcatttggaatgataaagtctatgttgttcaaaaaacaaatgcttgtagcaggtattttttcactccagactgagaatattggtgggatattgataaggggtactgaatggtaataaacatgtgctctagctctgtgctagtcagcttatttcagaactctagtttgattcagtttcttgcctctgactcaaaatggagggagagtgatttgtttcatgacacccggaccgagctcgatctc

SEQ ID NO: 67151 - DNA, 2422 bp, Homo sapiens
ttccgggggggaggggcggcgaggcgaggcctgcggagcgggtgcgcgcgggcgggcacgtggggccctttcgtccccggcgtccgggcgccctgcatggatcccccaccccagctcctgctccccggcggcggccggtgggcagaaagaccgaaacccactcacggccgcctgccgaatcgcggctctgctgtttgtggggcgtgctagaaacgtggtcctaaaaagaatggcgtccatttacataatgctttgtttgcgtttcgcaagtttctttcggttaaagccacagaaaccccacctcctgcccttgtgtcgtttccaccgcggcacccttttccgacattagaaacaatagtgtacgcctgtggaggcctcgtttgttcaggggctgccggccagggcttcaggacgtttctgcggctttccccgcgcggcctgggctcccgcggctgcttttcgggcccatgggcgcagccactgcgccaggctcaaggggggcggccccgtcagggcccgccatcttggaaggccttttttgccggttcttcccgctgaggaagtgtcgctcaagacgctggcctatgagttgtgatttctgccttttccccttcctccttgggctaagccagaccagaaagggccccgtgcgcaacgtgcttcacaatctctcagggaaagcggctaacgtggcgctactccgcctcccctgttccttacccttggggcggccgccatgtttcctgaacacaaaatggcgacacgtggttagcattcgtcgccaacgagaaattggggtcggcccgaaagctctagaatgcacccctcttcctccccggggccttccacctccgcgagttttatgacttaaaaaagcccacaggctggtctgaaggtcggaggcctaattttaacgcgttttcctccctttaatttgaaacgggaacgcgaatgactgtaaaatgtgggcacaatatttaatctctcgcctttttaaagcttaatagtggataataggggggcagtatcaagggataatttgggtccccacagtaccaaagcatttagaaacctctgtttaatttaaggaatgagataagttactgcttttctagacttcctagcatgggctgttgtgctggagagaacgagagctacgaagagactacagtgcctctgactttttcataggacagttggccggtgaatcttattaatagtttaccacaattaagtgttcatttttagtctagaagggacaggcgtttattgtgcattggccagtgccagcacatccgatgcaaggcagttcaccgtattctatctttaatttttaccatggtcctctgaggtaggtgttcttatctctctctctctctctctcttttaaacaaggaagacaaacataaagatgaagtgcttaattcaaggtcacacaatgtcggggatggacctccagatttccttactgacctgcattatcttgtggatacctgagtgaattccacaccacccattttatagatgaaaccactgagacatggagcaattgactgagtagtcactgccccacccctgcctggagcctcacacatgactcgcctcctctcagtgaccacagatggagtcttgctgtgtcaccaggatggagtgcagtggcgcaatctcggctcactgcaacctctgcttcccgggttcaagtgattctcctgcctcagcaacccgagtagctggcactacaggaaaacaagctcagggctcccactgattgtacattatgagacggagtcttgctatgttgcccaggctggtcttgaactcctcacctcaagcgatcctcccgtcttggcctcccaagtgtcaggattacgggcatgtgctatcacacccaacctgatacattgcctttataaatttttttttctttattctaaaaaccagaaaaaacaaaactggatacatgtgcagaacatgcagaccaagtgtgttggggacttgagatgcgtacatgagtgtgatgtttcctgctgaaagcacaggtgagacgtggtcttgtaacacagtggttaagaatgtgactttggagccagcctgctaggggctgaattctgactcagccatttactaactgtgtgaccttagtctgtctagtgactggtgttgtcataagaagagagggacacagagggaagatggccacatgaagatggaggcagagattgcagttatgctgctgcaaactaaggaatggctctggccctccaaggattgctgataaccaccagaaactagaagagacaaggaaggattcttccctagagccttcagagggagcatggccctactgacacctggatttcaaacttgtagcttcctaaactgcaagagaataaatttctgttgttttaagccaaataaaaag

SEQ ID NO: 67152 - DNA, 1814 bp, Homo sapiens
ttccgggggggaggggcggcgaggcgaggcctgcggagcgggtgcgcgcgggcgggcacgtggggccctttcgtccccggcgtccgggcgccctgcatggatcccccaccccagctcctgctccccggcggcggccggtgggcagaaagaccgaaacccactcacggccgcctgccgaatcgcggctctgctgtttgtggggcgtgctagaaacgtggtcctaaaaagaatggcgtccatttacataatgctttgtttgcgtttcgcaagtttctttcggttaaagccacagaaaccccacctcctgcccttgtgtcgtttccaccgcggcacccttttccgacattagaaacaatagtgtacgcctgtggaggcctcgtttgttcaggggctgccggccagggcttcaggacgtttctgcggctttccccgcgcggcctgggctcccgcggctgcttttcgggcccatgggcgcagccactgcgccaggctcaaggggggcggccccgtcagggcccgccatcttggaaggccttttttgccggttcttcccgctgaggaagtgtcgctcaagacgctggcctatgagttgtgatttctgccttttccccttcctccttgggctaagccagaccagaaagggccccgtgcgcaacgtgcttcacaatctctcagggaaagcggctaacgtggcgctactccgcctcccctgttccttacccttggggcggccgccatgtttcctgaacacaaaatggcgacacgtggttagcattcgtcgccaacgagaaattggggtcggcccgaaagctctagaatgcacccctcttcctccccggggccttccacctccgcgagttttatgacttaaaaaagcccacaggctggtctgaaggtcggaggcctaattttaacgcgttttcctccctttaatttgaaacgggaacgcgaatgactgtaaaatgtgggcacaatatttaatctctcgcctttttaaagcttaatagtggataataggggggcagtatcaagggataatttgggtccccacagtaccaaagcatttagaaacctctgtttaatttaaggaatgagataagttactgcttttctagacttcctagcatgggctgttgtgctggagagaacgagagctacgaagagactacagtgcctctgactttttcataggacagttggccggtgaatcttattaatagtttaccacaattaagtgttcatttttagtctagaagggacaggcgtttattgtgcattggccagtgccagcacatccgatgcaaggcagttcaccgtattctatctttaatttttaccatggtcctctgaggtaggtgttcttatctctctctctctctctctcttttaaacaaggaagacaaacataaagatgaagtgcttaattcaaggtcacacaatgtcggggatggacctccagatttccttactgaaaacaagctcagggctcccactgattgtacattatgagacggagtcttgctatgttgcccaggctggtcttgaactcctcacctcaagcgatcctcccgtcttggcctcccaagtgtcaggattacgggcatgtgctatcacacccaacctgatacattgcctttataaatttttttttctttattctaaaaaccagaaaaaacaaaactggatacatgtgcagaacatgcaggtttgttacatagctgtacgtgtgccatggtggtttgctgcacctattgacctatcctgtaagttccctcccctcacccccaccccccaacagccctgaagtgtcaacg

SEQ ID NO: 67153 - DNA, 711 bp, Homo sapiens
ttccgggggggaggggcggcgaggcgaggcctgcggagcgggtgcgcgcgggcgggcacgtggggccctttcgtccccggcgtccgggcgccctgcatggatcccccaccccagctcctgctccccggcggcggccggtgggcagaaagaccgaaacccactcacggccgcctgccgaatcgcggctctgctgtttgtggggcgtgctagaaacgtggtcctaaaaagaatggcgtccatttacataatgctttgtttgcgtttcgcaagtttctttcggttaaagccacagaaaccccacctcctgcccttgtgtcgtttccaccgcggcacccttttccgacattagaaacaatagtgtacgcctgtggaggcctcgtttgttcaggggctgccggccagggcttcaggacgtttctgcggctttccccgcgcggcctgggctcccgcggctgctctttagatgcatgcgagcagattcagattcagggtaaagtaggagggcaccgagagtgagccccatcatgtcaggcttgagcttccggttggtaaaggtgagtacacgtgtcagctaaagaggaagcccaatgaagggagataggaacccagtcactttggtctgtgcaagaagggacaagaaagatggacacgttcgccacttgtgtcctttctcgcagggaatttggttcaggaggggttacaaagcataaa

SEQ ID NO: 67154 - DNA, 436 bp, Homo sapiens
ctttttggttcttatactaagtttctccaagtttcatcattagtttaagtattttaatctgattttaactgccttactgattccccaagggtttgtttccccttttttcaactaagttaagaacttctagactatatacttaaaattgtagttaattgagatcggccacagttgaatttcttagctatgtaacaggattttcatttgaagctatttattcctgacaatctctactcttaaagtgtggagttctcttaaaggggctgtttttcagtgaaaatttccagatactcctcaaatgtgtttcaacattagccaggaatcaggaggaaatagagctcctgggatgctattatttcaaacccaggtagatgctccaagtttttcccagtggtctcagtaaaagtaggctgtctatctactaccgtgttgctcc

SEQ ID NO: 67155 - DNA, 3203 bp, Homo sapiens
agtgtgataaatgtagaaaagcctttattcatagatcatcgcttactaaacatgagaaaacacataaaggagagggagctttccctaatggaacagatcaaggaatttatcctggaaagaaacaccatgaatgtaccgactgtgggaaaacctttctctggaagacacagcttactgagcatcagagaattcacactggggagaaaccctttgaatgcaatgtatgtggaaaggccttcaggcatagctcatctcttggtcagcatgagaatgctcataccggagagaaaccctatcagtgtagtctctgtgggaaagccttccagcgcagctcctcccttgttcaacaccagcgaattcacactggagagaaaccctatcgatgtaatctatgtgggaggtcctttaggcatggcacatccctcactcaacacgaggtcacacacagtggagagaagcccttccagtgtaaggaatgtgggaaagcctttagtcgatgttcttcccttgtccaacatgagaggactcatactggagagaaaccttttgaatgtagcatatgtgggagggcttttggtcagagcccatccctttataaacatatgaggattcataagagaggcaaaccttaccaaagcagtaactacagcatagatttcaagcacagcacatctctcactcaagatgaaagcactcttaccgaagtgaaatcctaccattgtaatgactgtggggaagactttagtcacattacagactttactgaccatcagaggatccatactgcagagaacccctatgattgtgagcaggcttttagtcagcaagctatttctcatcctggagagaaaccctatcaatgtaatgtatgtgggaaagctttcaaaaggagtacaagtttcatagagcatcacagaattcatactggagagaaaccctatgaatgtaatgagtgtggagaagcctttagtcgacgctcatcgcttactcaacatgagagaacccacactggagagaaaccctatgaatgtattgactgtgggaaagcctttagtcaaagttcatctctcattcagcatgagagaactcatactggagagaagccctatgaatgtaatgaatgtgggagagccttccgaaaaaaaaccaacctgcatgatcatcagagaattcatactggagaaaaaccctattcttgtaaggaatgtgggaaaaacttcagccgaagttcagctcttactaaacaccagagaattcatactcgaaataaactctaggaaccgtgaaattaaggaatttgcagaatgctttagctaaaatgttctgattcaggatcagaggattcttagagagcttgggaatgtaatgaattacgtgtgtgtttatacgttgtgtgtggagaaaactgccagtagacagatttttttttttttttaacataaagacacattctcagatctgattacagactagtgtaaaaacagctacatgtatgtagctggttggggatgatatgcctgtatgttggactttgcttttgaatatatgtatgcaggatatcatcaagtttcaacatcttgacttgtgacccccaatgtcaacagcttttttaaaaaacaaattcctgcagtaatgaccaaaacccattttaaaaattgcttgacaactgcactcaactgcagctcttacattaacttcaccatggaaaccagttccaactccaggaagtcaccattcaaagaattagatcaactagcccaaccacttcattgtacagatgaagactgaaagccaaagatgtgaagtggtttccacagtatgatacagcctataagggtaaagctgggttaaaaatgcaggtttcctggatttggggccccatggccttgccagtgaaaaggttatttttggactcagagggctttaaaataaattttaagatgtatcagatacacaaacatttaatgggcacctatgggttggacactttgagaattcttaaaagtataagtgggagcaaaatgtatgcaaatttatcacaaactatttaaagcaacttcttggaggcttacaaaccacaatttaacagaaactgtagatggttgaactactagtgacttttttccccttttcccagttacaattatactttcagctaacatatgccagtttcacagaactattaagtccccttattgtactttttatggcatgcccatgaaaaagcactttcttaagcctacagtatcagatcaatgggaaaacaacagaaaactaagaggagaattttcccgttaattttcttgcagaaaagtataagtctaattgcccattgccataaattttgtcttgtactcagagaagcaacatgcactggctcattttatgtgcaaagaaaagatttcaccattaaaaaaattaacttggctaggtatggtgtctcacacctgtaatcccagcactttgggtggctaaggcagatagactgcttgaacccaggagttcaagaccagcctggacaacatggtgaaaccccatctctttaaaaaaaaaaaaaaatccaaaaattagctgggcatggtggcatgcagtggtagtcccagctactcaggaggctgaggtgggaggatcactggaacccgggagcagagactgcagtgagctgagatcacactactgcattccagcctgagcaacagagcaagacacacacacacatcaatttattttagttgtataatgcttttctattagtaaagcatcagctaagcttcagtggcctgctccatcccctaatgactcccatgggctatcctaaaggaacttccagaacctttgttggtgtgttgacattgaccatgcagaccaatttgggcacaactggacattgattccttttacacaagagctgcctcccaaagatagataaattttcccagccctaaatatgaatcatggggcaagatattggtcgtattgatggtgaacctttcctactggattctttgcatgccacatagcaggattcattgcctttctctcatcatggatggcatgcagcagcacccaagtattcttcattctttgcagggaaaaaattgtgcatgggggctgaaatgtaatatgtgtagctcaattagtctctcctctcagaagggcagatctgccattgaatattccattttgcatcacagaggtcgagc

SEQ ID NO: 67156 - DNA, 3874 bp, Homo sapiens
agtgtgataaatgtagaaaagcctttattcatagatcatcgcttactaaacatgagaaaacacataaaggagagggagctttccctaatggaacagatcaaggaatttatcctggaaagaaacaccatgaatgtaccgactgtgggaaaacctttctctggaagacacagcttactgagcatcagagaattcacactggggagaaaccctttgaatgcaatgtatgtggaaaggccttcaggcatagctcatctcttggtcagcatgagaatgctcataccggagagaaaccctatcagtgtagtctctgtgggaaagccttccagcgcagctcctcccttgttcaacaccagcgaattcacactggagagaaaccctatcgatgtaatctatgtgggaggtcctttaggcatggcacatccctcactcaacacgaggtcacacacagtggagagaagcccttccagtgtaaggaatgtgggaaagcctttagtcgatgttcttcccttgtccaacatgagaggactcatactggagagaaaccttttgaatgtagcatatgtgggagggcttttggtcagagcccatccctttataaacatatgaggattcataagagaggcaaaccttaccaaagcagtaactacagcatagatttcaagcacagcacatctctcactcaagatgaaagcactcttaccgaagtgaaatcctaccattgtaatgactgtggggaagactttagtcacattacagactttactgaccatcagaggatccatactgcagagaacccctatgattgtgagcaggcttttagtcagcaagctatttctcatcctggagagaaaccctatcaatgtaatgtatgtgggaaagctttcaaaaggagtacaagtttcatagagcatcacagaattcatactggagagaaaccctatgaatgtaatgagtgtggagaagcctttagtcgacgctcatcgcttactcaacatgagagaacccacactggagagaaaccctatgaatgtattgactgtgggaaagcctttagtcaaagttcatctctcattcagcatgagagaactcatactggagagaagccctatgaatgtaatgaatgtgggagagccttccgaaaaaaaaccaacctgcatgatcatcagagaattcatactggagaaaaaccctattcttgtaaggaatgtgggaaaaacttcagccgaagttcagctcttactaaacaccagagaattcatactcgaaataaactctaggaaccgtgaaattaaggaatttgcagaatgctttagctaaaatgttctgattcaggatcagaggattcttagagagcttgggaatgtaatgaattacgtgtgtgtttatacgttgtgtgtggagaaaactgccagtagacagatttttttttttttttaacataaagacacattctcagatctgattacagactagtgtaaaaacagctacatgtatgtagctggttggggatgatatgcctgtatgttggactttgcttttgaatatatgtatgcaggatatcatcaagtttcaacatcttgacttgtgacccccaatgtcaacagcttttttaaaaaacaaattcctgcagtaatgaccaaaacccattttaaaaattgcttgacaactgcactcaactgcagctcttacattaacttcaccatggaaaccagttccaactccaggaagtcaccattcaaagaattagatcaactagcccaaccacttcattgtacagatgaagactgaaagccaaagatgtgaagtggtttccacagtatgatacagcctataagggtaaagctgggttaaaaatgcaggtttcctggatttggggccccatggccttgccagtgaaaaggttatttttggactcagagggctttaaaataaattttaagatgtatcagatacacaaacatttaatgggcacctatgggttggacactttgagaattcttaaaagtataagtgggagcaaaatgtatgcaaatttatcacaaactatttaaagcaacttcttggaggcttacaaaccacaatttaacagaaactgtagatggttgaactactagtgacttttttccccttttcccagttacaattatactttcagctaacatatgccagtttcacagaactattaagtccccttattgtactttttatggcatgcccatgaaaaagcactttcttaagcctacagtatcagatcaatgggaaaacaacagaaaactaagaggagaattttcccgttaattttcttgcagaaaagtataagtctaattgcccattgccataaattttgtcttgtactcagagaagcaacatgcactggctcattttatgtgcaaagaaaagatttcaccattaaaaaaattaacttggctaggtatggtgtctcacacctgtaatcccagcactttgggtggctaaggcagatagactgcttgaacccaggagttcaagaccagcctggacaacatggtgaaaccccatctctttaaaaaaaaaaaaaaatccaaaaattagctgggcatggtggcatgcagtggtagtcccagctactcaggaggctgaggtgggaggatcactggaacccgggagcagagactgcagtgagctgagatcacactactgcattccagcctgagcaacagagcaagacacacacacacatcaatttattttagttgtataatgcttttctattagtaaagcatcagctaagcttcagtggcctgctccatcccctaatgactcccatgggctatcctaaaggaacttccagaacctttgttggtgtgttgacattgaccatgcagaccaatttgggcacaactggacattgattccttttacacaagagctgcctcccaaagatagataaattttcccagccctaaatatgaatcatggggcaagatattggtcgtattgatggtgaacctttcctactggattctttgcatgccacatagcaggattcattgcctttctctcatcatggatggcatgcagcagcacccaagtattcttcattctttgcagggaaaaaattgtgcatgggggctgaaatgtaatatgtgtagctcaattagtctctcctctgtgatgcaaaatggaatattcaatggcagatctgcccttctgagatgctgaccatccaaaacaccttgtttatggtgcaccatgattagctcacacacaatgccaaggctgtgcttctattatctgatacatagtttgacaatgggtaattctactcagaccctccctactgattggctaggatgcctgtcaggaactcattatgctactggttgtttggggatccccatagtggactactttcaggaatggcatgaattgtaaccaactgagtgctgcccccactgttacggaagtttataaaaccttagttccagaagacccaaaggagagtactggtttgtgtttggtgcttggcctagatccagccaccactctgaaactcatcacatcttcattgacagggagggagcccaggacatatgtgtggctcattgaccagaaggctttcttagtcccaacagccatgaaccatgcacttatggatacccagccttttagggctacgtgaaatgcatccttgtaacatcattgtattctttcaataaatagccttctgagttgaaaaaaaaaaaaaaaaaaaagtcgacgcggccgcgaatttagtagtattagtcaccccggaatttcgggcggggactctgggggtcaacatttccccaaggaggcggagttgagacttgcggaacagggcaaaaccgtttccgggtgaaatgtaaccgcc

SEQ ID NO: 67157 - DNA, 1248 bp, Homo sapiens
catacatgccttggcctgcgttatccataaaagcagctataccactatggcggtgctgttgacattgaccagtccataaccatctagtgccattcgtacatagatacctgtctatgacaagagctgcctcccaaagatagataaattttcccagccctaaatatgaatcatggggcaagatattggtcgtattgatggtgaacctttcctactggattctttgcatgccacatagcaggattcattgcctttctctcatcatggatggcatgcagcagcacccaagtattcttcattctttgcagggaaaaaattgtgcatgggggctgaaatgtaatatgtgtagctcaattagtctctcctctgtgatgcaaaatggaatattcaatggcagatctgcccttctgagatgctgaccatccaaaacaccttgtttatggtgcaccatgattagctcacacacaatgccaaggctgtgcttctattatctgatacatagtttgacaatgggtaattctactcagaccctccctactgattggctaggatgcctgtcaggaactcattatgctactggttgtttggggatccccatagtggactactttcaggaatggcatgaattgtaaccaactgagtgctgcccccactgttacggaagtttataaaaccttagttccagaagacccaaaggagagtactggtttgtgtttggtgcttggcctagatccagccaccactctgaaactcatcacatcttcattgacagggagggagcccaggacatatgtgtggctcattgaccagaaggctttcttagtcccaacagccatgaaccatgcacttatggatacccagccttttagggctacgtgaaatgcatccttgtaacatcattgtattctttcaataaatagccttctgagttgaatcctgagtctcaccaaaaaccaccacccgatatcaccacgcaacacacaaacctgttgtggcgcgccttgcggccgcctggaaaaagattttcttgaacaccaatctgcgtgtggggccgtcggcgccccccctgatgttgtgcgatcaacttcgcgcaatcgcggtcttcccacgaagaacacctgtcgcgacacagagtgtgtgtccgtcttcccccataaaaagacggcgccggcgacgcacgacggtttcggcaaacacaccagcgaggttccggcgctgtctggcgtctatccacgagggacacagcagcca

SEQ ID NO: 67158 - DNA, 4033 bp, Homo sapiens
agtgtgataaatgtagaaaagcctttattcatagatcatcgcttactaaacatgagaaaacacataaaggagagggagctttccctaatggaacagatcaaggaatttatcctggaaagaaacaccatgaatgtaccgactgtgggaaaacctttctctggaagacacagcttactgagcatcagagaattcacactggggagaaaccctttgaatgcaatgtatgtggaaaggccttcaggcatagctcatctcttggtcagcatgagaatgctcataccggagagaaaccctatcagtgtagtctctgtgggaaagccttccagcgcagctcctcccttgttcaacaccagcgaattcacactggagagaaaccctatcgatgtaatctatgtgggaggtcctttaggcatggcacatccctcactcaacacgaggtcacacacagtggagagaagcccttccagtgtaaggaatgtgggaaagcctttagtcgatgttcttcccttgtccaacatgagaggactcatactggagagaaaccttttgaatgtagcatatgtgggagggcttttggtcagagcccatccctttataaacatatgaggattcataagagaggcaaaccttaccaaagcagtaactacagcatagatttcaagcacagcacatctctcactcaagatgaaagcactcttaccgaagtgaaatcctaccattgtaatgactgtggggaagactttagtcacattacagactttactgaccatcagaggatccatactgcagagaacccctatgattgtgagcaggcttttagtcagcaagctatttctcatcctggagagaaaccctatcaatgtaatgtatgtgggaaagctttcaaaaggagtacaagtttcatagagcatcacagaattcatactggagagaaaccctatgaatgtaatgagtgtggagaagcctttagtcgacgctcatcgcttactcaacatgagagaacccacactggagagaaaccctatgaatgtattgactgtgggaaagcctttagtcaaagttcatctctcattcagcatgagagaactcatactggagagaagccctatgaatgtaatgaatgtgggagagccttccgaaaaaaaaccaacctgcatgatcatcagagaattcatactggagaaaaaccctattcttgtaaggaatgtgggaaaaacttcagccgaagttcagctcttactaaacaccagagaattcatactcgaaataaactctaggaaccgtgaaattaaggaatttgcagaatgctttagctaaaatgttctgattcaggatcagaggattcttagagagcttgggaatgtaatgaattacgtgtgtgtttatacgttgtgtgtggagaaaactgccagtagacagatttttttttttttttaacataaagacacattctcagatctgattacagactagtgtaaaaacagctacatgtatgtagctggttggggatgatatgcctgtatgttggactttgcttttgaatatatgtatgcaggatatcatcaagtttcaacatcttgacttgtgacccccaatgtcaacagcttttttaaaaaacaaattcctgcagtaatgaccaaaacccattttaaaaattgcttgacaactgcactcaactgcagctcttacattaacttcaccatggaaaccagttccaactccaggaagtcaccattcaaagaattagatcaactagcccaaccacttcattgtacagatgaagactgaaagccaaagatgtgaagtggtttccacagtatgatacagcctataagggtaaagctgggttaaaaatgcaggtttcctggatttggggccccatggccttgccagtgaaaaggttatttttggactcagagggctttaaaataaattttaagatgtatcagatacacaaacatttaatgggcacctatgggttggacactttgagaattcttaaaagtataagtgggagcaaaatgtatgcaaatttatcacaaactatttaaagcaacttcttggaggcttacaaaccacaatttaacagaaactgtagatggttgaactactagtgacttttttccccttttcccagttacaattatactttcagctaacatatgccagtttcacagaactattaagtccccttattgtactttttatggcatgcccatgaaaaagcactttcttaagcctacagtatcagatcaatgggaaaacaacagaaaactaagaggagaattttcccgttaattttcttgcagaaaagtataagtctaattgcccattgccataaattttgtcttgtactcagagaagcaacatgcactggctcattttatgtgcaaagaaaagatttcaccattaaaaaaattaacttggctaggtatggtgtctcacacctgtaatcccagcactttgggtggctaaggcagatagactgcttgaacccaggagttcaagaccagcctggacaacatggtgaaaccccatctctttaaaaaaaaaaaaaaatccaaaaattagctgggcatggtggcatgcagtggtagtcccagctactcaggaggctgaggtgggaggatcactggaacccgggagcagagactgcagtgagctgagatcacactactgcattccagcctgagcaacagagcaagacacacacacacatcaatttattttagttgtataatgcttttctattagtaaagcatcagctaagcttcagtggcctgctccatcccctaatgactcccatgggctatcctaaaggaacttccagaacctttgttggtgtgttgacattgaccatgcagaccaatttgggcacaactggacattgattccttttacacaagagctgcctcccaaagatagataaattttcccagccctaaatatgaatcatggggcaagatattggtcgtattgatggtgaacctttcctactggattctttgcatgccacatagcaggattcattgcctttctctcatcatggatggcatgcagcagcacccaagtattcttcattctttgcagggaaaaaattgtgcatgggggctgaaatgtaatatgtgtagctcaattagtctctcctctgtgatgcaaaatggaatattcaatggcagatctgcccttctgagatgctgaccatccaaaacaccttgtttatggtgcaccatgattagctcacacacaatgccaaggctgtgcttctattatctgatacatagtttgacaatgggtaattctactcagaccctccctactgattggctaggatgcctgtcaggaactcattatgctactggttgtttggggatccccatagtggactactttcaggaatggcatgaattgtaaccaactgagtgctgcccccactgttacggaagtttataaaaccttagttccagaagacccaaaggagagtactggtttgtgtttggtgcttggcctagatccagccaccactctgaaactcatcacatcttcattgacagggagggagcccaggacatatgtgtggctcattgaccagaaggctttcttagtcccaacagccatgaaccatgcacttatggatacccagccttttagggctacgtgaaatgcatccttgtaacatcattgtattctttcaataaatagccttctgagttgaatcctgagtctcaccaaaaaccaccacccgatatcaccacgcaacacacaaacctgttgtggcgcgccttgcggccgcctggaaaaagattttcttgaacaccaatctgcgtgtggggccgtcggcgccccccctgatgttgtgcgatcaacttcgcgcaatcgcggtcttcccacgaagaacacctgtcgcgacacagagtgtgtgtccgtcttcccccataaaaagacggcgccggcgacgcacgacggtttcggcaaacacaccagcgaggttccggcgctgtctggcgtctatccacgagggacacagcagcca

SEQ ID NO: 67159 - DNA, 4189 bp, Homo sapiens
gtgctcaggagctcaacttttacttcagctgttattaaccttcaaccacaagacaataacatctgttccttttatcccaattttacgtgcggcattcttagccatatctacactgtgtttttatgcacatcatcataccctgttgtagggctataaagaccctactatggtagaattgggagtggactgagggattaggacaaaaggatgtggaaaaccgcagatctagagatgcatagctattctcataacctaggaagagaggtggatttctccgtcatcaatagctgaacactccttgtgtttctaagtattgaatccataaagttacatgcaaacatacagcccttgccttcaggccaagccgtagttatgcagaaggcttgaagcaatcacagatttaacatttgtggttccagctattcaggaccaattcccaaactccacgacatgtaacaatttgtaattttgctaggacacagtttgatgcttaggttttaaggctggtgtgctagacgttatcaagtggtttgtgagagtagccctgtgtctccattgggtagagtagctgggtcgcaaggatcatgaagagatgaagaaatggctgtgaaaagccaactagcctcggtgatagtaagcaaaggtatagaaacactaaggaagttaccctttgtattgtcaaaggtttcagttttgtgtaaggtggtgattcacgggcagttaatctccatcactaaaattaaatccttttttattcattgcaaatagataatctgtggaagacattttggcttttctcgctagcagaaaatgtgaggcttcttcaggtttttcctgttcattgtttcacgggagcatcttccccaaaacactgcaaaactcaaagttctcaggctgatgtggcagaaagagcattgatctcggcttcaggagctaaattctctagtcctgactgtgccactaacagactgtgggacttcagacaagtacattcctttctcgggtttcttatgtcaaatggacagcgtgagaaggatcacaatgaaccagggatcagcttcacgattaaaacctaagacttaagagacggacatctgtccgttcctggctacacctccggcccatctggcccaccccaaactgcgcgaagcccctctccaccgacgccaggcctgtggcctcgcgcgaagctgttggtcgttaacatctcccccgcaatgggcgggatggagggcttcagcttccggctgcaaatggcgaggcggcgcgcggcgttgcccactggcctcggcatgggcctgcccacgcacccgcccagcgcgcgccggaccctgtctaccgccgttgaagggcttcccagccctagcagtgcgtactgggaagcccccaaaaggctctgcgaggccgaggagacccgttcggagtgggggaggggaagataaaccgaactatttatgttaatcagtgcatgcttcctttatggagattggccagggttttactctagtaaccaatcacttcagaacaagggcgggcccgttgatatctctcacactcattggttgagaggttgcggcgcaatggaaggtcttaaaccgagagtatccgggattatttttccccgccgtgcggtgcgtgtcccggaagtgacgcatggccaaggccgggcggccgccttgcccccgcttcctttcacgctgtcgctgcccgtaggtggttgtggccactgtgcccggagggaggcggcggtggccagtaatgcctgggaaactcctctggggggacattatggagctggaagcacccttggaggagtccgagagccagaagaaggagaggcaaaagagtgacagaaggaagtcaaggcaccattatgactcggatgagaaatcagaaacaagagaaaatggtgttacagatgacctggatgctcccaaggccaaaaaatctaaaatgaaagagaagctaaatggagacactgaagaaggatttaatagactttcagatgaattctccaaatctcataagtcaagaagaaaagatctaccaaatggagatatagatgaatatgaaaaaaaatcaaagcgagtatcatctttagatacttctactcataaatcaagtgataataaactagaggagaccttaacacgtgaacagaaagaaggagccttctccaattttcctatttctgaagagactataaagcttctgaaaggtcgaggggtaacatatctctttcctattcaagttaagacctttggtcctgtatatgaaggaaaagatttaatagctcaagcacggacaggaacaggaaagacattctcttttgccatccccttaattgaaagactccaaagaaatcaagaaacaattaaaaaaagccgctcaccaaaggtacttgttttggctccaacaagggaactggcaaaccaagtagccaaagacttcaaagatataactaggaaactcagcgtggcgtgtttttatggtggaacatcatatcaaagccaaattaatcatattcgaaatggtattgacatcttggttggaacacctggtcgtatcaaagaccatctgcagagtggccgattggatctttctaaactgcgacatgttgtgcttgatgaagtggatcagatgttagatttaggtttcgctgaacaagttgaagatattattcatgaatcctacaaaactgattctgaagacaatcctcagactttacttttttctgcaacttgcccacagtgggtatacaaagttgcaaaaaaatacatgaaatccagatatgaacaggttgaccttgttggaaaaatgactcaaaaggctgcaactactgtggaacatttggccatccagtgtcattggtctcagaggccagcagttattggagatgtccttcaagtctacagtgggtctgaagggagggctattattttctgtgagaccaagaagaatgtaactgaaatggccatgaatccacacataaaacagaatgcccagtgtttacatggggacattgcacagtcacaaagagaaattacactaaaaggcttcagagaaggtagttttaaagttttggtggcaaccaatgtggctgcccgtggtttggacattcctgaagttgacctggtgattcaaagttctcctcctcaggatgttgagtcctatatccatcgctctggacgcacaggtagagctggacggacagggatttgtatatgtttttatcaaccaagagaaagaggtcaactaagatatgtggaacaaaaagcaggaattacttttaaacgtgtaggtgttccttctacaatggatttagttaaatctaaaagcatggatgccatcaggtctctggcttccgtttcttatgctgctgttgattttttccgaccatcagctcagagactgatagaagagaaaggtgcagtggatgcattggctgcagctttagcccacatttctggtgcatcaagctttgaaccacgatctttgatcacctctgataaggggtttgtgaccatgactctggaaagcctagaggaaatacaggatgtcagctgtgcttggaaagaacttaacagaaagctgagtagtaatgcagtgtctcagattaccagaatgtgcctcctgaaagggaatatgggtgtttgctttgatgttcctacaactgagtcagaaaggttacaggcagagtggcatgattccgactggatactctcagtgccagccaaattacctgaaattgaagaatattatgatggaaacacatcttctaattccagacagaggagtggctggtcaagtggtcgatcaggccggtcaggccggtcaggtggtcgatctggcggccggtcaggtagacagagtcgacaaggaagtcgctcaggaagtcgacaagatggtagaagacgaagtgggaatagaaatcgatcaagaagtgggggccacaaacggagttttgactgagtatttgatagttaatctaccagtgtgagcttgcctatttctgcctaatcatgtacattatccaccaaaaattaggtcatcatagttgaggtatgtgtctgctatttgcaaagaagttggtcgtatttttttaaaaagtatttcacaagaatggaacaaatctacttatccagttatacctttgaataaaaaaacctccttttattgtctcttttca

SEQ ID NO: 67160 - DNA, 413 bp, Homo sapiens
ggcctcccaaagtgctgggatacaggcatgaactaccacgccggccatgtagctcttgtaaatgagactttctatcattaaattttaaaagaaatttattaggaggatcattttacaagggacatggaacaacatatagggtctacacaaactcttctagagaatactgtagattcttagcagtagttgtaaattcttattggatactgtgtttagttaccttttaaatttagaaaatacattaagcagccactgagtcatgcattattagtgaaacaaaaaaaatctacacatatgcatctaatttaaaatgtttggctttgttttgcttttagggtgtttgctttgatgttcctacaactgagtcagaaaggttacaggtatttttaaaattttatcttttaaatggttga

SEQ ID NO: 67161 - DNA, 4301 bp, Homo sapiens
gtgctcaggagctcaacttttacttcagctgttattaaccttcaaccacaagacaataacatctgttccttttatcccaattttacgtgcggcattcttagccatatctacactgtgtttttatgcacatcatcataccctgttgtagggctataaagaccctactatggtagaattgggagtggactgagggattaggacaaaaggatgtggaaaaccgcagatctagagatgcatagctattctcataacctaggaagagaggtggatttctccgtcatcaatagctgaacactccttgtgtttctaagtattgaatccataaagttacatgcaaacatacagcccttgccttcaggccaagccgtagttatgcagaaggcttgaagcaatcacagatttaacatttgtggttccagctattcaggaccaattcccaaactccacgacatgtaacaatttgtaattttgctaggacacagtttgatgcttaggttttaaggctggtgtgctagacgttatcaagtggtttgtgagagtagccctgtgtctccattgggtagagtagctgggtcgcaaggatcatgaagagatgaagaaatggctgtgaaaagccaactagcctcggtgatagtaagcaaaggtatagaaacactaaggaagttaccctttgtattgtcaaaggtttcagttttgtgtaaggtggtgattcacgggcagttaatctccatcactaaaattaaatccttttttattcattgcaaatagataatctgtggaagacattttggcttttctcgctagcagaaaatgtgaggcttcttcaggtttttcctgttcattgtttcacgggagcatcttccccaaaacactgcaaaactcaaagttctcaggctgatgtggcagaaagagcattgatctcggcttcaggagctaaattctctagtcctgactgtgccactaacagactgtgggacttcagacaagtacattcctttctcgggtttcttatgtcaaatggacagcgtgagaaggatcacaatgaaccagggatcagcttcacgattaaaacctaagacttaagagacggacatctgtccgttcctggctacacctccggcccatctggcccaccccaaactgcgcgaagcccctctccaccgacgccaggcctgtggcctcgcgcgaagctgttggtcgttaacatctcccccgcaatgggcgggatggagggcttcagcttccggctgcaaatggcgaggcggcgcgcggcgttgcccactggcctcggcatgggcctgcccacgcacccgcccagcgcgcgccggaccctgtctaccgccgttgaagggcttcccagccctagcagtgcgtactgggaagcccccaaaaggctctgcgaggccgaggagacccgttcggagtgggggaggggaagataaaccgaactatttatgttaatcagtgcatgcttcctttatggagattggccagggttttactctagtaaccaatcacttcagaacaagggcgggcccgttgatatctctcacactcattggttgagaggttgcggcgcaatggaaggtcttaaaccgagagtatccgggattatttttccccgccgtgcggtgcgtgtcccggaagtgacgcatggccaaggccgggcggccgccttgcccccgcttcctttcacgctgtcgctgcccgtaggtggttgtggccactgtgcccggagggaggcggcggtggccagtaatgcctgggaaactcctctggggggacattatggagctggaagcacccttggaggagtccgagagccagaagaaggagaggcaaaagagctttatggatatcgcaatttcggataagggattatggacctgtacttcccttatagggttgttatgaagatttaaacaagataagctgaaaacacattacacagtgctggagtgacagaaggaagtcaaggcaccattatgactcggatgagaaatcagaaacaagagaaaatggtgttacagatgacctggatgctcccaaggccaaaaaatctaaaatgaaagagaagctaaatggagacactgaagaaggatttaatagactttcagatgaattctccaaatctcataagtcaagaagaaaagatctaccaaatggagatatagatgaatatgaaaaaaaatcaaagcgagtatcatctttagatacttctactcataaatcaagtgataataaactagaggagaccttaacacgtgaacagaaagaaggagccttctccaattttcctatttctgaagagactataaagcttctgaaaggtcgaggggtaacatatctctttcctattcaagttaagacctttggtcctgtatatgaaggaaaagatttaatagctcaagcacggacaggaacaggaaagacattctcttttgccatccccttaattgaaagactccaaagaaatcaagaaacaattaaaaaaagccgctcaccaaaggtacttgttttggctccaacaagggaactggcaaaccaagtagccaaagacttcaaagatataactaggaaactcagcgtggcgtgtttttatggtggaacatcatatcaaagccaaattaatcatattcgaaatggtattgacatcttggttggaacacctggtcgtatcaaagaccatctgcagagtggccgattggatctttctaaactgcgacatgttgtgcttgatgaagtggatcagatgttagatttaggtttcgctgaacaagttgaagatattattcatgaatcctacaaaactgattctgaagacaatcctcagactttacttttttctgcaacttgcccacagtgggtatacaaagttgcaaaaaaatacatgaaatccagatatgaacaggttgaccttgttggaaaaatgactcaaaaggctgcaactactgtggaacatttggccatccagtgtcattggtctcagaggccagcagttattggagatgtccttcaagtctacagtgggtctgaagggagggctattattttctgtgagaccaagaagaatgtaactgaaatggccatgaatccacacataaaacagaatgcccagtgtttacatggggacattgcacagtcacaaagagaaattacactaaaaggcttcagagaaggtagttttaaagttttggtggcaaccaatgtggctgcccgtggtttggacattcctgaagttgacctggtgattcaaagttctcctcctcaggatgttgagtcctatatccatcgctctggacgcacaggtagagctggacggacagggatttgtatatgtttttatcaaccaagagaaagaggtcaactaagatatgtggaacaaaaagcaggaattacttttaaacgtgtaggtgttccttctacaatggatttagttaaatctaaaagcatggatgccatcaggtctctggcttccgtttcttatgctgctgttgattttttccgaccatcagctcagagactgatagaagagaaaggtgcagtggatgcattggctgcagctttagcccacatttctggtgcatcaagctttgaaccacgatctttgatcacctctgataaggggtttgtgaccatgactctggaaagcctagaggaaatacaggatgtcagctgtgcttggaaagaacttaacagaaagctgagtagtaatgcagtgtctcagattaccagaatgtgcctcctgaaagggaatatgggtgtttgctttgatgttcctacaactgagtcagaaaggttacaggcagagtggcatgattccgactggatactctcagtgccagccaaattacctgaaattgaagaatattatgatggaaacacatcttctaattccagacagaggagtggctggtcaagtggtcgatcaggccggtcaggccggtcaggtggtcgatctggcggccggtcaggtagacagagtcgacaaggaagtcgctcaggaagtcgacaagatggtagaagacgaagtgggaatagaaatcgatcaagaagtgggggccacaaacggagttttgactgagtatttgatagttaatctaccagtgtgagcttgcctatttctgcctaatcatgtacattatccaccaaaaattaggtcatcatagttgaggtatgtgtctgctatttgcaaagaagttggtcgtatttttttaaaaagtatttcacaagaatggaacaaatctacttatccagttatacctttgaataaaaaaacctccttttattgtctcttttca

SEQ ID NO: 67162 - DNA, 4243 bp, Homo sapiens
gtgctcaggagctcaacttttacttcagctgttattaaccttcaaccacaagacaataacatctgttccttttatcccaattttacgtgcggcattcttagccatatctacactgtgtttttatgcacatcatcataccctgttgtagggctataaagaccctactatggtagaattgggagtggactgagggattaggacaaaaggatgtggaaaaccgcagatctagagatgcatagctattctcataacctaggaagagaggtggatttctccgtcatcaatagctgaacactccttgtgtttctaagtattgaatccataaagttacatgcaaacatacagcccttgccttcaggccaagccgtagttatgcagaaggcttgaagcaatcacagatttaacatttgtggttccagctattcaggaccaattcccaaactccacgacatgtaacaatttgtaattttgctaggacacagtttgatgcttaggttttaaggctggtgtgctagacgttatcaagtggtttgtgagagtagccctgtgtctccattgggtagagtagctgggtcgcaaggatcatgaagagatgaagaaatggctgtgaaaagccaactagcctcggtgatagtaagcaaaggtatagaaacactaaggaagttaccctttgtattgtcaaaggtttcagttttgtgtaaggtggtgattcacgggcagttaatctccatcactaaaattaaatccttttttattcattgcaaatagataatctgtggaagacattttggcttttctcgctagcagaaaatgtgaggcttcttcaggtttttcctgttcattgtttcacgggagcatcttccccaaaacactgcaaaactcaaagttctcaggctgatgtggcagaaagagcattgatctcggcttcaggagctaaattctctagtcctgactgtgccactaacagactgtgggacttcagacaagtacattcctttctcgggtttcttatgtcaaatggacagcgtgagaaggatcacaatgaaccagggatcagcttcacgattaaaacctaagacttaagagacggacatctgtccgttcctggctacacctccggcccatctggcccaccccaaactgcgcgaagcccctctccaccgacgccaggcctgtggcctcgcgcgaagctgttggtcgttaacatctcccccgcaatgggcgggatggagggcttcagcttccggctgcaaatggcgaggcggcgcgcggcgttgcccactggcctcggcatgggcctgcccacgcacccgcccagcgcgcgccggaccctgtctaccgccgttgaagggcttcccagccctagcagtgcgtactgggaagcccccaaaaggctctgcgaggccgaggagacccgttcggagtgggggaggggaagataaaccgaactatttatgttaatcagtgcatgcttcctttatggagattggccagggttttactctagtaaccaatcacttcagaacaagggcgggcccgttgatatctctcacactcattggttgagaggttgcggcgcaatggaaggtcttaaaccgagagtatccgggattatttttccccgccgtgcggtgcgtgtcccggaagtgacgcatggccaaggccgggcggccgccttgcccccgcttcctttcacgctgtcgctgcccgtaggtggttgtggccactgtgcccggagggaggcggcggtggccagtaatgcctgggaaactcctctggggggacattatggagctggaagcacccttggaggagtccgagagccagaagaaggagaggcaaaagggttgttatgaagatttaaacaagataagctgaaaacacattacacagtgctggagtgacagaaggaagtcaaggcaccattatgactcggatgagaaatcagaaacaagagaaaatggtgttacagatgacctggatgctcccaaggccaaaaaatctaaaatgaaagagaagctaaatggagacactgaagaaggatttaatagactttcagatgaattctccaaatctcataagtcaagaagaaaagatctaccaaatggagatatagatgaatatgaaaaaaaatcaaagcgagtatcatctttagatacttctactcataaatcaagtgataataaactagaggagaccttaacacgtgaacagaaagaaggagccttctccaattttcctatttctgaagagactataaagcttctgaaaggtcgaggggtaacatatctctttcctattcaagttaagacctttggtcctgtatatgaaggaaaagatttaatagctcaagcacggacaggaacaggaaagacattctcttttgccatccccttaattgaaagactccaaagaaatcaagaaacaattaaaaaaagccgctcaccaaaggtacttgttttggctccaacaagggaactggcaaaccaagtagccaaagacttcaaagatataactaggaaactcagcgtggcgtgtttttatggtggaacatcatatcaaagccaaattaatcatattcgaaatggtattgacatcttggttggaacacctggtcgtatcaaagaccatctgcagagtggccgattggatctttctaaactgcgacatgttgtgcttgatgaagtggatcagatgttagatttaggtttcgctgaacaagttgaagatattattcatgaatcctacaaaactgattctgaagacaatcctcagactttacttttttctgcaacttgcccacagtgggtatacaaagttgcaaaaaaatacatgaaatccagatatgaacaggttgaccttgttggaaaaatgactcaaaaggctgcaactactgtggaacatttggccatccagtgtcattggtctcagaggccagcagttattggagatgtccttcaagtctacagtgggtctgaagggagggctattattttctgtgagaccaagaagaatgtaactgaaatggccatgaatccacacataaaacagaatgcccagtgtttacatggggacattgcacagtcacaaagagaaattacactaaaaggcttcagagaaggtagttttaaagttttggtggcaaccaatgtggctgcccgtggtttggacattcctgaagttgacctggtgattcaaagttctcctcctcaggatgttgagtcctatatccatcgctctggacgcacaggtagagctggacggacagggatttgtatatgtttttatcaaccaagagaaagaggtcaactaagatatgtggaacaaaaagcaggaattacttttaaacgtgtaggtgttccttctacaatggatttagttaaatctaaaagcatggatgccatcaggtctctggcttccgtttcttatgctgctgttgattttttccgaccatcagctcagagactgatagaagagaaaggtgcagtggatgcattggctgcagctttagcccacatttctggtgcatcaagctttgaaccacgatctttgatcacctctgataaggggtttgtgaccatgactctggaaagcctagaggaaatacaggatgtcagctgtgcttggaaagaacttaacagaaagctgagtagtaatgcagtgtctcagattaccagaatgtgcctcctgaaagggaatatgggtgtttgctttgatgttcctacaactgagtcagaaaggttacaggcagagtggcatgattccgactggatactctcagtgccagccaaattacctgaaattgaagaatattatgatggaaacacatcttctaattccagacagaggagtggctggtcaagtggtcgatcaggccggtcaggccggtcaggtggtcgatctggcggccggtcaggtagacagagtcgacaaggaagtcgctcaggaagtcgacaagatggtagaagacgaagtgggaatagaaatcgatcaagaagtgggggccacaaacggagttttgactgagtatttgatagttaatctaccagtgtgagcttgcctatttctgcctaatcatgtacattatccaccaaaaattaggtcatcatagttgaggtatgtgtctgctatttgcaaagaagttggtcgtatttttttaaaaagtatttcacaagaatggaacaaatctacttatccagttatacctttgaataaaaaaacctccttttattgtctcttttca

SEQ ID NO: 67163 - DNA, 3928 bp, Homo sapiens
gtgctcaggagctcaacttttacttcagctgttattaaccttcaaccacaagacaataacatctgttccttttatcccaattttacgtgcggcattcttagccatatctacactgtgtttttatgcacatcatcataccctgttgtagggctataaagaccctactatggtagaattgggagtggactgagggattaggacaaaaggatgtggaaaaccgcagatctagagatgcatagctattctcataacctaggaagagaggtggatttctccgtcatcaatagctgaacactccttgtgtttctaagtattgaatccataaagttacatgcaaacatacagcccttgccttcaggccaagccgtagttatgcagaaggcttgaagcaatcacagatttaacatttgtggttccagctattcaggaccaattcccaaactccacgacatgtaacaatttgtaattttgctaggacacagtttgatgcttaggttttaaggctggtgtgctagacgttatcaagtggtttgtgagagtagccctgtgtctccattgggtagagtagctgggtcgcaaggatcatgaagagatgaagaaatggctgtgaaaagccaactagcctcggtgatagtaagcaaaggtatagaaacactaaggaagttaccctttgtattgtcaaaggtttcagttttgtgtaaggtggtgattcacgggcagttaatctccatcactaaaattaaatccttttttattcattgcaaatagataatctgtggaagacattttggcttttctcgctagcagaaaatgtgaggcttcttcaggtttttcctgttcattgtttcacgggagcatcttccccaaaacactgcaaaactcaaagttctcaggctgatgtggcagaaagagcattgatctcggcttcaggagctaaattctctagtcctgactgtgccactaacagactgtgggacttcagacaagtacattcctttctcgggtttcttatgtcaaatggacagcgtgagaaggatcacaatgaaccagggatcagcttcacgattaaaacctaagacttaagagacggacatctgtccgttcctggctacacctccggcccatctggcccaccccaaactgcgcgaagcccctctccaccgacgccaggcctgtggcctcgcgcgaagctgttggtcgttaacatctcccccgcaatgggcgggatggagggcttcagcttccggctgcaaatggcgaggcggcgcgcggcgttgcccactggcctcggcatgggcctgcccacgcacccgcccagcgcgcgccggaccctgtctaccgccgttgaagggcttcccagccctagcagtgcgtactgggaagcccccaaaaggctctgcgaggccgaggagacccgttcggagtgggggaggggaagataaaccgaactatttatgttaatcagtgcatgcttcctttatggagattggccagggttttactctagtaaccaatcacttcagaacaagggcgggcccgttgatatctctcacactcattggttgagaggttgcggcgcaatggaaggtcttaaaccgagagtatccgggattatttttccccgccgtgcggtgcgtgtcccggaagtgacgcatggccaaggccgggcggccgccttgcccccgcttcctttcacgctgtcgctgcccgtaggtggttgtggccactgtgcccggagggaggcggcggtggccagtaatgcctgggaaactcctctggggggacattatggagctggaagcacccttggaggagtccgagagccagaagaaggagaggcaaaagagtgacagaaggaagtcaaggcaccattatgactcggatgagaaatcagaaacaagagaaaatggtgttacagatgacctggatgctcccaaggccaaaaaatctaaaatgaaagagaagctaaatggagacactgaagaaggatttaatagactttcagatgaattctccaaatctcataagtcaagaagaaaagatctaccaaatggagatatagatgaatatgaaaaaaaatcaaagcgagtatcatctttagatacttctactcataaatcaagtgataataaactagaggagaccttaacacgtgaacagaaagaaggagccttctccaattttcctatttctgaagagactataaagcttctgaaaggtcgaggggtaacatatctctttcctattcaagttaagacctttggtcctgtatatgaaggaaaagatttaatagctcaagcacggacaggaacaggaaagacattctcttttgccatccccttaattgaaagactccaaagaaatcaagaaacaattaaaaaaagccgctcaccaaaggtacttgttttggctccaacaagggaactggcaaaccaagtagccaaagacttcaaagatataactaggaaactcagcgtggcgtgtttttatggtggaacatcatatcaaagccaaattaatcatattcgaaatggtattgacatcttggttggaacacctggtcgtatcaaagaccatctgcagagtggccgattggatctttctaaactgcgacatgttgtgcttgatgaagtggatcagatgttagatttaggtttcgctgaacaagttgaagatattattcatgaatcctacaaaactgattctgaagacaatcctcagactttacttttttctgcaacttgcccacagtgggtatacaaagttgcaaaaaaatacatgaaatccagatatgaacaggttgaccttgttggaaaaatgactcaaaaggctgcaactactgtggaacatttggccatccagtgtcattggtctcagaggccagcagttattggagatgtccttcaagtctacagtgggtctgaagggagggctattattttctgtgagaccaagaagaatgtaactgaaatggccatgaatccacacataaaacagaatgcccagtgtttacatggggacattgcacagtcacaaagagaaattacactaaaaggcttcagagaaggtagttttaaagttttggtggcaaccaatgtggctgcccgtggtttggacattcctgaagttgacctggtgattcaaagttctcctcctcaggatgttgagtcctatatccatcgctctggacgcacaggtagagctggacggacagggatttgtatatgtttttatcaaccaagagaaagaggtcaactaagatatgtggaacaaaaagcaggaattacttttaaacgtgtaggtgttccttctacaatggatttagttaaatctaaaagcatggatgccatcaggtctctggcttccgtttcttatgctgctgttgattttttccgaccatcagctcagagactgatagaagagaaaggtgcagcagagtggcatgattccgactggatactctcagtgccagccaaattacctgaaattgaagaatattatgatggaaacacatcttctaattccagacagaggagtggctggtcaagtggtcgatcaggccggtcaggccggtcaggtggtcgatctggcggccggtcaggtagacagagtcgacaaggaagtcgctcaggaagtcgacaagatggtagaagacgaagtgggaatagaaatcgatcaagaagtgggggccacaaacggagttttgactgagtatttgatagttaatctaccagtgtgagcttgcctatttctgcctaatcatgtacattatccaccaaaaattaggtcatcatagttgaggtatgtgtctgctatttgcaaagaagttggtcgtatttttttaaaaagtatttcacaagaatggaacaaatctacttatccagttatacctttgaataaaaaaacctccttttattgtctcttttca

SEQ ID NO: 67164 - DNA, 3630 bp, Homo sapiens
gtgctcaggagctcaacttttacttcagctgttattaaccttcaaccacaagacaataacatctgttccttttatcccaattttacgtgcggcattcttagccatatctacactgtgtttttatgcacatcatcataccctgttgtagggctataaagaccctactatggtagaattgggagtggactgagggattaggacaaaaggatgtggaaaaccgcagatctagagatgcatagctattctcataacctaggaagagaggtggatttctccgtcatcaatagctgaacactccttgtgtttctaagtattgaatccataaagttacatgcaaacatacagcccttgccttcaggccaagccgtagttatgcagaaggcttgaagcaatcacagatttaacatttgtggttccagctattcaggaccaattcccaaactccacgacatgtaacaatttgtaattttgctaggacacagtttgatgcttaggttttaaggctggtgtgctagacgttatcaagtggtttgtgagagtagccctgtgtctccattgggtagagtagctgggtcgcaaggatcatgaagagatgaagaaatggctgtgaaaagccaactagcctcggtgatagtaagcaaaggtatagaaacactaaggaagttaccctttgtattgtcaaaggtttcagttttgtgtaaggtggtgattcacgggcagttaatctccatcactaaaattaaatccttttttattcattgcaaatagataatctgtggaagacattttggcttttctcgctagcagaaaatgtgaggcttcttcaggtttttcctgttcattgtttcacgggagcatcttccccaaaacactgcaaaactcaaagttctcaggctgatgtggcagaaagagcattgatctcggcttcaggagctaaattctctagtcctgactgtgccactaacagactgtgggacttcagacaagtacattcctttctcgggtttcttatgtcaaatggacagcgtgagaaggatcacaatgaaccagggatcagcttcacgattaaaacctaagacttaagagacggacatctgtccgttcctggctacacctccggcccatctggcccaccccaaactgcgcgaagcccctctccaccgacgccaggcctgtggcctcgcgcgaagctgttggtcgttaacatctcccccgcaatgggcgggatggagggcttcagcttccggctgcaaatggcgaggcggcgcgcggcgttgcccactggcctcggcatgggcctgcccacgcacccgcccagcgcgcgccggaccctgtctaccgccgttgaagggcttcccagccctagcagtgcgtactgggaagcccccaaaaggctctgcgaggccgaggagacccgttcggagtgggggaggggaagataaaccgaactatttatgttaatcagtgcatgcttcctttatggagattggccagggttttactctagtaaccaatcacttcagaacaagggcgggcccgttgatatctctcacactcattggttgagaggttgcggcgcaatggaaggtcttaaaccgagagtatccgggattatttttccccgccgtgcggtgcgtgtcccggaagtgacgcatggccaaggccgggcggccgccttgcccccgcttcctttcacgctgtcgctgcccgtaggtggttgtggccactgtgcccggagggaggcggcggtggccagtaatgcctgggaaactcctctggggggacattatggagctggaagcacccttggaggagtccgagagccagaagaaggagaggcaaaagagtgacagaaggaagtcaaggcaccattatgactcggatgagaaatcagaaacaagagaaaatggtgttacagatgacctggatgctcccaaggccaaaaaatctaaaatgaaagagaagctaaatggagacactgaagaaggatttaatagactttcagatgaattctccaaatctcataagtcaagaagaaaagatctaccaaatggagatatagatgaatatgaaaaaaaatcaaagcgagtatcatctttagatacttctactcataaatcaagtgataataaactagaggagaccttaacacgtgaacagaaagaaggagccttctccaattttcctatttctgaagagactataaagcttctgaaaggtcgaggggtaacatatctctttcctattcaagttaagacctttggtcctgtatatgaaggaaaagatttaatagctcaagcacggacaggaacaggaaagacattctcttttgccatccccttaattgaaagactccaaagaaatcaagaaacaattaaaaaaagccgctcaccaaaggtacttgttttggctccaacaagggaactggcaaaccaagtagccaaagacttcaaagatataactaggaaactcagcgtggcgtgtttttatggtggaacatcatatcaaagccaaattaatcatattcgaaatggtattgacatcttggttggaacacctggtcgtatcaaagaccatctgcagagtggccgattggatctttctaaactgcgacatgttgtgcttgatgaagtggatcagatgttagatttaggtttcgctgaacaagttgaagatattattcatgaatcctacaaaactgattctgaagacaatcctcagactttacttttttctgcaacttgcccacagtgggtatacaaagttgcaaaaaaatacatgaaatccagatatgaacaggttgaccttgttggaaaaatgactcaaaaggctgcaactactgtggaacatttggccatccagtgtcattggtctcagaggccagcagttattggagatgtccttcaagtctacagtgggtctgaagggagggctattattttctgtgagaccaagaagaatgtaactgaaatggccatgaatccacacataaaacagaatgcccagtgtttacatggggacattgcacagtcacaaagagaaattacactaaaaggcttcagagaaggtagttttaaagttttggtggcaaccaatgtggctgcccgtggtttggacattcctgaagttgacctggtgattcaaagttctcctcctcaggatgttgagtcctatatccatcgctctggacgcacaggtagagctggacggacagggatttgtatatgtttttatcaaccaagagaaagaggtcaactaagatatgtggaacaaaaagcaggaattacttttaaacgtgtaggtgttccttctacaatggatttagttaaatctaaaagcatggatgccatcaggtctctggcttccgtttcttatgctgctgttgattttttccgaccatcagctcagagactgatagaagagaaaggtgcagtggatgcattggctgcagctttagcccacatttctggtgcatcaagctttgaaccacgatctttgatcacctctgataagctgtagttccagatgcttgtggggctgaggtgagaagactgcttgagcccagaaggttgagggtgcagcgagccgagatcgtgccactgcactccaacctgggtgacagagcgagac

SEQ ID NO: 67165 - DNA, 585 bp, Homo sapiens
tcatctcccatattggaagaatgtgcctcctgaaagggaatatgggtgtttgctttgatgttcctacaactgagtcagaaaggttacaggcagagtggcatgattccgactggatactctcagtgccagccaaattacctgaaattgaagaatattatgatggaaacacatcttctaattccagacagaggagtggctggtcaagtggtcgatcaggccggtcaggccggtcaggtggtcgatctggcggccggtcaggtagacagagtcgacaaggaagtcgctcaggaagtcgacaagatggtagaagacgaagtgggaatagaaatcgatcaagaagtgggggccacaaacggagttttgactgagtatttgatagttaatctaccagtgtgagcttgcctatttctgcctaatcatgtacattatccaccaaaaattaggtcatcatagttgaggtatgtgtctgctatttgcaaagaagttggtcgtatttttttaaaaagtatttcacaagaatggaacaaatctacttatccagttatacctttgaataaaaaaacctccttttattgtctcttttca

SEQ ID NO: 67166 - DNA, 533 bp, Homo sapiens
ttttgcatttatattaatcctgtaaattcccctaacagcagagtggcatgattccgactggatactctcagtgccagccaaattacctgaaattgaagaatattatgatggaaacacatcttctaattccagacagaggagtggctggtcaagtggtcgatcaggccggtcaggccggtcaggtggtcgatctggcggccggtcaggtagacagagtcgacaaggaagtcgctcaggaagtcgacaagatggtagaagacgaagtgggaatagaaatcgatcaagaagtgggggccacaaacggagttttgactgagtatttgatagttaatctaccagtgtgagcttgcctatttctgcctaatcatgtacattatccaccaaaaattaggtcatcatagttgaggtatgtgtctgctatttgcaaagaagttggtcgtatttttttaaaaagtatttcacaagaatggaacaaatctacttatccagttatacctttgaataaaaaaacctccttttattgtctcttttca

SEQ ID NO: 67167 - DNA, 417 bp, Homo sapiens
tagctcacacttgttcactacaatatttactatgatcaattttggcggttttccactcatgtacaggtttttcccatttttcttcttatcttttattttttccctatgtcttgaccaagaatactatttttaaaccataggtctctggcttccgtttcttatgctgctgttgattttttccgaccatcagctcagagactgatagaagagaaaggtgcagtggatgcattggctgcagctttagcccacatttctggtgcatcaagctttgaaccacgatctttgatcacctctgataagctgtagttccagatgcttgtggggctgaggtgagaagactgcttgagcccagaaggttgagggtgcagcgagccgagatcgtgccactgcactccaacctgggtgacagagcgagac

SEQ ID NO: 67168 - DNA, 349 bp, Homo sapiens
aagacttccatttttctttaatgtaactctttcattttcagggaattacttttaaacgtgtaggtgttccttctacaatggatttagttaaatctaaaagcatggatgccatcaggtatgctttctgaacttgctgaataattgtttcttttgtattaggctattcatctgtaagctctcccagttcaaatagcagaaaattttaccaccagttttaccagcagacatttagttatattaaaatataaaacagtggctcatgcctgtaattccagcactttgggaggctgaggcgggcagctcatgaggtcaggagattgagaccatcctggctaacacggtgaaaccc

SEQ ID NO: 67169 - DNA, 444 bp, Homo sapiens
aaatattttaaaataattttaatgaaacaaataatgtggtattttctttcttcaaagcatttggccatccagtgtcattggtctcagaggccagcagttattggagatgtccttcaagtctacagtgggtctgaagggagggctattattttctgtgagaccaagaagaatgtaactgaaatggccatgaatccacacataaaacaggtaagtctttttttcatgctttctctaattgaaattatggggatgaatcactgaacgaaaattatattgtcctttgtggaccagatttgatagtcattctcaaaactgagttgtaaggctgggcatggtggcccacacctgtaatcctgtgacctgataagtcaggatagaattttatcagttttgtttgtttgtcttgagacagggtctccctcttatgcccaggctggagtgcag

SEQ ID NO: 67170 - DNA, 2565 bp, Homo sapiens
  misc_feature (2189)..(2189): n is a, c, g, or t
gtgctcaggagctcaacttttacttcagctgttattaaccttcaaccacaagacaataacatctgttccttttatcccaattttacgtgcggcattcttagccatatctacactgtgtttttatgcacatcatcataccctgttgtagggctataaagaccctactatggtagaattgggagtggactgagggattaggacaaaaggatgtggaaaaccgcagatctagagatgcatagctattctcataacctaggaagagaggtggatttctccgtcatcaatagctgaacactccttgtgtttctaagtattgaatccataaagttacatgcaaacatacagcccttgccttcaggccaagccgtagttatgcagaaggcttgaagcaatcacagatttaacatttgtggttccagctattcaggaccaattcccaaactccacgacatgtaacaatttgtaattttgctaggacacagtttgatgcttaggttttaaggctggtgtgctagacgttatcaagtggtttgtgagagtagccctgtgtctccattgggtagagtagctgggtcgcaaggatcatgaagagatgaagaaatggctgtgaaaagccaactagcctcggtgatagtaagcaaaggtatagaaacactaaggaagttaccctttgtattgtcaaaggtttcagttttgtgtaaggtggtgattcacgggcagttaatctccatcactaaaattaaatccttttttattcattgcaaatagataatctgtggaagacattttggcttttctcgctagcagaaaatgtgaggcttcttcaggtttttcctgttcattgtttcacgggagcatcttccccaaaacactgcaaaactcaaagttctcaggctgatgtggcagaaagagcattgatctcggcttcaggagctaaattctctagtcctgactgtgccactaacagactgtgggacttcagacaagtacattcctttctcgggtttcttatgtcaaatggacagcgtgagaaggatcacaatgaaccagggatcagcttcacgattaaaacctaagacttaagagacggacatctgtccgttcctggctacacctccggcccatctggcccaccccaaactgcgcgaagcccctctccaccgacgccaggcctgtggcctcgcgcgaagctgttggtcgttaacatctcccccgcaatgggcgggatggagggcttcagcttccggctgcaaatggcgaggcggcgcgcggcgttgcccactggcctcggcatgggcctgcccacgcacccgcccagcgcgcgccggaccctgtctaccgccgttgaagggcttcccagccctagcagtgcgtactgggaagcccccaaaaggctctgcgaggccgaggagacccgttcggagtgggggaggggaagataaaccgaactatttatgttaatcagtgcatgcttcctttatggagattggccagggttttactctagtaaccaatcacttcagaacaagggcgggcccgttgatatctctcacactcattggttgagaggttgcggcgcaatggaaggtcttaaaccgagagtatccgggattatttttccccgccgtgcggtgcgtgtcccggaagtgacgcatggccaaggccgggcggccgccttgcccccgcttcctttcacgctgtcgctgcccgtaggtggttgtggccactgtgcccggagggaggcggcggtggccagtaatgcctgggaaactcctctggggggacattatggagctggaagcacccttggaggagtccgagagccagaagaaggagaggcaaaaggtgcgctgagcatgggccgcgcctccttttgggctgcgccggcttgggcggggaggggaactgtctgtccctgatgatggcctgtcagaaccgggccggagcatccgagggcctcccttcgcgccgccctcggccctctggggtcgctcagggaccgtttccacctccaccctcccgacctggagaaagatggccctgggctttgggcctctcctccgcgtggcccctcagcccttcccgttggcgcctgaatctcagatgggcagactcaagctcccatcaccatggaatctgttctttctcttctgaagcagtgacgcttgccatttcgttttcattggccntcttagaagatgattaagaaaaaatgattgctttgaatatgtgttgcttctgtcaccccgtcccctgtgcaagaatcctggggaaagcgatcttaggtttacagacctcaataactagtctgtagaggcttaaggaaaagtgtcactgagacttgccaggatttgtcagtgatggagatcgtgtgggttgcattattaatagcctttactgtcagtattttcattcaatccgcaggtgtttattgaacctaatttgtaccatactctttgctgagtaccaaggaggttaaactaaataagtaaagaaatggtctctgctctcaaggagcctgtagaggagttgtagtctttcctcctcccagccccctgccctcca

SEQ ID NO: 67171 - DNA, 3907 bp, Homo sapiens
gtgctcaggagctcaacttttacttcagctgttattaaccttcaaccacaagacaataacatctgttccttttatcccaattttacgtgcggcattcttagccatatctacactgtgtttttatgcacatcatcataccctgttgtagggctataaagaccctactatggtagaattgggagtggactgagggattaggacaaaaggatgtggaaaaccgcagatctagagatgcatagctattctcataacctaggaagagaggtggatttctccgtcatcaatagctgaacactccttgtgtttctaagtattgaatccataaagttacatgcaaacatacagcccttgccttcaggccaagccgtagttatgcagaaggcttgaagcaatcacagatttaacatttgtggttccagctattcaggaccaattcccaaactccacgacatgtaacaatttgtaattttgctaggacacagtttgatgcttaggttttaaggctggtgtgctagacgttatcaagtggtttgtgagagtagccctgtgtctccattgggtagagtagctgggtcgcaaggatcatgaagagatgaagaaatggctgtgaaaagccaactagcctcggtgatagtaagcaaaggtatagaaacactaaggaagttaccctttgtattgtcaaaggtttcagttttgtgtaaggtggtgattcacgggcagttaatctccatcactaaaattaaatccttttttattcattgcaaatagataatctgtggaagacattttggcttttctcgctagcagaaaatgtgaggcttcttcaggtttttcctgttcattgtttcacgggagcatcttccccaaaacactgcaaaactcaaagttctcaggctgatgtggcagaaagagcattgatctcggcttcaggagctaaattctctagtcctgactgtgccactaacagactgtgggacttcagacaagtacattcctttctcgggtttcttatgtcaaatggacagcgtgagaaggatcacaatgaaccagggatcagcttcacgattaaaacctaagacttaagagacggacatctgtccgttcctggctacacctccggcccatctggcccaccccaaactgcgcgaagcccctctccaccgacgccaggcctgtggcctcgcgcgaagctgttggtcgttaacatctcccccgcaatgggcgggatggagggcttcagcttccggctgcaaatggcgaggcggcgcgcggcgttgcccactggcctcggcatgggcctgcccacgcacccgcccagcgcgcgccggaccctgtctaccgccgttgaagggcttcccagccctagcagtgcgtactgggaagcccccaaaaggctctgcgaggccgaggagacccgttcggagtgggggaggggaagataaaccgaactatttatgttaatcagtgcatgcttcctttatggagattggccagggttttactctagtaaccaatcacttcagaacaagggcgggcccgttgatatctctcacactcattggttgagaggttgcggcgcaatggaaggtcttaaaccgagagtatccgggattatttttccccgccgtgcggtgcgtgtcccggaagtgacgcatggccaaggccgggcggccgccttgcccccgcttcctttcacgctgtcgctgcccgtaggtggttgtggccactgtgcccggagggaggcggcggtggccagtaatgcctgggaaactcctctggggggacattatggagctggaagcacccttggaggagtccgagagccagaagaaggagaggcaaaagagtgacagaaggaagtcaaggcaccattatgactcggatgagaaatcagaaacaagagaaaatggtgttacagatgacctggatgctcccaaggccaaaaaatctaaaatgaaagagaagctaaatggagacactgaagaaggatttaatagactttcagatgaattctccaaatctcataagtcaagaagaaaagatctaccaaatggagatatagatgaatatgaaaaaaaatcaaagcgagtatcatctttagatacttctactcataaatcaagtgataataaactagaggagaccttaacacgtgaacagaaagaaggagccttctccaattttcctatttctgaagagactataaagcttctgaaaggtcgaggggtaacatatctctttcctattcaagttaagacctttggtcctgtatatgaaggaaaagatttaatagctcaagcacggacaggaacaggaaagacattctcttttgccatccccttaattgaaagactccaaagaaatcaagaaacaattaaaaaaagccgctcaccaaaggtacttgttttggctccaacaagggaactggcaaaccaagtagccaaagacttcaaagatataactaggaaactcagcgtggcgtgtttttatggtggaacatcatatcaaagccaaattaatcatattcgaaatggtattgacatcttggttggaacacctggtcgtatcaaagaccatctgcagagtggccgattggatctttctaaactgcgacatgttgtgcttgatgaagtggatcagatgttagatttaggtttcgctgaacaagttgaagatattattcatgaatcctacaaaactgattctgaagacaatcctcagactttacttttttctgcaacttgcccacagtgggtatacaaagttgcaaaaaaatacatgaaatccagatatgaacaggttgaccttgttggaaaaatgactcaaaaggctgcaactactgtggaacatttggccatccagtgtcattggtctcagaggccagcagttattggagatgtccttcaagtctacagtgggtctgaagggagggctattattttctgtgagaccaagaagaatgtaactgaaatggccatgaatccacacataaaacagggaattacttttaaacgtgtaggtgttccttctacaatggatttagttaaatctaaaagcatggatgccatcaggtctctggcttccgtttcttatgctgctgttgattttttccgaccatcagctcagagactgatagaagagaaaggtgcagtggatgcattggctgcagctttagcccacatttctggtgcatcaagctttgaaccacgatctttgatcacctctgataaggggtttgtgaccatgactctggaaagcctagaggaaatacaggatgtcagctgtgcttggaaagaacttaacagaaagctgagtagtaatgcagtgtctcagattaccagaatgtgcctcctgaaagggaatatgggtgtttgctttgatgttcctacaactgagtcagaaaggttacaggcagagtggcatgattccgactggatactctcagtgccagccaaattacctgaaattgaagaatattatgatggaaacacatcttctaattccagacagaggagtggctggtcaagtggtcgatcaggccggtcaggccggtcaggtggtcgatctggcggccggtcaggtagacagagtcgacaaggaagtcgctcaggaagtcgacaagatggtagaagacgaagtgggaatagaaatcgatcaagaagtgggggccacaaacggagttttgactgagtatttgatagttaatctaccagtgtgagcttgcctatttctgcctaatcatgtacattatccaccaaaaattaggtcatcatagttgaggtatgtgtctgctatttgcaaagaagttggtcgtatttttttaaaaagtatttcacaagaatggaacaaatctacttatccagttatacctttgaataaaaaaacctccttttattgtctcttttca

SEQ ID NO: 67172 - DNA, 4147 bp, Homo sapiens
gtgctcaggagctcaacttttacttcagctgttattaaccttcaaccacaagacaataacatctgttccttttatcccaattttacgtgcggcattcttagccatatctacactgtgtttttatgcacatcatcataccctgttgtagggctataaagaccctactatggtagaattgggagtggactgagggattaggacaaaaggatgtggaaaaccgcagatctagagatgcatagctattctcataacctaggaagagaggtggatttctccgtcatcaatagctgaacactccttgtgtttctaagtattgaatccataaagttacatgcaaacatacagcccttgccttcaggccaagccgtagttatgcagaaggcttgaagcaatcacagatttaacatttgtggttccagctattcaggaccaattcccaaactccacgacatgtaacaatttgtaattttgctaggacacagtttgatgcttaggttttaaggctggtgtgctagacgttatcaagtggtttgtgagagtagccctgtgtctccattgggtagagtagctgggtcgcaaggatcatgaagagatgaagaaatggctgtgaaaagccaactagcctcggtgatagtaagcaaaggtatagaaacactaaggaagttaccctttgtattgtcaaaggtttcagttttgtgtaaggtggtgattcacgggcagttaatctccatcactaaaattaaatccttttttattcattgcaaatagataatctgtggaagacattttggcttttctcgctagcagaaaatgtgaggcttcttcaggtttttcctgttcattgtttcacgggagcatcttccccaaaacactgcaaaactcaaagttctcaggctgatgtggcagaaagagcattgatctcggcttcaggagctaaattctctagtcctgactgtgccactaacagactgtgggacttcagacaagtacattcctttctcgggtttcttatgtcaaatggacagcgtgagaaggatcacaatgaaccagggatcagcttcacgattaaaacctaagacttaagagacggacatctgtccgttcctggctacacctccggcccatctggcccaccccaaactgcgcgaagcccctctccaccgacgccaggcctgtggcctcgcgcgaagctgttggtcgttaacatctcccccgcaatgggcgggatggagggcttcagcttccggctgcaaatggcgaggcggcgcgcggcgttgcccactggcctcggcatgggcctgcccacgcacccgcccagcgcgcgccggaccctgtctaccgccgttgaagggcttcccagccctagcagtgcgtactgggaagcccccaaaaggctctgcgaggccgaggagacccgttcggagtgggggaggggaagataaaccgaactatttatgttaatcagtgcatgcttcctttatggagattggccagggttttactctagtaaccaatcacttcagaacaagggcgggcccgttgatatctctcacactcattggttgagaggttgcggcgcaatggaaggtcttaaaccgagagtatccgggattatttttccccgccgtgcggtgcgtgtcccggaagtgacgcatggccaaggccgggcggccgccttgcccccgcttcctttcacgctgtcgctgcccgtaggtggttgtggccactgtgcccggagggaggcggcggtggccagtaatgcctgggaaactcctctggggggacattatggagctggaagcacccttggaggagtccgagagccagaagaaggagaggcaaaagagtgacagaaggaagtcaaggcaccattatgactcggatgagaaatcagaaacaagagaaaatggtgttacagatgacctggatgctcccaaggccaaaaaatctaaaatgaaagagaagctaaatggagacactgaagaaggatttaatagactttcagatgaattctccaaatctcataagtcaagaagaaaagatctaccaaatggagatatagatgaatatgaaaaaaaatcaaagcgagtatcatctttagatacttctactcataaatcaagtgataataaactagaggagaccttaacacgtgaacagaaagaaggagccttctccaattttcctatttctgaagagactataaagcttctgaaaggtcgaggggtaacatatctctttcctattcaagttaagacctttggtcctgtatatgaaggaaaagatttaatagctcaagcacggacaggaacaggaaagacattctcttttgccatccccttaattgaaagactccaaagaaatcaagaaacaattaaaaaaagccgctcaccaaaggtacttgttttggctccaacaagggaactggcaaaccaagtagccaaagacttcaaagatataactaggaaactcagcgtggcgtgtttttatggtggaacatcatatcaaagccaaattaatcatattcgaaatggtattgacatcttggttggaacacctggtcgtatcaaagaccatctgcagagtggccgattggatctttctaaactgcgacatgttgtgcttgatgaagtggatcagatgttagatttaggtttcgctgaacaagttgaagatattattcatgaatcctacaaaactgattctgaagacaatcctcagactttacttttttctgcaacttgcccacagtgggtatacaaagttgcaaaaaaatacatgaaatccagatatgaacaggttgaccttgttggaaaaatgactcaaaaggctgcaactactgtggaacatttggccatccagtgtcattggtctcagaggccagcagttattggagatgtccttcaagtctacagtgggtctgaagggagggctattattttctgtgagaccaagaagaatgtaactgaaatggccatgaatccacacataaaacagaatgcccagtgtttacatggggacattgcacagtcacaaagagaaattacactaaaaggcttcagagaaggtagttttaaagttttggtggcaaccaatgtggctgcccgtggtttggacattcctgaagttgacctggtgattcaaagttctcctcctcaggatgttgagtcctatatccatcgctctggacgcacaggtagagctggacggacagggatttgtatatgtttttatcaaccaagagaaagaggtcaactaagatatgtggaacaaaaagcaggaattacttttaaacgtgtaggtgttccttctacaatggatttagttaaatctaaaagcatggatgccatcaggtctctggcttccgtttcttatgctgctgttgattttttccgaccatcagctcagagactgatagaagagaaaggtgcagtggatgcattggctgcagctttagcccacatttctggtgcatcaagctttgaaccacgatctttgatcacctctgataaggggtttgtgaccatgactctggaaagcctagaggaaatacaggatgtcagctgtgcttggaaagaacttaacagaaagctgagtagtaatgcagtgtctcagattaccagaatgtgcctcctgaaagggaatatgggtgtttgctttgatgttcctacaactgagtcagaaaggttacaggcagagtggcatgattccgactggatactctcagtgccagccaaattacctgaaattgaagaatattatgatggaaacacatcttctaattccagacagaggagtggctggtcaagtggtcgatcaggtagacagagtcgacaaggaagtcgctcaggaagtcgacaagatggtagaagacgaagtgggaatagaaatcgatcaagaagtgggggccacaaacggagttttgactgagtatttgatagttaatctaccagtgtgagcttgcctatttctgcctaatcatgtacattatccaccaaaaattaggtcatcatagttgaggtatgtgtctgctatttgcaaagaagttggtcgtatttttttaaaaagtatttcacaagaatggaacaaatctacttatccagttatacctttgaataaaaaaacctccttttattgtctcttttca

SEQ ID NO: 67173 - DNA, 3271 bp, Homo sapiens
gtgctcaggagctcaacttttacttcagctgttattaaccttcaaccacaagacaataacatctgttccttttatcccaattttacgtgcggcattcttagccatatctacactgtgtttttatgcacatcatcataccctgttgtagggctataaagaccctactatggtagaattgggagtggactgagggattaggacaaaaggatgtggaaaaccgcagatctagagatgcatagctattctcataacctaggaagagaggtggatttctccgtcatcaatagctgaacactccttgtgtttctaagtattgaatccataaagttacatgcaaacatacagcccttgccttcaggccaagccgtagttatgcagaaggcttgaagcaatcacagatttaacatttgtggttccagctattcaggaccaattcccaaactccacgacatgtaacaatttgtaattttgctaggacacagtttgatgcttaggttttaaggctggtgtgctagacgttatcaagtggtttgtgagagtagccctgtgtctccattgggtagagtagctgggtcgcaaggatcatgaagagatgaagaaatggctgtgaaaagccaactagcctcggtgatagtaagcaaaggtatagaaacactaaggaagttaccctttgtattgtcaaaggtttcagttttgtgtaaggtggtgattcacgggcagttaatctccatcactaaaattaaatccttttttattcattgcaaatagataatctgtggaagacattttggcttttctcgctagcagaaaatgtgaggcttcttcaggtttttcctgttcattgtttcacgggagcatcttccccaaaacactgcaaaactcaaagttctcaggctgatgtggcagaaagagcattgatctcggcttcaggagctaaattctctagtcctgactgtgccactaacagactgtgggacttcagacaagtacattcctttctcgggtttcttatgtcaaatggacagcgtgagaaggatcacaatgaaccagggatcagcttcacgattaaaacctaagacttaagagacggacatctgtccgttcctggctacacctccggcccatctggcccaccccaaactgcgcgaagcccctctccaccgacgccaggcctgtggcctcgcgcgaagctgttggtcgttaacatctcccccgcaatgggcgggatggagggcttcagcttccggctgcaaatggcgaggcggcgcgcggcgttgcccactggcctcggcatgggcctgcccacgcacccgcccagcgcgcgccggaccctgtctaccgccgttgaagggcttcccagccctagcagtgcgtactgggaagcccccaaaaggctctgcgaggccgaggagacccgttcggagtgggggaggggaagataaaccgaactatttatgttaatcagtgcatgcttcctttatggagattggccagggttttactctagtaaccaatcacttcagaacaagggcgggcccgttgatatctctcacactcattggttgagaggttgcggcgcaatggaaggtcttaaaccgagagtatccgggattatttttccccgccgtgcggtgcgtgtcccggaagtgacgcatggccaaggccgggcggccgccttgcccccgcttcctttcacgctgtcgctgcccgtaggtggttgtggccactgtgcccggagggaggcggcggtggccagtaatgcctgggaaactcctctggggggacattatggagctggaagcacccttggaggagtccgagagccagaagaaggagaggcaaaagagtgacagaaggaagtcaaggcaccattatgactcggatgagaaatcagaaacaagagaaaatggtgttacagatgacctggatgctcccaaggccaaaaaatctaaaatgaaagagaagctaaatggagacactgaagaaggatttaatagactttcagatgaattctccaaatctcataagtcaagaagaaaagatctaccaaatggagatatagatgaatatgaaaaaaaatcaaagcgagtatcatctttagatacttctactcataaatcaagtgataataaactagaggagaccttaacacgtgaacagaaagaaggagccttctccaattttcctatttctgaagagactataaagcttctgaaaggtcgaggggtaacatatctctttcctattcaagttaagacctttggtcctgtatatgaaggaaaagatttaatagctcaagcacggacaggaacaggaaagacattctcttttgccatccccttaattgaaagactccaaagaaatcaagaaacaattaaaaaaagccgctcaccaaaggtacttgttttggctccaacaagggaactggcaaaccaagtagccaaagacttcaaagatataactaggaaactcagcgtggcgtgtttttatggtggaacatcatatcaaagccaaattaatcatattcgaaatggtattgacatcttggttggaacacctggtcgtatcaaagaccatctgcagagtggccgattggatctttctaaactgcgacatgttgtgcttgatgaagtggatcagatgttagatttaggtttcgctgaacaagttgaagatattattcatgaatcctacaaaactgattctgaagacaatcctcagactttacttttttctgcaacttgcccacagtgggtatacaaagttgcaaaaaaatacatgaaatccagatatgaacaggttgaccttgttggaaaaatgactcaaaaggctgcaactactgtggaacatttggccatccagtgtcattggtctcagaggccagcagttattggagatgtccttcaagtctacagtgggtctgaagggagggctattattttctgtgagaccaagaagaatgtaactgaaatggccatgaatccacacataaaacagaatgcccagtgtttacatggggacattgcacagtcacaaagagaaattacactaaaaggcttcagagaaggtagttttaaagttttggtggcaaccaatgtggctgcccgtggtttggacattcctgaagttgacctggtgattcaaagttctcctcctcaggatgttgagtcctatatccatcgctctggacgcacaggtagagctggacggacagggatttgtatatgtttttactcactcagaggtgtcgcgggtcctctagaaccgcacg

SEQ ID NO: 67174 - DNA, 276 bp, Homo sapiens
tcatctcctctagaggttctggaatcagcagcctgtgaaaaactgcccactcctactcctcaagtagtaaaggaaggtgattcctttccagataccttggcaaaaaatgggcaagagatagccccagcccagatttccaaatcattaatggtagataactacaccaaagatggagtcccaggtcaagaaagacccaagggtccctctgctgttgtgccctctacaagcacaggaggagttgctctacctattacaacagccatagaaacagttaac

SEQ ID NO: 67175 - DNA, 456 bp, Homo sapiens
tggaggaggccctgcagcaggccaaggaggacttggcgcggctgctgcgtgactaccaggagctgatgaacgtgaagctggccctagatgtggagatcgccacctaccgcaaactgctggagggcgaggagtgcaggatgtctggagacctcagcagcaatgtgactgtgtctgtgacaagcagcaccatttcatcaaatgtggcatccaaggctgcctttggaggttctggaggtagagggtccagttccggaggaggatacagctctggaagcagcagttatggctctggaggccgacagtctggctccagaggcggtagtggaggaggaggttctatctctggaggaggatatggctctggcggtggttctggaggaagatacggatctggtggtggctctaagggagggtccatctctggaggaggatatggctctggaggtggaaaacaca

SEQ ID NO: 67176 - DNA, 403 bp, Homo sapiens
atttgcgggtggaagtggtaaaacaacatgcatacagaacctaagtgttccaccacaacttgttttttctctctcccttacaggatgtctggagacctcagcagcaatgtgactgtgtctgtgacaagcagcaccatttcatcaaatgtggcatccaaggctgcctttggaggttctggaggtagagggtccagttccggaggaggatacagctctggaagcagcagttatggctctggaggccgacagtctggctccagaggcggtagtggaggaggaggttctatctctggaggaggatatggctctggcggtggttctggaggaagatacggatctggtggtggctctaagggagggtccatctctggaggaggatatggctctggaggtggaaaacaca

SEQ ID NO: 67177 - DNA, 470 bp, Homo sapiens
agcatcttgggtgacttaatctggctgaagcaattggaaggggaaaagctaccccaggccatcagcaagccagcatgacaaacagggagtggctttcttcaggaggttgctctgtccctgtctagaggcaatgcctcctatgcccagcttgatgtctggagacctcagcagcaatgtgactgtgtctgtgacaagcagcaccatttcatcaaatgtggcatccaaggctgcctttggaggttctggaggtagagggtccagttccggaggaggatacagctctggaagcagcagttatggctctggaggccgacagtctggctccagaggcggtagtggaggaggaggttctatctctggaggaggatatggctctggcggtggttctggaggaagatacggatctggtggtggctctaagggagggtccatctctggaggaggatatggctctggaggtggaaaacaca

SEQ ID NO: 67178 - DNA, 405 bp, Homo sapiens
gggtctgcaaagcatgccctgagcacccgttcacagccagctatgtgcaggatcctcacaccaaggagctggggtgggagttgagtcaatagccaggcctgcaccataggcgtgacccagacaggccatcacatggagatggaaaggcagcagataaggccacttcagagagacagggtggagcccatgtcctgctcctgagaccaagcaatgcctcttcatgcttccttgcagaccattccctcccactagtccagcccttggcaaccataggcttctttttttttttttttctcagacagggttttgctctgttgcccaggctggagtgcaatggcacaatcacagcttactacagcttattgcaatctccacttcccaggctcgagtgatcctccagcctca

SEQ ID NO: 67179 - DNA, 477 bp, Homo sapiens
aactaaagcaacagcagttaaaaaagacaaagaggaacattatataatggtagaaggactagtccaagaggaaaataccacaatcctaaatatatatacacctaagactggagctcctacatttataaaacaattactactagacctaagaaatgagatagacggcaacacaataatagtgggggactttagactgggcgtggtggctcaagcctgtaatctcagcactttgagaggccaaggcaggaggatcacttgaggtcaggagtttgagaccagcctggccaatatagtgaaacatcttctctactaaaaatacaaaaaattagccaggcgtggtggcgtgtgcctgtaatcccagctactggggagactgaggctggagaattttttgaacccagggggtggaggttgccatgagccaagattgtgcaactgtactccagcctggtgacagagtgagactctgtctcaaaa

SEQ ID NO: 67180 - DNA, 554 bp, Homo sapiens
gaaaagcaaccatagtggaaagataaaaaagatagaaaataagttatgaatgactacagacttctcaagatcaacagtggaggctgggagtcattgaaatactagcttcagagtgttaacagaaaattggagatgtagagcactgtatgcagctaaagtgtcattcaagagtcagggtgaaaaacatatatttacagaaatgactaaaatattttagcattgaaagaccctgtcttgaagaactactgaaggatatactccaggaagaaggaatttgaacccagaaagaaggaatacattgaaagaagtaataatgaacaacgaacaacaaaacattggtaaacatgagtaaatataaataaaccttgactatacatttaaaaaaaaaatgcctttctagcttgggaggacaaacaaacaaaatgtctagagcgggttattgtaattgaacagattttaatgcccttactttgtttaggtagaaaatatagtatccaagctagcagagatatgaagtggaattaggaaatttgatttattcaatagaaggcaag

SEQ ID NO: 67181 - DNA, 297 bp, Homo sapiens
cctgagaacaaacacaggtgcaaacaaaaccagggcgtttcagctggtaaatgctgccatgaggcagaacttgcttttccccaggctggaaattggagaacagtttgtcctggaccaagtgatgaaaggcagggcgacatgggggaagaattggaactcccagtcctatggctcagctgtaaattctgcagagtagagcagagaagggattgttttgttccctcttgggagaggacgtgatgctgagggcccagtgtgagaggctttgggcacagagcgacctttaatgattcccag

SEQ ID NO: 67182 - DNA, 430 bp, Homo sapiens
aaaatagttctccaaatagcttctgtgtaactcatatccagagtgagcatttatgtgtttgtaccacaagggtttctatacagtggaataaaaaggtgacccaagtaaatatatttaccagctatattataataataataattcaccaccaatcattacgcattgttctaaagtgtttaccaagtataaatcattttaattcttacaaaaaccctctgaggtactatcactactcccattttgtatctaaggaaactggggcaaaccgacatatgtaacttgctcagcatcccaagactgtgaatggtggagtctgggattgtagctatagcccgtgctacacgccacatttctatactgactgtgcatttctatacaggcagtgcatgaaccatttaaattcttaggaaacatgtttgtagatgcagtc

SEQ ID NO: 67183 - DNA, 675 bp, Homo sapiens
acggaaagaatagactaagatggtgtagtggccgtgctatataactacgctgtgcctgggaagagacttctagaattggaaatactgttttgtcctgttttagggtattgttgggtatagcagcttgaattgtggtggtgacaaataagaataaaagtagagagattaatatgtgggatcagaccaaggaatagttaggtattaataattcactattggttagatagtagtaggcttttaggtagagtgttttggttcaacagtttcagactgctttgtattaaacaagtttttattttggtatagtagactagtcatttccatttgtccactggtaaggtattaaactatactggatgggaaggagagcatctaatgtagtaggagcagtgttaatagtggcttggtggcatgaaatgagttggagtgttgagaaattgtcagctgtttttatggttagggagtttaatgtggtgtcagggcagctgggagaggtcagaggccaaataataaagggacttttttgtatacattacaaggaaattttttgtttttcgttttttttttttaaaacgtgaacagtggggaactgttgaagaggttagtcagtagaccaatatcacttttttcaacagtttatggtttccccttatttttaatgatttactcttattt

SEQ ID NO: 67184 - DNA, 641 bp, Homo sapiens
ttaggtatattattctcttgtcctttgtaggagttctagaattggaaatactgttttgtcctgttttagggtattgttgggtatagcagcttgaattgtggtggtgacaaataagaataaaagtagagagattaatatgtgggatcagaccaaggaatagttaggtattaataattcactattggttagatagtagtaggcttttaggtagagtgttttggttcaacagtttcagactgctttgtattaaacaagtttttattttggtatagtagactagtcatttccatttgtccactggtaaggtattaaactatactggatgggaaggagagcatctaatgtagtaggagcagtgttaatagtggcttggtggcatgaaatgagttggagtgttgagaaattgtcagctgtttttatggttagggagtttaatgtggtgtcagggcagctgggagaggtcagaggccaaataataaagggacttttttgtatacattacaaggaaattttttgtttttcgttttttttttttaaaacgtgaacagtggggaactgttgaagaggttagtcagtagaccaatatcacttttttcaacagtttatggtttccccttatttttaatgatttactcttattt

SEQ ID NO: 67185 - DNA, 3002 bp, Homo sapiens
  misc_feature (1)..(4): n is a, c, g, or t
  misc_feature (7)..(7): n is a, c, g, or t
  misc_feature (1132)..(1132): n is a, c, g, or t
  misc_feature (1506)..(1506): n is a, c, g, or t
  misc_feature (1670)..(1670): n is a, c, g, or t
nnnnagngacagatgcgtcctggcaacagtcggcagagttgctgcggtttgtgcccttgcgatttctttttctgagagaggagagtcaaactcccacctccagctctcgaaggagcttttcctgagggcactgcaaagaggctccttttctttcagatcagcagtatcagcccaagtcagaaccatggctccaaaacaaaagaaaaagacatcacgtggcaaaaaaagactaaaaccagtattagctgctagtgaagacatggaaccagtaaatatggagagcatgggtcatccagaaatttatcctttagtattaaccaccaagacccaagaaatatttaactgccgaatagatgaagatgtcacagatgaacaaccttataagcttatcaataaagaagacatttttgaggacctgcgcaacagagctgcagtatctgatttccacccagtcaaaaaaattgtccaggaatatcctggaaatgagcttctgcttgtttatgacaaagacttcaaatatggacttaacttttatcttattgcaactgaagagggcaaagaaaactatttaaatcccccagaagtaccagaagaacaagaagaatataaagaacatattcctgaagatgtgtatatttataaaccacctgtctctaaaccatgggtttctttgggcagtgaaaaagaaattgaggaagaatcagttacggaatctacaaagcagattacatatatgatttctcgaaaacgaagtgaatttggtgcaccaattaagttcagtgaccagaatgcttccagtgtaaaagatgcctatattgaatgtacagcctacccagataaaaattttacccttaaacaacttgaaaaagatgttggcatgcaagtaatcccccaaataaaggacataagcactcagacaaaatggacatatcctaaaaatgctactacgcaatattatccaagagaattctcagaagaggaaaaagagacactcaaacaatcaaagcctttggttgattttcttaacaatgcatccataagtgttgaaatagccctgcagcaaaatgaaatcatgaacacatttattgatgactggaaatacctcgcagaagaagaaggcacctttgggganaagaccgatacccacctgaaagagtaccagtcctttaccgaccttcatagcccaacggagaaaatgattacctgtgtctcatggcatccaactatctatgggctaatagctgtgtcggtagccgtgcgactttcttttgaagacagagttcacttttctggtaaattattgctgcagccatcactgattcttttctggagcttctctgatcctatacatcctcagttaatgctggagagcccagatgacatcttctgcttcaagttctgtccgagtgatcctaatatcattgctggaggctgtatcaatgggcagattgtcatgtgggatatcaccgcacatgcagatcgcatagaaaacattaaggcaggtgntagtagaagtaaaagagccacactgaagcctatgtttctccttgaaccggagagtaataaagaagcaatgtatatcagacactgtgcagtctcttcaatagaaaatggacataagaaagtaattacagatatacactggttgtctgacacatttgagattaacngaatgggctccgtctttgagaatcgaagtggaatatgctgtcaacttgtcacatgttcagcagattgcacaatatgtttttgggatattagaccacagaaacctttaaccccccaaacaacagagaaaaagaaggaggaaagtattgaaattccttttgatgtaccatctacttttttgcatctggatctctcctggaaacctctcactaaggtaaggctgtccaagggtgaaacaagtttagaccactgtccaaccaagataagcctgaatgaagaccatcttctttgcaaaacacaagacaaaatgttagcacagagcaaaacagagaaggcagaagaaatgaacccgtatcataatctggaaagtgggatggccaatcttctcaagccaatagatgacttctgcacaaagttctttgtgggaacagaggaaggcgaagtgatatacacagattggaaaatggaaaaagaccctgaaactggccgacttatgtcaaagaagccagtgagccaccacaccattcacgacggaactgtccacactattcagagatcacctttctacaacgacattattctcacggttggaggttggaacgtggccatatggaaagaaggtgttatgactggaccgctccttcagtcatgctgtgcaccaaaaaggtacacctcaggccactggtccctgactcggcccggagttttctacatcggccgagaagatggatacattgatatctgggaccttctggagaaaacccatgaaccagcccagtctcaaaacatttgcataactatgatcacctacatcaaaccctggatcttttcttctaaacagcaatttatagccacagctgattattatggaacactgcatatattagaaattccttggacattaagtcgcccttccaccaatgagatggcaagtgtcaaccactattttgaaagagaagtcaagcatctggaatacgtagaacagcgcaaaaaaattcgtgagcaagaaaagaaagaaatggaactagaaatggcaaagaaaaaagttaaaacatatcagaagtcaaaagaacaaatgcaggctgaattaaaaatggactatgagagttatctggaactggaaaagactgttcttatcaaccttggcctaatcaaagtcacagagaaggggtcatacatggaggtgatgtaaaaaagcttcctgaaggggtgttttggggacttcttccctctatttatttttatgtcaggtgaactggcatgctgaacatatatatatataggctcatttatagacttttatttccctgctattaaaacttttgaattttaaa

SEQ ID NO: 67186 - DNA, 594 bp, Homo sapiens
  misc_feature (1)..(4): n is a, c, g, or t
  misc_feature (7)..(7): n is a, c, g, or t
nnnnagngacagatgcgtcctggcaacagtcggcagagttgctgcggtttgtgcccttgcgatttctttttctgagagaggagagtcaaactcccacctccagctctcgaaggagcttttcctgagggcactgcaaagaggctccttttctttcagatcagcagtatcagcccaagtcagaaccatggctccaaaacaaaagaaaaagacatcacttgggccggaaaggtggaggttgcagtgagccatgatcatgcccctgcactccagcctgggtgacagagtgagaccctgtctcaaaaagaaaaaaaaataaaataaaagctaacagtttataattaaaaatcatctttcatttagccttaacattttcaattttatttttatgattgttgttctgtttttaattttttattgtaatgaaatattttaaatgtttagaaaaaactacagagtagtataacaaatatctacacttaattatccagaattttaaaatattaatttttattatatttactttaaaacttttttaacaaaagaaataaatattacagacaatattccactccctctcgtatcctccctaattcc

SEQ ID NO: 67187 - DNA, 2796 bp, Homo sapiens
  misc_feature (1)..(4): n is a, c, g, or t
  misc_feature (7)..(7): n is a, c, g, or t
  misc_feature (1132)..(1132): n is a, c, g, or t
  misc_feature (1506)..(1506): n is a, c, g, or t
  misc_feature (1670)..(1670): n is a, c, g, or t
nnnnagngacagatgcgtcctggcaacagtcggcagagttgctgcggtttgtgcccttgcgatttctttttctgagagaggagagtcaaactcccacctccagctctcgaaggagcttttcctgagggcactgcaaagaggctccttttctttcagatcagcagtatcagcccaagtcagaaccatggctccaaaacaaaagaaaaagacatcacgtggcaaaaaaagactaaaaccagtattagctgctagtgaagacatggaaccagtaaatatggagagcatgggtcatccagaaatttatcctttagtattaaccaccaagacccaagaaatatttaactgccgaatagatgaagatgtcacagatgaacaaccttataagcttatcaataaagaagacatttttgaggacctgcgcaacagagctgcagtatctgatttccacccagtcaaaaaaattgtccaggaatatcctggaaatgagcttctgcttgtttatgacaaagacttcaaatatggacttaacttttatcttattgcaactgaagagggcaaagaaaactatttaaatcccccagaagtaccagaagaacaagaagaatataaagaacatattcctgaagatgtgtatatttataaaccacctgtctctaaaccatgggtttctttgggcagtgaaaaagaaattgaggaagaatcagttacggaatctacaaagcagattacatatatgatttctcgaaaacgaagtgaatttggtgcaccaattaagttcagtgaccagaatgcttccagtgtaaaagatgcctatattgaatgtacagcctacccagataaaaattttacccttaaacaacttgaaaaagatgttggcatgcaagtaatcccccaaataaaggacataagcactcagacaaaatggacatatcctaaaaatgctactacgcaatattatccaagagaattctcagaagaggaaaaagagacactcaaacaatcaaagcctttggttgattttcttaacaatgcatccataagtgttgaaatagccctgcagcaaaatgaaatcatgaacacatttattgatgactggaaatacctcgcagaagaagaaggcacctttgggganaagaccgatacccacctgaaagagtaccagtcctttaccgaccttcatagcccaacggagaaaatgattacctgtgtctcatggcatccaactatctatgggctaatagctgtgtcggtagccgtgcgactttcttttgaagacagagttcacttttctggtaaattattgctgcagccatcactgattcttttctggagcttctctgatcctatacatcctcagttaatgctggagagcccagatgacatcttctgcttcaagttctgtccgagtgatcctaatatcattgctggaggctgtatcaatgggcagattgtcatgtgggatatcaccgcacatgcagatcgcatagaaaacattaaggcaggtgntagtagaagtaaaagagccacactgaagcctatgtttctccttgaaccggagagtaataaagaagcaatgtatatcagacactgtgcagtctcttcaatagaaaatggacataagaaagtaattacagatatacactggttgtctgacacatttgagattaacngaatgggctccgtctttgagaatcgaagtggaatatgctgtcaacttgtcacatgttcagcagattgcacaatatgtttttgggatattagaccacagaaacctttaaccccccaaacaacagagaaaaagaaggaggaaagtattgaaattccttttgatgtaccatctacttttttgcatctggatctctcctggaaacctctcactaaggtaaggctgtccaagggtgaaacaagtttagaccactgtccaaccaagataagcctgaatgaagaccatcttctttgcaaaacacaagacaaaatgttagcacagagcaaaacagagaaggcagaagaaatgaacccgtatcataatctggaaagtgggatggccaatcttctcaagccaatagatgacttctgcacaaagttctttgtgggaacagaggaaggcgaagtgatatacacagattggaaaatggaaaaagaccctgaaactggccgacttatgtcaaagaagccagtgagccaccacaccattcacgacggaactgtccacactattcagagatcacctttctacaacgacattattctcacggttggaggttggaacgtggccatatggaaagaaggtgttatgactggaccgctccttcagtcatgctgtgcaccaaaaaggtacacctcaggccactggtccctgactcggcccggagttttctacatcggccgagaagatggatacattgatatctgggaccttctggagaaaacccatgaaccagcccagtctcaaaacatttgcataactatgatcacctacatcaaaccctggatcttttcttctaaacagcaatttatagccacagctgattattatggaacactgcatatattagaaattccttggacattaagtcgcccttccaccaatgagatggcaagtgtcaatccctcactctactgctcacttttgttctctgttttccagtcacacccttaactgattatttccagcctttacacatgctgattccttcaacctagaacgcttttcccctcattctaattactactcatcctacatgtcattttctcagaaaagctctcactgagcctccatcagaaggtccaggtatg

SEQ ID NO: 67188 - DNA, 2789 bp, Homo sapiens
  misc_feature (1)..(4): n is a, c, g, or t
  misc_feature (7)..(7): n is a, c, g, or t
  misc_feature (1132)..(1132): n is a, c, g, or t
  misc_feature (1506)..(1506): n is a, c, g, or t
  misc_feature (1670)..(1670): n is a, c, g, or t
nnnnagngacagatgcgtcctggcaacagtcggcagagttgctgcggtttgtgcccttgcgatttctttttctgagagaggagagtcaaactcccacctccagctctcgaaggagcttttcctgagggcactgcaaagaggctccttttctttcagatcagcagtatcagcccaagtcagaaccatggctccaaaacaaaagaaaaagacatcacgtggcaaaaaaagactaaaaccagtattagctgctagtgaagacatggaaccagtaaatatggagagcatgggtcatccagaaatttatcctttagtattaaccaccaagacccaagaaatatttaactgccgaatagatgaagatgtcacagatgaacaaccttataagcttatcaataaagaagacatttttgaggacctgcgcaacagagctgcagtatctgatttccacccagtcaaaaaaattgtccaggaatatcctggaaatgagcttctgcttgtttatgacaaagacttcaaatatggacttaacttttatcttattgcaactgaagagggcaaagaaaactatttaaatcccccagaagtaccagaagaacaagaagaatataaagaacatattcctgaagatgtgtatatttataaaccacctgtctctaaaccatgggtttctttgggcagtgaaaaagaaattgaggaagaatcagttacggaatctacaaagcagattacatatatgatttctcgaaaacgaagtgaatttggtgcaccaattaagttcagtgaccagaatgcttccagtgtaaaagatgcctatattgaatgtacagcctacccagataaaaattttacccttaaacaacttgaaaaagatgttggcatgcaagtaatcccccaaataaaggacataagcactcagacaaaatggacatatcctaaaaatgctactacgcaatattatccaagagaattctcagaagaggaaaaagagacactcaaacaatcaaagcctttggttgattttcttaacaatgcatccataagtgttgaaatagccctgcagcaaaatgaaatcatgaacacatttattgatgactggaaatacctcgcagaagaagaaggcacctttgggganaagaccgatacccacctgaaagagtaccagtcctttaccgaccttcatagcccaacggagaaaatgattacctgtgtctcatggcatccaactatctatgggctaatagctgtgtcggtagccgtgcgactttcttttgaagacagagttcacttttctggtaaattattgctgcagccatcactgattcttttctggagcttctctgatcctatacatcctcagttaatgctggagagcccagatgacatcttctgcttcaagttctgtccgagtgatcctaatatcattgctggaggctgtatcaatgggcagattgtcatgtgggatatcaccgcacatgcagatcgcatagaaaacattaaggcaggtgntagtagaagtaaaagagccacactgaagcctatgtttctccttgaaccggagagtaataaagaagcaatgtatatcagacactgtgcagtctcttcaatagaaaatggacataagaaagtaattacagatatacactggttgtctgacacatttgagattaacngaatgggctccgtctttgagaatcgaagtggaatatgctgtcaacttgtcacatgttcagcagattgcacaatatgtttttgggatattagaccacagaaacctttaaccccccaaacaacagagaaaaagaaggaggaaagtattgaaattccttttgatgtaccatctacttttttgcatctggatctctcctggaaacctctcactaaggtaaggctgtccaagggtgaaacaagtttagaccactgtccaaccaagataagcctgaatgaagaccatcttctttgcaaaacacaagacaaaatgttagcacagagcaaaacagagaaggcagaagaaatgaacccgtatcataatctggaaagtgggatggccaatcttctcaagccaatagatgacttctgcacaaagttctttgtgggaacagaggaaggcgaagtgatatacacagattggaaaatggaaaaagaccctgaaactggccgacttatgtcaaagaagccagtgagccaccacaccattcacgacggaactgtccacactattcagagatcacctttctacaacgacattattctcacggttggaggttggaacgtggccatatggaaagaaggtgttatgactggaccgctccttcagtcatgctgtgcaccaaaaaggtacacctcaggccactggtccctgactcggcccggagttttctacatcggccgagaagatggatacattgatatctgggaccttctggagaaaacccatgaaccagcccagtctcaaaacatttgcataactatgatcacctacatcaaaccctggatcttttcttctaaacagcaatttatagccacagctgattattatggaacactgcatatattagaaattccttggacattaagtcgcccttccaccaatgagatggcaagtgtcaaccactattttgaaagagaagtcaagcatctggaatacgtagaacagcgcaaaaaaattcgtgagcaagaaaagaaagaaatggaactagaaatggcaaagaaaaaagttgtaagttaaatttcagaaatgaaagatgttttcctcgaacaccagtggaaatatatttgtttggcttaatcca

SEQ ID NO: 67189 - DNA, 563 bp, Homo sapiens
  misc_feature (137)..(137): n is a, c, g, or t
  misc_feature (150)..(151): n is a, c, g, or t
  misc_feature (155)..(155): n is a, c, g, or t
  misc_feature (165)..(165): n is a, c, g, or t
  misc_feature (175)..(175): n is a, c, g, or t
  misc_feature (183)..(183): n is a, c, g, or t
  misc_feature (186)..(186): n is a, c, g, or t
  misc_feature (204)..(204): n is a, c, g, or t
  misc_feature (209)..(209): n is a, c, g, or t
  misc_feature (216)..(216): n is a, c, g, or t
tgccgaatccgtcgtgcaagacatgagagtcccgggttgaggaagggtacaagtctcttaagatccaacactcaaaagggccggttcttccaagggtgccgaattgtgggaagtggaccaaaatggctgatggcccnttaaaaacatcanntttnacaacgtcanggatttagcntaaaaagnatnggttaaaagctttggttnctagnaaaggtnagtgtgtgtggtttttttaagaagctgttttgctaaattatttttacttggaatgtttcaaacagatttcaggctgcaaacttgttttataatcgtttgcttctccaagtgaagctcagaaatacctaaaaatagctgtaacgttcgcgttaggaaagatggtgtttattccagtttgcatttttatggtgaaataaaatccttttccaatgaactaaaaaaaaaaaaaaagggcggccgctcgcgatctagaactagttttttttaatttacaaaaatataaaatatgaagacataaacccagttgccatctgcgtgacaataaaacattaatgctaacacttttt

SEQ ID NO: 67190 - DNA, 536 bp, Homo sapiens
gtaaaactcattttgtccacatgccaccaacaatggcagagaggtcccagaaagcttggttgttgaggacccatctaacaagtctcttgtcccatttccaaggcagtttcaaacacttaagcccaagtctgcaagagccaatttagaaacaatgttactcaagagaatttcagagtgcacttcctgccatgtacaatgaaggtagctacaatgaataacatgtttgatatttaatgttttcatcttctccattacccgccaggtacttagctcagaaatcaatccagagcaactagaatttttaaattatgatctctaaaaagagaaaaatttacaacacgaaagaacacttcgctttgctctaatattaaaaaatacaaagaaatgaaaactggagaccaggtgcggtgggtcacgcctgtaatccccaagttttgggaggtcaaggtggaaggataacttgagctcaggagattgaaaccagcctgggcaacatagttaagaatccatctctatttctataaatgtattttaaa

SEQ ID NO: 67191 - DNA, 558 bp, Homo sapiens
cccgggctcgcaggaattcggcacgaggtgacttagaccactttctttcaaggggactcagagagttatggaagcaaaacacgattttaatgtccccttggtaacaaggacttttgaacttagtatcctacatcatagatagttttcttttccttgaatttcctggattttttttctttctataatgttgttgattgttatcttaggtgccattttgcttttttcttttgtccaattgttctacatgtaaaaataacaattataaatgaacctgcttgtaactgctgggcagtcaggtttgtaacacctatggttttgaggaagcttgatttgatgactttaggcagtgtaaggataaatacagtagatttcaaaggacttttttatatccccacttctaaaacagtgtcatgaaaatgatgagcctgatgatgagttaatggaaatatttgggtttagaatctagagactatttcaacagctcagtggtttgttgccactagaaatttatgcatttgtcaatacctgtgaaaaaatacagaaaaaaaaagagaaaac

SEQ ID NO: 67192 - DNA, 612 bp, Homo sapiens
ctaagtggcctaaaataatgaataaactgctgaaagagtttgccctattcccaggaattatttcacacactgaaagaatctgtgacttagaccactttctttcaaggggactcagagagttatggaagcaaaacacgattttaatgtccccttggtaacaaggacttttgaacttagtatcctacatcatagatagttttcttttccttgaatttcctggattttttttctttctataatgttgttgattgttatcttaggtgccattttgcttttttcttttgtccaattgttctacatgtaaaaataacaattataaatgaacctgcttgtaactgctgggcagtcaggtttgtaacacctatggttttgaggaagcttgatttgatgactttaggcagtgtaaggataaatacagtagatttcaaaggacttttttatatccccacttctaaaacagtgtcatgaaaatgatgagcctgatgatgagttaatggaaatatttgggtttagaatctagagactatttcaacagctcagtggtttgttgccactagaaatttatgcatttgtcaatacctgtgaaaaaatacagaaaaaaaaagagaaaac

SEQ ID NO: 67193 - DNA, 451 bp, Homo sapiens
ctgggacaattcagtatggcaaaggtgaccagtgagccacagaagcctaatgaagatgtggacgaacagaccccatcaacctcaagtaccaaagggaggaagaaggggaagacaccccgtcaacgaaggtccagaagcggcgttaagggcctaaagaccaccaggaaggcgaaaagaccccttcgagggagctcgagccaaaaagccggtgaaactaacacccctgcaggaaaacctaagaaagctagaggaccaatactgcgtggtcgttatcaccggctgaaagaaaaaatgaagaaagaagaggccgacaaagagcaaagcgagacctcagttctgtgatgtctctagaggtccgccactgaaaagtcatcaatcatacagtcagtgaattctacaccaacaggttaaaaccatgaaaataaaatcaacctgaatcgaaaaaatatgt

SEQ ID NO: 67194 - DNA, 251 bp, Homo sapiens
gagttgcggggttgagggcaactctccagcatggcttactgacctgggaaggaagtctgcttttctgtgggcaaagcagactccagagactgtgaggaaaacttcacctgattcatagctgaagaggctataattccttttgttaatatccagcaatatgttttggtcttgaacatgtgaggcttcacatgtgcatgtgtgtgcatattcatacatggaaaatgtatggggagaaacaaatgtggaggcag

SEQ ID NO: 67195 - DNA, 279 bp, Homo sapiens
tacttgtcagtttgcctctcagacttaataccaggagggaataaaaatcatcattactctctagctgctcaatggcatacatgaaatgaataggaggcttaactctggtctaactggctcagtttctgcttgtatcagcagagagccagagactgaatgatccagcttcctgtccattatcccatcaagtccaaaccaggtagggatgcccagacacatgtattccatagggaaagaagaacaccaaagaggagaacaaaagaagtctcggaaaaggga

SEQ ID NO: 67196 - DNA, 451 bp, Homo sapiens
gcctactactactactaaatttgcggcggtcgacttttgtttttgtttttgtattgtttatcctgtgtttttgtttttgattacaaatttaactttgcccttgttggatctgtgatttatcatgcattcttacagtatgtttgaagtttttaaactattatcaacaatgaagactgttaaaaaaaaattagttgccaggcacggtggctcaagcctgtattcctagcactttgggaggctgaggcgggccgatcacctgagatcgggagttcgagaccagcctgaccaacatggagaaaccctgtctctactaaaaatacaaaattagccaagcgtggtggcacatacctgtaatcgcagctactcaggaggctgaggcaggagaatcacttgaacctgagagaccagaggtttcagtgagctgagatcgcacccttgcactccatcctgg

SEQ ID NO: 67197 - DNA, 647 bp, Homo sapiens
ggggggcgtttaaaaatacttctgggataaaatatatttttctaagtaatttccaagcgcaggctagatccgaggtggcagctccagcccccgggctcgccccctcgcgggcgtgccccgcgcgccccgggcggccgaaggccgggccgccccgtcccgccccgtagttgctctttcggtagtggcgatgcgccctgcatgtctcctcacccgtggatcgtgacgactcgaaataacagaaacaaagtcaataaagtgaaaataaataaaaatccttgaacaaatccgaaaaggcttggagtcctcgcccagatctctctcccctgcgagccctttttatttgagaaggaaaaagagaaaagagaatcgtttaagggaacccggcgcccagccaggctccagtggcccgaacggggcggcgagggcggcgagggcgccgaggtccggcccatcccagtcctgtggggctggccgggcagagaccccggacccaggcccaggcctaacctgctaaatgtccccggacggttctggtctcctcggccactttcagtgcgtcggttcgttttgattctttttcttttgtgcacataagaaataaataataataataaataaagaataaaattttgtatgtcaaaaaccat

SEQ ID NO: 67198 - DNA, 4052 bp, Homo sapiens
cgggggcctggccgcgcgctcccctcccgcaggcgccacctcggacatccccgggattgctacttctctgccaacttcgccaactcgccagcacttggagaggcccggctcccctcccggcgccctctgaccgcccccgccccgcggcgctctccgaccaccgcctctcggatgaccaggttccaggggagctgagcgagtcgcctcccccgcccagcttcagccctggctgcagctgcagcgcgagccatgcgcccccagtgcaccccggcccaccgccccggggccattctgctgaccgcccagccccgagccccgacagtggcaagttgcggctactgcagttgcaagctccggccaacccggaggagccccacggggaaggcagtcgtgcgccccccgcccccgggcgccccgcagcagccgggcgttcactcatcctccctcccccaccgtccctcccttttctcctcaagtcctgaagttgagtttgagaggcgacacggcggcggcgccgcgctgctcccgctcctctgcctccccatggatatgcactgcaaagcagaccccttctccgcgatgcacccagggcacgggggtgtgaaccagctcgggggggtgtttgtgaacggccggcccctacccgacgtggtgaggcagcgcatcgtggagctggcccaccagggtgtgcggccctgtgacatctcccggcagctgcgggtcagccacggctgtgtcagcaaaatcctgggcaggtactacgagaccggcagcatcaagccgggtgtgatcggtggctccaagcccaaagtggcgacgcccaaagtggtggacaagattgctgaatacaaacgacagaacccgactatgttcgcctgggagattcgagaccggctcctggccgagggcatctgtgacaatgacacagtgcccagcgtctcttccatcaacagaatcatccggaccaaagttcagcagcctttccacccaacgccggatggggctgggacaggagtgaccgcccctggccacaccattgttcccagcacggcctcccctcctgtttccagcgcctccaatgacccagtgggatcctactccatcaatgggatcctggggattcctcgctccaatggtgagaagaggaaacgtgatgaagatgtgtctgagggctcagtccccaatggagattcccagagtggtgtggacagtttgcggaagcacttgcgagctgacaccttcacccagcagcagctggaagctttggatcgggtctttgagcgtccttcctaccctgacgtcttccaggcatcagagcacatcaaatcagaacaggggaacgagtactccctcccagccctgacccctgggcttgatgaagtcaagtcgagtctatctgcatccaccaaccctgagctgggcagcaacgtgtcaggcacacagacataccccgttgtgactggtcgtgacatggcgagcaccactctgcctggttacccccctcacgtgccccccactggccagggaagctaccccacctccaccctggcaggaatggtgcctgggagcgagttctccggcaacccgtacagccacccccagtacacggcctacaacgaggcttggagattcagcaaccccgccttactaagttccccttattattatagtgccgccccccggtccgcccctgccgctcgtgccgctgcctatgaccgccactagttaccgcggggaccacatcaagcttcaggccgacagcttcggcctccacatcgtccccgtctgaccccaccccggaggagggaggaccgacgcgacgcatgcctcccggccaccgccccagcctcaccccatcccacgacccccgcaacccttcacatcacccccctcgaaggtcggacaggacgggtggagccgcggggcgggaccctcaggcccgggcccaccgcccccagccccgcctgccgcccctccccgcctgcctggactgcgcggcgccgtgagggggattcggcccagctcgtcccggcctccaccaagccagccccgaagcccgccagccaccctgccgtactcgggcgcgacctgctggtgcgcgccggatgtttctgtgacacacaatcagcgcggaccgcagcgcggcccagccccgggcacccgcctcggacgctcgggcgccaggagcttcgctggaggggctgggccaaggagattaagaagaaaacgactttctgcaggaggaagagcccgctgccgaatccctgggaaaaattcttttcccccagtgccagccggactgccctcgccttccgggtgtgccctgtcccagaagatggaatgggggtgtgggggtccggctctaggaacgggctttgggggcgtcaggtctttccaaggttgggacccaaggatcggggggcccagcagcccgcaccgatcgagccggactctcggctcttcactgctcctcctggcctgcctagttccccagggcccggcacctcctgctgcgagacccggctctcagccctgccttgcccctacctcagcgtctcttccacctgctggcctcccagtttcccctcctgccagtccttcgcctgtcccttgacgccctgcatcctcctccctgactcgcagccccatcggacgctctcccgggaccgccgcaggaccagtttccatagactgcggactggggtcttcctccagcagttacttgatgccccctcccccgacacagactctcaatctgccggtggtaagaaccggttctgagctggcgtctgagctgctgcggggtggaagtggggggctgcccactccactcctcccatcccctcccagcctcctcctccggcaggaactgaacagaaccacaaaaagtctacatttatttaatatgatggtctttgcaaaaaggaacaaaacaacacaaaagcccaccaggctgctgctttgtggaaagacggtgtgtgtcgtgtgaaggcgaaacccggtgtacataacccctccccctccgccccgccccgcccggccccgtagagtccctgtcgcccgccggccctgcctgtagatacgccccgctgtctgtgctgtgagagtcgccgctcgctgggggggaagggggggacacagctacacgcccattaaagcacagcacgtcctgggggaggggggcattttttatgttacaaaaaaaaattacgaagaaagaaatctcatatgcaaaatgagcgaacatggtctgtggactcctctggcctgttttgttggctctttctctgtaattccgtgttttcgctttttcctccctgcccctctctccctctgcccctctctcctctccgcttctctccccctctgtctctgtctctctccgtctctgtcgctcttgtctgtctgtctctgctctttcctcggcctctctccccagacctggcccggccgccctgtctccgcaggctagatccgaggtggcagctccagcccccgggctcgccccctcgcgggcgtgccccgcgcgccccgggcggccgaaggccgggccgccccgtcccgccccgtagttgctctttcggtagtggcgatgcgccctgcatgtctcctcacccgtggatcgtgacgactcgaaataacagaaacaaagtcaataaagtgaaaataaataaaaatccttgaacaaatccgaaaaggcttggagtcctcgcccagatctctctcccctgcgagccctttttatttgagaaggaaaaagagaaaagagaatcgtttaagggaacccggcgcccagccaggctccagtggcccgaacggggcggcgagggcggcgagggcgccgaggtccggcccatcccagtcctgtggggctggccgggcagagaccccggacccaggcccaggcctaacctgctaaatgtccccggacggttctggtctcctcggccactttcagtgcgtcggttcgttttgattctttttcttttgtgcacataagaaataaataataataataaataaagaataaaattttgtatgtcaaaaaccat

SEQ ID NO: 67199 - DNA, 4135 bp, Homo sapiens
cgggggcctggccgcgcgctcccctcccgcaggcgccacctcggacatccccgggattgctacttctctgccaacttcgccaactcgccagcacttggagaggcccggctcccctcccggcgccctctgaccgcccccgccccgcggcgctctccgaccaccgcctctcggatgaccaggttccaggggagctgagcgagtcgcctcccccgcccagcttcagccctggctgcagctgcagcgcgagccatgcgcccccagtgcaccccggcccaccgccccggggccattctgctgaccgcccagccccgagccccgacagtggcaagttgcggctactgcagttgcaagctccggccaacccggaggagccccacggggaaggcagtcgtgcgccccccgcccccgggcgccccgcagcagccgggcgttcactcatcctccctcccccaccgtccctcccttttctcctcaagtcctgaagttgagtttgagaggcgacacggcggcggcgccgcgctgctcccgctcctctgcctccccatggatatgcactgcaaagcagaccccttctccgcgatgcacccagggcacgggggtgtgaaccagctcgggggggtgtttgtgaacggccggcccctacccgacgtggtgaggcagcgcatcgtggagctggcccaccagggtgtgcggccctgtgacatctcccggcagctgcgggtcagccacggctgtgtcagcaaaatcctgggcaggtactacgagaccggcagcatcaagccgggtgtgatcggtggctccaagcccaaagtggcgacgcccaaagtggtggacaagattgctgaatacaaacgacagaacccgactatgttcgcctgggagattcgagaccggctcctggccgagggcatctgtgacaatgacacagtgcccagcgtctcttccatcaacagaatcatccggaccaaagttcagcagcctttccacccaacgccggatggggctgggacaggagtgaccgcccctggccacaccattgttcccagcacggcctcccctcctgtttccagcgcctccaatgacccagtgggatcctactccatcaatgggatcctggggattcctcgctccaatggtgagaagaggaaacgtgatgaagatgtgtctgagggctcagtccccaatggagattcccagagtggtgtggacagtttgcggaagcacttgcgagctgacaccttcacccagcagcagctggaagctttggatcgggtctttgagcgtccttcctaccctgacgtcttccaggcatcagagcacatcaaatcagaacaggggaacgagtactccctcccagccctgacccctgggcttgatgaagtcaagtcgagtctatctgcatccaccaaccctgagctgggcagcaacgtgtcaggcacacagacataccccgttgtgactggtcgtgacatggcgagcaccactctgcctggttacccccctcacgtgccccccactggccagggaagctaccccacctccaccctggcaggaatggtgcctgaggctgcagttggtccctcatcctccctcatgagcaagccggggaggaagcttgcagaagtgcccccttgtgtgcaacccactggagcgagttctccggcaacccgtacagccacccccagtacacggcctacaacgaggcttggagattcagcaaccccgccttactaagttccccttattattatagtgccgccccccggtccgcccctgccgctcgtgccgctgcctatgaccgccactagttaccgcggggaccacatcaagcttcaggccgacagcttcggcctccacatcgtccccgtctgaccccaccccggaggagggaggaccgacgcgacgcatgcctcccggccaccgccccagcctcaccccatcccacgacccccgcaacccttcacatcacccccctcgaaggtcggacaggacgggtggagccgcggggcgggaccctcaggcccgggcccaccgcccccagccccgcctgccgcccctccccgcctgcctggactgcgcggcgccgtgagggggattcggcccagctcgtcccggcctccaccaagccagccccgaagcccgccagccaccctgccgtactcgggcgcgacctgctggtgcgcgccggatgtttctgtgacacacaatcagcgcggaccgcagcgcggcccagccccgggcacccgcctcggacgctcgggcgccaggagcttcgctggaggggctgggccaaggagattaagaagaaaacgactttctgcaggaggaagagcccgctgccgaatccctgggaaaaattcttttcccccagtgccagccggactgccctcgccttccgggtgtgccctgtcccagaagatggaatgggggtgtgggggtccggctctaggaacgggctttgggggcgtcaggtctttccaaggttgggacccaaggatcggggggcccagcagcccgcaccgatcgagccggactctcggctcttcactgctcctcctggcctgcctagttccccagggcccggcacctcctgctgcgagacccggctctcagccctgccttgcccctacctcagcgtctcttccacctgctggcctcccagtttcccctcctgccagtccttcgcctgtcccttgacgccctgcatcctcctccctgactcgcagccccatcggacgctctcccgggaccgccgcaggaccagtttccatagactgcggactggggtcttcctccagcagttacttgatgccccctcccccgacacagactctcaatctgccggtggtaagaaccggttctgagctggcgtctgagctgctgcggggtggaagtggggggctgcccactccactcctcccatcccctcccagcctcctcctccggcaggaactgaacagaaccacaaaaagtctacatttatttaatatgatggtctttgcaaaaaggaacaaaacaacacaaaagcccaccaggctgctgctttgtggaaagacggtgtgtgtcgtgtgaaggcgaaacccggtgtacataacccctccccctccgccccgccccgcccggccccgtagagtccctgtcgcccgccggccctgcctgtagatacgccccgctgtctgtgctgtgagagtcgccgctcgctgggggggaagggggggacacagctacacgcccattaaagcacagcacgtcctgggggaggggggcattttttatgttacaaaaaaaaattacgaagaaagaaatctcatatgcaaaatgagcgaacatggtctgtggactcctctggcctgttttgttggctctttctctgtaattccgtgttttcgctttttcctccctgcccctctctccctctgcccctctctcctctccgcttctctccccctctgtctctgtctctctccgtctctgtcgctcttgtctgtctgtctctgctctttcctcggcctctctccccagacctggcccggccgccctgtctccgcaggctagatccgaggtggcagctccagcccccgggctcgccccctcgcgggcgtgccccgcgcgccccgggcggccgaaggccgggccgccccgtcccgccccgtagttgctctttcggtagtggcgatgcgccctgcatgtctcctcacccgtggatcgtgacgactcgaaataacagaaacaaagtcaataaagtgaaaataaataaaaatccttgaacaaatccgaaaaggcttggagtcctcgcccagatctctctcccctgcgagccctttttatttgagaaggaaaaagagaaaagagaatcgtttaagggaacccggcgcccagccaggctccagtggcccgaacggggcggcgagggcggcgagggcgccgaggtccggcccatcccagtcctgtggggctggccgggcagagaccccggacccaggcccaggcctaacctgctaaatgtccccggacggttctggtctcctcggccactttcagtgcgtcggttcgttttgattctttttcttttgtgcacataagaaataaataataataataaataaagaataaaattttgtatgtcaaaaaccat

SEQ ID NO: 67200 - DNA, 4121 bp, Homo sapiens
cgggggcctggccgcgcgctcccctcccgcaggcgccacctcggacatccccgggattgctacttctctgccaacttcgccaactcgccagcacttggagaggcccggctcccctcccggcgccctctgaccgcccccgccccgcggcgctctccgaccaccgcctctcggatgaccaggttccaggggagctgagcgagtcgcctcccccgcccagcttcagccctggctgcagctgcagcgcgagccatgcgcccccagtgcaccccggcccaccgccccggggccattctgctgaccgcccagccccgagccccgacagtggcaagttgcggctactgcagttgcaagctccggccaacccggaggagccccacggggaaggcagtcgtgcgccccccgcccccgggcgccccgcagcagccgggcgttcactcatcctccctcccccaccgtccctcccttttctcctcaagtcctgaagttgagtttgagaggcgacacggcggcggcgccgcgctgctcccgctcctctgcctccccatggatatgcactgcaaagcagaccccttctccgcgatgcacccagggcacgggggtgtgaaccagctcgggggggtgtttgtgaacggccggcccctacccgacgtggtgaggcagcgcatcgtggagctggcccaccagggtgtgcggccctgtgacatctcccggcagctgcgggtcagccacggctgtgtcagcaaaatcctgggcaggtactacgagaccggcagcatcaagccgggtgtgatcggtggctccaagcccaaagtggcgacgcccaaagtggtggacaagattgctgaatacaaacgacagaacccgactatgttcgcctgggagattcgagaccggctcctggccgagggcatctgtgacaatgacacagtgcccagcgtctcttccatcaacagaatcatccggaccaaagttcagcagcctttccacccaacgccggatggggctgggacaggagtgaccgcccctggccacaccattgttcccagcacggcctcccctcctgtttccagcgcctccaatgacccagtgggatcctactccatcaatgggatcctggggattcctcgctccaatggtgagaagaggaaacgtgatgaagttgaggtatacactgatcctgcccacattagaggaggtggaggtttgcatctggtctggactttaagagatgtgtctgagggctcagtccccaatggagattcccagagtggtgtggacagtttgcggaagcacttgcgagctgacaccttcacccagcagcagctggaagctttggatcgggtctttgagcgtccttcctaccctgacgtcttccaggcatcagagcacatcaaatcagaacaggggaacgagtactccctcccagccctgacccctgggcttgatgaagtcaagtcgagtctatctgcatccaccaaccctgagctgggcagcaacgtgtcaggcacacagacataccccgttgtgactggtcgtgacatggcgagcaccactctgcctggttacccccctcacgtgccccccactggccagggaagctaccccacctccaccctggcaggaatggtgcctgggagcgagttctccggcaacccgtacagccacccccagtacacggcctacaacgaggcttggagattcagcaaccccgccttactaagttccccttattattatagtgccgccccccggtccgcccctgccgctcgtgccgctgcctatgaccgccactagttaccgcggggaccacatcaagcttcaggccgacagcttcggcctccacatcgtccccgtctgaccccaccccggaggagggaggaccgacgcgacgcatgcctcccggccaccgccccagcctcaccccatcccacgacccccgcaacccttcacatcacccccctcgaaggtcggacaggacgggtggagccgcggggcgggaccctcaggcccgggcccaccgcccccagccccgcctgccgcccctccccgcctgcctggactgcgcggcgccgtgagggggattcggcccagctcgtcccggcctccaccaagccagccccgaagcccgccagccaccctgccgtactcgggcgcgacctgctggtgcgcgccggatgtttctgtgacacacaatcagcgcggaccgcagcgcggcccagccccgggcacccgcctcggacgctcgggcgccaggagcttcgctggaggggctgggccaaggagattaagaagaaaacgactttctgcaggaggaagagcccgctgccgaatccctgggaaaaattcttttcccccagtgccagccggactgccctcgccttccgggtgtgccctgtcccagaagatggaatgggggtgtgggggtccggctctaggaacgggctttgggggcgtcaggtctttccaaggttgggacccaaggatcggggggcccagcagcccgcaccgatcgagccggactctcggctcttcactgctcctcctggcctgcctagttccccagggcccggcacctcctgctgcgagacccggctctcagccctgccttgcccctacctcagcgtctcttccacctgctggcctcccagtttcccctcctgccagtccttcgcctgtcccttgacgccctgcatcctcctccctgactcgcagccccatcggacgctctcccgggaccgccgcaggaccagtttccatagactgcggactggggtcttcctccagcagttacttgatgccccctcccccgacacagactctcaatctgccggtggtaagaaccggttctgagctggcgtctgagctgctgcggggtggaagtggggggctgcccactccactcctcccatcccctcccagcctcctcctccggcaggaactgaacagaaccacaaaaagtctacatttatttaatatgatggtctttgcaaaaaggaacaaaacaacacaaaagcccaccaggctgctgctttgtggaaagacggtgtgtgtcgtgtgaaggcgaaacccggtgtacataacccctccccctccgccccgccccgcccggccccgtagagtccctgtcgcccgccggccctgcctgtagatacgccccgctgtctgtgctgtgagagtcgccgctcgctgggggggaagggggggacacagctacacgcccattaaagcacagcacgtcctgggggaggggggcattttttatgttacaaaaaaaaattacgaagaaagaaatctcatatgcaaaatgagcgaacatggtctgtggactcctctggcctgttttgttggctctttctctgtaattccgtgttttcgctttttcctccctgcccctctctccctctgcccctctctcctctccgcttctctccccctctgtctctgtctctctccgtctctgtcgctcttgtctgtctgtctctgctctttcctcggcctctctccccagacctggcccggccgccctgtctccgcaggctagatccgaggtggcagctccagcccccgggctcgccccctcgcgggcgtgccccgcgcgccccgggcggccgaaggccgggccgccccgtcccgccccgtagttgctctttcggtagtggcgatgcgccctgcatgtctcctcacccgtggatcgtgacgactcgaaataacagaaacaaagtcaataaagtgaaaataaataaaaatccttgaacaaatccgaaaaggcttggagtcctcgcccagatctctctcccctgcgagccctttttatttgagaaggaaaaagagaaaagagaatcgtttaagggaacccggcgcccagccaggctccagtggcccgaacggggcggcgagggcggcgagggcgccgaggtccggcccatcccagtcctgtggggctggccgggcagagaccccggacccaggcccaggcctaacctgctaaatgtccccggacggttctggtctcctcggccactttcagtgcgtcggttcgttttgattctttttcttttgtgcacataagaaataaataataataataaataaagaataaaattttgtatgtcaaaaaccat

SEQ ID NO: 67201 - DNA, 3001 bp, Homo sapiens
cgggggcctggccgcgcgctcccctcccgcaggcgccacctcggacatccccgggattgctacttctctgccaacttcgccaactcgccagcacttggagaggcccggctcccctcccggcgccctctgaccgcccccgccccgcggcgctctccgaccaccgcctctcggatgaccaggttccaggggagctgagcgagtcgcctcccccgcccagcttcagccctggctgcagctgcagcgcgagccatgcgcccccagtgcaccccggcccaccgccccggggccattctgctgaccgcccagccccgagccccgacagtggcaagttgcggctactgcagttgcaagctccggccaacccggaggagccccacggggaaggcagtcgtgcgccccccgcccccgggcgccccgcagcagccgggcgttcactcatcctccctcccccaccgtccctcccttttctcctcaagtcctgaagttgagtttgagaggcgacacggcggcggcgccgcgctgctcccgctcctctgcctccccatggatatgcactgcaaagcagaccccttctccgcgatgcacccagggcacgggggtgtgaaccagctcgggggggtgtttgtgaacggccggcccctacccgacgtggtgaggcagcgcatcgtggagctggcccaccagggtgtgcggccctgtgacatctcccggcagctgcgggtcagccacggctgtgtcagcaaaatcctgggcaggtactacgagaccggcagcatcaagccgggtgtgatcggtggctccaagcccaaagtggcgacgcccaaagtggtggacaagattgctgaatacaaacgacagaacccgactatgttcgcctgggagattcgagaccggctcctggccgagggcatctgtgacaatgacacagtgcccagcgtctcttccatcaacagaatcatccggaccaaagttcagcagcctttccacccaacgccggatggggctgggacaggagtgaccgcccctggccacaccattgttcccagcacggcctcccctcctgtttccagcgcctccaatgacccagtgggatcctactccatcaatgggatcctggggattcctcgctccaatggtgagaagaggaaacgtgatgaagatgtgtctgagggctcagtccccaatggagattcccagagtggtgtggacagtttgcggaagcacttgcgagctgacaccttcacccagcagcagctggaagctttggatcgggtctttgagcgtccttcctaccctgacgtcttccaggcatcagagcacatcaaatcagaacaggggaacgagtactccctcccagccctgacccctgggcttgatgaagtcaagtcgagtctatctgcatccaccaaccctgagctgggcagcaacgtgtcaggcacacagacataccccgttgtgactggtcgtgacatggcgagcaccactctgcctggttacccccctcacgtgccccccactggccagggaagctaccccacctccaccctggcaggaatggtgcctgggagcgagttctccggcaacccgtacagccacccccagtacacggcctacaacgaggcttggagattcagcaaccccgccttactaagttccccttattattatagtgccgccccccggtccgcccctgccgctcgtgccgctgcctatgaccgccactagttaccgcggggaccacatcaagcttcaggccgacagcttcggcctccacatcgtccccgtctgaccccaccccggaggagggaggaccgacgcgacgcatgcctcccggccaccgccccagcctcaccccatcccacgacccccgcaacccttcacatcacccccctcgaaggtcggacaggacgggtggagccgcggggcgggaccctcaggcccgggcccaccgcccccagccccgcctgccgcccctccccgcctgcctggactgcgcggcgccgtgagggggattcggcccagctcgtcccggcctccaccaagccagccccgaagcccgccagccaccctgccgtactcgggcgcgacctgctggtgcgcgccggatgtttctgtgacacacaatcagcgcggaccgcagcgcggcccagccccgggcacccgcctcggacgctcgggcgccaggagcttcgctggaggggctgggccaaggagattaagaagaaaacgactttctctgtaattccgtgttttcgctttttcctccctgcccctctctccctctgcccctctctcctctccgcttctctccccctctgtctctgtctctctccgtctctgtcgctcttgtctgtctgtctctgctctttcctcggcctctctccccagacctggcccggccgccctgtctccgcaggctagatccgaggtggcagctccagcccccgggctcgccccctcgcgggcgtgccccgcgcgccccgggcggccgaaggccgggccgccccgtcccgccccgtagttgctctttcggtagtggcgatgcgccctgcatgtctcctcacccgtggatcgtgacgactcgaaataacagaaacaaagtcaataaagtgaaaataaataaaaatccttgaacaaatccgaaaaggcttggagtcctcgcccagatctctctcccctgcgagccctttttatttgagaaggaaaaagagaaaagagaatcgtttaagggaacccggcgcccagccaggctccagtggcccgaacggggcggcgagggcggcgagggcgccgaggtccggcccatcccagtcctgtggggctggccgggcagagaccccggacccaggcccaggcctaacctgctaaatgtccccggacggttctggtctcctcggccactttcagtgcgtcggttcgttttgattctttttcttttgtgcacataagaaataaataataataataaataaagaataaaattttgtatgtcaaaaaccat

SEQ ID NO: 67202 - DNA, 4033 bp, Homo sapiens
cgggggcctggccgcgcgctcccctcccgcaggcgccacctcggacatccccgggattgctacttctctgccaacttcgccaactcgccagcacttggagaggcccggctcccctcccggcgccctctgaccgcccccgccccgcggcgctctccgaccaccgcctctcggatgaccaggttccaggggagctgagcgagtcgcctcccccgcccagcttcagccctggctgcagctgcagcgcgagccatgcgcccccagtgcaccccggcccaccgccccggggccattctgctgaccgcccagccccgagccccgacagtggcaagttgcggctactgcagttgcaagctccggccaacccggaggagccccacggggaaggcagtcgtgcgccccccgcccccgggcgccccgcagcagccgggcgttcactcatcctccctcccccaccgtccctcccttttctcctcaagtcctgaagttgagtttgagaggcgacacggcggcggcgccgcgctgctcccgctcctctgcctccccatggatatgcactgcaaagcagaccccttctccgcgatgcacccagggcacgggggtgtgaaccagctcgggggggtgtttgtgaacggccggcccctacccgacgtggtgaggcagcgcatcgtggagctggcccaccagggtgtgcggccctgtgacatctcccggcagctgcgggtcagccacggctgtgtcagcaaaatcctgggcaggtactacgagaccggcagcatcaagccgggtgtgatcggtggctccaagcccaaagtggcgacgcccaaagtggtggacaagattgctgaatacaaacgacagaacccgactatgttcgcctgggagattcgagaccggctcctggccgagggcatctgtgacaatgacacagtgcccagcgtctcttccatcaacagaatcatccggaccaaagttcagcagcctttccacccaacgccggatggggctgggacaggagtgaccgcccctggccacaccattgttcccagcacggcctcccctcctgtttccagcgcctccaatgacccagtgggatcctactccatcaatgggatcctggggattcctcgctccaatggtgagaagaggaaacgtgatgaagatgtgtctgagggctcagtccccaatggagattcccagagtggtgtggacagtttgcggaagcacttgcgagctgacaccttcacccagcagcagctggaagctttggatcgggtctttgagcgtccttcctaccctgacgtcttccaggcatcagagcacatcaaatcagaacaggggaacgagtactccctcccagccctgacccctgggcttgatgaagtcaagtcgagtctatctgcatccaccaaccctgagctgggcagcaacgtgtcaggcacacagacataccccgttgtgactggtcgtgacatggcgagcaccactctgcctggttacccccctcacgtgccccccactggccagggaagctaccccacctccaccctggcaggaatggtgcctgggagcgagttctccggcaacccgtacagccacccccagtacacggcctacaacgaggcttggagattcagcaaccccgccttactaatgccgccccccggtccgcccctgccgctcgtgccgctgcctatgaccgccactagttaccgcggggaccacatcaagcttcaggccgacagcttcggcctccacatcgtccccgtctgaccccaccccggaggagggaggaccgacgcgacgcatgcctcccggccaccgccccagcctcaccccatcccacgacccccgcaacccttcacatcacccccctcgaaggtcggacaggacgggtggagccgcggggcgggaccctcaggcccgggcccaccgcccccagccccgcctgccgcccctccccgcctgcctggactgcgcggcgccgtgagggggattcggcccagctcgtcccggcctccaccaagccagccccgaagcccgccagccaccctgccgtactcgggcgcgacctgctggtgcgcgccggatgtttctgtgacacacaatcagcgcggaccgcagcgcggcccagccccgggcacccgcctcggacgctcgggcgccaggagcttcgctggaggggctgggccaaggagattaagaagaaaacgactttctgcaggaggaagagcccgctgccgaatccctgggaaaaattcttttcccccagtgccagccggactgccctcgccttccgggtgtgccctgtcccagaagatggaatgggggtgtgggggtccggctctaggaacgggctttgggggcgtcaggtctttccaaggttgggacccaaggatcggggggcccagcagcccgcaccgatcgagccggactctcggctcttcactgctcctcctggcctgcctagttccccagggcccggcacctcctgctgcgagacccggctctcagccctgccttgcccctacctcagcgtctcttccacctgctggcctcccagtttcccctcctgccagtccttcgcctgtcccttgacgccctgcatcctcctccctgactcgcagccccatcggacgctctcccgggaccgccgcaggaccagtttccatagactgcggactggggtcttcctccagcagttacttgatgccccctcccccgacacagactctcaatctgccggtggtaagaaccggttctgagctggcgtctgagctgctgcggggtggaagtggggggctgcccactccactcctcccatcccctcccagcctcctcctccggcaggaactgaacagaaccacaaaaagtctacatttatttaatatgatggtctttgcaaaaaggaacaaaacaacacaaaagcccaccaggctgctgctttgtggaaagacggtgtgtgtcgtgtgaaggcgaaacccggtgtacataacccctccccctccgccccgccccgcccggccccgtagagtccctgtcgcccgccggccctgcctgtagatacgccccgctgtctgtgctgtgagagtcgccgctcgctgggggggaagggggggacacagctacacgcccattaaagcacagcacgtcctgggggaggggggcattttttatgttacaaaaaaaaattacgaagaaagaaatctcatatgcaaaatgagcgaacatggtctgtggactcctctggcctgttttgttggctctttctctgtaattccgtgttttcgctttttcctccctgcccctctctccctctgcccctctctcctctccgcttctctccccctctgtctctgtctctctccgtctctgtcgctcttgtctgtctgtctctgctctttcctcggcctctctccccagacctggcccggccgccctgtctccgcaggctagatccgaggtggcagctccagcccccgggctcgccccctcgcgggcgtgccccgcgcgccccgggcggccgaaggccgggccgccccgtcccgccccgtagttgctctttcggtagtggcgatgcgccctgcatgtctcctcacccgtggatcgtgacgactcgaaataacagaaacaaagtcaataaagtgaaaataaataaaaatccttgaacaaatccgaaaaggcttggagtcctcgcccagatctctctcccctgcgagccctttttatttgagaaggaaaaagagaaaagagaatcgtttaagggaacccggcgcccagccaggctccagtggcccgaacggggcggcgagggcggcgagggcgccgaggtccggcccatcccagtcctgtggggctggccgggcagagaccccggacccaggcccaggcctaacctgctaaatgtccccggacggttctggtctcctcggccactttcagtgcgtcggttcgttttgattctttttcttttgtgcacataagaaataaataataataataaataaagaataaaattttgtatgtcaaaaaccat

SEQ ID NO: 67203 - DNA, 4102 bp, Homo sapiens
cgggggcctggccgcgcgctcccctcccgcaggcgccacctcggacatccccgggattgctacttctctgccaacttcgccaactcgccagcacttggagaggcccggctcccctcccggcgccctctgaccgcccccgccccgcggcgctctccgaccaccgcctctcggatgaccaggttccaggggagctgagcgagtcgcctcccccgcccagcttcagccctggctgcagctgcagcgcgagccatgcgcccccagtgcaccccggcccaccgccccggggccattctgctgaccgcccagccccgagccccgacagtggcaagttgcggctactgcagttgcaagctccggccaacccggaggagccccacggggaaggcagtcgtgcgccccccgcccccgggcgccccgcagcagccgggcgttcactcatcctccctcccccaccgtccctcccttttctcctcaagtcctgaagttgagtttgagaggcgacacggcggcggcgccgcgctgctcccgctcctctgcctccccatggatatgcactgcaaagcagaccccttctccgcgatgcacccagggcacgggggtgtgaaccagctcgggggggtgtttgtgaacggccggcccctacccgacgtggtgaggcagcgcatcgtggagctggcccaccagggtgtgcggccctgtgacatctcccggcagctgcgggtcagccacggctgtgtcagcaaaatcctgggcaggtactacgagaccggcagcatcaagccgggtgtgatcggtggctccaagcccaaagtggcgacgcccaaagtggtggacaagattgctgaatacaaacgacagaacccgactatgttcgcctgggagattcgagaccggctcctggccgagggcatctgtgacaatgacacagtgcccagcgtctcttccatcaacagaatcatccggaccaaagttcagcagcctttccacccaacgccggatggggctgggacaggagtgaccgcccctggccacaccattgttcccagcacggcctcccctcctgtttccagcgcctccaatgacccagtgggatcctactccatcaatgggatcctggggattcctcgctccaatggtgagaagaggaaacgtgatgaagttgaggtatacactgatcctgcccacattagaggaggtggaggtttgcatctggtctggactttaagagatgtgtctgagggctcagtccccaatggagattcccagagtggtgtggacagtttgcggaagcacttgcgagctgacaccttcacccagcagcagctggaagctttggatcgggtctttgagcgtccttcctaccctgacgtcttccaggcatcagagcacatcaaatcagaacaggggaacgagtactccctcccagccctgacccctgggcttgatgaagtcaagtcgagtctatctgcatccaccaaccctgagctgggcagcaacgtgtcaggcacacagacataccccgttgtgactggtcgtgacatggcgagcaccactctgcctggttacccccctcacgtgccccccactggccagggaagctaccccacctccaccctggcaggaatggtgcctgggagcgagttctccggcaacccgtacagccacccccagtacacggcctacaacgaggcttggagattcagcaaccccgccttactaatgccgccccccggtccgcccctgccgctcgtgccgctgcctatgaccgccactagttaccgcggggaccacatcaagcttcaggccgacagcttcggcctccacatcgtccccgtctgaccccaccccggaggagggaggaccgacgcgacgcatgcctcccggccaccgccccagcctcaccccatcccacgacccccgcaacccttcacatcacccccctcgaaggtcggacaggacgggtggagccgcggggcgggaccctcaggcccgggcccaccgcccccagccccgcctgccgcccctccccgcctgcctggactgcgcggcgccgtgagggggattcggcccagctcgtcccggcctccaccaagccagccccgaagcccgccagccaccctgccgtactcgggcgcgacctgctggtgcgcgccggatgtttctgtgacacacaatcagcgcggaccgcagcgcggcccagccccgggcacccgcctcggacgctcgggcgccaggagcttcgctggaggggctgggccaaggagattaagaagaaaacgactttctgcaggaggaagagcccgctgccgaatccctgggaaaaattcttttcccccagtgccagccggactgccctcgccttccgggtgtgccctgtcccagaagatggaatgggggtgtgggggtccggctctaggaacgggctttgggggcgtcaggtctttccaaggttgggacccaaggatcggggggcccagcagcccgcaccgatcgagccggactctcggctcttcactgctcctcctggcctgcctagttccccagggcccggcacctcctgctgcgagacccggctctcagccctgccttgcccctacctcagcgtctcttccacctgctggcctcccagtttcccctcctgccagtccttcgcctgtcccttgacgccctgcatcctcctccctgactcgcagccccatcggacgctctcccgggaccgccgcaggaccagtttccatagactgcggactggggtcttcctccagcagttacttgatgccccctcccccgacacagactctcaatctgccggtggtaagaaccggttctgagctggcgtctgagctgctgcggggtggaagtggggggctgcccactccactcctcccatcccctcccagcctcctcctccggcaggaactgaacagaaccacaaaaagtctacatttatttaatatgatggtctttgcaaaaaggaacaaaacaacacaaaagcccaccaggctgctgctttgtggaaagacggtgtgtgtcgtgtgaaggcgaaacccggtgtacataacccctccccctccgccccgccccgcccggccccgtagagtccctgtcgcccgccggccctgcctgtagatacgccccgctgtctgtgctgtgagagtcgccgctcgctgggggggaagggggggacacagctacacgcccattaaagcacagcacgtcctgggggaggggggcattttttatgttacaaaaaaaaattacgaagaaagaaatctcatatgcaaaatgagcgaacatggtctgtggactcctctggcctgttttgttggctctttctctgtaattccgtgttttcgctttttcctccctgcccctctctccctctgcccctctctcctctccgcttctctccccctctgtctctgtctctctccgtctctgtcgctcttgtctgtctgtctctgctctttcctcggcctctctccccagacctggcccggccgccctgtctccgcaggctagatccgaggtggcagctccagcccccgggctcgccccctcgcgggcgtgccccgcgcgccccgggcggccgaaggccgggccgccccgtcccgccccgtagttgctctttcggtagtggcgatgcgccctgcatgtctcctcacccgtggatcgtgacgactcgaaataacagaaacaaagtcaataaagtgaaaataaataaaaatccttgaacaaatccgaaaaggcttggagtcctcgcccagatctctctcccctgcgagccctttttatttgagaaggaaaaagagaaaagagaatcgtttaagggaacccggcgcccagccaggctccagtggcccgaacggggcggcgagggcggcgagggcgccgaggtccggcccatcccagtcctgtggggctggccgggcagagaccccggacccaggcccaggcctaacctgctaaatgtccccggacggttctggtctcctcggccactttcagtgcgtcggttcgttttgattctttttcttttgtgcacataagaaataaataataataataaataaagaataaaattttgtatgtcaaaaaccat

SEQ ID NO: 67204 - DNA, 271 bp, Homo sapiens
gtaagaagtaaaaataactccaaagaatacaaaaataatagatatgagaacagcccctacctctagggttgccacagagtgcccaaggaagaggcccggcagggttgagatccacaccttgatggagagggtgtggcgatggctccctggatggcaacgtctctgtaatgccatgttggcagaacttgctggaaatccaccctctggaatttactggaaatccatctttttgggtcccaaggaaagttgtttgtgggaggtatcttgctgg

SEQ ID NO: 67205 - DNA, 335 bp, Homo sapiens
aaggtgcatggtggagagaccatgagactcactgtccaggagaagaatgtcccagggtcaactgatcagttagggtagggcaggaaccagtcatagtggtggaaggtcatatggagggtcaatcggtgaaggcaggaactggggtttcacttcttctgtggtttttcggctgctccagatttcgtggctcctgcagaccatctggacatatgtgtgcaggtcacaggggttataatggctgagctttggctcagaggcctgacagaactcacacacacacacacacacacacacacacaccatattcatacacatgtgggcaagtgtatgtatgc

SEQ ID NO: 67206 - DNA, 465 bp, Homo sapiens
tgcatatatttcagaatcatgggttgtacaaaatgaagtatattgtaaaaggcttatgtattatgtattatgtattaagtaggaaatattaaggttaatcaagtaaagatgaattcatccagcctaacctttccatccatgccaaatctgaagctttggactcataactgagtttgactgctgcagatcccaccatacttactaagtaggtataagggatccattttaatacatttcaatggttatatttagtaatacattttattcacttgcatttgtacaaaagaacttttttttaacaaaatgaagaattgtgtggaataaaaaattgagtttcttttgtttgaaattattaatgtttgaaatagattcatattgtataaaaatggaaatatatttgcattaatatttagcatgtcatttttgatccctggacaataaataatgactggtttgatgataaca

SEQ ID NO: 67207 - DNA, 899 bp, Homo sapiens
agacagggtcttgctctgttgcctgggctggtcttgaactcctgtccttaagagattctcccaaagtagcctcccacagtgttaggattacaggtgtgagccaccatgcccagcctgtttcttaacttgtatatttgacagaaattttcttgaacaccaggaactaaaaccaagaaacaacaaacaagaaaactcctggtcttgaaattgtctctgtgttggggctctcctttgatgcttagccaaacttgaactaaggtttgagatcagctcaaggttaaagtttaaggttttctctggtcttttattttgtaatagtgttttcattttcattcaacttcttttcttatttcccctctcagatcttttctgatcgtgtatctcatcctaggcatacatgtgtctttctgaattctccctattcacgggtgcttttgaatgcactaatttcctaaagacactctctgttttttttttctcccatatcttaggtggtttcaacagtaatcttttgcccagacatctgcaggttgttcctctaccttaccatgatttaaagaaatgcctgctacatttccagcctggataagttctgagttaggtgaaacagagatgtgttccttgtgtcagtccttcaggcagcccacagacaggttagagcagacatatgcggaaatttgtgaatgaggtctgctctgcttcctccagaaccagggaggaaatgggacaagtgtaattaaaaaggcacagagctttcataccattttcttttatttttttgagacagagtctcactctgtcacctagtctggagtgcagtgagctgagatggcgccattgcactccagcctgggtgacaagaagcagaactccatctcagaaacaaaacaaaacatctc

SEQ ID NO: 67208 - DNA, 924 bp, Homo sapiens
cctggctaatttttgtatttttttttgtagagatggcggtctcactttgttgcccaggctggtcttgaattcctgagcttaagtgatcctcccacctcagcctcccaaagtgctgggattacaggtgtgagccaccacacccagccaaaaccaggtgttatttgctgactcaccaatgcctcccccaaaaggataaatttaaaggtgtgtataacccatgaagtgtaattcaaataaaacaaattatcgtttggaataataacaactataggtatgtggtcaggaagcagttaaaaacattaaaatacagacctggccagttcaatccaacccaggggttccaagcaggaggtggggcaggtgggcgtcatgccctgtgcttataagggagggcacgtgcacagcagaagcaggttgttccccatttaaagttctggagcccaggctgtgagctccttggctgagccctctcctgtccctgggagctccccaggtgcgaggagcctgccagccagtggggcctacactctgtgttattgcatctccgccaggctaaaagccttggtcactactttagagccactcaaggaaacgcgtgcaccctgccctgctggaaggcaccatggttagagggaggcacactgtttcttagagacggggactgcttgctgtcatgtttcgccttcctcggaagctccatggaatgttctggagcaggcatcttagggcattccctccgcacttctctgccagcccatgtggctcccacactgggctatcccttgccttaggcttgtggccttttttttttttttttttttaatttgaaaaatatttttcatgtgcacttaaacgtgttgtggaatgatgctgggtctcaagaatgctgtgaatcaataaacattttattcagagggtgtctca

SEQ ID NO: 67209 - DNA, 805 bp, Homo sapiens
cgcccagtgacctgccgaggtcggcagcacagagctctggagatgaagaccctgttcctgggtgtcacgctcggcctggccgctgccctgtccttcaccctggaggaggaggatatcacagggacctggtacgtgaaggccatggtggtcgataaggactttccggaggacaggaggcccaggaaggtgtccccagtgaaggtgacagccctgggcggtgggaagttggaagccacgttcaccttcatgagggaggatcggtgcatccagaagaaaatcctgatgcggaagacggaggagcctggcaaatacagcgcctgcttgtccgcagtcgagatggaccagatcacgcctgccctctgggaggccctagccattgacacattgaggaagctgaggattgggacaaggaggccaaggattagatgggggcaggaagctcatgtacctgcaggagctgcccaggagggaccactacatcttttactgcaaagaccagcaccatgggggcctgctccacatgggaaagcttgtgggtaggaattctgataccaaccgggaggccctggaagaatttaagaaattggtgcagcgcaagggactctcggaggaggacattttcacgcccctgcagacgggaagctgcgttcccgaacactaggcagcccccgggtctgcacctccagagcccaccctaccaccagacacagagcccggaccacctggacctaccctccagccatgacccttccctgctcccacccacctgactccaaataaagtccttctcccccaaaaaaaaaaa

SEQ ID NO: 67210 - DNA, 565 bp, Homo sapiens
cgcccagtgacctgccgaggtcggcagcacagagctctggagatgaagaccctgttcctgggtgtcacgctcggcctggccgctgccctgtccttcaccctggaggaggaggatgagggaggatcggtgcatccagaagaaaatcctgatgcggaagacggaggagcctggcaaatacagcgcctatgggggcaggaagctcatgtacctgcaggagctgcccaggagggaccactacatcttttactgcaaagaccagcaccatgggggcctgctccacatgggaaagcttgtgggtaggaattctgataccaaccgggaggccctggaagaatttaagaaattggtgcagcgcaagggactctcggaggaggacattttcacgcccctgcagacgggaagctgcgttcccgaacactaggcagcccccgggtctgcacctccagagcccaccctaccaccagacacagagcccggaccacctggacctaccctccagccatgacccttccctgctcccacccacctgactccaaataaagtccttctcccccaaaaaaaaaaa

SEQ ID NO: 67211 - DNA, 699 bp, Homo sapiens
cgcccagtgacctgccgaggtcggcagcacagagctctggagatgaagaccctgttcctgggtgtcacgctcggcctggccgctgccctgtccttcaccctggaggaggaggatatcacagggacctggtacgtgaaggccatggtggtcgataaggactttccggaggacaggaggcccaggaaggtgtccccagtgaaggtgacagccctgggcggtgggaagttggaagccacgttcaccttcatgagggaggatcggtgcatccagaagaaaatcctgatgcggaagacggaggagcctggcaaatacagcgcctatgggggcaggaagctcatgtacctgcaggagctgcccaggagggaccactacatcttttactgcaaagaccagcaccatgggggcctgctccacatgggaaagcttgtgggtaggaattctgataccaaccgggaggccctggaagaatttaagaaattggtgcagcgcaagggactctcggaggaggacattttcacgcccctgcagacgggaagctgcgttcccgaacactaggcagcccccgggtctgcacctccagagcccaccctaccaccagacacagagcccggaccacctggacctaccctccagccatgacccttccctgctcccacccacctgactccaaataaagtccttctcccccaaaaaaaaaaa

SEQ ID NO: 67212 - DNA, 338 bp, Homo sapiens
gaggattgcatgaggccaggagtttgagcccccatctttaaaaataaaataaaacttgaaaaaaaaaaagaatggccgactttattctaaaagcactgagaaatcgcttcatagttttaaacagggcagtgacttgctcagtatatccttgccttcaagaactcattccagtttcagctaccaagtctactctcagatttggatctctggccctgacttccctcagtgttccaggctacattgcttactccctttttttgagacggagtctcgctctgtcgcccaggctggattgcagtggtgcgatctcagcttactgcacccttcacctcctgggt

SEQ ID NO: 67213 - DNA, 733 bp, Homo sapiens
aacaatattaacatcaccttttggtagataaggaaagtctaagaccggacaacttgttcaaggacacaaagccaacatgtgttagaaccaggacctgccggatcagtcacataaggcttagaggatcaaggatcctgcccagatgacttaccgaaatgttacagattaagttggtgtggtaacctgggctgagcactctgggagaggaagagaagagagaagacaggaaacaactgaactatgaccaatcccagcacggaggcccagaaaactttaagatttgagtattaatgtctcaaggtcaggagcaacctcaaggctaaaactcagatctcaggactcaatttcacagaagttccactataaaggcaataatctaaagctttaaatgatatgaaaattttgtaataagagttcagtatttctgccaacattggcgcatggattgcaaagttcacaggattgaaaacaccatcgacataatggaaattgaacagcatctgattactgagtgctatatcagcaagttaaaaggatcttttgcataccttttaatggtatatatcctaaaactgaagtgttcaatatagacatccagattgaaactcaggcagtgaattacatacacaacaaatcagttgaacatggcagagcttgtcagacttatgaaagattaaatacattttacatttcaaaaaaaaaagtcgacgcggacgcgaatttagtagtaata

SEQ ID NO: 67214 - DNA, 711 bp, Homo sapiens
aacaatattaacatcaccttttggtagataaggaaagtctaagaccggacaacttgttcaaggacacaaagccaacatgtgttagaaccaggacctgccggatcagtcacataaggcttagaggatcaaggatcctgcccagatgacttaccgaaatgttacagattaagttggtgtggtaacctgggctgagcactctgggagaggaagagaagagagaagacaggaaacaactgaactatgaccaatcccagcacggaggcccagaaaactttaagatttgagtattaatgtctcaaggtcaggagcaacctcaaggctaaaactcagatctcaggactcaatttcacagaagttccactataaaggcaataatctaaagctttaaatgatatgaaaattttgtaataagagttcagtatttctgccaacattggcgcatggattgcaaagttcacaggattgaaaacaccatcgacataatggaaattgaacagcatctgattactgagtgctatatcagcaagttaaaaggatcttttgcataccttttaatggtatatatcctaaaactgaagtgttcaatatagacatccagattgaaactcaggcagtgaattacatacacaacaaatcagttgaacatggcagagcttgtcttgcaaatagaaccttataactgtcagagtttccacaaaaaatggtattaaa

SEQ ID NO: 67215 - DNA, 380 bp, Homo sapiens
tcaatttcacagaagttccactataaaggcaataatctaaagctttaaatgatatgaaaattttgtaataagagttcagtatttctgccaacattggcgcatggattgcaaagttcacaggattgaaaacaccatcgacataatggaaattgaacagcatctgattactgagtgctatatcagcaagttaaaaggatcttttgcataccttttaatggtatatatcctaaaactgaagtgttcaatatagacatccagattgaaactcaggcagtgaattacatacacaacaaatcagttgaacatggcagagcttgtcagacttatgaaagattaaatacattttacatttccacaagtgtggtattcacaggtctaaa

SEQ ID NO: 67216 - DNA, 474 bp, Homo sapiens
caatgttggctcacttcaagccctgcctcccgggttcaagtgattctcctgtctcagccacccaagtacctaagattacaggcatgcaacaccacacccggctaatttttgaatttttattaatagtagagatggggtttcaccatgttggccaggctgatctccaactcctgacctcaagtgatccgctcgcctcagcctcccaaaagtgctgggattacaggcatgagccaccgcgcccagccactctctcctgattctgaccatgcactttgctctaaatatttcacatgacaagtttccgtaaagatttagtttgaataaaaaattactatgaacgaaaaaaatatataaaagtttgaaataatcttacaacaaacccctgtgacatgaatttacctatataacaaacctgcacatgtacccttaaaataaaagttgaaagttaaacctaaaataaaagttaaaagtttg

SEQ ID NO: 67217 - DNA, 1263 bp, Homo sapiens
ggcgtgagccaccacacccagccatatggaaacatttcagatatcctaatattaaaatgatatttcacaagactggacagttattaactcatgtgaaaggaaaatcttggggccccaaaatcactaagctaaaggaaaaagtcaagcttcggagaactgcttagggcaaacctgcctcccattctattcaaagtcatccctctgctcactgagataaatgaatatctgattgcctcctttggaaagggtaaccagaaactcaaaagaatgcagtgatttgcctcttatctccctaaaacctggaagcccgccccctgttttgagttgtcccacctttgcttcaagtcgtcccaccttttctggactgaaccagtgttcatcttacacacgctgattgatgtctcgtgtcttcctaaaatgtacaaaaccaaactgctctgaccacctcgggttctgacctcctgaagctgtatcatgggcacgcatcctcaaccgtggcaaaataaactttctaaattaactgggacatggctcagatttttagggttcacacgcaaaacccacaaattatccttaatataattatataatatatatttatgtagttagatctggttggtggtagatactaatacacttttgcccaactaagtgtaaaacacattaaatctgtatagcaatctctagactattacacaaaattaactactaactagaaaacacagtatattaaattctcttaagtgtggaaaaatggagaaggaagaataaccttttctctcctcccgtggtcctaatacacagaacagcgactgggaaactgccactagaaaaagatgactgtccaactaaaacctgcatacacagctacatccttccctggaagagcacagtggaactagatcctagtacagatagcacagggattgtcaacattcttgtcacactgaaatttccttctactgatctccaagtaagtaactaacagctgaaacttggaatttatatatcagcacagcacgaagactatagatatatctagtcttatgtaagtttcatattgtgtgataaatgtattgcccccccccgcccccgaatgccggccccttgagaaatatatttttacagggtagaatttctaatatatataaaatgcataatgttaaataatgtttatatattaatatgttatatactaatattaaatataaaatatactgcatattatatttttaatataaaatgtatattattgcattgatt

SEQ ID NO: 67218 - DNA, 366 bp, Homo sapiens
aattttgtgtcctgtaggaaatgcttccttgggtgtttgtattatagcccaatccaagtcatccctgagaacatccccaggttgtaaggattagtcagaagtcatgatgactgttctatataaatatttggcctattaactaaaattagtacctttccatttcttctctttcttgggcggggcagcgggggagtgcaggggaggggaaatagggaacgttcaattgtgttttaagtaatgctcataaaattcttagccaaagatgatcttgccctccaccttggtgacccaccgcatacggggtacatctatctggcctgtctctaggcctagacagaagaaacagggaggattattgttaacttt

SEQ ID NO: 67219 - DNA, 986 bp, Homo sapiens
  misc_feature (1)..(1): n is a, c, g, or t
  misc_feature (5)..(5): n is a, c, g, or t
  misc_feature (24)..(24): n is a, c, g, or t
ncctngcggaacgactctcttaanctccaccgctacacgaatatgactggcgaaactatcagccaagccagatgagtgaatccgagttacagatgctagcaagcctacggtggcaacaaaatgaagaactggaggatgctgggacctcccatggcctgagtgcctcccaggtggacaactgtaatgtcagcataagtaccagcagtgacgacacaaccacctggaactcctgcctgccaccccctgtcaaccagggtcgccactatcagaaagaaatgaacccaccttctccttctaatccccgggactggttaaatatgttgagcccaccaatcgttcctcccagtcaacagccggctgagcagcgtccagattcctgtgaaagtttgagtgttcaaggtgaagaagacctcagtgtggaagaggacgaggaagtactgactttgttgtatgacccttgtctgaactgttactttgacccccaaacagggaaatactatgagttggtataatgcctccttccggggcagagagcaggcactcccagctggagcagaatagcagttcagggtcgcttaaggagtcaccacaacttatgtgttgggtgaccacaaaatcaacagtaactgagagaaacgaattcattttgtaaataatgttcaacgttaagaatacctatattccttttgtagatgagtatgattttgaaactgaagaaattaatacagaggcaagattttaggagtttgaattggttcttgtttgttctcattctacatataattttgtttatttcagataattttatgtaaacaaattaagagttattcattcaaattttttgcagtgttaatctgtaaatgatggcttgatgtacagaaaatgtatttttgcttaaaagatgcctgggtaccttttattttatggcatttgtattaaaaataaagtatgatggtaagaagaataaaaaaaaaaatgcttctttt

SEQ ID NO: 67220 - DNA, 990 bp, Homo sapiens
  misc_feature (1)..(1): n is a, c, g, or t
  misc_feature (34)..(34): n is a, c, g, or t
ncctaagcgtgacgtgactctcttccttaaccgncgcaccaggaatatgactggcgaaactatcagccaagccagatgagtgaatccgagttacagatgctagcaagcctacggtggcaacaaaatgaagaactggaggatgctgggacctcccatggcctgagtgcctcccaggtggacaactgtaatgtcagcataagtaccagcagtgacgacacaaccacctggaactcctgcctgccaccccctgtcaaccagggtcgccactatcagaaagaaatgaacccaccttctccttctaatccccgggactggttaaatatgttgagcccaccaatcgttcctcccagtcaacagccggctgagcagcgtccagattcctgtgaaagtttgagtgttcaaggtgaagaagacctcagtgtggaagaggacgaggaagtactgactttgttgtatgacccttgtctgaactgttactttgacccccaaacagggaaatactatgagttggtataatgcctccttccggggcagagagcaggcactcccagctggagcagaatagcagttcagggtcgcttaaggagtcaccacaacttatgtgttgggtgaccacaaaatcaacagtaactgagagaaacgaattcattttgtaaataatgttcaacgttaagaatacctatattccttttgtagatgagtatgattttgaaactgaagaaattaatacagaggcaagattttaggagtttgaattggttcttgtttgttctcattctacatataattttgtttatttcagataattttatgtaaacaaattaagagttattcattcaaattttttgcagtgttaatctgtaaatgatggcttgatgtacagaaaatgtatttttgcttaaaagatgcctgggtaccttttattttatggcatttgtattaaaaataaagtatgatggtaagaagaataaaaaaaaaaatgcttctttt

SEQ ID NO: 67221 - DNA, 472 bp, Homo sapiens
  misc_feature (1)..(1): n is a, c, g, or t
  misc_feature (34)..(34): n is a, c, g, or t
ncctaagcgtgacgtgactctcttccttaaccgncgcaccaggaatatgactggcgaaactatcagccaagccagatgagtgaatccgagttacagatgctagcaagcctacggtggcaacaaaatgaagaactggaggatgctgggacctcccatggcctgagtgcctcccaggtggacaactgtaatgtcagcataagtaccagcagtgacgacacaaccacctggaactcctgcctgccaccccctgtcaaccagggtcgccactatcagaaagaaatgaacccaccttctccttctaatccccgggactggttaaatatgttgagcccaccaatcgttcctcccagtcaacagccggctgagcagcgtccagattcctgtgaaagtttgagtgttcaaggtgggactatgaaaaacgatatgcataagaaaataaaaataatttactataaatagagagaatccaaca

SEQ ID NO: 67222 - DNA, 925 bp, Homo sapiens
  misc_feature (1)..(1): n is a, c, g, or t
  misc_feature (34)..(34): n is a, c, g, or t
ncctaagcgtgacgtgactctcttccttaaccgncgcaccaggaatatgactggcgaaactatcagccaagccagatgagtgaatccgagttacagatgctagcaagcctacggtggcaacaaaatgaagaactggaggatgctgggacctcccatggcctgagtgcctcccaggtggacaactgtaatgtcagcataagtaccagcagtgacgacacaaccacctggaactcctgcctgccaccccctgtcaaccagggtcgccactatcagaaagaaatgaacccaccttctccttctaatccccgggactggttaaatatgttgagcccaccaatcgttcctcccagtcaacagccggctgagcagcgtccagattcctgtgaaagtttgagtgttcaagaagaaatgtctggaagtgctacagccattttgcaactgtgaaggcaaaactcacactctaaagatatcaggacaagaacctggaagtgtgggtcctcacttcttccttgagcatctatactcatcctgaactacagtttccagaacacatttcacatgagaagaataagcatcttttgtctacagatcccaaagcatccttggacacaattcagagtttcatgaacttgagcggaaagagattacattttcattttcacaaagccctgagattcagcattcccctgctttgtgagtgtggacggcagaccagggtagtatcagcaatgcttttggttttgtgtgatggtttgctctcaattggcaagccagcaatacaccttcatcgtcctaccctcaggaatatatcaaccctccagccctgttataatttagtttgcaggcatcttgatcaccttttccttccacaagatgtcacactgcttcattacattgatgacattacactgattgtatctagtga

SEQ ID NO: 67223 - DNA, 623 bp, Homo sapiens
  misc_feature (1)..(1): n is a, c, g, or t
  misc_feature (34)..(34): n is a, c, g, or t
ncctaagcgtgacgtgactctcttccttaaccgncgcaccaggaatatgactggcgaaactatcagccaagccagatgagtgaatccgagttacagatgctagcaagcctacggtggcaacaaaatgaagaactggaggatgctgggacctcccatggcctgagtgcctcccaggtggacaactgtaatgtcagcataagtaccagcagtgacgacacaaccacctggaactcctgcctgccaccccctgtcaaccagggtcgccactatcagaaagaaatgaacccaccttctccttctaatccccgcctttaggtcctttgccatccattaagacaaatcagatgcaatttggtgctcaggacaagaaaatgctgttggatgtttggtgtaggcatgggaaaaaaaaactatattctgaaacaagactggttagaaggcagcttcccacattttgagggactggttaaatatgttgagcccaccaatcgttcctcccagtcaacagccggctgagcagcgtccagattcctgtgaaagtttgagtgttcaaggtgggactatgaaaaacgatatgcataagaaaataaaaataatttactataaatagagagaatccaaca

SEQ ID NO: 67224 - DNA, 405 bp, Homo sapiens
cggcccgagggaaagaaaatattcaccaaataaagcagactgtacctattcatgcagccaatctacatattatgcatccgcatcccccacaattcagagtttcatgaacttgagcggaaagagattacattttcattttcacaaagccctgagattcagcattcccctgctttgtgagtgtggacggcagaccagggtagtatcagcaatgcttttggttttgtgtgatggtttgctctcaattggcaagccagcaatacaccttcatcgtcctaccctcaggaatatatcaaccctccagccctgttataatttagtttgcaggcatcttgatcaccttttccttccacaagatgtcacactgcttcattacattgatgacattacactgattgtatctagtga

SEQ ID NO: 67225 - DNA, 998 bp, Homo sapiens
  misc_feature (1)..(1): n is a, c, g, or t
  misc_feature (5)..(5): n is a, c, g, or t
  misc_feature (24)..(24): n is a, c, g, or t
ncctngcggaacgactctcttaanctccaccgctacacgaatatgactggcgaaactatcagccaagccagatgagtgaatccgagttacagatgctagcaagcctacggtggcaacaaaatgaagaactggaggatgctgggacctcccatggcctgagtgcctcccaggtggacaactgtaatgtcagcataagtaccagcagtgacgacacaaccacctggaactcctgcctgccaccccctgtcaaccagggtcgccactatcagaaagaaatgaacccaccttctccttctaatccccgggactggttaaatatgttgagcccaccaatcgttcctcccagtcaacagccggctgagcagcgtccagattcctgtgaaagtttgagtgttcaaggtgaagaagacctcagtgtggaagaggacgaggaagtactgactttgttgtatgacccttgtctgaactgttactttgacccccaaacagggaaatactatgagttggtataatgcctccttccggggcagagagcaggcactcccagctggagcagaatagcagttcagggtcgcttaaggagtcaccacaacttatgtgttgggtgaccacaaaatcaacagtaactgagagaaacgaattcattttgtaaataatgttcaacgttaagaatacctatattccttttgtagatgagtatgattttgaaactgaagaaattaatacagaggcaagattttaggagtttgaattggttcttgtttgttctcattctacatataattttgtttatttcagataattttatgtaaacaaattaagagttattcattcaaattttttgcagtgttaatctgtaaatgatggcttgatgtacagaaaatgtatttttgcttaaaagatgcctgggtaccttttattttatggcatttgtattaaaaataaatagcgatgcgaccgttttgtgtggggcgaaaatggggcgggtgcggggaaaa

SEQ ID NO: 67226 - DNA, 1012 bp, Homo sapiens
  misc_feature (1)..(1): n is a, c, g, or t
  misc_feature (34)..(34): n is a, c, g, or t
ncctaagcgtgacgtgactctcttccttaaccgncgcaccaggaatatgactggcgaaactatcagccaagccagatgagtgaatccgagttacagatgctagcaagcctacggtggcaacaaaatgaagaactggaggatgctgggacctcccatggcctgagtgcctcccaggtggacaactgtaatgtcagcataagtaccagcagtgacgacacaaccacctggaactcctgcctgccaccccctgtcaaccagggtcgccactatcagaaagaaatgaacccaccttctccttctaatccccgggactggttaaatatgttgagcccaccaatcgttcctcccagtcaacagccggctgagcagcgtccagattcctgtgaaagtttgagtgttcaaggatgatttaatcccagaaagctggagagcttggagacatccaagatgctgacaaatggaccaccgaagaaaaagcacttagcacatgaagaaatgtctggaagtgctacagccattttgcaactgtgaaggcaaaactcacactctaaagatatcaggacaagaacctggaagtgtgggtcctcacttcttccttgagcatctatactcatcctgaactacagtttccagaacacatttcacatgagaagaataagcatcttttgtctacagatcccaaagcatccttggacacaattcagagtttcatgaacttgagcggaaagagattacattttcattttcacaaagccctgagattcagcattcccctgctttgtgagtgtggacggcagaccagggtagtatcagcaatgcttttggttttgtgtgatggtttgctctcaattggcaagccagcaatacaccttcatcgtcctaccctcaggaatatatcaaccctccagccctgttataatttagtttgcaggcatcttgatcaccttttccttccacaagatgtcacactgcttcattacattgatgacattacactgattgtatctagtga

SEQ ID NO: 67227 - DNA, 728 bp, Homo sapiens
  misc_feature (1)..(1): n is a, c, g, or t
  misc_feature (34)..(34): n is a, c, g, or t
ncctaagcgtgacgtgactctcttccttaaccgncgcaccaggaatatgactggcgaaactatcagccaagccagatgagtgaatccgagttacagatgctagcaagcctacggtggcaacaaaatgaagaactggaggatgctgggacctcccatggcctgagtgcctcccaggtggacaactgtaatgtcagcataagtaccagcagtgacgacacaaccacctggaactcctgcctgccaccccctgtcaaccagggtcgccactatcagaaagaaatgaacccaccttctccttctaatccccgggactggttaaatatgttgagcccaccaatcgttcctcccagtcaacagccggctgagcagcgtccagattcctgtgaaagtttgagtgttcaagatatttcacacactcctgaccaggctgtaacaagatgattttttagacccacttttcatccaaaacaaggatgatttaatcccagaaagctggagagcttggagacatccaagatgctgacaaatggaccaccgaagaaaaagcacttagcacatgcacatgctcaccaaaatgcaataccatgctatggtcgctcattctgtccacaaagattgcagctttctatgcactctaactgcattctgccacctgcaccctgtggcccacttgaaatgaagtttgactacatgacctgcttctttagccaataaaatgtgagcagaag

SEQ ID NO: 67228 - DNA, 648 bp, Homo sapiens
  misc_feature (33)..(33): n is a, c, g, or t
  misc_feature (130)..(130): n is a, c, g, or t
  misc_feature (132)..(132): n is a, c, g, or t
  misc_feature (137)..(138): n is a, c, g, or t
  misc_feature (140)..(140): n is a, c, g, or t
  misc_feature (145)..(145): n is a, c, g, or t
  misc_feature (152)..(153): n is a, c, g, or t
  misc_feature (156)..(156): n is a, c, g, or t
  misc_feature (159)..(159): n is a, c, g, or t
  misc_feature (164)..(164): n is a, c, g, or t
  misc_feature (175)..(175): n is a, c, g, or t
  misc_feature (197)..(197): n is a, c, g, or t
  misc_feature (200)..(200): n is a, c, g, or t
  misc_feature (229)..(229): n is a, c, g, or t
  misc_feature (233)..(233): n is a, c, g, or t
  misc_feature (238)..(238): n is a, c, g, or t
  misc_feature (240)..(241): n is a, c, g, or t
  misc_feature (247)..(247): n is a, c, g, or t
  misc_feature (250)..(250): n is a, c, g, or t
  misc_feature (255)..(255): n is a, c, g, or t
  misc_feature (257)..(257): n is a, c, g, or t
caccacacaaccccaaacccaaccaacagaccnacccccacccccccccccccacccacccaaccccccaaaccccccaccccaaccccacacccaccaaccccacacccaccaacacaccccccccccncnccccnnangcaangaagcanncanacncccgnaaccccgcacnccccacgaaccagaaagagcancgncggaggggaaggaaaagggggggaaaganaatnccccncnnggcatnaanccaantntttaaatgctttatagcaaaatgaaagagaacatgaaatgcttctttctcagtttattggttgaatgtgtatctatttgagtctggaaataactaatgtgtttgataattagtttagtttgtggcttcatggaaactccctgtaaactaaaagcttcagggttatgtctatgttcattctatagaagaaatgcaaactatcactgtattttaatatttgttattctctcatgaatagaaatttatgtagaagcaaacaaaatacttttacccacttaaaaagagaatataacattttatgtcactataatcttttgttttttaagttagtgtatattttgttgtgattatctttttgtggtgtgaataaatcttttatcttgaatgtaata

SEQ ID NO: 67229 - DNA, 684 bp, Homo sapiens
tctgggctcccctgggcggggcctgtccctcactcttaggcccagaacctgtccaagggacaggtagggtccaggtcccactttgggtagctgcctgtttggaatgcccacactggtgctgcctgtggcatagccactgctgtacgtttttggttgtttttaagaaactcgatgaagaggggtgtcattctgggctcggggtggtcgccaatttttcaccagaaagggagccaccccttgcaaccacttctgtctccgttagccccccctctgccctcctccaagccaaagcgtggcctggcttttgtcttcccatttagttttcctcttttacccttccttttgtgcttaatttattaaaatagttgctgtgtcctctgaagaaaccaatgactttaaacaagagacccttccaagtaagtccaacgaaagccatgaccacatggatgatatggatgatgaagatgatgatgaccatgtggacagccaggactccattgactcgaacgactctgatgatgtagatgacactgatgattctcaccagtctgatgagtctcaccattctgatgaatctgatgaactggtcactgattttcccacggacctgccagcaaccgaagttttcactccagttgtccccagcgtgagtccctcgtcatctgtcgctaggatattacgtgc

SEQ ID NO: 67230 - DNA, 593 bp, Homo sapiens
  misc_feature (574)..(575): n is a, c, g, or t
tagtagaaacggggtttcactgtgttagccaggatgttctcgatctcctgacctcgtgatccgcctgcctcggcctcccaaagtgctgggattacaggggtgagccaccgtgcctagccatttcattttaattaacttaaatttaaatagctccatgtggttagaggatactgaattagcacagtcttagagagttccttcttgttccatggactggacacaatgaagattaacagtaattaaggtcacttctggtttagatgtgctttatctgagaggaaaattcagccagcaaacatacaaaaagaaagcacagtgtgaagttcggtgttaagagctagtttgcctgcgtttgaaccctgcctggctctgccatttcctaccacttaactgcactgtggctgagttttctgatctgtaaggtgggaataataatgatacctatctcataggggaatgaaaggatcaaatgagttcatatttgtaaagcaatttgaaagagtgcctagcccacagtaagtgctacataagagtttgttaaatgaatctgcaaaaaaaaaagtcgaccggccgnnaatttagtagtagtaggc

SEQ ID NO: 67231 - DNA, 768 bp, Homo sapiens
tagtagaaacggggtttcactgtgttagccaggatgttctcgatctcctgacctcgtgatccgcctgcctcggcctcccaaagtgctgggattacaggggtgagccaccgtgcctagccatttcattttaattaacttaaatttaaatagctccatgtggttagaggatactgaattagcacagtcttagagagttccttcttgttccatggactggacacaatgaagattaacagtaattaaggtcacttctggtttagatgtgctttatctgagaggaaaattcagccagcaaacatacaaaaagaaagcacagtgtgaagttcggtgttaagagctagtttgcctgcgtttgaaccctgcctggctctgccatttcctaccacttaactgcactgtggctgagttttctgatctgtaaggtgggaataataatgatacctatctcataggggaatgaaaggatcaaatgagttcatatttgtaaagcaatttgaaagagtgcctagcccacagtaagtgctacataagagtttgttaaatgaatctgcaaaaaaaaaaaatttacaaaaaggtacctaagggtccgggtgactatatgcttccatcaagactagtgaagaatggttgttttttccattcatccctacatttctttttttaataatgataaacatgcaacttttttgtagctttacaacaaatacccagatgctgtggccacatggcgttacgtcgagtccacagtcgaagggatccatctaggca

SEQ ID NO: 67232 - DNA, 1516 bp, Homo sapiens
  misc_feature (2)..(2): n is a, c, g, or t
  misc_feature (11)..(13): n is a, c, g, or t
  misc_feature (16)..(16): n is a, c, g, or t
tnagtacccgnnnttngggcattcttggcctactggtacagcaggaggaggcagagcacagcatcgtcgggaccagactcgtctcaggccagttgcagccttctcagccaaacgccgaccaaggaaaactcactaccatgagaattgcagtgatttgcttttgcctcctaggcatcacctgtgccataccagttaaacaggctgattctggaagttctgaggaaaagcagctttacaacaaatacccagatgctgtggccacatggctaaaccctgacccatctcagaagcagaatctcctagccccacagaatgctgtgtcctctgaagaaaccaatgactttaaacaagagacccttccaagtaagtccaacgaaagccatgaccacatggatgatatggatgatgaagatgatgatgaccatgtggacagccaggactccattgactcgaacgactctgatgatgtagatgacactgatgattctcaccagtctgatgagtctcaccattctgatgaatctgatgaactggtcactgattttcccacggacctgccagcaaccgaagttttcactccagttgtccccacagtagacacatatgatggccgaggtgatagtgtggtttatggactgaggtcaaaatctaagaagtttcgcagacctgacatccagtaccctgatgctacagacgaggacatcacctcacacatggaaagcgaggagttgaatggtgcatacaaggccatccccgttgcccaggacctgaacgcgccttctgattgggacagccgtgggaaggacagttatgaaacgagtcagctggatgaccagagtgctgaaacccacagccacaagcagtccagattatataagcggaaagccaatgatgagagcaatgagcattccgatgtgattgatagtcaggaactttccaaagtcagccgtgaattccacagccatgaatttcacagccatgaagatatgctggttgtagaccccaaaagtaaggaagaagataaacacctgaaatttcgtatttctcatgaattagatagtgcatcttctgaggtcaattaaaaggagaaaaaatacaatttctcactttgcatttagtcaaaagaaaaaatgctttatagcaaaatgaaagagaacatgaaatgcttctttctcagtttattggttgaatgtgtatctatttgagtctggaaataactaatgtgtttgataattagtttagtttgtggcttcatggaaactccctgtaaactaaaagcttcagggttatgtctatgttcattctatagaagaaatgcaaactatcactgtattttaatatttgttattctctcatgaatagaaatttatgtagaagcaaacaaaatacttttacccacttaaaaagagaatataacattttatgtcactataatcttttgttttttaagttagtgtatattttgttgtgattatctttttgtggtgtgaataaatcttttatcttgaatgtaata

SEQ ID NO: 67233 - DNA, 1858 bp, Homo sapiens
  misc_feature (54)..(55): n is a, c, g, or t
  misc_feature (57)..(57): n is a, c, g, or t
  misc_feature (64)..(64): n is a, c, g, or t
  misc_feature (67)..(67): n is a, c, g, or t
  misc_feature (101)..(101): n is a, c, g, or t
  misc_feature (114)..(114): n is a, c, g, or t
gaacagcaggatgaggtacaatacagtatctatcggaccagactcgtctcagcnnangttcagnctnctcagccaaacgccgaccaaggaaaactcactancatgagaattgcngtgatttgcttttgcctcctaggcatcactgtgccataccagttaaacaggctgattctggaagttctgaggaaaagcagctttacaacaaatacccagatgctgtggccacatggctaaaccctgtcccagtctcagaagcagaatctcctagccccacagaacactattgtctacggaaggagcagcaggaggaggcagagcacagcatcgtcgggaccagactcgtctcaggccagttgcagccttctcagccaaacgccgaccaaggaaaactcactaccatgagaattgcagtgatttgcttttgcctcctaggcatcacctgtgccataccagttaaacaggctgattctggaagttctgaggaaaagcagctttacaacaaatacccagatgctgtggccacatggctaaaccctgacccatctcagaagcagaatctcctagccccacagaatgctgtgtcctctgaagaaaccaatgactttaaacaagagacccttccaagtaagtccaacgaaagccatgaccacatggatgatatggatgatgaagatgatgatgaccatgtggacagccaggactccattgactcgaacgactctgatgatgtagatgacactgatgattctcaccagtctgatgagtctcaccattctgatgaatctgatgaactggtcactgattttcccacggacctgccagcaaccgaagttttcactccagttgtccccacagtagacacatatgatggccgaggtgatagtgtggtttatggactgaggtcaaaatctaagaagtttcgcagacctgacatccagtaccctgatgctacagacgaggacatcacctcacacatggaaagcgaggagttgaatggtgcatacaaggccatccccgttgcccaggacctgaacgcgccttctgattgggacagccgtgggaaggacagttatgaaacgagtcagctggatgaccagagtgctgaaacccacagccacaagcagtccagattatataagcggaaagccaatgatgagagcaatgagcattccgatgtgattgatagtcaggaactttccaaagtcagccgtgaattccacagccatgaatttcacagccatgaagatatgctggttgtagaccccaaaagtaaggaagaagataaacacctgaaatttcgtatttctcatgaattagatagtgcatcttctgaggtcaattaaaaggagaaaaaatacaatttctcactttgcatttagtcaaaagaaaaaatgctttatagcaaaatgaaagagaacatgaaatgcttctttctcagtttattggttgaatgtgtatctatttgagtctggaaataactaatgtgtttgataattagtttagtttgtggcttcatggaaactccctgtaaactaaaagcttcagggttatgtctatgttcattctatagaagaaatgcaaactatcactgtattttaatatttgttattctctcatgaatagaaatttatgtagaagcaaacaaaatacttttacccacttaaaaagagaatataacattttatgtcactataatcttttgttttttaagttagtgtatattttgttgtgattatctttttgtggtgtgaataaatcttttatcttgaatgtaataagaatttggtggtgtcaattgcttatttgttttcccacggttgtccagcaattaataaaacataaccttttttactgccta

SEQ ID NO: 67234 - DNA, 1913 bp, Homo sapiens
  misc_feature (54)..(55): n is a, c, g, or t
  misc_feature (57)..(57): n is a, c, g, or t
  misc_feature (64)..(64): n is a, c, g, or t
  misc_feature (67)..(67): n is a, c, g, or t
  misc_feature (101)..(101): n is a, c, g, or t
  misc_feature (114)..(114): n is a, c, g, or t
  misc_feature (1907)..(1908): n is a, c, g, or t
gaacagcaggatgaggtacaatacagtatctatcggaccagactcgtctcagcnnangttcagnctnctcagccaaacgccgaccaaggaaaactcactancatgagaattgcngtgatttgcttttgcctcctaggcatcactgtgccataccagttaaacaggctgattctggaagttctgaggaaaagcagctttacaacaaatacccagatgctgtggccacatggctaaaccctgtcccagtctcagaagcagaatctcctagccccacagaacactattgtctacggaaggagcagcaggaggaggcagagcacagcatcgtcgggaccagactcgtctcaggccagttgcagccttctcagccaaacgccgaccaaggaaaactcactaccatgagaattgcagtgatttgcttttgcctcctaggcatcacctgtgccataccagttaaacaggctgattctggaagttctgaggaaaagcagctttacaacaaatacccagatgctgtggccacatggctaaaccctgacccatctcagaagcagaatctcctagccccacagaatgctgtgtcctctgaagaaaccaatgactttaaacaagagacccttccaagtaagtccaacgaaagccatgaccacatggatgatatggatgatgaagatgatgatgaccatgtggacagccaggactccattgactcgaacgactctgatgatgtagatgacactgatgattctcaccagtctgatgagtctcaccattctgatgaatctgatgaactggtcactgattttcccacggacctgccagcaaccgaagttttcactccagttgtccccacagtagacacatatgatggccgaggtgatagtgtggtttatggactgaggtcaaaatctaagaagtttcgcagacctgacatccagtaccctgatgctacagacgaggacatcacctcacacatggaaagcgaggagttgaatggtgcatacaaggccatccccgttgcccaggacctgaacgcgccttctgattgggacagccgtgggaaggacagttatgaaacgagtcagctggatgaccagagtgctgaaacccacagccacaagcagtccagattatataagcggaaagccaatgatgagagcaatgagcattccgatgtgattgatagtcaggaactttccaaagtcagccgtgaattccacagccatgaatttcacagccatgaagatatgctggttgtagaccccaaaagtaaggaagaagataaacacctgaaatttcgtatttctcatgaattagatagtgcatcttctgaggtcaattaaaaggagaaaaaatacaatttctcactttgcatttagtcaaaagaaaaaatgctttatagcaaaatgaaagagaacatgaaatgcttctttctcagtttattggttgaatgtgtatctatttgagtctggaaataactaatgtgtttgataattagtttagtttgtggcttcatggaaactccctgtaaactaaaagcttcagggttatgtctatgttcattctatagaagaaatgcaaactatcactgtattttaatatttgttattctctcatgaatagaaatttatgtagaagcaaacaaaatacttttacccacttaaaaagagaatataacattttatgtcactataatcttttgttttttaagttagtgtatattttgttgtgattatctttttgtggtgtgaataaatcttttatcttgaatgtaataagaatttggtggtgtcaattgcttatttgttttcccacggttgtccagcaattaataaaacataaccttttttactgcctaaaaaaaaaaaaaaaaaaaaaaaaaaaaaaaaaaaaaaaaaaaaaaaagnnggggg

SEQ ID NO: 67235 - DNA, 1828 bp, Homo sapiens
  misc_feature (54)..(55): n is a, c, g, or t
  misc_feature (57)..(57): n is a, c, g, or t
  misc_feature (64)..(64): n is a, c, g, or t
  misc_feature (67)..(67): n is a, c, g, or t
  misc_feature (101)..(101): n is a, c, g, or t
  misc_feature (114)..(114): n is a, c, g, or t
  misc_feature (1786)..(1786): n is a, c, g, or t
gaacagcaggatgaggtacaatacagtatctatcggaccagactcgtctcagcnnangttcagnctnctcagccaaacgccgaccaaggaaaactcactancatgagaattgcngtgatttgcttttgcctcctaggcatcactgtgccataccagttaaacaggctgattctggaagttctgaggaaaagcagctttacaacaaatacccagatgctgtggccacatggctaaaccctgtcccagtctcagaagcagaatctcctagccccacagaacactattgtctacggaaggagcagcaggaggaggcagagcacagcatcgtcgggaccagactcgtctcaggccagttgcagccttctcagccaaacgccgaccaaggaaaactcactaccatgagaattgcagtgatttgcttttgcctcctaggcatcacctgtgccataccagttaaacaggctgattctggaagttctgaggaaaagcagctttacaacaaatacccagatgctgtggccacatggctaaaccctgacccatctcagaagcagaatctcctagccccacagaatgctgtgtcctctgaagaaaccaatgactttaaacaagagacccttccaagtaagtccaacgaaagccatgaccacatggatgatatggatgatgaagatgatgatgaccatgtggacagccaggactccattgactcgaacgactctgatgatgtagatgacactgatgattctcaccagtctgatgagtctcaccattctgatgaatctgatgaactggtcactgattttcccacggacctgccagcaaccgaagttttcactccagttgtccccacagtagacacatatgatggccgaggtgatagtgtggtttatggactgaggtcaaaatctaagaagtttcgcagacctgacatccagtaccctgatgctacagacgaggacatcacctcacacatggaaagcgaggagttgaatggtgcatacaaggccatccccgttgcccaggacctgaacgcgccttctgattgggacagccgtgggaaggacagttatgaaacgagtcagctggatgaccagagtgctgaaacccacagccacaagcagtccagattatataagcggaaagccaatgatgagagcaatgagcattccgatgtgattgatagtcaggaactttccaaagtcagccgtgaattccacagccatgaatttcacagccatgaagatatgctggttgtagaccccaaaagtaaggaagaagataaacacctgaaatttcgtatttctcatgaattagatagtgcatcttctgaggtcaattaaaaggagaaaaaatacaatttctcactttgcatttagtcaaaagaaaaaatgctttatagcaaaatgaaagagaacatgaaatgcttctttctcagtttattggttgaatgtgtatctatttgagtctggaaataactaatgtgtttgataattagtttagtttgtggcttcatggaaactccctgtaaactaaaagcttcagggttatgtctatgttcattctatagaagaaatgcaaactatcactgtattttaatatttgttattctctcatgaatagaaatttatgtagaagcaaacaaaatacttttacccacttaaaaagagaatataacattttatgtcactataatcttttgttttttaagttagtgtatattttgttgtgattatctttttgtggtgtgaataaatcttttatcttgaatgtaataaggatgcgncagttttcctcgttcttgtcaataattgaaacaatgaataca

SEQ ID NO: 67236 - DNA, 1797 bp, Homo sapiens
  misc_feature (54)..(55): n is a, c, g, or t
  misc_feature (57)..(57): n is a, c, g, or t
  misc_feature (64)..(64): n is a, c, g, or t
  misc_feature (67)..(67): n is a, c, g, or t
  misc_feature (101)..(101): n is a, c, g, or t
  misc_feature (114)..(114): n is a, c, g, or t
gaacagcaggatgaggtacaatacagtatctatcggaccagactcgtctcagcnnangttcagnctnctcagccaaacgccgaccaaggaaaactcactancatgagaattgcngtgatttgcttttgcctcctaggcatcactgtgccataccagttaaacaggctgattctggaagttctgaggaaaagcagctttacaacaaatacccagatgctgtggccacatggctaaaccctgtcccagtctcagaagcagaatctcctagccccacagaacactattgtctacggaaggagcagcaggaggaggcagagcacagcatcgtcgggaccagactcgtctcaggccagttgcagccttctcagccaaacgccgaccaaggaaaactcactaccatgagaattgcagtgatttgcttttgcctcctaggcatcacctgtgccataccagttaaacaggctgattctggaagttctgaggaaaagcagctttacaacaaatacccagatgctgtggccacatggctaaaccctgacccatctcagaagcagaatctcctagccccacagaatgctgtgtcctctgaagaaaccaatgactttaaacaagagacccttccaagtaagtccaacgaaagccatgaccacatggatgatatggatgatgaagatgatgatgaccatgtggacagccaggactccattgactcgaacgactctgatgatgtagatgacactgatgattctcaccagtctgatgagtctcaccattctgatgaatctgatgaactggtcactgattttcccacggacctgccagcaaccgaagttttcactccagttgtccccacagtagacacatatgatggccgaggtgatagtgtggtttatggactgaggtcaaaatctaagaagtttcgcagacctgacatccagtaccctgatgctacagacgaggacatcacctcacacatggaaagcgaggagttgaatggtgcatacaaggccatccccgttgcccaggacctgaacgcgccttctgattgggacagccgtgggaaggacagttatgaaacgagtcagctggatgaccagagtgctgaaacccacagccacaagcagtccagattatataagcggaaagccaatgatgagagcaatgagcattccgatgtgattgatagtcaggaactttccaaagtcagccgtgaattccacagccatgaatttcacagccatgaagatatgctggttgtagaccccaaaagtaaggaagaagataaacacctgaaatttcgtatttctcatgaattagatagtgcatcttctgaggtcaattaaaaggagaaaaaatacaatttctcactttgcatttagtcaaaagaaaaaatgctttatagcaaaatgaaagagaacatgaaatgcttctttctcagtttattggttgaatgtgtatctatttgagtctggaaataactaatgtgtttgataattagtttagtttgtggcttcatggaaactccctgtaaactaaaagcttcagggttatgtctatgttcattctatagaagaaatgcaaactatcactgtattttaatatttgttattctctcatgaatagaaatttatgtagaagcaaacaaaatacttttacccacttaaaaagagaatataacattttatgtcactataatcttttgttttttaagttagtgtatattttgttgtgattatctttttgtggtgtgaataaatcttttatcttgaatgtaatattttaaaaaaaaaccaaaaa

SEQ ID NO: 67237 - DNA, 1996 bp, Homo sapiens
  misc_feature (54)..(55): n is a, c, g, or t
  misc_feature (57)..(57): n is a, c, g, or t
  misc_feature (64)..(64): n is a, c, g, or t
  misc_feature (67)..(67): n is a, c, g, or t
  misc_feature (101)..(101): n is a, c, g, or t
  misc_feature (114)..(114): n is a, c, g, or t
gaacagcaggatgaggtacaatacagtatctatcggaccagactcgtctcagcnnangttcagnctnctcagccaaacgccgaccaaggaaaactcactancatgagaattgcngtgatttgcttttgcctcctaggcatcactgtgccataccagttaaacaggctgattctggaagttctgaggaaaagcagctttacaacaaatacccagatgctgtggccacatggctaaaccctgtcccagtctcagaagcagaatctcctagccccacagaacactattgtctacggaaggagcagcaggaggaggcagagcacagcatcgtcgggaccagactcgtctcaggccagttgcagccttctcagccaaacgccgaccaaggaaaactcactaccatgagaattgcagtgatttgcttttgcctcctaggcatcacctgtgccataccagttaaacaggctgattctggaagttctgaggaaaagcagctttacaacaaatacccagatgctgtggccacatggctaaaccctgacccatctcagaagcagaatctcctagccccacagaatgctgtgtcctctgaagaaaccaatgactttaaacaagagacccttccaagtaagtccaacgaaagccatgaccacatggatgatatggatgatgaagatgatgatgaccatgtggacagccaggactccattgactcgaacgactctgatgatgtagatgacactgatgattctcaccagtctgatgagtctcaccattctgatgaatctgatgaactggtcactgattttcccacggacctgccagcaaccgaagttttcactccagttgtccccacagtagacacatatgatggccgaggtgatagtgtggtttatggactgaggtcaaaatctaagaagtttcgcagacctgacatccagtaccctgatgctacagacgaggacatcacctcacacatggaaagcgaggagttgaatggtgcatacaaggccatccccgttgcccaggacctgaacgcgccttctgattgggacagccgtgggaaggacagttatgaaacgagtcagctggatgaccagagtgctgaaacccacagccacaagcagtccagattatataagcggaaagccaatgatgagagcaatgagcattccgatgtgattgatagtcaggaactttccaaagtcagccgtgaattccacagccatgaatttcacagccatgaagatatgctggttgtagaccccaaaagtaaggaagaagataaacacctgaaatttcgtatttctcatgaattagatagtgcatcttctgaggtcaattaaaaggagaaaaaatacaatttctcactttgcatttagtcaaaagaaaaaatgctttatagcaaaatgaaagagaacatgaaatgcttctttctcagtttattggttgaatgtgtatctatttgagtctggaaataactaatgtgtttgataattagtttagtttgtggcttcatggaaactccctgtaaactaaaagcttcagggttatgtctatgttcattctatagaagaaatgcaaactatcactgtattttaatatttgttattctctcatgaatagaaatttatgtagaagcaaacaaaatacttttacccacttaaaaagagaatataacattttatgtcactataatcttttgttttttaagttagtgtatattttgttgtgattatctttttgtggtgtgaataaatcttttatcttgaatgtaataaaaaaaaaaaaaaaaaaaaaaaaaaaaactttgttggggggctgcgggccctggaaaaagtttttaaaaccatttggttggggggggggggcccaagtaggtttaggtggacctggggcaaaggggccccaaggaaaacggggcaggaaaaggggtgggttttttccccaataaaaagggcggggggacgcgggggttggacaactcagtgggtttggg

SEQ ID NO: 67238 - DNA, 1753 bp, Homo sapiens
  misc_feature (54)..(55): n is a, c, g, or t
  misc_feature (57)..(57): n is a, c, g, or t
  misc_feature (64)..(64): n is a, c, g, or t
  misc_feature (67)..(67): n is a, c, g, or t
  misc_feature (101)..(101): n is a, c, g, or t
  misc_feature (114)..(114): n is a, c, g, or t
gaacagcaggatgaggtacaatacagtatctatcggaccagactcgtctcagcnnangttcagnctnctcagccaaacgccgaccaaggaaaactcactancatgagaattgcngtgatttgcttttgcctcctaggcatcactgtgccataccagttaaacaggctgattctggaagttctgaggaaaagcagctttacaacaaatacccagatgctgtggccacatggctaaaccctgtcccagtctcagaagcagaatctcctagccccacagaacactattgtctacggaaggagcagcaggaggaggcagagcacagcatcgtcgggaccagactcgtctcaggccagttgcagccttctcagccaaacgccgaccaaggaaaactcactaccatgagaattgcagtgatttgcttttgcctcctaggcatcacctgtgccataccagttaaacaggctgattctggaagttctgaggaaaagcagctttacaacaaatacccagatgctgtggccacatggctaaaccctgacccatctcagaagcagaatctcctagccccacagaatgctgtgtcctctgaagaaaccaatgactttaaacaagagacccttccaagtaagtccaacgaaagccatgaccacatggatgatatggatgatgaagatgatgatgaccatgtggacagccaggactccattgactcgaacgactctgatgatgtagatgacactgatgattctcaccagtctgatgagtctcaccattctgatgaatctgatgaactggtcactgattttcccacggacctgccagcaaccgaagttttcactccagttgtccccacagtagacacatatgatggccgaggtgatagtgtggtttatggactgaggtcaaaatctaagaagtttcgcagacctgacatccagtaccctgatgctacagacgaggacatcacctcacacatggaaagcgaggagttgaatggtgcatacaaggccatccccgttgcccaggacctgaacgcgccttctgattgggacagccgtgggaaggacagttatgaaacgagtcagctggatgaccagagtgctgaaacccacagccacaagcagtccagattatataagcggaaagccaatgatgagagcaatgagcattccgatgtgattgatagtcaggaactttccaaagtcagccgtgaattccacagccatgaatttcacagccatgaagatatgctggttgtagaccccaaaagtaaggaagaagataaacacctgaaatttcgtatttctcatgaattagatagtgcatcttctgaggtcaattaaaaggagaaaaaatacaatttctcactttgcatttagtcaaaagaaaaaatgctttatagcaaaatgaaagagaacatgaaatgcttctttctcagtttattggttgaatgtgtatctatttgagtctggaaataactaatgtgtttgataattagtttagtttgtggcttcatggaaactccctgtaaactaaaagcttcagggttatgtctatgttcattctatagaagaaatgcaaactatcactgtattttaatatttgttattctctcatgaatagaaatttatgtagaagcaaacaaaatacttttacccacttaaaaagagaatataacattttatgtcactataatcttttgttttttaagttagtgtatattttgatacaaacacccccccgagcttgagta

SEQ ID NO: 67239 - DNA, 1652 bp, Homo sapiens
  misc_feature (54)..(55): n is a, c, g, or t
  misc_feature (57)..(57): n is a, c, g, or t
  misc_feature (64)..(64): n is a, c, g, or t
  misc_feature (67)..(67): n is a, c, g, or t
  misc_feature (101)..(101): n is a, c, g, or t
  misc_feature (114)..(114): n is a, c, g, or t
  misc_feature (1633)..(1634): n is a, c, g, or t
gaacagcaggatgaggtacaatacagtatctatcggaccagactcgtctcagcnnangttcagnctnctcagccaaacgccgaccaaggaaaactcactancatgagaattgcngtgatttgcttttgcctcctaggcatcactgtgccataccagttaaacaggctgattctggaagttctgaggaaaagcagctttacaacaaatacccagatgctgtggccacatggctaaaccctgtcccagtctcagaagcagaatctcctagccccacagaacactattgtctacggaaggagcagcaggaggaggcagagcacagcatcgtcgggaccagactcgtctcaggccagttgcagccttctcagccaaacgccgaccaaggaaaactcactaccatgagaattgcagtgatttgcttttgcctcctaggcatcacctgtgccataccagttaaacaggctgattctggaagttctgaggaaaagcagctttacaacaaatacccagatgctgtggccacatggctaaaccctgacccatctcagaagcagaatctcctagccccacagaatgctgtgtcctctgaagaaaccaatgactttaaacaagagacccttccaagtaagtccaacgaaagccatgaccacatggatgatatggatgatgaagatgatgatgaccatgtggacagccaggactccattgactcgaacgactctgatgatgtagatgacactgatgattctcaccagtctgatgagtctcaccattctgatgaatctgatgaactggtcactgattttcccacggacctgccagcaaccgaagttttcactccagttgtccccacagtagacacatatgatggccgaggtgatagtgtggtttatggactgaggtcaaaatctaagaagtttcgcagacctgacatccagtaccctgatgctacagacgaggacatcacctcacacatggaaagcgaggagttgaatggtgcatacaaggccatccccgttgcccaggacctgaacgcgccttctgattgggacagccgtgggaaggacagttatgaaacgagtcagctggatgaccagagtgctgaaacccacagccacaagcagtccagattatataagcggaaagccaatgatgagagcaatgagcattccgatgtgattgatagtcaggaactttccaaagtcagccgtgaattccacagccatgaatttcacagccatgaagatatgctggttgtagaccccaaaagtaaggaagaagataaacacctgaaatttcgtatttctcatgaattagatagtgcatcttctgaggtcaattaaaaggagaaaaaatacaatttctcactttgcatttagtcaaaagaaaaaatgctttatagcaaaatgaaagagaacatgaaatgcttctttctcagtttattggttgaatgtgtatctatttgagtctggaaataactaatgtgtttgataattagtttagtttgtggcttcatggaaactccctgtaaactaaaagcttcagggttatgtctatgttcattctatagaagaaatgcaaactatcactgtattttaatatttgttattctctcatgaagtcgaccggccgnnaatttagtagtagtaggc

SEQ ID NO: 67240 - DNA, 1592 bp, Homo sapiens
  misc_feature (54)..(55): n is a, c, g, or t
  misc_feature (57)..(57): n is a, c, g, or t
  misc_feature (64)..(64): n is a, c, g, or t
  misc_feature (67)..(67): n is a, c, g, or t
  misc_feature (101)..(101): n is a, c, g, or t
  misc_feature (114)..(114): n is a, c, g, or t
gaacagcaggatgaggtacaatacagtatctatcggaccagactcgtctcagcnnangttcagnctnctcagccaaacgccgaccaaggaaaactcactancatgagaattgcngtgatttgcttttgcctcctaggcatcactgtgccataccagttaaacaggctgattctggaagttctgaggaaaagcagctttacaacaaatacccagatgctgtggccacatggctaaaccctgtcccagtctcagaagcagaatctcctagccccacagaacactattgtctacggaaggagcagcaggaggaggcagagcacagcatcgtcgggaccagactcgtctcaggccagttgcagccttctcagccaaacgccgaccaaggaaaactcactaccatgagaattgcagtgatttgcttttgcctcctaggcatcacctgtgccataccagttaaacaggctgattctggaagttctgaggaaaagcagctttacaacaaatacccagatgctgtggccacatggctaaaccctgacccatctcagaagcagaatctcctagccccacagaatgctgtgtcctctgaagaaaccaatgactttaaacaagagacccttccaagtaagtccaacgaaagccatgaccacatggatgatatggatgatgaagatgatgatgaccatgtggacagccaggactccattgactcgaacgactctgatgatgtagatgacactgatgattctcaccagtctgatgagtctcaccattctgatgaatctgatgaactggtcactgattttcccacggacctgccagcaaccgaagttttcactccagttgtccccacagtagacacatatgatggccgaggtgatagtgtggtttatggactgaggtcaaaatctaagaagtttcgcagacctgacatccagtaccctgatgctacagacgaggacatcacctcacacatggaaagcgaggagttgaatggtgcatacaaggccatccccgttgcccaggacctgaacgcgccttctgattgggacagccgtgggaaggacagttatgaaacgagtcagctggatgaccagagtgctgaaacccacagccacaagcagtccagattatataagcggaaagccaatgatgagagcaatgagcattccgatgtgattgatagtcaggaactttccaaagtcagccgtgaattccacagccatgaatttcacagccatgaagatatgctggttgtagaccccaaaagtaaggaagaagataaacacctgaaatttcgtatttctcatgaattagatagtgcatcttctgaggtcaattaaaaggagaaaaaatacaatttctcactttgcatttagtcaaaagaaaaaatgctttatagcaaaatgaaagagaacatgaaatgcttctttctcagtttattggttgaatgtgtatctatttgagtctggaaataactaatgtgtttgataattagtttagtttgtggcttcatggaaactccctgtaaactaaagcctaacgatgtatgattatgtagatatagcagacgcgtagtttttcctcaagag

SEQ ID NO: 67241 - DNA, 1605 bp, Homo sapiens
  misc_feature (54)..(55): n is a, c, g, or t
  misc_feature (57)..(57): n is a, c, g, or t
  misc_feature (64)..(64): n is a, c, g, or t
  misc_feature (67)..(67): n is a, c, g, or t
  misc_feature (101)..(101): n is a, c, g, or t
  misc_feature (114)..(114): n is a, c, g, or t
  misc_feature (1445)..(1445): n is a, c, g, or t
  misc_feature (1453)..(1454): n is a, c, g, or t
  misc_feature (1600)..(1600): n is a, c, g, or t
gaacagcaggatgaggtacaatacagtatctatcggaccagactcgtctcagcnnangttcagnctnctcagccaaacgccgaccaaggaaaactcactancatgagaattgcngtgatttgcttttgcctcctaggcatcactgtgccataccagttaaacaggctgattctggaagttctgaggaaaagcagctttacaacaaatacccagatgctgtggccacatggctaaaccctgtcccagtctcagaagcagaatctcctagccccacagaacactattgtctacggaaggagcagcaggaggaggcagagcacagcatcgtcgggaccagactcgtctcaggccagttgcagccttctcagccaaacgccgaccaaggaaaactcactaccatgagaattgcagtgatttgcttttgcctcctaggcatcacctgtgccataccagttaaacaggctgattctggaagttctgaggaaaagcagctttacaacaaatacccagatgctgtggccacatggctaaaccctgacccatctcagaagcagaatctcctagccccacagaatgctgtgtcctctgaagaaaccaatgactttaaacaagagacccttccaagtaagtccaacgaaagccatgaccacatggatgatatggatgatgaagatgatgatgaccatgtggacagccaggactccattgactcgaacgactctgatgatgtagatgacactgatgattctcaccagtctgatgagtctcaccattctgatgaatctgatgaactggtcactgattttcccacggacctgccagcaaccgaagttttcactccagttgtccccacagtagacacatatgatggccgaggtgatagtgtggtttatggactgaggtcaaaatctaagaagtttcgcagacctgacatccagtaccctgatgctacagacgaggacatcacctcacacatggaaagcgaggagttgaatggtgcatacaaggccatccccgttgcccaggacctgaacgcgccttctgattgggacagccgtgggaaggacagttatgaaacgagtcagctggatgaccagagtgctgaaacccacagccacaagcagtccagattatataagcggaaagccaatgatgagagcaatgagcattccgatgtgattgatagtcaggaactttccaaagtcagccgtgaattccacagccatgaatttcacagccatgaagatatgctggttgtagaccccaaaagtaaggaagaagataaacacctgaaatttcgtatttctcatgaattagatagtgcatcttctgaggtcaattaaaaggagaaaaaatacaatttctcactttgcatttagtcaaaagaaaaaatgctttatagcaaaatgaaagagaacatgaaatgcttctttctcagttatggngaggttcnntgggtgcaaaacatgggggataggtggggccggaccggaaaagcaggggtgggtttaaagacaaaggtttgttctcgggattgggaaaccaaaatttctttttgtttgttttaaagcgccggggtggttgtgttctcgctttgggnggccc

SEQ ID NO: 67242 - DNA, 1859 bp, Homo sapiens
  misc_feature (54)..(55): n is a, c, g, or t
  misc_feature (57)..(57): n is a, c, g, or t
  misc_feature (64)..(64): n is a, c, g, or t
  misc_feature (67)..(67): n is a, c, g, or t
  misc_feature (101)..(101): n is a, c, g, or t
  misc_feature (114)..(114): n is a, c, g, or t
  misc_feature (1416)..(1416): n is a, c, g, or t
  misc_feature (1437)..(1437): n is a, c, g, or t
  misc_feature (1454)..(1454): n is a, c, g, or t
  misc_feature (1456)..(1456): n is a, c, g, or t
  misc_feature (1473)..(1473): n is a, c, g, or t
  misc_feature (1478)..(1478): n is a, c, g, or t
gaacagcaggatgaggtacaatacagtatctatcggaccagactcgtctcagcnnangttcagnctnctcagccaaacgccgaccaaggaaaactcactancatgagaattgcngtgatttgcttttgcctcctaggcatcactgtgccataccagttaaacaggctgattctggaagttctgaggaaaagcagctttacaacaaatacccagatgctgtggccacatggctaaaccctgtcccagtctcagaagcagaatctcctagccccacagaacactattgtctacggaaggagcagcaggaggaggcagagcacagcatcgtcgggaccagactcgtctcaggccagttgcagccttctcagccaaacgccgaccaaggaaaactcactaccatgagaattgcagtgatttgcttttgcctcctaggcatcacctgtgccataccagttaaacaggctgattctggaagttctgaggaaaagcagctttacaacaaatacccagatgctgtggccacatggctaaaccctgacccatctcagaagcagaatctcctagccccacagaatgctgtgtcctctgaagaaaccaatgactttaaacaagagacccttccaagtaagtccaacgaaagccatgaccacatggatgatatggatgatgaagatgatgatgaccatgtggacagccaggactccattgactcgaacgactctgatgatgtagatgacactgatgattctcaccagtctgatgagtctcaccattctgatgaatctgatgaactggtcactgattttcccacggacctgccagcaaccgaagttttcactccagttgtccccacagtagacacatatgatggccgaggtgatagtgtggtttatggactgaggtcaaaatctaagaagtttcgcagacctgacatccagtaccctgatgctacagacgaggacatcacctcacacatggaaagcgaggagttgaatggtgcatacaaggccatccccgttgcccaggacctgaacgcgccttctgattgggacagccgtgggaaggacagttatgaaacgagtcagctggatgaccagagtgctgaaacccacagccacaagcagtccagattatataagcggaaagccaatgatgagagcaatgagcattccgatgtgattgatagtcaggaactttccaaagtcagccgtgaattccacagccatgaatttcacagccatgaagatatgctggttgtagaccccaaaagtaaggaagaagataaacacctgaaatttcgtatttctcatgaattagatagtgcatcttctgaggtcaattaaaaggagaaaaaatacaatccccccccccccacccacccaaccccccaaaccccccaccccaaaaccaaacagnacaccaaaccccccccccccnccccatccggccgaatncncacccatttgaccccgnaaatnaccaatgtgtcccacaaacagtttagtttgtggcttcatggaaactccctgtaaactaaaagcttcagggttatgtctatgttcattctatagaagaaatgcaaactatcactgtattttaatatttgttattctctcatgaatagaaatttatgtagaagcaaacaaaatacttttacccacttaaaaagagaatataacattttatgtcactataatcttttgttttttaagttagtgtatattttgttgtgattatctttttgtggtgtgaataaatcttttatcttgaatgtaataagaatttggtggtgtcaattgcttatttgttttcccacggttgtccagcaattaataaaacataaccttttttactgccta

SEQ ID NO: 67243 - DNA, 1245 bp, Homo sapiens
  misc_feature (54)..(55): n is a, c, g, or t
  misc_feature (57)..(57): n is a, c, g, or t
  misc_feature (64)..(64): n is a, c, g, or t
  misc_feature (67)..(67): n is a, c, g, or t
  misc_feature (101)..(101): n is a, c, g, or t
  misc_feature (114)..(114): n is a, c, g, or t
gaacagcaggatgaggtacaatacagtatctatcggaccagactcgtctcagcnnangttcagnctnctcagccaaacgccgaccaaggaaaactcactancatgagaattgcngtgatttgcttttgcctcctaggcatcactgtgccataccagttaaacaggctgattctggaagttctgaggaaaagcagctttacaacaaatacccagatgctgtggccacatggctaaaccctgtcccagtctcagaagcagaatctcctagccccacagaacactattgtctacggaaggagcagcaggaggaggcagagcacagcatcgtcgggaccagactcgtctcaggccagttgcagccttctcagccaaacgccgaccaaggaaaactcactaccatgagaattgcagtgatttgcttttgcctcctaggcatcacctgtgccataccagttaaacaggctgattctggaagttctgaggaaaagcagctttacaacaaatacccagatgctgtggccacatggctaaaccctgacccatctcagaagcagaatctcctagccccacagaatgctgtgtcctctgaagaaaccaatgactttaaacaagagacccttccaagtaagtccaacgaaagccatgaccacatggatgatatggatgatgaagatgatgatgaccatgtggacagccaggactccattgactcgaacgactctgatgatgtagatgacactgatgattctcaccagtctgatgagtctcaccattctgatgaatctgatgaactggtcactgattttcccacggacctgccagcaaccgaagttttcactccagttgtccccacagtagacacatatgatggccgaggtgatagtgtggtttatggactgaggtcaaaatctaagaagtttcgcagacctgacatccagtaccctgatgctacagacgaggacatcacctcacacatggaaagcgaggagttgaatggtgcatacaaggccatccccgttgcccaggacctgaacgcgccttctgattgggacagccgtgggaaggacagttatgaaacgagtcagctggatgaccagagtgctgaaacccacagccacaagcagtccagattatataagcggaaagccaatgatgagagcaatgagcattccgatgtgattgatagtcaggaactccccagcagtgagggtctctctcttccccttgtgctcttgctggggctgg

SEQ ID NO: 67244 - DNA, 1724 bp, Homo sapiens
  misc_feature (54)..(55): n is a, c, g, or t
  misc_feature (57)..(57): n is a, c, g, or t
  misc_feature (64)..(64): n is a, c, g, or t
  misc_feature (67)..(67): n is a, c, g, or t
  misc_feature (101)..(101): n is a, c, g, or t
  misc_feature (114)..(114): n is a, c, g, or t
gaacagcaggatgaggtacaatacagtatctatcggaccagactcgtctcagcnnangttcagnctnctcagccaaacgccgaccaaggaaaactcactancatgagaattgcngtgatttgcttttgcctcctaggcatcactgtgccataccagttaaacaggctgattctggaagttctgaggaaaagcagctttacaacaaatacccagatgctgtggccacatggctaaaccctgtcccagtctcagaagcagaatctcctagccccacagaacactattgtctacggaaggagcagcaggaggaggcagagcacagcatcgtcgggaccagactcgtctcaggccagttgcagccttctcagccaaacgccgaccaaggaaaactcactaccatgagaattgcagtgatttgcttttgcctcctaggcatcacctgtgccataccagttaaacaggctgattctggaagttctgaggaaaagcagctttacaacaaatacccagatgctgtggccacatggctaaaccctgacccatctcagaagcagaatctcctagccccacagaatgctgtgtcctctgaagaaaccaatgactttaaacaagagacccttccaagtaagtccaacgaaagccatgaccacatggatgatatggatgatgaagatgatgatgaccatgtggacagccaggactccattgactcgaacgactctgatgatgtagatgacactgatgattctcaccagtctgatgagtctcaccattctgatgaatctgatgaactggtcactgattttcccacggacctgccagcaaccgaagttttcactccagttgtccccacagtagacacatatgatggccgaggtgatagtgtggtttatggactgaggtcaaaatctaagaagtttcgcagacctgacatccagtaccctgatgctacagacgaggacatcacctcacacatggaaagcgccttctgattgggacagccgtgggaaggacagttatgaaacgagtcagctggatgaccagagtgctgaaacccacagccacaagcagtccagattatataagcggaaagccaatgatgagagcaatgagcattccgatgtgattgatagtcaggaactttccaaagtcagccgtgaattccacagccatgaatttcacagccatgaagatatgctggttgtagaccccaaaagtaaggaagaagataaacacctgaaatttcgtatttctcatgaattagatagtgcatcttctgaggtcaattaaaaggagaaaaaatacaatttctcactttgcatttagtcaaaagaaaaaatgctttatagcaaaatgaaagagaacatgaaatgcttctttctcagtttattggttgaatgtgtatctatttgagtctggaaataactaatgtgtttgataattagtttagtttgtggcttcatggaaactccctgtaaactaaaagcttcagggttatgtctatgttcattctatagaagaaatgcaaactatcactgtattttaatatttgttattctctcatgaatagaaatttatgtagaagcaaacaaaatacttttacccacttaaaaagagaatataacattttatgtcactataatcttttgttttttaagttagtgtatattttgttgtgattatctttttgtggtgtgaataaatcttttatcttgaatgtaata

SEQ ID NO: 67245 - DNA, 1435 bp, Homo sapiens
  misc_feature (2)..(2): n is a, c, g, or t
  misc_feature (11)..(13): n is a, c, g, or t
  misc_feature (16)..(16): n is a, c, g, or t
tnagtacccgnnnttngggcattcttggcctactggtacagcaggaggaggcagagcacagcatcgtcgggaccagactcgtctcaggccagttgcagccttctcagccaaacgccgaccaaggaaaactcactaccatgagaattgcagtgatttgcttttgcctcctaggcatcacctgtgccataccagttaaacaggctgattctggaagttctgaggaaaagcagaatgctgtgtcctctgaagaaaccaatgactttaaacaagagacccttccaagtaagtccaacgaaagccatgaccacatggatgatatggatgatgaagatgatgatgaccatgtggacagccaggactccattgactcgaacgactctgatgatgtagatgacactgatgattctcaccagtctgatgagtctcaccattctgatgaatctgatgaactggtcactgattttcccacggacctgccagcaaccgaagttttcactccagttgtccccacagtagacacatatgatggccgaggtgatagtgtggtttatggactgaggtcaaaatctaagaagtttcgcagacctgacatccagtaccctgatgctacagacgaggacatcacctcacacatggaaagcgaggagttgaatggtgcatacaaggccatccccgttgcccaggacctgaacgcgccttctgattgggacagccgtgggaaggacagttatgaaacgagtcagctggatgaccagagtgctgaaacccacagccacaagcagtccagattatataagcggaaagccaatgatgagagcaatgagcattccgatgtgattgatagtcaggaactttccaaagtcagccgtgaattccacagccatgaatttcacagccatgaagatatgctggttgtagaccccaaaagtaaggaagaagataaacacctgaaatttcgtatttctcatgaattagatagtgcatcttctgaggtcaattaaaaggagaaaaaatacaatttctcactttgcatttagtcaaaagaaaaaatgctttatagcaaaatgaaagagaacatgaaatgcttctttctcagtttattggttgaatgtgtatctatttgagtctggaaataactaatgtgtttgataattagtttagtttgtggcttcatggaaactccctgtaaactaaaagcttcagggttatgtctatgttcattctatagaagaaatgcaaactatcactgtattttaatatttgttattctctcatgaatagaaatttatgtagaagcaaacaaaatacttttacccacttaaaaagagaatataacattttatgtcactataatcttttgttttttaagttagtgtatattttgttgtgattatctttttgtggtgtgaataaatcttttatcttgaatgtaata

SEQ ID NO: 67246 - DNA, 1393 bp, Homo sapiens
  misc_feature (2)..(2): n is a, c, g, or t
  misc_feature (11)..(13): n is a, c, g, or t
  misc_feature (16)..(16): n is a, c, g, or t
tnagtacccgnnnttngggcattcttggcctactggtacagcaggaggaggcagagcacagcatcgtcgggaccagactcgtctcaggccagttgcagccttctcagccaaacgccgaccaaggaaaactcactaccatgagaattgcagtgatttgcttttgcctcctaggcatcacctgtgccataccagttaaacaggctgattctggaagttctgaggaaaagcagacccttccaagtaagtccaacgaaagccatgaccacatggatgatatggatgatgaagatgatgatgaccatgtggacagccaggactccattgactcgaacgactctgatgatgtagatgacactgatgattctcaccagtctgatgagtctcaccattctgatgaatctgatgaactggtcactgattttcccacggacctgccagcaaccgaagttttcactccagttgtccccacagtagacacatatgatggccgaggtgatagtgtggtttatggactgaggtcaaaatctaagaagtttcgcagacctgacatccagtaccctgatgctacagacgaggacatcacctcacacatggaaagcgaggagttgaatggtgcatacaaggccatccccgttgcccaggacctgaacgcgccttctgattgggacagccgtgggaaggacagttatgaaacgagtcagctggatgaccagagtgctgaaacccacagccacaagcagtccagattatataagcggaaagccaatgatgagagcaatgagcattccgatgtgattgatagtcaggaactttccaaagtcagccgtgaattccacagccatgaatttcacagccatgaagatatgctggttgtagaccccaaaagtaaggaagaagataaacacctgaaatttcgtatttctcatgaattagatagtgcatcttctgaggtcaattaaaaggagaaaaaatacaatttctcactttgcatttagtcaaaagaaaaaatgctttatagcaaaatgaaagagaacatgaaatgcttctttctcagtttattggttgaatgtgtatctatttgagtctggaaataactaatgtgtttgataattagtttagtttgtggcttcatggaaactccctgtaaactaaaagcttcagggttatgtctatgttcattctatagaagaaatgcaaactatcactgtattttaatatttgttattctctcatgaatagaaatttatgtagaagcaaacaaaatacttttacccacttaaaaagagaatataacattttatgtcactataatcttttgttttttaagttagtgtatattttgttgtgattatctttttgtggtgtgaataaatcttttatcttgaatgtaata

SEQ ID NO: 67247 - DNA, 1421 bp, Homo sapiens
  misc_feature (2)..(2): n is a, c, g, or t
  misc_feature (11)..(13): n is a, c, g, or t
  misc_feature (16)..(16): n is a, c, g, or t
tnagtacccgnnnttngggcattcttggcctactggtacagcaggaggaggcagagcacagcatcgtcgggaccagactcgtctcaggccagttgcagccttctcagccaaacgccgaccaaggaaaactcactaccatgagaattgcagtgatttgcttttgcctcctaggcatcacctgtgccataccagttaaacaggctgattctggaagttctgaggaaaagcagctttacaacaaatacccagatgctgtggccacatggctaaaccctgacccatctcagaagcagaatctcctagccccacagacccttccaagtaagtccaacgaaagccatgaccacatggatgatatggatgatgaagatgatgatgaccatgtggacagccaggactccattgactcgaacgactctgatgatgtagatgacactgatgattctcaccagtctgatgagtctcaccattctgatgaatctgatgaactggtcactgattttcccacggacctgccagcaaccgaagttttcactccagttgtccccacagtagacacatatgatggccgaggtgatagtgtggtttatggactgaggtcaggacatcacctcacacatggaaagcgaggagttgaatggtgcatacaaggccatccccgttgcccaggacctgaacgcgccttctgattgggacagccgtgggaaggacagttatgaaacgagtcagctggatgaccagagtgctgaaacccacagccacaagcagtccagattatataagcggaaagccaatgatgagagcaatgagcattccgatgtgattgatagtcaggaactttccaaagtcagccgtgaattccacagccatgaatttcacagccatgaagatatgctggttgtagaccccaaaagtaaggaagaagataaacacctgaaatttcgtatttctcatgaattagatagtgcatcttctgaggtcaattaaaaggagaaaaaatacaatttctcactttgcatttagtcaaaagaaaaaatgctttatagcaaaatgaaagagaacatgaaatgcttctttctcagtttattggttgaatgtgtatctatttgagtctggaaataactaatgtgtttgataattagtttagtttgtggcttcatggaaactccctgtaaactaaaagcttcagggttatgtctatgttcattctatagaagaaatgcaaactatcactgtattttaatatttgttattctctcatgaatagaaatttatgtagaagcaaacaaaatacttttacccacttaaaaagagaatataacattttatgtcactataatcttttgttttttaagttagtgtatattttgttgtgattatctttttgtggtgtgaataaatcttttatcttgaatgtaata

SEQ ID NO: 67248 - DNA, 1221 bp, Homo sapiens
  misc_feature (54)..(55): n is a, c, g, or t
  misc_feature (57)..(57): n is a, c, g, or t
  misc_feature (64)..(64): n is a, c, g, or t
  misc_feature (67)..(67): n is a, c, g, or t
  misc_feature (101)..(101): n is a, c, g, or t
  misc_feature (114)..(114): n is a, c, g, or t
gaacagcaggatgaggtacaatacagtatctatcggaccagactcgtctcagcnnangttcagnctnctcagccaaacgccgaccaaggaaaactcactancatgagaattgcngtgatttgcttttgcctcctaggcatcactgtgccataccagttaaacaggctgattctggaagttctgaggaaaagcagctttacaacaaatacccagatgctgtggccacatggctaaaccctgtcccagtctcagaagcagaatctcctagccccacagaacactattgtctacggaaggagcagcaggaggaggcagagcacagcatcgtcgggaccagactcgtctcaggccagttgcagccttctcagccaaacgccgaccaaggaaaactcactaccatgagaattgcagtgatttgcttttgcctcctaggcatcacctgtgccataccagttaaacaggctgattctggaagttctgaggaaaagcagctttacaacaaatacccagatgctgtggccacatggctaaaccctgacccatctcagaagcagaatctcctagccccacagaatgctgtgtcctctgaagaaaccaatgactttaaacaagagacccttccaagtaagtccaacgaaagccatgaccacatggatgatatggatgatgaagatgatgatgaccatgtggacagccaggactccattgactcgaacgactctgatgatgtagatgacactgatgattctcaccagtctgatgagtctcaccattctgatgaatctgatgaactggtcactgattttcccacggacctgccagcaaccgaagttttcactccagttgtccccacagtagacacatatgatggccgaggtgatagtgtggtttatggactgaggtcaaaatctaagaagtttcgcagacctgacatccaggtaaatcctttaacagacacacctgatggttctgactagcgctcaagtctaggaaaccacagtttgcatattcattcattcattcatccattcattcatccattcagcaagaattcattcatattctactttatgaccattgaatacaaatctttttctgcttggcggtttttgtaagtctacataatttctctctagatttgattctcaaacacaattctactttttgaaatcctggatcagttattttcagattaaaataaatggaaaacaccaattattt

SEQ ID NO: 67249 - DNA, 918 bp, Homo sapiens
  misc_feature (2)..(2): n is a, c, g, or t
  misc_feature (11)..(13): n is a, c, g, or t
  misc_feature (16)..(16): n is a, c, g, or t
tnagtacccgnnnttngggcattcttggcctactggtacagcaggaggaggcagagcacagcatcgtcgggaccagactcgtctcaggccagttgcagccttctcagccaaacgccgaccaaggaaaactcactaccatgagaattgcagtgatttgcttttgcctcctaggcatcacctgtgccataccagttaaacaggctgattctggaagttctgaggaaaagcagctttacaacaaatacccagatgctgtggccacatggctaaaccctgacccatctcagaagcagaatctcctagccccacagacccttccaagtaagtccaacgaaagccatgaccacatggatgatatggatgatgaagatgatgatgaccatgtggacagccaggactccattgactcgaacgactctgatgatgtagatgacactgatgattctcaccagtctgatgagtctcaccattctgatgaatctgatgaactggtcactgattttcccacggacctgccagcaaccgaagttttcactccagttgtccccacagtagacacatatgatggccgaggtgatagtgtggtttatggactgaggtcaaaatctaagaagtttcgcagacctgacatccaggtaaatcctttaacagacacacctgatggttctgactagcgctcaagtctaggaaaccacagtttgcatattcattcattcattcatccattcattcatccattcagcaagaattcattcatattctactttatgaccattgaatacaaatctttttctgcttggcggtttttgtaagtctacataatttctctctagatttgattctcaaacacaattctactttttgaaatcctggatcagttattttcagattaaaataaatggaaaacaccaattattt

SEQ ID NO: 67250 - DNA, 375 bp, Homo sapiens
  misc_feature (2)..(2): n is a, c, g, or t
  misc_feature (11)..(13): n is a, c, g, or t
  misc_feature (16)..(16): n is a, c, g, or t
tnagtacccgnnnttngggcattcttggcctactggtacagcaggaggaggcagagcacagcatcgtcgggaccagactcgtctcaggccagttgcagccttctcagccaaacgccgaccaaggaaaactcactaccatgagaattgcagtgatttgcttttgcctcctaggcatcacctgtgccataccagttaaacaggctgattctggaagttctgaggaaaagcagctttacaacaaatacccagatgctgtggccacatggctaaaccctgacccatctcagaagcagaatctcctagccccacagggtatttttaaacttctcataattaaactacagtgatgaaagatagccacactcaggccatttg

SEQ ID NO: 67251 - DNA, 338 bp, Homo sapiens
  misc_feature (2)..(2): n is a, c, g, or t
  misc_feature (11)..(13): n is a, c, g, or t
  misc_feature (16)..(16): n is a, c, g, or t
tnagtacccgnnnttngggcattcttggcctactggtacagcaggaggaggcagagcacagcatcgtcgggaccagactcgtctcaggccagttgcagccttctcagccaaacgccgaccaaggaaaactcactaccatgagaattgcagtgatttgcttttgcctcctaggcatcacctgtgccataccagttaaacaggctgattctggaagttctgaggaaaagcagctttacaacaaatacccagatgctgtggccacatggctaaaccctgacccatctcagaagcagaatctcctagccccacagtcgaaggggatcctcaagagtcagctc

SEQ ID NO: 67252 - DNA, 536 bp, Homo sapiens
aaaggagaaaaaatacaatttctcactttgcatttagtcaaaagaaaaaatgctttatagcaaaatgaaagagaacatgaaatgcttctttctcagtttattggttgaatgtgtatctatttgagtctggaaataactaatgtgtttgataattagtttagtttgtggcttcatggaaactccctgtaaactaaaagcttcagggttatgtctatgttcattctatagaagaaatgcaaactatcactgtattttaatatttgttattctctcatgaatagaaatttatgtagaagcaaacaaaatacttttacccacttaaaaagagaatataacattttatgtcactataatcttttgttttttaagttagtgtatattttgttgtgattatctttttgtggtgtgaataaatcttttatcttgaatgtaataagaatttggtggtgtcaattgcttatttgttttcccacggttgtccagcaattaataaaacataaccttttttactgcctaataatgtttttaaaggttta

SEQ ID NO: 67253 - DNA, 651 bp, Homo sapiens
  misc_feature (54)..(55): n is a, c, g, or t
  misc_feature (57)..(57): n is a, c, g, or t
  misc_feature (64)..(64): n is a, c, g, or t
  misc_feature (67)..(67): n is a, c, g, or t
  misc_feature (101)..(101): n is a, c, g, or t
  misc_feature (114)..(114): n is a, c, g, or t
gaacagcaggatgaggtacaatacagtatctatcggaccagactcgtctcagcnnangttcagnctnctcagccaaacgccgaccaaggaaaactcactancatgagaattgcngtgatttgctttgccgtcctagacagtcacccctgtgttctcattgatcacgctaagagactagggtcgttggcttgctggaaacgttattcttgaggaacaacgtcggattctacatagcaataatagcgcgatgatgcggggtggccctccattggctaaaacctctgtagcacccagtctcagaagcagaatctcctagccccacagaaatgctgtgtcctctgaagaaaccaatgactttaaacaagagacccttccaagtaagtccaacgaaagccatgaccacatggatgatatggatgatgaagatgatgatgaccatgtggacagccaggactccattgactcgaacgactctgatgatgtagatgacactgatgattctcaccagtctgatgagtctcaccattctgatgaatctgatgaactggtcactgattttcccacggacctgccagcaaccgaagttttcactccagttgtccccaaggtagacacgagagacaaggtagagccgaaaacaaggtagaccga

SEQ ID NO: 67254 - DNA, 1777 bp, Homo sapiens
  misc_feature (54)..(55): n is a, c, g, or t
  misc_feature (57)..(57): n is a, c, g, or t
  misc_feature (64)..(64): n is a, c, g, or t
  misc_feature (67)..(67): n is a, c, g, or t
  misc_feature (101)..(101): n is a, c, g, or t
  misc_feature (114)..(114): n is a, c, g, or t
gaacagcaggatgaggtacaatacagtatctatcggaccagactcgtctcagcnnangttcagnctnctcagccaaacgccgaccaaggaaaactcactancatgagaattgcngtgatttgcttttgcctcctaggcatcactgtgccataccagttaaacaggctgattctggaagttctgaggaaaagcagctttacaacaaatacccagatgctgtggccacatggctaaaccctgtcccagtctcagaagcagaatctcctagccccacagaacactattgtctacggaaggagcagcaggaggaggcagagcacagcatcgtcgggaccagactcgtctcaggccagttgcagccttctcagccaaacgccgaccaaggaaaactcactaccatgagaattgcagtgatttgcttttgcctcctaggcatcacctgtgccataccagttaaacaggctgattctggaagttctgaggaaaagcagctttacaacaaatacccagatgctgtggccacatggctaaaccctgacccatctcagaagcagaatctcctagccccacagaatgctgtgtcctctgaagaaaccaatgactttaaacaagagacccttccaagtaagtccaacgaaagccatgaccacatggatgatatggatgatgaagatgatgatgaccatgtggacagccaggactccattgactcgaacgactctgatgatgtagatgacactgatgattctcaccagtctgatgagtctcaccattctgatgaatctgatgaactggtcactgattttcccacggacctgccagcaaccgaagttttcactccagttgtccccacagtagacacatatgatggccgaggtgatagtgtggtttatggactgaggtcaaaatctaagaagtttcgcagacctgacatccagtaccctgatgctacagacgaggacatcacctcacacatggaaagcgaggagttgaatggtgcatacaaggccatccccgttgcccaggacctgaacgcgccttctgattgggacagccgtgggaaggacagttatgaaacgagtcagctggatgaccagagtgctgaaacccacagccacaagcagtccagattatataagcggaaagccaatgatgagagcaatgagcattccgatgtgattgatagtcaggaactttccaaagtcagccgtgaattccacagccatgaatttcacagccatgaagatatgctggttgtagaccccaaaagtaaggaagaagataaacacctgaaatttcgtatttctcatgaattagatagtgcatcttctgaggtcaattaaaaggagaaaaaatacaatttctcactttgcatttagtcaaaagaaaaaatgctttatagcaaaatgaaagagaacatgaaatgcttctttctcagtttattggttgaatgtgtatctatttgagtctggaaataactaatgtgtttgataattagtttagtttgtggcttcatggaaactccctgtaaactaaaagcttcagggttatgtctatgttcattctatagaagaaatgcaaactatcactgtattttaatatttgttattctctcatgaatagaaatttatgtagaagcaaacaaaatacttttacccacttaaaaagagaatataacattttatgtcactataatcttttgttttttaagttagtgtatattttgttgtgattatctttttgtggtgtgaataaatcttttatcttgaatgtaata

SEQ ID NO: 67255 - DNA, 1886 bp, Homo sapiens
  misc_feature (54)..(55): n is a, c, g, or t
  misc_feature (57)..(57): n is a, c, g, or t
  misc_feature (64)..(64): n is a, c, g, or t
  misc_feature (67)..(67): n is a, c, g, or t
  misc_feature (101)..(101): n is a, c, g, or t
  misc_feature (114)..(114): n is a, c, g, or t
  misc_feature (1880)..(1881): n is a, c, g, or t
gaacagcaggatgaggtacaatacagtatctatcggaccagactcgtctcagcnnangttcagnctnctcagccaaacgccgaccaaggaaaactcactancatgagaattgcngtgatttgcttttgcctcctaggcatcactgtgccataccagttaaacaggctgattctggaagttctgaggaaaagcagctttacaacaaatacccagatgctgtggccacatggctaaaccctgtcccagtctcagaagcagaatctcctagccccacagaacactattgtctacggaaggagcagcaggaggaggcagagcacagcatcgtcgggaccagactcgtctcaggccagttgcagccttctcagccaaacgccgaccaaggaaaactcactaccatgagaattgcagtgatttgcttttgcctcctaggcatcacctgtgccataccagttaaacaggctgattctggaagttctgaggaaaagcagctttacaacaaatacccagatgctgtggccacatggctaaaccctgacccatctcagaagcagaatctcctagccccacagaatgctgtgtcctctgaagaaaccaatgactttaaacaagagacccttccaagtaagtccaacgaaagccatgaccacatggatgatatggatgatgaagatgatgatgaccatgtggacagccaggactccattgactcgaacgactctgatgatgtagatgacactgatgattctcaccagtctgatgagtctcaccattctgatgaatctgatgaactggtcactgattttcccacggacctgccagcaaccgaagttttcactccagttgtccccacagtagacacatatgatggccgaggtgatagtgtggtttatggactgaggtcaaaatctaagaagtttcgcagacctgacatccagtaccctgatgctacagacgaggacatcacctcacacatggaaagcgaggagttgaatggtgcatacaaggccatccccgttgcccaggacctgaacgcgccttctgattgggacagccgtgggaaggacagttatgaaacgagtcagctggatgaccagagtgctgaaacccacagccacaagcagtccagattatataagcggaaagccaatgatgagagcaatgagcattccgatgtgattgatagtcaggaactttccaaagtcagccgtgaattccacagccatgaatttcacagccatgaagatatgctggttgtagaccccaaaagtaaggaagaagataaacacctgaaatttcgtatttctcatgaattagatagtgcatcttctgaggtcaattaaaaggagaaaaaatacaatttctcactttgcatttagtcaaaagaaaaaatgctttatagcaaaatgaaagagaacatgaaatgcttctttctcagtttattggttgaatgtgtatctatttgagtctggaaataactaatgtgtttgataattagtttagtttgtggcttcatggaaactccctgtaaactaaaagcttcagggttatgtctatgttcattctatagaagaaatgcaaactatcactgtattttaatatttgttattctctcatgaatagaaatttatgtagaagcaaacaaaatacttttacccacttaaaaagagaatataacattttatgtcactataatcttttgttttttaagttagtgtatattttgttgtgattatctttttgtggtgtgaataaatcttttatcttgaatgtaataagaatttggtggtgtcaattgcttatttgttttcccacggttgtccagcaattaataaaacataaccttttttactgcctaaaaaaaaaaaaaaaaaaaaagnnggggg

SEQ ID NO: 67256 - DNA, 1830 bp, Homo sapiens
  misc_feature (54)..(55): n is a, c, g, or t
  misc_feature (57)..(57): n is a, c, g, or t
  misc_feature (64)..(64): n is a, c, g, or t
  misc_feature (67)..(67): n is a, c, g, or t
  misc_feature (101)..(101): n is a, c, g, or t
  misc_feature (114)..(114): n is a, c, g, or t
gaacagcaggatgaggtacaatacagtatctatcggaccagactcgtctcagcnnangttcagnctnctcagccaaacgccgaccaaggaaaactcactancatgagaattgcngtgatttgcttttgcctcctaggcatcactgtgccataccagttaaacaggctgattctggaagttctgaggaaaagcagctttacaacaaatacccagatgctgtggccacatggctaaaccctgtcccagtctcagaagcagaatctcctagccccacagaacactattgtctacggaaggagcagcaggaggaggcagagcacagcatcgtcgggaccagactcgtctcaggccagttgcagccttctcagccaaacgccgaccaaggaaaactcactaccatgagaattgcagtgatttgcttttgcctcctaggcatcacctgtgccataccagttaaacaggctgattctggaagttctgaggaaaagcagctttacaacaaatacccagatgctgtggccacatggctaaaccctgacccatctcagaagcagaatctcctagccccacagaatgctgtgtcctctgaagaaaccaatgactttaaacaagagacccttccaagtaagtccaacgaaagccatgaccacatggatgatatggatgatgaagatgatgatgaccatgtggacagccaggactccattgactcgaacgactctgatgatgtagatgacactgatgattctcaccagtctgatgagtctcaccattctgatgaatctgatgaactggtcactgattttcccacggacctgccagcaaccgaagttttcactccagttgtccccacagtagacacatatgatggccgaggtgatagtgtggtttatggactgaggtcaaaatctaagaagtttcgcagacctgacatccagtaccctgatgctacagacgaggacatcacctcacacatggaaagcgaggagttgaatggtgcatacaaggccatccccgttgcccaggacctgaacgcgccttctgattgggacagccgtgggaaggacagttatgaaacgagtcagctggatgaccagagtgctgaaacccacagccacaagcagtccagattatataagcggaaagccaatgatgagagcaatgagcattccgatgtgattgatagtcaggaactttccaaagtcagccgtgaattccacagccatgaatttcacagccatgaagatatgctggttgtagaccccaaaagtaaggaagaagataaacacctgaaatttcgtatttctcatgaattagatagtgcatcttctgaggtcaattaaaaggagaaaaaatacaatttctcactttgcatttagtcaaaagaaaaaatgctttatagcaaaatgaaagagaacatgaaatgcttctttctcagtttattggttgaatgtgtatctatttgagtctggaaataactaatgtgtttgataattagtttagtttgtggcttcatggaaactccctgtaaactaaaagcttcagggttatgtctatgttcattctatagaagaaatgcaaactatcactgtattttaatatttgttattctctcatgaatagaaatttatgtagaagcaaacaaaatacttttacccacttaaaaagagaatataacattttatgtcactataatcttttgttttttaagttagtgtatattttgttgtgattatctttttgtggtgtgaataaatcttttatcttgaatgtaataaaaaaaaaaagcacggcggcgccgagaaaaaggaatataaagaatagcagaag

SEQ ID NO: 67257 - DNA, 1895 bp, Homo sapiens
  misc_feature (54)..(55): n is a, c, g, or t
  misc_feature (57)..(57): n is a, c, g, or t
  misc_feature (64)..(64): n is a, c, g, or t
  misc_feature (67)..(67): n is a, c, g, or t
  misc_feature (101)..(101): n is a, c, g, or t
  misc_feature (114)..(114): n is a, c, g, or t
  misc_feature (1889)..(1890): n is a, c, g, or t
gaacagcaggatgaggtacaatacagtatctatcggaccagactcgtctcagcnnangttcagnctnctcagccaaacgccgaccaaggaaaactcactancatgagaattgcngtgatttgcttttgcctcctaggcatcactgtgccataccagttaaacaggctgattctggaagttctgaggaaaagcagctttacaacaaatacccagatgctgtggccacatggctaaaccctgtcccagtctcagaagcagaatctcctagccccacagaacactattgtctacggaaggagcagcaggaggaggcagagcacagcatcgtcgggaccagactcgtctcaggccagttgcagccttctcagccaaacgccgaccaaggaaaactcactaccatgagaattgcagtgatttgcttttgcctcctaggcatcacctgtgccataccagttaaacaggctgattctggaagttctgaggaaaagcagctttacaacaaatacccagatgctgtggccacatggctaaaccctgacccatctcagaagcagaatctcctagccccacagaatgctgtgtcctctgaagaaaccaatgactttaaacaagagacccttccaagtaagtccaacgaaagccatgaccacatggatgatatggatgatgaagatgatgatgaccatgtggacagccaggactccattgactcgaacgactctgatgatgtagatgacactgatgattctcaccagtctgatgagtctcaccattctgatgaatctgatgaactggtcactgattttcccacggacctgccagcaaccgaagttttcactccagttgtccccacagtagacacatatgatggccgaggtgatagtgtggtttatggactgaggtcaaaatctaagaagtttcgcagacctgacatccagtaccctgatgctacagacgaggacatcacctcacacatggaaagcgaggagttgaatggtgcatacaaggccatccccgttgcccaggacctgaacgcgccttctgattgggacagccgtgggaaggacagttatgaaacgagtcagctggatgaccagagtgctgaaacccacagccacaagcagtccagattatataagcggaaagccaatgatgagagcaatgagcattccgatgtgattgatagtcaggaactttccaaagtcagccgtgaattccacagccatgaatttcacagccatgaagatatgctggttgtagaccccaaaagtaaggaagaagataaacacctgaaatttcgtatttctcatgaattagatagtgcatcttctgaggtcaattaaaaggagaaaaaatacaatttctcactttgcatttagtcaaaagaaaaaatgctttatagcaaaatgaaagagaacatgaaatgcttctttctcagtttattggttgaatgtgtatctatttgagtctggaaataactaatgtgtttgataattagtttagtttgtggcttcatggaaactccctgtaaactaaaagcttcagggttatgtctatgttcattctatagaagaaatgcaaactatcactgtattttaatatttgttattctctcatgaatagaaatttatgtagaagcaaacaaaatactttttataacattttatgtcactataatcttttgttttttaagttagtgtatattttgttgtgattatctttttgtggtgtgaataaatcttttatcttgaatgtaataagaatttggtggtgtcaattgcttatttgttttcccacggttgtccagcaattaataaaacataaccttttttactgcctaaaaaaaaaaaaaaaaaaaaaaaaaaaaaaaaaaaaaaaaaaaaaaaagnnggggg

SEQ ID NO: 67258 - DNA, 1719 bp, Homo sapiens
  misc_feature (54)..(55): n is a, c, g, or t
  misc_feature (57)..(57): n is a, c, g, or t
  misc_feature (64)..(64): n is a, c, g, or t
  misc_feature (67)..(67): n is a, c, g, or t
  misc_feature (101)..(101): n is a, c, g, or t
  misc_feature (114)..(114): n is a, c, g, or t
gaacagcaggatgaggtacaatacagtatctatcggaccagactcgtctcagcnnangttcagnctnctcagccaaacgccgaccaaggaaaactcactancatgagaattgcngtgatttgcttttgcctcctaggcatcactgtgccataccagttaaacaggctgattctggaagttctgaggaaaagcagctttacaacaaatacccagatgctgtggccacatggctaaaccctgtcccagtctcagaagcagaatctcctagccccacagaacactattgtctacggaaggagcagcaggaggaggcagagcacagcatcgtcgggaccagactcgtctcaggccagttgcagccttctcagccaaacgccgaccaaggaaaactcactaccatgagaattgcagtgatttgcttttgcctcctaggcatcacctgtgccataccagttaaacaggctgattctggaagttctgaggaaaagcagctttacaacaaatacccagatgctgtggccacatggctaaaccctgacccatctcagaagcagaatctcctagccccacagaatgctgtgtcctctgaagaaaccaatgactttaaacaagagacccttccaagtaagtccaacgaaagccatgaccacatggatgatatggatgatgaagatgatgatgaccatgtggacagccaggactccattgactcgaacgactctgatgatgtagatgacactgatgattctcaccagtctgatgagtctcaccattctgatgaatctgatgaactggtcactgattttcccacggacctgccagcaaccgaagttttcactccagttgtccccacagtagacacatatgatggccgaggtgatagtgtggtttatggactgaggtcaaaatctaagaagtttcgcagacctgacatccagtaccctgatgctacagacgaggacatcacctcacacatggaaagcgaggagttgaatggtgcatacaaggccatccccgttgcccaggacctgaacgcgccttctgattgggacagccgtgggaaggacagttatgaaacgagtcagctggatgaccagagtgctgaaacccacagccacaagcagtccagattatataagcggaaagccaatgatgagagcaatgagcattccgatgtgattgatagtcaggaactttccaaagtcagccgtgaattccacagccatgaatttcacagccatgaagatatgctggttgtagaccccaaaagtaaggaagaagataaacacctgaaatttcgtatttctcatgaattagatagtgcatcttctgaggtcaattaaaaggagaaaaaatacaatttctcactttgcatttagtcaaaagaaaaaatgctttatagcaaaatgaaagagaacatgaaatgcttctttctcagtttattggttgaatgtgtatctatttgagtctggaaataactaatgtgtttgataattagtttagtttgtggcttcatggaaactccctgtaaactaaattaatatttgttattctctcatgaatagaaatttatgtagaagcaaacaaaatacttttacccacttaaaaagagaatataacattttatgtcactataatcttttgttttttaagttagtgtatattttgttgtgattatctttttgtggtgtgaataaatcttttatcttgaatgtaata

SEQ ID NO: 67259 - DNA, 1778 bp, Homo sapiens
  misc_feature (54)..(55): n is a, c, g, or t
  misc_feature (57)..(57): n is a, c, g, or t
  misc_feature (64)..(64): n is a, c, g, or t
  misc_feature (67)..(67): n is a, c, g, or t
  misc_feature (101)..(101): n is a, c, g, or t
  misc_feature (114)..(114): n is a, c, g, or t
  misc_feature (1416)..(1416): n is a, c, g, or t
  misc_feature (1437)..(1437): n is a, c, g, or t
  misc_feature (1454)..(1454): n is a, c, g, or t
  misc_feature (1456)..(1456): n is a, c, g, or t
  misc_feature (1473)..(1473): n is a, c, g, or t
  misc_feature (1478)..(1478): n is a, c, g, or t
gaacagcaggatgaggtacaatacagtatctatcggaccagactcgtctcagcnnangttcagnctnctcagccaaacgccgaccaaggaaaactcactancatgagaattgcngtgatttgcttttgcctcctaggcatcactgtgccataccagttaaacaggctgattctggaagttctgaggaaaagcagctttacaacaaatacccagatgctgtggccacatggctaaaccctgtcccagtctcagaagcagaatctcctagccccacagaacactattgtctacggaaggagcagcaggaggaggcagagcacagcatcgtcgggaccagactcgtctcaggccagttgcagccttctcagccaaacgccgaccaaggaaaactcactaccatgagaattgcagtgatttgcttttgcctcctaggcatcacctgtgccataccagttaaacaggctgattctggaagttctgaggaaaagcagctttacaacaaatacccagatgctgtggccacatggctaaaccctgacccatctcagaagcagaatctcctagccccacagaatgctgtgtcctctgaagaaaccaatgactttaaacaagagacccttccaagtaagtccaacgaaagccatgaccacatggatgatatggatgatgaagatgatgatgaccatgtggacagccaggactccattgactcgaacgactctgatgatgtagatgacactgatgattctcaccagtctgatgagtctcaccattctgatgaatctgatgaactggtcactgattttcccacggacctgccagcaaccgaagttttcactccagttgtccccacagtagacacatatgatggccgaggtgatagtgtggtttatggactgaggtcaaaatctaagaagtttcgcagacctgacatccagtaccctgatgctacagacgaggacatcacctcacacatggaaagcgaggagttgaatggtgcatacaaggccatccccgttgcccaggacctgaacgcgccttctgattgggacagccgtgggaaggacagttatgaaacgagtcagctggatgaccagagtgctgaaacccacagccacaagcagtccagattatataagcggaaagccaatgatgagagcaatgagcattccgatgtgattgatagtcaggaactttccaaagtcagccgtgaattccacagccatgaatttcacagccatgaagatatgctggttgtagaccccaaaagtaaggaagaagataaacacctgaaatttcgtatttctcatgaattagatagtgcatcttctgaggtcaattaaaaggagaaaaaatacaatccccccccccccacccacccaaccccccaaaccccccaccccaaaaccaaacagnacaccaaaccccccccccccnccccatccggccgaatncncacccatttgaccccgnaaatnaccaatgtgtcccacaaacagtttagtttgtggcttcatggaaactccctgtaaactaaaagcttcagggttatgtctatgttcattctatagaagaaatgcaaactatcactgtattttaatatttgttattctctcatgaatagaaatttatgtagaagcaaacaaaatacttttacccacttaaaaagagaatataacattttatgtcactataatcttttgttttttaagttagtgtatattttgttgtgattatctttttgtggtgtgaataaatcttttatcttgaatgtaata

SEQ ID NO: 67260 - DNA, 1474 bp, Homo sapiens
  misc_feature (2)..(2): n is a, c, g, or t
  misc_feature (11)..(13): n is a, c, g, or t
  misc_feature (16)..(16): n is a, c, g, or t
tnagtacccgnnnttngggcattcttggcctactggtacagcaggaggaggcagagcacagcatcgtcgggaccagactcgtctcaggccagttgcagccttctcagccaaacgccgaccaaggaaaactcactaccatgagaattgcagtgatttgcttttgcctcctaggcatcacctgtgccataccagttaaacaggctgattctggaagttctgaggaaaagcagctttacaacaaatacccagatgctgtggccacatggctaaaccctgacccatctcagaagcagaatctcctagccccacagacccttccaagtaagtccaacgaaagccatgaccacatggatgatatggatgatgaagatgatgatgaccatgtggacagccaggactccattgactcgaacgactctgatgatgtagatgacactgatgattctcaccagtctgatgagtctcaccattctgatgaatctgatgaactggtcactgattttcccacggacctgccagcaaccgaagttttcactccagttgtccccacagtagacacatatgatggccgaggtgatagtgtggtttatggactgaggtcaaaatctaagaagtttcgcagacctgacatccagtaccctgatgctacagacgaggacatcacctcacacatggaaagcgaggagttgaatggtgcatacaaggccatccccgttgcccaggacctgaacgcgccttctgattgggacagccgtgggaaggacagttatgaaacgagtcagctggatgaccagagtgctgaaacccacagccacaagcagtccagattatataagcggaaagccaatgatgagagcaatgagcattccgatgtgattgatagtcaggaactttccaaagtcagccgtgaattccacagccatgaatttcacagccatgaagatatgctggttgtagaccccaaaagtaaggaagaagataaacacctgaaatttcgtatttctcatgaattagatagtgcatcttctgaggtcaattaaaaggagaaaaaatacaatttctcactttgcatttagtcaaaagaaaaaatgctttatagcaaaatgaaagagaacatgaaatgcttctttctcagtttattggttgaatgtgtatctatttgagtctggaaataactaatgtgtttgataattagtttagtttgtggcttcatggaaactccctgtaaactaaaagcttcagggttatgtctatgttcattctatagaagaaatgcaaactatcactgtattttaatatttgttattctctcatgaatagaaatttatgtagaagcaaacaaaatacttttacccacttaaaaagagaatataacattttatgtcactataatcttttgttttttaagttagtgtatattttgttgtgattatctttttgtggtgtgaataaatcttttatcttgaatgtaata

SEQ ID NO: 67261 - DNA, 1555 bp, Homo sapiens
  misc_feature (2)..(2): n is a, c, g, or t
  misc_feature (11)..(13): n is a, c, g, or t
  misc_feature (16)..(16): n is a, c, g, or t
tnagtacccgnnnttngggcattcttggcctactggtacagcaggaggaggcagagcacagcatcgtcgggaccagactcgtctcaggccagttgcagccttctcagccaaacgccgaccaaggaaaactcactaccatgagaattgcagtgatttgcttttgcctcctaggcatcacctgtgccataccagttaaacaggctgattctggaagttctgaggaaaagcagctttacaacaaatacccagatgctgtggccacatggctaaaccctgacccatctcagaagcagaatctcctagccccacagacccttccaagtaagtccaacgaaagccatgaccacatggatgatatggatgatgaagatgatgatgaccatgtggacagccaggactccattgactcgaacgactctgatgatgtagatgacactgatgattctcaccagtctgatgagtctcaccattctgatgaatctgatgaactggtcactgattttcccacggacctgccagcaaccgaagttttcactccagttgtccccacagtagacacatatgatggccgaggtgatagtgtggtttatggactgaggtcaaaatctaagaagtttcgcagacctgacatccagtaccctgatgctacagacgaggacatcacctcacacatggaaagcgaggagttgaatggtgcatacaaggccatccccgttgcccaggacctgaacgcgccttctgattgggacagccgtgggaaggacagttatgaaacgagtcagctggatgaccagagtgctgaaacccacagccacaagcagtccagattatataagcggaaagccaatgatgagagcaatgagcattccgatgtgattgatagtcaggaactttccaaagtcagccgtgaattccacagccatgaatttcacagccatgaagatatgctggttgtagaccccaaaagtaaggaagaagataaacacctgaaatttcgtatttctcatgaattagatagtgcatcttctgaggtcaattaaaaggagaaaaaatacaatttctcactttgcatttagtcaaaagaaaaaatgctttatagcaaaatgaaagagaacatgaaatgcttctttctcagtttattggttgaatgtgtatctatttgagtctggaaataactaatgtgtttgataattagtttagtttgtggcttcatggaaactccctgtaaactaaaagcttcagggttatgtctatgttcattctatagaagaaatgcaaactatcactgtattttaatatttgttattctctcatgaatagaaatttatgtagaagcaaacaaaatacttttacccacttaaaaagagaatataacattttatgtcactataatcttttgttttttaagttagtgtatattttgttgtgattatctttttgtggtgtgaataaatcttttatcttgaatgtaataagaatttggtggtgtcaattgcttatttgttttcccacggttgtccagcaattaataaaacataaccttttttactgccta

SEQ ID NO: 67262 - DNA, 1461 bp, Homo sapiens
  misc_feature (2)..(2): n is a, c, g, or t
  misc_feature (11)..(13): n is a, c, g, or t
  misc_feature (16)..(16): n is a, c, g, or t
tnagtacccgnnnttngggcattcttggcctactggtacagcaggaggaggcagagcacagcatcgtcgggaccagactcgtctcaggccagttgcagccttctcagccaaacgccgaccaaggaaaactcactaccatgagaattgcagtgatttgcttttgcctcctaggcatcacctgtgccataccaatcaacaggctgattctggaagatctgaggacccatctgagaggcagaatctcctagccccacagaatgctgtgtcctctgaagaaaccaatgactttaaacaagagacccttccaagtaagtccaacgaaagccatgaccacatggatgatatggatgatgaagatgatgatgaccatgtggacagccaggactccattgactcgaacgactctgatgatgtagatgacactgatgattctcaccagtctgatgagtctcaccattctgatgaatctgatgaactggtcactgattttcccacggacctgccagcaaccgaagttttcactccagttgtccccacagtagacacatatgatggccgaggtgatagtgtggtttatggactgaggtcaaaatctaagaagtttcgcagacctgacatccagtaccctgatgctacagacgaggacatcacctcacacatggaaagcgaggagttgaatggtgcatacaaggccatccccgttgcccaggacctgaacgcgccttctgattgggacagccgtgggaaggacagttatgaaacgagtcagctggatgaccagagtgctgaaacccacagccacaagcagtccagattatataagcggaaagccaatgatgagagcaatgagcattccgatgtgattgatagtcaggaactttccaaagtcagccgtgaattccacagccatgaatttcacagccatgaagatatgctggttgtagaccccaaaagtaaggaagaagataaacacctgaaatttcgtatttctcatgaattagatagtgcatcttctgaggtcaattaaaaggagaaaaaatacaatttctcactttgcatttagtcaaaagaaaaaatgctttatagcaaaatgaaagagaacatgaaatgcttctttctcagtttattggttgaatgtgtatctatttgagtctggaaataactaatgtgtttgataattagtttagtttgtggcttcatggaaactccctgtaaactaaaagcttcagggttatgtctatgttcattctatagaagaaatgcaaactatcactgtattttaatatttgttattctctcatgaatagaaatttatgtagaagcaaacaaaatacttttacccacttaaaaagagaatataacattttatgtcactataatcttttgttttttaagttagtgtatattttgttgtgattatctttttgtggtgtgaataaatcttttatcttgaatgtaata

SEQ ID NO: 67263 - DNA, 877 bp, Homo sapiens
ccacgcgtcgcccacgcgtccgctgacctgacatccagtaccctgatgctacagacgaggacatcacctcacacatggaaagcgaggagttgaatggtgcatacaaggccatccccgttgcccaggacctgaacgcgccttctgattgggacagccgtgggaaggacagttatgaaacgagtcagctggatgaccagagtgctgaaacccacagccacaagcagtccagattatataagcggaaagccaatgatgagagcaatgagcattccgatgtgattgatagtcaggaactttccaaagtcagccgtgaattccacagccatgaatttcacagccatgaagatatgctggttgtagaccccaaaagtaaggaagaagataaacacctgaaatttcgtatttctcatgaattagatagtgcatcttctgaggtcaattaaaaggagaaaaaatacaatttctcactttgcatttagtcaaaagaaaaaatgctttatagcaaaatgaaagagaacatgaaatgcttctttctcagtttattggttgaatgtgtatctatttgagtctggaaataactaatgtgtttgataattagtttagtttgtggcttcatggaaactccctgtaaactaaaagcttcagggttatgtctatgttcattctatagaagaaatgcaaactatcactgtattttaatatttgttattctctcatgaatagaaatttatgtagaagcaaacaaaatacttttacccacttaaaaagagaatataacattttatgtcactataatcttttgttttttaagttagtgtatattttgttgtgattatctttttgtggtgtgaataaatcttttatcttgaatgtaata

SEQ ID NO: 67264 - DNA, 955 bp, Homo sapiens
  misc_feature (54)..(55): n is a, c, g, or t
  misc_feature (57)..(57): n is a, c, g, or t
  misc_feature (64)..(64): n is a, c, g, or t
  misc_feature (67)..(67): n is a, c, g, or t
  misc_feature (101)..(101): n is a, c, g, or t
  misc_feature (114)..(114): n is a, c, g, or t
gaacagcaggatgaggtacaatacagtatctatcggaccagactcgtctcagcnnangttcagnctnctcagccaaacgccgaccaaggaaaactcactancatgagaattgcngtgatttgcttttgcctcctaggcatcactgtgccataccagttaaacaggctgattctggaagttctgaggaaaagcagctttacaacaaatacccagatgctgtggccacatggctaaaccctgtcccagtctcagaagcagaatctcctagccccacagaacactattgtctacggaaggagcagcaggaggaggcagagcacagcatcgtcgggaccagactcgtctcaggccagttgcagccttctcagccaaacgccgaccaaggaaaactcactaccatgagaattgcagtgatttgcttttgcctcctaggcatcacctgtgccataccagttaaacaggctgattctggaagttctgaggaaaagcagctttacaacaaatacccagatgctgtggccacatggctaaaccctgacccatctcagaagcagaatctcctagccccacagaatgctgtgtcctctgaagaaaccaatgactttaaacaagagacccttccaagtaagtccaacgaaagccatgaccacatggatgatatggatgatgaagatgatgatgaccatgtggacagccaggactccattgactcgaacgactctgatgatgtagatgacactgatgattctcaccagtctgatgagtctcaccattctgatgaatctgatgaactggtcactgattttcccacggacctgccagcaaccgaagttttcactccagttgtccccacagtagacacatatgatggccgaggtgatagtgtggtttatggactgaggtcggacataacttacacattgaaagccaagaagttgattgtgcatacaaggct

SEQ ID NO: 67265 - DNA, 684 bp, Homo sapiens
  misc_feature (2)..(2): n is a, c, g, or t
  misc_feature (11)..(13): n is a, c, g, or t
  misc_feature (16)..(16): n is a, c, g, or t
  misc_feature (622)..(622): n is a, c, g, or t
tnagtacccgnnnttngggcattcttggcctactggtacagcaggaggaggcagagcacagcatcgtcgggaccagactcgtctcaggccagttgcagccttctcagccaaacgccgaccaaggaaaactcactaccatgagaattgcagtgatttgcttttgcctcctaggcatcacctgtgccataccagttaaacaggctgattctggaagttctgaggaaaagcagctttacaacaaatacccagatgctgtggccacatggctaaaccctgacccatctcagaagcagaatctcctagccccacagacccttccaagtaagtccaacgaaagccatgaccacatggatgatatggatgatgaagatgatgatgaccatgtggacagccaggactccattgactcgaacgactctgatgatgtagatgacactgatgattctcaccagtctgatgagtctcaccattctgatgaatctgatgaactggtcactgattttcccacggacctgccagcaaccgaagttttcactccagttgtccccacagtagacacatatgatggccgaggtgatagtgtggtttatggactgaggtccaaaatctttaagaaagtttntccgcagaacccttggacaatctccaagtaccccctgggttggcttcccaggacggaaggga

SEQ ID NO: 67266 - DNA, 349 bp, Homo sapiens
  misc_feature (2)..(2): n is a, c, g, or t
  misc_feature (11)..(13): n is a, c, g, or t
  misc_feature (16)..(16): n is a, c, g, or t
tnagtacccgnnnttngggcattcttggcctactggtacagcaggaggaggcagagcacagcatcgtcgggaccagactcgtctcaggccagttgcagccttctcagccaaacgccgaccaaggaaaactcactaccatgagaattgcagtgatttgcttttgcctcctaggcatcacctgtgccataccagttaaacaggctgattctggaagttctgaggaaaagcagctttacaacaaatacccagatgctgtggccacatggctaaaccctgacccatctcagaagcagaatctcctagccccacagaatgctgttgtcgctagggggtcctcagagcgccgcac

SEQ ID NO: 67267 - DNA, 533 bp, Homo sapiens
tctcaggtaaacctattgaccattgtgccttcttgtgtgatttacaataacataatatttatgtatacacagagagcttttgcaatagaaggtgtgccttgagaactgcagagtgcgtcttccctgaacctaacaccggaccagagttaagagttgctcaataaatgcatgttgaattaatttcactttttctttttctagaggatctctattgctcaggctggagtggtggggtacaaccatggctcaccgtggcctcgactcccaggctcaagcgatcctccctcttcagcctcccaagtagctgggaccacaggcatgccaacatgcctggctaattttttaattttttgttgagacaaagtcttgctatgttgcccgggctggtcttgaactcctgggctcaagcatttctcctgcctcggcgtttcaaagtgtgagatgataggtgtaagtcactatgctcggccggatttgattttagaccctggggaacccatctttggactgtttctcaaagagagggcagatat

SEQ ID NO: 67268 - DNA, 2492 bp, Homo sapiens
acgggggcgccccggcctaagcgggactaggagggcgcgccacccgcttccgctgcccgccggggaatcccccgggctggcgcgcagggaagttcccgaacgcgcgggcataaaagggcagccggcgcccgcgcgccacagctctgcagctcgtggcagcggcgcagcgctccagccatgtcgcgcggcctccagcttctgctcctgagctgcgcctacagcctggctcccgcgacgccggaggtgaaggtggcttgctccgaagatgtggacttgccctgcaccgccccctgggatccgcaggttccctacacggtctcctgggtcaagttattggagggtggtgaagagaggatggagacaccccaggaagaccacctcaggggacagcactatcatcagaaggggcaaaatggttctttcgacgcccccaatgaaaggccctattccctgaagatccgaaacactaccagctgcaactcggggacatacaggtgcactctgcaggacccggatgggcagagaaacctaagtggcaaggtgatcttgagagtgacaggatgccctgcacagcgtaaagaagagacttttaagaaatacagagcggagattgtcctgctgctggctctggttattttctacttaacactcatcattttcacttgtaagtttgcacggctacagagtatcttcccagatttttctaaagctggcatggaacgagcttttctcccagttacctccccaaataagcatttagggctagtgactcctcacaagacagaactggtatgagcaggatttctgcaggttcttcttcctgaagctgaggctcaggggtgtgcctgtctgttacactggaggagagaagaatgagcctacgctgaagatggcatcctgtgaagtccttcacctcactgaaaacatctggaaggggatcccaccccattttctgtgggcaggcctcgaaaaccatcacatgaccacatagcatgaggccactgctgcttctccatggccaccttttcagcgatgtatgcagctatctggtcaacctcctggacattttttcagtcatataaaagctatggtgagatgcagctggaaaagggtcttgggaaatatgaatgcccccagctggcccgtgacagactcctgaggacagctgtcctcttctgcatcttggggacatctctttgaattttctgtgttttgctgtaccagcccagatgttttacgtctgggagaaattgacagatcaagctgtgagacagtgggaaatatttagcaaataatttcctggtgtgaaggtcctgctattactaaggagtaatctgtgtacaaagaaataacaagtcgatgaactattccccagcagggtcttttcatctgggaaagacatccataaagaagcaataaagaagagtgccacatttatttttatatctatatgtacttgtcaaagaaggtttgtgtttttctgcttttgaaatctgtatctgtagtgagatagcattgtgaactgacaggcagcctggacatagagagggagaagaagtcagagagggtgacaagatagagagctatttaatggccggctggaaatgctgggctgacggtgcagtctgggtgctcgcccacttgtcccactatctgggtgcatgatcttgagcaagttccttctggtgtctgctttctccattgtaaaccacaaggctgttgcatgggctaatgaagatcatatacgtgaaaattctttgaaaacatataaagcactatacagattcgaaactccattgagtcattatccttgctatgatgatggtgttttggggatgagagggtgctatccatttctcatgttttccattgtttgaaacaaagaaggttaccaagaagcctttcctgtagccttctgtaggaattcttttggggaagtgaggaagccaggtccacggtctgttcttgaagcagtagcctaacacactccaagatatggacacacgggagccgctggcagaagggacttcacgaagtgttgcatggatgttttagccattgttggctttcccttatcaaacttgggcccttcccttcttggtttccaaaggcattttattgcttgagttatatgttcactgtccccctaatattagggagtaaaacggataccaagttgatttagtgtttttacctctgtcttggctttcatgttattaaacgtatgcatgtgaagaaagggtgtttttctgttttatattcaactcataagactttgggataggaaaaatgagtaatggttactaggcttaatacctgggtgattacataatctgtacaacgaacccccatgatgtaagtttacctatgtaacaaacctgcacttatacccatgaacttaaaatgaaagttaaaaataaaaaacatatacaaataaaaaaatcccgactttgggatgagtgctaggatgttgtaaaccagtttgagaatca

SEQ ID NO: 67269 - DNA, 2239 bp, Homo sapiens
acgggggcgccccggcctaagcgggactaggagggcgcgccacccgcttccgctgcccgccggggaatcccccgggctggcgcgcagggaagttcccgaacgcgcgggcataaaagggcagccggcgcccgcgcgccacagctctgcagctcgtggcagcggcgcagcgctccagccatgtcgcgcggcctccagcttctgctcctgagctgcgcctacagcctggctcccgcgacgccggaggtgaaggtggcttgctccgaagatgtggacttgccctgcaccgccccctgggatccgcaggttccctacacggtctcctgggtcaagttattggagggtggtgaagagaggatggagacaccccaggaagaccacctcaggggacagcactatcatcagaaggggcaaaatggttctttcgacgcccccaatgaaaggccctattccctgaagatccgaaacactaccagctgcaactcggggacatacaggtgcactctgcaggacccggatgggcagagaaacctaagtggcaaggtgatcttgagagtgacaggatgccctgcacagcgtaaagaagagacttttaagaaatacagagcggagattgtcctgctgctggctctggttattttctacttaacactcatcattttcacttgtaagtttgcacggctacagagtatcttcccagatttttctaaagctggcatggaacgagcttttctcccagttacctccccaaataagcatttagggctagtgactcctcacaagacagaactggtatgagcaggatttctgcaggttcttcttcctgaagctgaggctcaggggtgtgcctgtctgttacactggaggagagaagaatgagcctacgctgaagatggcatcctgtgaagtccttcacctcactgaaaacatctggaaggggatcccaccccattttctgtgggcaggcctcgaaaaccatcacatgaccacatagcatgaggccactgctgcttctccatggccaccttttcagcgatgtatgcagctatctggtcaacctcctggacattttttcagtcatataaaagctatggtgagatgcagctggaaaagggtcttgggaaatatgaatgcccccagctggcccgtgacagactcctgaggacagctgtcctcttctgcatcttggggacatctctttgaattttctgtgttttgctgtaccagcccagatgttttacgtctgggagaaattgacagatcaagctgtgagacagtgggaaatatttagcaaataatttcctggtgtgaaggtcctgctattactaaggagtaatctgtgtacaaagaaataacaagtcgatgaactattccccagcagggtcttttcatctgggaaagacatccataaagaagcaataaagaagagtgccacatttatttttatatctatatgtacttgtcaaagaaggtttgtgtttttctgcttttgaaatctgtatctgtagtgagatagcattgtgaactgacaggcagcctggacatagagagggagaagaagtcagagagggtgacaagatagagagctatttaatggccggctggaaatgctgggctgacggtgcagtctgggtgctcgcccacttgtcccactatctgggtgcatgatcttgagcaagttccttctggtgtctgctttctccattgtaaaccacaaggctgttgcatgggctaatgaagatcatatacgtgaaaattctttgaaaacatataaagcactatacagattcgaaactccattgagtcattatccttgctatgatgatggtgttttggggatgagagggtgctatccatttctcatgttttccattgtttgaaacaaagaaggttaccaagaagcctttcctgtagccttctgtaggaattcttttggggaagtgaggaagccaggtccacggtctgttcttgaagcagtagcctaacacactccaagatatggacacacgggagccgctggcagaagggacttcacgaagtgttgcatggatgttttagccattgttggctttcccttatcaaacttgggcccttcccttcttggtttccaaaggcattttattgcttgagttatatgttcactgtccccctaatattagggagtaaaacggataccaagttgatttagtgtttttacctctgtcttggctttcatgttattaaacgtatgcatgtgaagaaa

SEQ ID NO: 67270 - DNA, 2070 bp, Homo sapiens
ctcccgtcggtcgcttgctcacgacgcgctctctctttcttgtagcctacagcctggctcccgcgacgccggaggtgaaggtggcttgctccgaagatgtggacttgccctgcaccgccccctgggatccgcaggttccctacacggtctcctgggtcaagttattggagggtggtgaagagaggatggagacaccccaggaagaccacctcaggggacagcactatcatcagaaggggcaaaatggttctttcgacgcccccaatgaaaggccctattccctgaagatccgaaacactaccagctgcaactcggggacatacaggtgcactctgcaggacccggatgggcagagaaacctaagtggcaaggtgatcttgagagtgacaggatgccctgcacagcgtaaagaagagacttttaagaaatacagagcggagattgtcctgctgctggctctggttattttctacttaacactcatcattttcacttgtaagtttgcacggctacagagtatcttcccagatttttctaaagctggcatggaacgagcttttctcccagttacctccccaaataagcatttagggctagtgactcctcacaagacagaactggtatgagcaggatttctgcaggttcttcttcctgaagctgaggctcaggggtgtgcctgtctgttacactggaggagagaagaatgagcctacgctgaagatggcatcctgtgaagtccttcacctcactgaaaacatctggaaggggatcccaccccattttctgtgggcaggcctcgaaaaccatcacatgaccacatagcatgaggccactgctgcttctccatggccaccttttcagcgatgtatgcagctatctggtcaacctcctggacattttttcagtcatataaaagctatggtgagatgcagctggaaaagggtcttgggaaatatgaatgcccccagctggcccgtgacagactcctgaggacagctgtcctcttctgcatcttggggacatctctttgaattttctgtgttttgctgtaccagcccagatgttttacgtctgggagaaattgacagatcaagctgtgagacagtgggaaatatttagcaaataatttcctggtgtgaaggtcctgctattactaaggagtaatctgtgtacaaagaaataacaagtcgatgaactattccccagcagggtcttttcatctgggaaagacatccataaagaagcaataaagaagagtgccacatttatttttatatctatatgtacttgtcaaagaaggtttgtgtttttctgcttttgaaatctgtatctgtagtgagatagcattgtgaactgacaggcagcctggacatagagagggagaagaagtcagagagggtgacaagatagagagctatttaatggccggctggaaatgctgggctgacggtgcagtctgggtgctcgcccacttgtcccactatctgggtgcatgatcttgagcaagttccttctggtgtctgctttctccattgtaaaccacaaggctgttgcatgggctaatgaagatcatatacgtgaaaattctttgaaaacatataaagcactatacagattcgaaactccattgagtcattatccttgctatgatgatggtgttttggggatgagagggtgctatccatttctcatgttttccattgtttgaaacaaagaaggttaccaagaagcctttcctgtagccttctgtaggaattcttttggggaagtgaggaagccaggtccacggtctgttcttgaagcagtagcctaacacactccaagatatggacacacgggagccgctggcagaagggacttcacgaagtgttgcatggatgttttagccattgttggctttcccttatcaaacttgggcccttcccttcttggtttccaaaggcattttattgcttgagttatatgttcactgtccccctaatattagggagtaaaacggataccaagttgatttagtgtttttacctctgtcttggctttcatgttattaaacgtatgcatgtgaagaaa

SEQ ID NO: 67271 - DNA, 1923 bp, Homo sapiens
ctcaggcctgttctgaagattcggaaagatgccatgtgagagtcgcatgcagccagacacagagcgacagtgcgcgccggctgctgctgtcaccttcactgtcactgttactgtcgttcatcctgatggtgggaagaggagacaagcaggactccaggaccaaggaacaaagcattcttagctttttttcatggtagaaaaatcctgttaaaatggcttcacatgtcgcttacttttttaaaggatgccctgcacagcgtaaagaagagacttttaagaaatacagagcggagattgtcctgctgctggctctggttattttctacttaacactcatcattttcacttgtaagtttgcacggctacagagtatcttcccagatttttctaaagctggcatggaacgagcttttctcccagttacctccccaaataagcatttagggctagtgactcctcacaagacagaactggtatgagcaggatttctgcaggttcttcttcctgaagctgaggctcaggggtgtgcctgtctgttacactggaggagagaagaatgagcctacgctgaagatggcatcctgtgaagtccttcacctcactgaaaacatctggaaggggatcccaccccattttctgtgggcaggcctcgaaaaccatcacatgaccacatagcatgaggccactgctgcttctccatggccaccttttcagcgatgtatgcagctatctggtcaacctcctggacattttttcagtcatataaaagctatggtgagatgcagctggaaaagggtcttgggaaatatgaatgcccccagctggcccgtgacagactcctgaggacagctgtcctcttctgcatcttggggacatctctttgaattttctgtgttttgctgtaccagcccagatgttttacgtctgggagaaattgacagatcaagctgtgagacagtgggaaatatttagcaaataatttcctggtgtgaaggtcctgctattactaaggagtaatctgtgtacaaagaaataacaagtcgatgaactattccccagcagggtcttttcatctgggaaagacatccataaagaagcaataaagaagagtgccacatttatttttatatctatatgtacttgtcaaagaaggtttgtgtttttctgcttttgaaatctgtatctgtagtgagatagcattgtgaactgacaggcagcctggacatagagagggagaagaagtcagagagggtgacaagatagagagctatttaatggccggctggaaatgctgggctgacggtgcagtctgggtgctcgcccacttgtcccactatctgggtgcatgatcttgagcaagttccttctggtgtctgctttctccattgtaaaccacaaggctgttgcatgggctaatgaagatcatatacgtgaaaattctttgaaaacatataaagcactatacagattcgaaactccattgagtcattatccttgctatgatgatggtgttttggggatgagagggtgctatccatttctcatgttttccattgtttgaaacaaagaaggttaccaagaagcctttcctgtagccttctgtaggaattcttttggggaagtgaggaagccaggtccacggtctgttcttgaagcagtagcctaacacactccaagatatggacacacgggagccgctggcagaagggacttcacgaagtgttgcatggatgttttagccattgttggctttcccttatcaaacttgggcccttcccttcttggtttccaaaggcattttattgcttgagttatatgttcactgtccccctaatattagggagtaaaacggataccaagttgatttagtgtttttacctctgtcttggctttcatgttattaaacgtatgcatgtgaagaaa

SEQ ID NO: 67272 - DNA, 383 bp, Homo sapiens
tttttcatggtagaaaaatcctgttaaaatggcttcacatgtcgcttacttttttaaaggatgccctgcacagcgtaaagaagagacttttaagaaatacagagcggagattgtcctgctgctggctctggttattttctacttaacactcatcattttcacttgtgtaagtatcttcttaaaacatcttctcttattaaaagattacccagggcaccaatccaagtatctcttgcagatagtgcgaatcatttaataatggtgagagagattattctttgaaccctggactttttgaggcccctagactgggagaatcattacaggaagctccctgaaatatttccagcttttgtctagtggctacgtttagagcattgtgg

SEQ ID NO: 67273 - DNA, 2435 bp, Homo sapiens
acgggggcgccccggcctaagcgggactaggagggcgcgccacccgcttccgctgcccgccggggaatcccccgggctggcgcgcagggaagttcccgaacgcgcgggcataaaagggcagccggcgcccgcgcgccacagctctgcagctcgtggcagcggcgcagcgctccagccatgtcgcgcggcctccagcttctgctcctgagctgcgcctacagcctggctcccgcgacgccggaggtgaaggtggcttgctccgaagatgtggacttgccctgcaccgccccctgggatccgcaggttccctacacggtctcctgggtcaagttattggagggtggtgaagagaggatggagacaccccaggaagaccacctcaggggacagcactatcatcagaaggggcaaaatggttctttcgacgcccccaatgaaaggccctattccctgaagatccgaaacactaccagctgcaactcggggacatacaggtgcactctgcaggacccggatgggcagagaaacctaagtggcaaggtgatcttgagagtgacaggatgccctgcacagcgtaaagaagagacttttaagaaatacagagcggagattgtcctgctgctggctctggttattttctacttaacactcatcattttcacttgtaagtttgcacggctacagagtatcttcccagatttttctaaagctggcatggaacgagcttttctcccagttacctccccaaataagcatttagggctagtgactcctcacaagacagaactggtatgagcaggatttctgcaggttcttcttcctgaagctgaggctcaggggtgtgcctgtctgttacactggaggagagaagaatgagcctacgctgaagatggcatcctgtgaagtccttcacctcactgaaaacatctggaaggggatcccaccccattttctgtgggcaggcctcgaaaaccatcacatgaccacatagcatgaggccactgctgcttctccatggccaccttttcagcgatgtatgcagctatctggtcaacctcctggacattttttcagtcatataaaagctatggtgagatgcagctggaaaagggtcttgggaaatatgaatgcccccagctggcccgtgacagactcctgaggacagctgtcctcttctgcatcttggggacatctctttgaattttctgtgttttgctgtaccagcccagatgttttacgtctgggagaaattgacagatcaagctgtgagacagtgggaaatatttagcaaataatttcctggtgtgaaggtcctgctattactaaggagtaatctgtgtacaaagaaataacaagtcgatgaactattccccagcagggtcttttcatctgggaaagacatccataaagaagcaataaagaagagtgccacatttatttttatatctatatgtacttgtcaaagaaggtttgtgtttttctgcttttgaaatctgtatctgtagtgagatagcattgtgaactgacaggcagcctggacatagagagggagaagaagtcagagagggtgacaagatagagagctatttaatggccggctggaaatgctgggctgacggtgcagtctgggtgctcgcccacttgtcccactatctgggtgcatgatcttgagcaagttccttctggtgtctgctttctccattgtaaaccacaaggctgttgcatgggctaatgaagatcatatacgtgaaaattctttgaaaacatataaagcactatacagattcgaaactccattgagtcattatccttgctatgatgatggtgttttggggatgagagggtgctatccatttctcatgttttccattgtttgaaacaaagaaggttaccaagaagcctttcctgtagccttctgtaggaattcttttggggaagtgaggaagccaggtccacggtctgttcttgaagcagtagcctaacacactccaagatatggacacacgggagccgctggcagaagggacttcacgaagtgttgcatggatgttttagccattgttggctttcccttatcaaacttgggcccttcccttcttggtttccaaaggcattttattgcttgagttatatgttcactgtccccctaatattagggagtaaaacggataccaagttgatttagtgtttttacctctgtcttggctttcatgttattaaacgtatgcatgtgaagaaagggtgtttttctgttttatattcaactcataagactttgggataggaaaaatgagtaatggttactaggcttaatacctgggtgattacataatctgtacaacgaacccccatgatgtaagtttacctatgtaacaaacctgcacttatacccatgaacttaaaatgaaagttaaaaataaaaaacatatacaaat

SEQ ID NO: 67274 - DNA, 2627 bp, Homo sapiens
acgggggcgccccggcctaagcgggactaggagggcgcgccacccgcttccgctgcccgccggggaatcccccgggctggcgcgcagggaagttcccgaacgcgcgggcataaaagggcagccggcgcccgcgcgccacagctctgcagctcgtggcagcggcgcagcgctccagccatgtcgcgcggcctccagcttctgctcctgagctgcgcctacagcctggctcccgcgacgccggaggtgaaggtggcttgctccgaagatgtggacttgccctgcaccgccccctgggatccgcaggttccctacacggtctcctgggtcaagttattggagggtggtgaagagaggatggagacaccccaggaagaccacctcaggggacagcactatcatcagaaggggcaaaatggttctttcgacgcccccaatgaaaggccctattccctgaagatccgaaacactaccagctgcaactcggggacatacaggtgcactctgcaggacccggatgggcagagaaacctaagtggcaaggtgatcttgagagtgacaggatgccctgcacagcgtaaagaagagacttttaagaaatacagagcggagattgtcctgctgctggctctggttattttctacttaacactcatcattttcacttgtaagtttgcacggctacagagtatcttcccagatttttctaaagctggcatggaacgagcttttctcccagttacctccccaaataagcatttagggctagtgactcctcacaagacagaactggtatgagcaggatttctgcaggttcttcttcctgaagctgaggctcaggggtgtgcctgtctgttacactggaggagagaagaatgagcctacgctgaagatggcatcctgtgaagtccttcacctcactgaaaacatctggaaggggatcccaccccattttctgtgggcaggcctcgaaaaccatcacatgaccacatagcatgaggccactgctgcttctccatggccaccttttcagcgatgtatgcagctatctggtcaacctcctggacattttttcagtcatataaaagctatggtgagatgcagctggaaaagggtcttgggaaatatgaatgcccccagctggcccgtgacagactcctgaggacagctgtcctcttctgcatcttggggacatctctttgaattttctgtgttttgctgtaccagcccagatgttttacgtctgggagaaattgacagatcaagctgtgagacagtgggaaatatttagcaaataatttcctggtgtgaaggtcctgctattactaaggagtaatctgtgtacaaagaaataacaagtcgatgaactattccccagcagggtcttttcatctgggaaagacatccataaagaagcaataaagaagagtgccacatttatttttatatctatatgtacttgtcaaagaaggtttgtgtttttctgcttttgaaatctgtatctgtagtgagatagcattgtgaactgacaggcagcctggacatagagagggagaagaagtcagagagggtgacaagatagagagctatttaatggccggctggaaatgctgggctgacggtgcagtctgggtgctcgcccacttgtcccactatctgggtgcatgatcttgagcaagttccttctggtgtctgctttctccattgtaaaccacaaggctgttgcatgggctaatgaagatcatatacgtgaaaattctttgaaaacatataaagcactatacagattcgaaactccattgagtcattatccttgctatgatgatggtgttttggggatgagagggtgctatccatttctcatgttttccattgtttgaaacaaagaaggttaccaagaagcctttcctgtagccttctgtaggaattcttttggggaagtgaggaagccaggtccacggtctgttcttgaagcagtagcctaacacactccaagatatggacacacgggagccgctggcagaagggacttcacgaagtgttgcatggatgttttagccattgttggctttcccttatcaaacttgggcccttcccttcttggtttccaaaggcattttattgcttgagttatatgttcactgtccccctaatattagggagtaaaacggataccaagttgatttagtgtttttacctctgtcttggctttcatgttattaaacgtatgcatgtgaagaaaaaaaaaacaaaaaaaaaaaaaaaaaaaaatgaaaaaaaactaaatcaaaaaaaatctaaaatacatcaaagtttatgcctgaaggatacaattagagtttacattggccaattcgccctataacgaatttaattacaaataactaaaaaacaattttaccacgttggacctggacaatttttgctgtacttatttttatcgctgcccaatatatgccgcctttggtgaagatcccctctttggggggggcgaaaaatctatcgggcccctatataatacacctttcttgtggaaaacacgggggtttgccagattataaaagctgttgaaaattcacctttttatctcacgtggggtttacataagggagccaccggtctgtttttct

SEQ ID NO: 67275 - DNA, 2185 bp, Homo sapiens
acgggggcgccccggcctaagcgggactaggagggcgcgccacccgcttccgctgcccgccggggaatcccccgggctggcgcgcagggaagttcccgaacgcgcgggcataaaagggcagccggcgcccgcgcgccacagctctgcagctcgtggcagcggcgcagcgctccagccatgtcgcgcggcctccagcttctgctcctgagctgcgcctacagcctggctcccgcgacgccggaggtgaaggtggcttgctccgaagatgtggacttgccctgcaccgccccctgggatccgcaggttccctacacggtctcctgggtcaagttattggagggtggtgaagagaggatggagacaccccaggaagaccacctcaggggacagcactatcatcagaaggggcaaactaccagctgcaactcggggacatacaggtgcactctgcaggacccggatgggcagagaaacctaagtggcaaggtgatcttgagagtgacaggatgccctgcacagcgtaaagaagagacttttaagaaatacagagcggagattgtcctgctgctggctctggttattttctacttaacactcatcattttcacttgtaagtttgcacggctacagagtatcttcccagatttttctaaagctggcatggaacgagcttttctcccagttacctccccaaataagcatttagggctagtgactcctcacaagacagaactggtatgagcaggatttctgcaggttcttcttcctgaagctgaggctcaggggtgtgcctgtctgttacactggaggagagaagaatgagcctacgctgaagatggcatcctgtgaagtccttcacctcactgaaaacatctggaaggggatcccaccccattttctgtgggcaggcctcgaaaaccatcacatgaccacatagcatgaggccactgctgcttctccatggccaccttttcagcgatgtatgcagctatctggtcaacctcctggacattttttcagtcatataaaagctatggtgagatgcagctggaaaagggtcttgggaaatatgaatgcccccagctggcccgtgacagactcctgaggacagctgtcctcttctgcatcttggggacatctctttgaattttctgtgttttgctgtaccagcccagatgttttacgtctgggagaaattgacagatcaagctgtgagacagtgggaaatatttagcaaataatttcctggtgtgaaggtcctgctattactaaggagtaatctgtgtacaaagaaataacaagtcgatgaactattccccagcagggtcttttcatctgggaaagacatccataaagaagcaataaagaagagtgccacatttatttttatatctatatgtacttgtcaaagaaggtttgtgtttttctgcttttgaaatctgtatctgtagtgagatagcattgtgaactgacaggcagcctggacatagagagggagaagaagtcagagagggtgacaagatagagagctatttaatggccggctggaaatgctgggctgacggtgcagtctgggtgctcgcccacttgtcccactatctgggtgcatgatcttgagcaagttccttctggtgtctgctttctccattgtaaaccacaaggctgttgcatgggctaatgaagatcatatacgtgaaaattctttgaaaacatataaagcactatacagattcgaaactccattgagtcattatccttgctatgatgatggtgttttggggatgagagggtgctatccatttctcatgttttccattgtttgaaacaaagaaggttaccaagaagcctttcctgtagccttctgtaggaattcttttggggaagtgaggaagccaggtccacggtctgttcttgaagcagtagcctaacacactccaagatatggacacacgggagccgctggcagaagggacttcacgaagtgttgcatggatgttttagccattgttggctttcccttatcaaacttgggcccttcccttcttggtttccaaaggcattttattgcttgagttatatgttcactgtccccctaatattagggagtaaaacggataccaagttgatttagtgtttttacctctgtcttggctttcatgttattaaacgtatgcatgtgaagaaa

SEQ ID NO: 67276 - DNA, 355 bp, Homo sapiens
catcatccattggttctggatttaacatacaaaatccgtaaaagaactgaaatgttctgaagcttgaatctctctcatgcagttattctgttggatgaagtggcatttcaaatttgctcactcagatttgggacattagtctcattctgaagcacaccaatgcttccagaactaccagcatgctgtaatgaaaggctagtaacacagtcagaagaggaagcaaggttggtttgacatgacttgctcttgatgcataaagctttggtgcttccttgtcacctgatactataaataacattccaaactttttaataaaatgttttattcccttatgtgggaatattattaactagta

SEQ ID NO: 67277 - DNA, 621 bp, Homo sapiens
catcatccattggttctggatttaacatacaaaatccgtaaaagaactgaaatgttctgaagcttgaatctctctcatgcagttattctgttggatgaagtggcatttcaaatttgctcactcagatttgggacattagtctcattctgaagcacaccaatgcttccagaactaccagcatgctgtaatgaaaggtaccgccatgagacttgaagaagtatctgactttgtcccaaaatctatctgaataagaaaaacggacaaacaaaaagataaggagaagaaagaggaaacaaaagctaaaaggttcaccttaactttcccagcattttcgtcatcttcttttttgtcttcaaattcaaaggcaacagtcatgcgttgttgtctctgctcttcccacagtgtagggttaaagctgtcactgtctgactggaaatctacagttagattccaaagtattattgtttttttaaaaaacaattttacacaaagtatttaatatagtatgcaaaaatggtgatagatactacaaacaaatacggaaataaagaagaaagaaagaaaaaaagaaagagaaagaaggaaagagaaaagaataaaattcccttgatatttattaca

SEQ ID NO: 67278 - DNA, 6220 bp, Homo sapiens
  misc_feature (12)..(12): n is a, c, g, or t
  misc_feature (14)..(14): n is a, c, g, or t
  misc_feature (167)..(167): n is a, c, g, or t
  misc_feature (319)..(319): n is a, c, g, or t
  misc_feature (347)..(347): n is a, c, g, or t
  misc_feature (464)..(464): n is a, c, g, or t
  misc_feature (500)..(500): n is a, c, g, or t
  misc_feature (558)..(558): n is a, c, g, or t
  misc_feature (727)..(727): n is a, c, g, or t
  misc_feature (744)..(744): n is a, c, g, or t
  misc_feature (881)..(881): n is a, c, g, or t
  misc_feature (920)..(920): n is a, c, g, or t
  misc_feature (992)..(992): n is a, c, g, or t
  misc_feature (1207)..(1207): n is a, c, g, or t
  misc_feature (1422)..(1422): n is a, c, g, or t
  misc_feature (1447)..(1447): n is a, c, g, or t
  misc_feature (1505)..(1505): n is a, c, g, or t
  misc_feature (1512)..(1512): n is a, c, g, or t
  misc_feature (1556)..(1556): n is a, c, g, or t
  misc_feature (1731)..(1731): n is a, c, g, or t
  misc_feature (1746)..(1746): n is a, c, g, or t
  misc_feature (1807)..(1807): n is a, c, g, or t
  misc_feature (2055)..(2055): n is a, c, g, or t
  misc_feature (2157)..(2157): n is a, c, g, or t
  misc_feature (2337)..(2337): n is a, c, g, or t
  misc_feature (2388)..(2388): n is a, c, g, or t
  misc_feature (2442)..(2442): n is a, c, g, or t
  misc_feature (2530)..(2530): n is a, c, g, or t
  misc_feature (2826)..(2826): n is a, c, g, or t
  misc_feature (2914)..(2914): n is a, c, g, or t
  misc_feature (2920)..(2920): n is a, c, g, or t
  misc_feature (2957)..(2957): n is a, c, g, or t
  misc_feature (3034)..(3034): n is a, c, g, or t
  misc_feature (3182)..(3182): n is a, c, g, or t
  misc_feature (3230)..(3230): n is a, c, g, or t
  misc_feature (3362)..(3362): n is a, c, g, or t
  misc_feature (3491)..(3491): n is a, c, g, or t
  misc_feature (3710)..(3710): n is a, c, g, or t
  misc_feature (3740)..(3740): n is a, c, g, or t
  misc_feature (3815)..(3815): n is a, c, g, or t
  misc_feature (4176)..(4177): n is a, c, g, or t
  misc_feature (4180)..(4180): n is a, c, g, or t
  misc_feature (4182)..(4182): n is a, c, g, or t
  misc_feature (4197)..(4197): n is a, c, g, or t
  misc_feature (4512)..(4512): n is a, c, g, or t
  misc_feature (4515)..(4515): n is a, c, g, or t
  misc_feature (4619)..(4619): n is a, c, g, or t
  misc_feature (4622)..(4622): n is a, c, g, or t
  misc_feature (4708)..(4708): n is a, c, g, or t
  misc_feature (4880)..(4880): n is a, c, g, or t
  misc_feature (5001)..(5001): n is a, c, g, or t
  misc_feature (5105)..(5105): n is a, c, g, or t
  misc_feature (5149)..(5149): n is a, c, g, or t
  misc_feature (5200)..(5200): n is a, c, g, or t
  misc_feature (5428)..(5428): n is a, c, g, or t
  misc_feature (5458)..(5458): n is a, c, g, or t
  misc_feature (5708)..(5708): n is a, c, g, or t
  misc_feature (5872)..(5872): n is a, c, g, or t
  misc_feature (6034)..(6034): n is a, c, g, or t
attacaggcgtnanccaccatgcctggcaacataacatttatatgcaccagaaagcaaaaaatttcgtgtgacttgcgctgttgtgacattcaccttattgtgttacctagaaccaaacctgcaatatctccaaggtgtgcctgtatccctagaagcagagctggantaaggacttcggtgtgggtggtttatttggaaagtgattccaagaagcaagagtcagaagtgggaagagtgagccaggcaagaaagaaaagccaaaataatggcatgctattgaggctcctgccatgcagttttttctgcaggaccttccgngaggctccggaaagttatccagaaatgnccacctgaaacatgagcctggagcatttgtccacctgtcccacactggttgaggtcttcccctgaggctgttaacctgcaagtgtttctgggctgtatttgtgctcaggcaaaatcntacaataatggagattccctagggcagaaagtgtancttgagtttgctggcagcacaagagaagcctgtgcttccatggaacttctcacggtgnctgagactgaatgaaaggtgagctgagaaaacatgacgcaggcgccattgcactaagcaatcatagccatcgatctgggcaagaggacccctgccctgaatcctgcacttgagaaggtgcctctctggccctccactgactgtaccctggcccactcagagcttcaccntctcttctagggcacangctgggcactcagggacctggcgaaatgtgcctgagcctgcatggcctcttccctgggtccatttcaaagtgcaaactgtgcttgtccaaatggtgcccaaggatctgctttctgaaggggtgagaattgtggatgnagcttgcatggggcctagggagttccccacacaagggtntgcaaagcttctcaagtgaggacagggctacctacgatgaaagaaaaaagtttagcctggggctgatgatcngctctccctttactaccacattcctgtgcagagcaccaagaaatcagagaattctacactcaactttgaccttgtgggttattatggcagtatatttatcgaaataggagaatagaacatatttaactatttgttagcttcatttataactcataattatttagacataatgcaaatgtgggctggaatttacgttctgattttttgtggccttnagctaaggaaaagggacccaaggaaatgggctttatatgcttggatggctttgtggaatccccaacttcattagcttctgtggtgactcaagattgttactaaaatccactttgtattatctttaaaaaccaaggaatattatgtagatcagtagttagaaggtacttgactcaaaatatgtatgaaccaaaggatataaatgactaaaagcagnaggattattacctgaagtggtgganggttgatctcaggatatgacctgtgagatccttcctgctggctcagtgctggctgaanggggggnaggagagcaccaggaacaacacacatctgggacaggagggaatncggggaggaaggaaagagaaataggcctttttatttttattgatacatgacaattatacatatttgtagggtacatgtgatattttgatacatgcatacaatgtgtagtgatcaaatcaggataatttgcatatccatcacctcaaacatttatcatttgtgttgagaacattcnacatctttcctctantcattttgaaatatataagttattgttaatgatcatcaccctacgtgctattgaacactanaaatttttctgttccttccatctaactgtatttttgtgtccattaaccaacttctgggaagggcaaaagagtgggtggatgaaaagggccctttttaaggaaaagtaaatcttacaagaagggaagacatcttaggaggaaaaataaaaaggtggaccatgggcttagagtagggactgcagaaattgaatggcaaagaaaaaaccaacttagcaatgtgaaaatacatctcaatgtcattcttttcncaggtccagtgtctgattcttttgggaagctggatatgaagtcagaatctttctttgagtcatacattttcatgattatgattattattgaatgatagctgncaattattgagagcaattattgaggacaattattgagctttcacaagcccttttcaaggtctttacatatattttctccacttctaactgttagatattcttattattcccattttgtagatgagggatacacaggcataaagcctatgtggaggcagagagcagctacgtaacctgacnatggcccaacagcaaacaaatgatggggccacatgcaaatccaggcagaanccttctattatatgaagctcaatgttttcttgtttgcagcttgttatgaatacntctatttgcaaatgggttttgaagctactttaaaacattttgtggctgtgcgtggtggctggcacctgtaatcccagcattatggganaccaaggtgggcagattgcctgagctcaggagtttgagaccaacctggccaacatggtgaaaccctgtgcctactaaaaatacaaaaaaattagccaggtgtgttggtgtgcacctgtaatcccagctactctggagggtgaggcaggagaatcacttgaacccaggagaggaaggttgcagtaagctgagatcatgccactgaactccagcctgggcaacagagtgagattctgtctccaaataaaaaataaataagattgaattttgagctcctgaccatgtccctagattgtnctcatatgtattttgatgtctaataagatttattctcagtgcattttttaagtgaaagtatttattgagcatctactgtatatcatgngctganataggcaccagtggtgcagggaacatatggcacagtntctgacctcaggtaactttcactctcatacatatgtattaggacaccaacacatgtgtgaatataagatagtatganagatattgcaacaagtaattatttactgtaaacctattttataggattttaaacttaaactactttcaccctatttccaaaaaaaagtattgcataactttaaatagattctcagtttgaaatcatcatacaaactgcagtagcatcngctggtgaaatactgctttgtatctattagaatagtccaaacaattgngagacaactgcattattagagctgtaaaagttattgtctagaaatctcagagaagaagaggaagttctatggtagatgaataagatgacatctaaactgttctcttcagctactgaagttctgtggatatcncacagcacaaagttcaagtgtatgcccacagctcctcatgccacaagatgtgacacctttccaatctctttttgcaaaagtttccaattatgtctcttttaagagtactttttatacccacatattccngattttgtggtgcacgcaaagacaagatgggaaggggcttccatttattgatgccagctgctccatggaccaggccctgcccatgcatccatgttggttcttttatccccacatcagccatagcccataagcattaactgccattgcacagatgaggaaattgaaagtctaagagaatatgcaatctacccagagtcatgcagcttgtgtatgtaaggnttggaatgaaaatccaatctgtgtgagtcncaagtccccttccaccatatggtttccatttcattttgcaatcagattggctgggatatgtctgccctaaaaganagtaagtaggaatatttgtctctataccttaacctgacatccatgggcttgctttttgtatttggaggtgtcataacattataataataatttgattttatttgtacagtggatattatactactcagtctagagatttatgacatcccagtctaaactggatgatagcaatgaagcttcttcaaggagacaagtatgagtaataaggtagtaataagctgaatttctatggagttgctacttctgaattaaaactagttgagattaagtagatattcaaaaatattgctataatcttcacttgaataatacaaacatttattatttttacatatttatttatttatggaacataattttnnaananaatattttcaaattntattaaaatatattaaaaacataatacattatcacccaatagagtttttcaaagtaactcagtgttagtttaaaatgtgaaattcaatcaacataattcaccatagaatacagtgtgtatgtcagtataatatatatatcaaaattggaaagcagtaaatttatctttgttttgtaataagatgaaattaaaattttaatgaatttcaactttcattttagatttcggagggtacctttgcaggtttattacatgggtgtattgtgtgatgctgagatttggggtatgaatgaaagtgtgagtgcctgttttganctngcaccgagagcaatctcccctgatcagcagagggtaaactaacttgaattacacttgaattttttagtagagcaggtcacaaagggcaaattgtagtccagagncanaagtgctcagtggtctaaaatgagcctgccatatcactgagggtacaggtcttcacagaaatatatttcagaaagacgtcaaaccnttgtttaaagataaatgtaagctgggtgtggaggcacacgtctataattccagctactcaggaggctgaggcaggaggatcccttgagttcaggagtttaagaccagcctggacaacataggaagatcccatctcaattttttaaaatgagaaaaaaatagataaacttaancatattaaaattttaaagagtttatttaagcaaacagagattcatggatcaggcagctccaaactgaaagtggttggaggatctactggaggtgtttgtaaggaaggcttttacagggtgnatatagaagtaaagtagagaaattatttgattggcaaaaatgtgggcagttgcattatttgaactatcctggtggtaggtctctcattacccagctaatactcngcaggccacctgtgggtgggctaagcttgtttcattttgtctangcaggaaccctggccatgggagctatctcagcctaatgctctcccattacnaaattttacaccttctttctgtatcagggtaagtggggatcttccccaggagggttcttaccaccctgtttccctcagcaaaatgaaactgtcccttttgcctctgtaggcaatcttctgaacaaggcattcctaatattcttatctcatcttattttatcttatcctcttctctgtaccttgtttacatgcttctggaacacttgtgtgtcttgcacccatctcctncattatttaggcaatcctaacagaaggccnctaggatggattggaagagaactgctggcatattgagccctctctctttgtatctggaactttcataattaccttagttctccatgccaattttgcacttatctttgttctccacttcaaaatacatttacctctgacagcagctgagttcataaaagggaacttgtccagtggtacttatgaggcaggagacatgatatagttaaaattataaactataatcactatatagttatatattatatataancactatatcactccagggttgaagtgatactcctgcctcagcctcctgagtagctgggattacaggcatgtgccaccacactcgaataatcgtatatgttttaaaataggaatagattttctcagctaaacggaagggaaatgctaaggaaagagtgagatttnacttgataattatgtttctgaatgaatcagccaattaataaaatgaaaacaggccaggacagtggtgcatgccagtcatcccagcaatttgggaggccaaggtgggcagatcacttgagtccaagagtttgagacaagcctgagcaacatatcaaaaccccntctctacaaaaaatacaaaaattagccaggtgtggtggctcatgcctgtagtccctgctacttgggaggctgaggtaggaggatcacctgagcctggagatgtagaggctgcaatgagctgtgatcatgccactgcacttccagcctgggtgacacagtgagaccctgtcccaaagaaactaaact

SEQ ID NO: 67279 - DNA, 290 bp, Homo sapiens
tgcagctcttgccccatgtgtcacttttatacacaagttcgacaagacccgaaccagccagtaccttctcccaggagacgagcccactcagcctgcattttgatggatcagccgtgtcacattgctgtagaaatttctaaatacttattctttttattttgtttcttatttcacagtggatccacaacagtctctggtgaacagcatgctctgagtagcaccgttctagtctttgtataccagggatgtttcacagtaaatgtttaaatcattttggacatatttatgtt

SEQ ID NO: 67280 - DNA, 462 bp, Homo sapiens
aatgaatatttaagaagtaataaagggaaggcttgaattgtgtgaaccacgaaagcactaaataatctagaattcaggtaggggtttttgattataagcttgcatcaggtctgtttttggcatttcttggaaatgaagtaattcactgcaggcttgtcaagaattggtcttggggccgggcgcggtggctgatgcctctaatcccagcactttgggaggccgaggcaggtggatcacctgaggtcaggagttcgagatcagcccggccaacatggcaaaacctcatctctactaaaaaatacaaaaattagcaggcgtgatggcgtgcacttgtaattccagctacttgggaggctgaagcagaagaattgcttgaactcagaaggcagaagttgcagtgagccaagattgcaccactggactccagcctgggcaacagaatgagactctgtctcaaaaaaa

SEQ ID NO: 67281 - DNA, 2871 bp, Homo sapiens
gggcacctgaggaagcgggctgcgcctgtggcacagtggtacggggccggaagataacttacctgaagaggcgatcaatccctgagaatcgcgggcgacccgttttttgtgtgcccgggtgcggggtgccgggacacggcgttgaaggcgctgagcggagggatctcagggcgagctcgagcggcgacggcgcgctctgtgattgcaccgagagcgcctgaggtgatctcggcctacatcgcgtcagcggggccttgggcgtgagcaccgccccctgtccggacgcagggtactggggcacctcgaactgtggcacctcacccttctccggggccacgtcttggggactccgacagccccaaataagccctcggggactggggttgtgaaaagcgaggtcgtgaagacgccggcctcataccgaagggtaggacggtgaggtcagccccgtcccactccaactaaaatcaacctgacaggaggtggttcaggaaaacggtcccatttggcacctcaagtctaggtccctcaagtctctacaacagtatgcaaagaaaatgttcatcttcattcttcttatagttttctggtaacttactgaaccaagcgcacacacactctccaaggacaaacatttttcagtgctgggacaatgcaaattcagctctcggcagactactacacactgtgcatgatataccaagactaaaagactcataacctacccgcagaaagagtgcatcttccatagtagctctgcaaaaagatccaaaagaaactgttaatggcctggcttaagtcaaattgtgtccggaattggtgggttcttcgtctcactgacttcaagtatgaagccgaccctcacggtcagtgttacagctcttaagatggcgcctctggagtttgttccttctgatgttcggatgtgttcggagtttcttccttctggtgggatcgtggtctcgctggctcaggagtgaagctgcagaccttcgcaacttccttccagaggaagatgttgactctaatgtattctgtctaggatgtgtttcataaatctggttagaagatttcccttccagcatcaacaaattgttttctaaatgtggaaaaagagacattcagtacaggctaacgtaacgtgggacagcatgcaaagccatgagaagtgggaaaatgagagagaatctgggcgtggcttacagggctgctgaagtaagacacacccttcgcttcacctgtggcctcccgcggcggctgcggctccttcgcaggaccggtagggggcgcgcgcggttgagtccagcaattgcgaggacctccgcaggcgcagcccagcactgacgcctctccgggccgtggctcctctttcccaggccgaaagcggccgggccctctgctccgctgcgccctggctcggccgcacccactgcgcgtttgtgagctggccatcggtcacactgggatactcgaggaggaggcctggggcctgcattcaattccctaagagggacccgcgctggccgctgcaggcgggtggagaacgggcgtctgagtctttggctttcgtaccggaatctccccgggagattttacaagcccctccgaatgttctgattgaattggtctgggggggtcggtccgggcatctaacgagcagccgggatggagaattactagtctggattctggtcctcagaggttcactcacgttaatcaacccgagtccatcttggtgggattgtcttgctccgaggccctcccactgagctttattttcctgcctgatttcggggtccgctaacaggatgaacagcggaccatacaggcacagtgaaaatgacacttggtgacgtggaagacccagcttgccacagttgaggcagagctcctcagggtcttttgtcttagttatccccgagctatttttcaggaaccgacaggctcccccaccccaacaccggatgaaggccagcaactggaggccaggaataatcaagcacgctctcatttcaaagaggtgacgattgtgcccgtgtttaaaagggatgcctgagaccatgaggatttggagttttggaggcggatctgcctttggggagtgagcgtagggccctaagatgtggttgtgctttgagacagttcccaaaatacggtatttgtcagaaaacatgtagtatttgtataatttgagaatgtaattgaagaacccgatatagagcttttagaaaggggaaatagaaaacttaaaaagaatcttgcttggtatattaataccaacatctaaaatataataaaattgaataaaccagtgagttttatactatgattgaaataaaatgccactatgttcttaagagtgctagtttaacaggaaatctccaatgcattattatctagactcatctcaaaggctcacttttcatttgcatgggcccttgctatttgtagggtaggaggcagcacctcgttctggtggctgccaccttgatgaggagacactccttgttaacaggatggttagcccacggctcttcccagcccccttttccacacccagtaaattgttttagtttatggccctcagctgcagttgcaatcatcatcaaattccagttttgaatttaaaggtgaataatgaatgcaatgaactttctagaatttatgaagggcagtgatgttcctttttatctaataattctacatgtgtagcctttcagtatgctattctgtggactgaatttacaaattgtcatttgtttaatgaactgttaatataacatgatgactaactgaaaacacatacaatttgctggtattccagaagtctatggatttcgttgttttgtttaaataaaaggcattaaaagc

SEQ ID NO: 67282 - DNA, 319 bp, Homo sapiens
ggttggtgtctgatgctctgttttctagcctctcttcttctgctcctcccctcccccagctgcctaccaactccttcccacccccaggccagcagtgactgcctccaagactccccctccttccagcaccgcctcatggtttccatggcaacagaaaatgttggtgggaagcaaaaatgctgaactgcaactcgtgttggggctgggaggaggaggtgaaatgtgggcctctctggaggctgtagaaaggtggggagaaagaagccaggtgagaagccctgagaagaaaggaccacgaggctcgaaaggaaggtgcatt

SEQ ID NO: 67283 - DNA, 324 bp, Homo sapiens
agggtgtttgctgtattatctcaaactacctgtagtgtatttgtaggtatgggtgagagtaactgtgcttggaatagaaaagccctgctgcatcgagacacaatgctggcagctgcggcagtgtacagagaaatgtacagaaatgaagatggttcagtacctgctacataccagatctattacatgataggatggaaatatcatgagtcacaggcaagaccagctgaaagaggttccgcaactgtgtcatttggagagctaggaaaaataaacaaccttatgccaccggggaaaaaatcacaataaatatttattcagtgttaa

SEQ ID NO: 67284 - DNA, 411 bp, Homo sapiens
ttcttgtccttcctctcaaaacacagatcctgtagctttttccagacagcctttactatttccttaccctcagtattaagaatttttcatgtaagatgttctcagaatcttacaagtatccttgtacccatttctttttgaagaacatgacctttattgagcagaaattttttcctacttgcattttttcagactttaaccattattgtctttttagaaatgtacagaaatgaagatggttcagtacctgctacataccagatctattacatgataggatggaaatatcatgagtcacaggcaagaccagctgaaagaggttccgcaactgtgtcatttggagagctaggaaaaataaacaaccttatgccaccggggaaaaaatcacaataaatatttattcagtgttaa

SEQ ID NO: 67285 - DNA, 2345 bp, Homo sapiens
ggcaagcgaactaggccaaactacttgcacgttccctcgagaagatctttggagtagacacaaaagccgcgctggcgcatgcgcacaaaaagcgccggcaattggggtcgcagctggagatgctgcggccggcagggctctggcgcttatgtcggcgaccttgggcggcgagggtcccagcggagaatcttggccgtagggaagtcacctctggtgtctctccccgcggtagcacctcgcccagaaccctgaatattttcgaccgggatttgaaaaggaaacagaagaactgggcagcccggcagcccgagccgaccaaatttgactacctgaaggaggaggttggaagtcggatcgcagaccgtgtatatgacatacccagaaatttcccccttgctttggatcttggttgtggaagaggttacattgcacaatatttgaataaggaaactattggaaagtttttccaagctgacattgcagaaaatgctttgaaaaattcctcagaaacagaaatacctactgtcagcgttttagctgatgaagaattccttcccttcaaagaaaatacatttgacctggtggttagcagtttaagtttgcattgggtgaatgaccttcctagagcacttgagcagattcattatattttaaaaccagatggagtgtttatcggtgcaatgtttggaggcgacacactctatgaacttcggtgttccttacagttagcggaaacggaaagggaaggaggattttctccacacatttctcctttcactgctgtcaatgacctgggacatctgcttgggagagctggctttaatactctgactgtggacactgatgaaattcaagttaactatcctggaatgtttgaattgatggaagatttacaaggtatgggtgagagtaactgtgcttggaatagaaaagccctgctgcatcgagacacaatgctggcagctgcggcagtgtacagagaaatgtacagaaatgaagatggttcagtacctgctacataccagatctattacatgataggatggaaatatcatgagtcacaggcaagaccagctgaaagaggttccgcaactgtgtcatttggagagctaggaaaaataaacaaccttatgccaccggggaaaaaatcacaataaatatttattcagtgttaatgtcgtccagaattttcatcagaaatggatagctttaacatctaaaattattatattttgaagcaagaagcactctaagctatttactaataggcttttcatataattaggaaaacctaatatcacatctatagtaaccatttcagtttcatattgtttctgttctcataaggatactgctgagtgtctttgcagattcagcctaaaagcaaagaaaatatttccctaaaatatttgcaaataatgttcacatatgtaaatgccttggaaaatattactcatgctgaccttttacacctttttcatttgtcatactgttttctttgccttgaagaggaacagatgaatatgcaccttctccagagttatgtggttttagaatttagaagagcatgtatctttattaaatccctcctcaactctttttttttaaagcatctgaatttaaccttatttcttttttatctccatggtgtgggtgggaccaccatggttttacaccccaccctaccttagggaagaagaaaacattttaaagaataccagaagtagaatcacatgtaacagtctctgcgctttcctttgtaatttcagggcttaaacactattatcctaatccaagttcacagtcctgttgttgtcgaggagggttcaaaatcatttggagataatcaagctcagacagcttaggataggtgagaagaacatagaggaagcagggagaaggctgagaagcaagcaggagtgagcgctaagtgttttgtttccagttagctgttcgctgtcttttccatttaacctgggcactgccctagcctcatcttcagccttcagtgatctataatagcatttccttctgtctcctctcagtctctcttccgccttccttccctcctttactgtattagcaacaagctgtccatgggtgggggctgtgtgttagcctgtacgtagcacatgggactttccacatagtagatattcagttacattttgaactaattatataacaaacttgccctttgaaagactaagttatagttaaaaaccaagatttgtaggagaaaaagaaattattgttcccttcagtttgaaaaatcatcgatatttgaaactgggatacgcttggtagcttttttgttttaacacaaagtaaacctgtgaagtaga

SEQ ID NO: 67286 - DNA, 2173 bp, Homo sapiens
acttggttcattttgtttcctggtggtttgagaagaaagttcctgtggtgaaattgaaaaggggataaagggaagtacttattttaaaacataagtaacttgtggattgttgaatactggaaaaagagtgttacttccccgttaacctacgcctcgtgtaatccttcaggttggaagtcggatcgcagaccgtgtatatgacatacccagaaatttcccccttgctttggatcttggttgtggaagaggttacattgcacaatatttgaataaggaaactattggaaagtttttccaagctgacattgcagaaaatgctttgaaaaattcctcagaaacagaaatacctactgtcagcgttttagctgatgaagaattccttcccttcaaagaaaatacatttgacctggtggttagcagtttaagtttgcattgggtgaatgaccttcctagagcacttgagcagattcattatattttaaaaccagatggagtgtttatcggtgcaatgtttggaggcgacacactctatgaacttcggtgttccttacagttagcggaaacggaaagggaaggaggattttctccacacatttctcctttcactgctgtcaatgacctgggacatctgcttgggagagctggctttaatactctgactgtggacactgatgaaattcaagttaactatcctggaatgtttgaattgatggaagatttacaaggtatgggtgagagtaactgtgcttggaatagaaaagccctgctgcatcgagacacaatgctggcagctgcggcagtgtacagagaaatgtacagaaatgaagatggttcagtacctgctacataccagatctattacatgataggatggaaatatcatgagtcacaggcaagaccagctgaaagaggttccgcaactgtgtcatttggagagctaggaaaaataaacaaccttatgccaccggggaaaaaatcacaataaatatttattcagtgttaatgtcgtccagaattttcatcagaaatggatagctttaacatctaaaattattatattttgaagcaagaagcactctaagctatttactaataggcttttcatataattaggaaaacctaatatcacatctatagtaaccatttcagtttcatattgtttctgttctcataaggatactgctgagtgtctttgcagattcagcctaaaagcaaagaaaatatttccctaaaatatttgcaaataatgttcacatatgtaaatgccttggaaaatattactcatgctgaccttttacacctttttcatttgtcatactgttttctttgccttgaagaggaacagatgaatatgcaccttctccagagttatgtggttttagaatttagaagagcatgtatctttattaaatccctcctcaactctttttttttaaagcatctgaatttaaccttatttcttttttatctccatggtgtgggtgggaccaccatggttttacaccccaccctaccttagggaagaagaaaacattttaaagaataccagaagtagaatcacatgtaacagtctctgcgctttcctttgtaatttcagggcttaaacactattatcctaatccaagttcacagtcctgttgttgtcgaggagggttcaaaatcatttggagataatcaagctcagacagcttaggataggtgagaagaacatagaggaagcagggagaaggctgagaagcaagcaggagtgagcgctaagtgttttgtttccagttagctgttcgctgtcttttccatttaacctgggcactgccctagcctcatcttcagccttcagtgatctataatagcatttccttctgtctcctctcagtctctcttccgccttccttccctcctttactgtattagcaacaagctgtccatgggtgggggctgtgtgttagcctgtacgtagcacatgggactttccacatagtagatattcagttacattttgaactaattatataacaaacttgccctttgaaagactaagttatagttaaaaaccaagatttgtaggagaaaaagaaattattgttcccttcagtttgaaaaatcatcgatatttgaaactgggatacgcttggtagcttttttgttttaacacaaagtaaacctgtgaagtaga

SEQ ID NO: 67287 - DNA, 1273 bp, Homo sapiens
ggcaagcgaactaggccaaactacttgcacgttccctcgagaagatctttggagtagacacaaaagccgcgctggcgcatgcgcacaaaaagcgccggcaattggggtcgcagctggagatgctgcggccggcagggctctggcgcttatgtcggcgaccttgggcggcgagggtcccagcggagaatcttggccgtagggaagtcacctctggtgtctctccccgcggtagcacctcgcccagaaccctgaatattttcgaccgggatttgaaaaggaaacagaagaactgggcagcccggcagcccgagccgaccaaatttgactacctgaaggaggaggttggaagtcggatcgcagaccgtgtatatgacatacccagaaatttcccccttgctttggatcttggttgtggaagaggttacattgcacaatatttgaataaggaaactattggaaagtttttccaagctgacattgcagaaaatgctttgaaaaattcctcagaaacagaaatacctactgtcagcgttttagctgatgaagaattccttcccttcaaagaaaatacatttgacctggtggttagcagtttaagtttgcattgggtgaatgaccttcctagagcacttgagcagattcattatattttaaaaccagatggagtgtttatcggtgcaatgtttggaggcgacacactctatgaacttcggtgttccttacagttagcggaaacggaaagggaaggaggattttctccacacatttctcctttcactgctgtcaatgacctgggacatctgcttgggagagctggctttaatactctgactgtggacactgatgaaattcaagttaactatcctggaatgtttgaattgatggaagatttacaagaacaaaagtccagaatgttgacctaattttacaaaacaagctgcatatcagctgatgaatgcatgagaaattttcaaggctttcacagtggtcttaaggtatgggtgagagtaactgtgcttggaatagaaaagccctgctgcatcgagacacaatgctggcagctgcggcagtgtacagagaaatgtacagaaatgaagatggttcagtacctgctacataccagatctattacatgataggatggaaatatcatgagtcacaggcaagaccagctgaaagaggttccgcaactgtgtcatttggagagctaggaaaaataaacaaccttatgccaccggggaaaaaatcacaataaatatttattcagtgttaa

SEQ ID NO: 67288 - DNA, 1574 bp, Homo sapiens
  misc_feature (1330)..(1330): n is a, c, g, or t
ggcaagcgaactaggccaaactacttgcacgttccctcgagaagatctttggagtagacacaaaagccgcgctggcgcatgcgcacaaaaagcgccggcaattggggtcgcagctggagatgctgcggccggcagggctctggcgcttatgtcggcgaccttgggcggcgagggtcccagcggagaatcttggccgtagggaagtcacctctggtgtctctccccgcggtagcacctcgcccagaaccctgaatattttcgaccgggatttgaaaaggaaacagaagaactgggcagcccggcagcccgagccgaccaaatttgactacctgaaggaggaggttggaagtcggatcgcagaccgtgtatatgacatacccagaaatttcccccttgctttggatcttggttgtggaagaggttacattgcacaatatttgaataaggaaactattggaaagtttttccaagctgacattgcagaaaatgctttgaaaaattcctcagaaacagaaatacctactgtcagcgttttagctgatgaagaattccttcccttcaaagaaaatacatttgacctggtggttagcagtttaagtttgcattgggtgaatgaccttcctagagcacttgagcagattcattatattttaaaaccagatggagtgtttatcggtgcaatgtttggaggcgacacactctatgaacttcggtgttccttacagttagcggaaacggaaagggaaggaggattttctccacacatttctcctttcactgctgtcaatgacctgggacatctgcttgggagagctggctttaatactctgactgtggacactgatgaaattcaagttaactatcctggaatgtttgaattgatggaagatttacaagaacaaaagtccagaatgttgacctaattttacaaaacaagctgcatatcagctgatgaatgcatgagaaattttcaaggctttcacagtggtcttaaggtatgggtgagagtaactgtgcttggaatagaaaagccctgctgcatcgagacacaatgctggcagctgcggcagtgtacagagaaatgtacagaaatgaagatggttcagtacctgctacataccagatctattacatgataggatggaaatatcatgagtcacaggcaagaccagctgaaagaggttccgcaactgtgtcatttggagagctaggaaaaataaacaaccttatgccaccggggaaaaaatcacaataaatatttattcagtgttaaaaaaaaaaaaaaaaaaaactcgagtttttttttttttttttttaaattaataaattnggtaaaatttaagggggggtgtggatgaaaagtggacctaaagggaggggggggaaattaaattgggcgtaggtgacaacgtattgattggaaaaaccctgggtttaaccaagtaaagcggctaaaaactaatccccttttcccctagatggctttaagaaaaagagctttcaccggtcggccttccaaacagatgcgccacctgaatggcggcatgaaaatttggaggcgaaatattttggat

SEQ ID NO: 67289 - DNA, 1329 bp, Homo sapiens
ggcaagcgaactaggccaaactacttgcacgttccctcgagaagatctttggagtagacacaaaagccgcgctggcgcatgcgcacaaaaagcgccggcaattggggtcgcagctggagatgctgcggccggcagggctctggcgcttatgtcggcgaccttgggcggcgagggtcccagcggagaatcttggccgtagggaagtcacctctggtgtctctccccgcggtagcacctcgcccagaaccctgaatattttcgaccgggatttgaaaaggaaacagaagaactgggcagcccggcagcccgagccgaccaaatttgactacctgaaggaggaggttggaagtcggatcgcagaccgtgtatatgacatacccagaaatttcccccttgctttggatcttggttgtggaagaggttacattgcacaatatttgaataaggaaactattggaaagtttttccaagctgacattgcagaaaatgctttgaaaaattcctcagaaacagaaatacctactgtcagcgttttagctgatgaagaattccttcccttcaaagaaaatacatttgacctggtggttagcagtttaagtttgcattgggtgaatgaccttcctagagcacttgagcagattcattatattttaaaaccagatggagtgtttatcggtgcaatgtttggaggcgacacactctatgaacttcggtgttccttacagttagcggaaacggaaagggaaggaggattttctccacacatttctcctttcactgctgtcaatgacctgggacatctgcttgggagagctggctttaatactctgactgtgggaaaagctctgattgacaatgtttagtttgtataacacatcttaattgacacaaggacactgatgaaattcaagttaactatcctggaatgtttgaattgatggaagatttacaagaacaaaagtccagaatgttgacctaattttacaaaacaagctgcatatcagctgatgaatgcatgagaaattttcaaggctttcacagtggtcttaaggtatgggtgagagtaactgtgcttggaatagaaaagccctgctgcatcgagacacaatgctggcagctgcggcagtgtacagagaaatgtacagaaatgaagatggttcagtacctgctacataccagatctattacatgataggatggaaatatcatgagtcacaggcaagaccagctgaaagaggttccgcaactgtgtcatttggagagctaggaaaaataaacaaccttatgccaccggggaaaaaatcacaataaatatttattcagtgttaa

SEQ ID NO: 67290 - DNA, 996 bp, Homo sapiens
ggcaagcgaactaggccaaactacttgcacgttccctcgagaagatctttggagtagacacaaaagccgcgctggcgcatgcgcacaaaaagcgccggcaattggggtcgcagctggagatgctgcggccggcagggctctggcgcttatgtcggcgaccttgggcggcgagggtcccagcggagaatcttggccgtagggaagtcacctctggtgtctctccccgcggtagcacctcgcccagaaccctgaatattttcgaccgggatttgaaaaggaaacagaagaactgggcagcccggcagcccgagccgaccaaatttgactacctgaaggaggaggttggaagtcggatcgcagaccgtgtatatgacatacccagaaatttcccccttgctttggatcttggttgtggaagaggttacattgcacaatatttgaataaggaaactattggaaagtttttccaagctgacattgcagaaaatgctttgaaaaattcctcagaaacagaaatacctactgtcagcgttttagctgatgaagaattccttcccttcaaagaaaatacatttgacctggtggttagcagtttaagtttgcattgggtgaatgaccttcctagagcacttgagcagattcattatattttaaaaccagatggagtgtttatcggtgcaatgtttggaggcgacacactctatgaacttcggtgttccttacagttagcggaaacggaaagggaaggaggattttctccacacatttctcctttcactgctgtcaatgacctgggacatctgcttgggagagctggctttaatactctgactgtggacactgatgaaattcaagttaactatcctggaatgtttgaattgatggaagatttacaaggtaaggcactttaaagaatttttagactccattgggaaaggtaggccaaaaaaaaagaatttttagactccatttgagagaaacattttgagagccagc

SEQ ID NO: 67291 - DNA, 1091 bp, Homo sapiens
ggcaagcgaactaggccaaactacttgcacgttccctcgagaagatctttggagtagacacaaaagccgcgctggcgcatgcgcacaaaaagcgccggcaattggggtcgcagctggagatgctgcggccggcagggctctggcgcttatgtcggcgaccttgggcggcgagggtcccagcggagaatcttggccgtagggaagtcacctctggtgtctctccccgcggtagcacctcgcccagaaccctgaatattttcgaccgggatttgaaaaggaaacagaagaactgggcagcccggcagcccgagccgaccaaatttgactacctgaaggaggaggttggaagtcggatcgcagaccgtgtatatgacatacccagaaatttcccccttgctttggatcttggttgtggaagaggttacattgcacaatatttgaataaggaaactattggaaagtttttccaagctgacattgcagaaaatgctttgaaaaattcctcagaaacagaaatacctactgtcagcgttttagctgatgaagaattccttcccttcaaagaaaatacatttgacctggtggttagcagtttaagtttgcattgggtgaatgaccttcctagagcacttgagcagattcattatattttaaaaccagatggagtgtttatcggtgcaatgtttggaggcgacacactctatgaacttcggtgttccttacagttagcggaaacggaaagggaaggaggattttctccacacatttctcctttcactgctgtcaatgacctgggacatctgcttgggagagctggctttaatactctgactgtggacactgatgaaattcaagttaactatcctggaatgtttgaattgatggaagatttacaagaaatgtacagaaatgaagatggttcagtacctgctacataccagatctattacatgataggatggaaatatcatgagtcacaggcaagaccagctgaaagaggttccgcaactgtgtcatttggagagctaggaaaaataaacaaccttatgccaccggggaaaaaatcacaataaatatttattcagtgttaa

SEQ ID NO: 67292 - DNA, 1053 bp, Homo sapiens
acttggttcattttgtttcctggtggtttgagaagaaagttcctgtggtgaaattgaaaaggggataaagggaagtacttattttaaaacataagtaacttgtggattgttgaatactggaaaaagagtgttacttccccgttaacctacgcctcgtgtaatccttcaggttggaagtcggatcgcagaccgtgtatatgacatacccagaaatttcccccttgctttggatcttggttgtggaagaggttacattgcacaatatttgaataaggaaactattggaaagtttttccaagctgacattgcagaaaatgctttgtttgcattgggtgaatgaccttcctagagcacttgagcagattcattatattttaaaaccagatggagtgtttatcggtgcaatgtttggaggcgacacactctatgaacttcggtgttccttacagttagcggaaacggaaagggaaggaggattttctccacacatttctcctttcactgctgtcaatgacctgggacatctgcttgggagagctggctttaatactctgactgtgggaaaagctctgattgacaatgtttagtttgtataacacatcttaattgacacaaggacactgatgaaattcaagttaactatcctggaatgtttgaattgatggaagatttacaagaacaaaagtccagaatgttgacctaattttacaaaacaagctgcatatcagctgatgaatgcatgagaaattttcaaggctttcacagtggtcttaaggtatgggtgagagtaactgtgcttggaatagaaaagccctgctgcatcgagacacaatgctggcagctgcggcagtgtacagagaaatgtacagaaatgaagatggttcagtacctgctacataccagatctattacatgataggatggaaatatcatgagtcacaggcaagaccagctgaaagaggttccgcaactgtgtcatttggagagctaggaaaaataaacaaccttatgccaccggggaaaaaatcacaataaatatttattcagtgttaa

SEQ ID NO: 67293 - DNA, 2241 bp, Homo sapiens
ggcaagcgaactaggccaaactacttgcacgttccctcgagaagatctttggagtagacacaaaagccgcgctggcgcatgcgcacaaaaagcgccggcaattggggtcgcagctggagatgctgcggccggcagggctctggcgcttatgtcggcgaccttgggcggcgagggtcccagcggagaatcttggccgtagggaagtcacctctggtgtctctccccgcggtagcacctcgcccagaaccctgaatattttcgaccgggatttgaaaaggaaacagaagaactgggcagcccggcagcccgagccgaccaaatttgactacctgaaggaggaggttggaagtcggatcgcagaccgtgtatatgacatacccagaaatttcccccttgctttggatcttggttgtggaagaggttacattgcacaatatttgaataaggaaactattggaaagtttttccaagctgacattgcagaaaatgctttgtttgcattgggtgaatgaccttcctagagcacttgagcagattcattatattttaaaaccagatggagtgtttatcggtgcaatgtttggaggcgacacactctatgaacttcggtgttccttacagttagcggaaacggaaagggaaggaggattttctccacacatttctcctttcactgctgtcaatgacctgggacatctgcttgggagagctggctttaatactctgactgtggacactgatgaaattcaagttaactatcctggaatgtttgaattgatggaagatttacaaggtatgggtgagagtaactgtgcttggaatagaaaagccctgctgcatcgagacacaatgctggcagctgcggcagtgtacagagaaatgtacagaaatgaagatggttcagtacctgctacataccagatctattacatgataggatggaaatatcatgagtcacaggcaagaccagctgaaagaggttccgcaactgtgtcatttggagagctaggaaaaataaacaaccttatgccaccggggaaaaaatcacaataaatatttattcagtgttaatgtcgtccagaattttcatcagaaatggatagctttaacatctaaaattattatattttgaagcaagaagcactctaagctatttactaataggcttttcatataattaggaaaacctaatatcacatctatagtaaccatttcagtttcatattgtttctgttctcataaggatactgctgagtgtctttgcagattcagcctaaaagcaaagaaaatatttccctaaaatatttgcaaataatgttcacatatgtaaatgccttggaaaatattactcatgctgaccttttacacctttttcatttgtcatactgttttctttgccttgaagaggaacagatgaatatgcaccttctccagagttatgtggttttagaatttagaagagcatgtatctttattaaatccctcctcaactctttttttttaaagcatctgaatttaaccttatttcttttttatctccatggtgtgggtgggaccaccatggttttacaccccaccctaccttagggaagaagaaaacattttaaagaataccagaagtagaatcacatgtaacagtctctgcgctttcctttgtaatttcagggcttaaacactattatcctaatccaagttcacagtcctgttgttgtcgaggagggttcaaaatcatttggagataatcaagctcagacagcttaggataggtgagaagaacatagaggaagcagggagaaggctgagaagcaagcaggagtgagcgctaagtgttttgtttccagttagctgttcgctgtcttttccatttaacctgggcactgccctagcctcatcttcagccttcagtgatctataatagcatttccttctgtctcctctcagtctctcttccgccttccttccctcctttactgtattagcaacaagctgtccatgggtgggggctgtgtgttagcctgtacgtagcacatgggactttccacatagtagatattcagttacattttgaactaattatataacaaacttgccctttgaaagactaagttatagttaaaaaccaagatttgtaggagaaaaagaaattattgttcccttcagtttgaaaaatcatcgatatttgaaactgggatacgcttggtagcttttttgttttaacacaaagtaaacctgtgaagtaga

SEQ ID NO: 67294 - DNA, 1153 bp, Homo sapiens
ggcaagcgaactaggccaaactacttgcacgttccctcgagaagatctttggagtagacacaaaagccgcgctggcgcatgcgcacaaaaagcgccggcaattggggtcgcagctggagatgctgcggccggcagggctctggcgcttatgtcggcgaccttgggcggcgagggtcccagcggagaatcttggccgtagggaagtcacctctggtgtctctccccgcggtagcacctcgcccagaaccctgaatattttcgaccgggatttgaaaaggaaacagaagaactgggcagcccggcagcccgagccgaccaaatttgactacctgaaggaggaggttggaagtcggatcgcagaccgtgtatatgacatacccagaaatttcccccttgctttggatcttggttgtggaagaggttacattgcacaatatttgaataaggaaactattggaaagtttttccaagctgacattgcagaaaatgctttgaaaaattcctcagaaacagaaatacctactgtcagcgttttagctgatgaagaattccttcccttcaaagaaaatacatttgacctggtggttagcagtttaagtttgcattgggtgaatgaccttcctagagcacttgagcagatggagtgtttatcggtgcaatgtttggaggcgacacactctatgaacttcggtgttccttacagttagcggaaacggaaagggaaggaggattttctccacacatttctcctttcactgctgtcaatgacctgggacatctgcttgggagagctggctttaatactctgactgtggacactgatgaaattcaagttaactatcctggaatgtttgaattgatggaagatttacaaggtatgggtgagagtaactgtgcttggaatagaaaagccctgctgcatcgagacacaatgctggcagctgcggcagtgtacagagaaatgtacagaaatgaagatggttcagtacctgctacataccagatctattacatgataggatggaaatatcatgagtcacaggcaagaccagctgaaagaggttccgcaactgtgtcatttggagagctaggaaaaataaacaaccttatgccaccggggaaaaaatcacaataaatatttattcagtgttaa

SEQ ID NO: 67295 - DNA, 1166 bp, Homo sapiens
ggcaagcgaactaggccaaactacttgcacgttccctcgagaagatctttggagtagacacaaaagccgcgctggcgcatgcgcacaaaaagcgccggcaattggggtcgcagctggagatgctgcggccggcagggctctggcgcttatgtcggcgaccttgggcggcgagggtcccagcggagaatcttggccgtagggaagtcacctctggtgtctctccccgcggtagcacctcgcccagaaccctgaatattttcgaccgggatttgaaaaggaaacagaagaactgggcagcccggcagcccgagccgaccaaatttgactacctgaaggaggaggttggaagtcggatcgcagaccgtgtatatgacatacccagaaatttcccccttgctttggatcttggttgtggaagaggttacattgcacaatatttgaataaggaaactattggaaagtttttccaagctgacattgcagaaaatgctttgaaaaattcctcagaaacagaaatacctactgtcagcgttttagctgatgaagaattccttcccttcaaagaaaatacatttgacctggtggttagcagtttaagtttgcattgggtgaatgaccttcctagagcacttgagcagattcattatattttaaaaccagatggagtgtttatcggtgcaatgtttggaggcgacacactctatgaacttcggtgttccttacagttagcggaaacggaaagggaaggaggattttctccacacatttctcctttcactgctgtcaatgacctgggacatctgcttgggagagctggctttaatactctgactgtgggaaaagctctgattgacaatgtttagtttgtataacacatcttaattgacacaagaagcaaggggcatgggcaagcagggcccctgatgttggaaaggagcctccagggagggaagaattaacaggctggaggactaggctgggaactgaagagaaccccggaggcttcacacctgtgactagtgttgatcttttgttaacttttaaatggcctgagtccatagaaactgcatcctgagaggttgctcggctagaaagcggaaaaccgcttcacatgagtgctctactttgtaatgaaaataaacactattaatacaggcaattgtaca

SEQ ID NO: 67296 - DNA, 1175 bp, Homo sapiens
ggcaagcgaactaggccaaactacttgcacgttccctcgagaagatctttggagtagacacaaaagccgcgctggcgcatgcgcacaaaaagcgccggcaattggggtcgcagctggagatgctgcggccggcagggctctggcgcttatgtcggcgaccttgggcggcgagggtcccagcggagaatcttggccgtagggaagtcacctctggtgtctctccccgcggtagcacctcgcccagaaccctgaatattttcgaccgggatttgaaaaggaaacagaagaactgggcagcccggcagcccgagccgaccaaatttgactacctgaaggaggaggttggaagtcggatcgcagaccgtgtatatgacatacccagaaatttcccccttgctttggatcttggttgtggaagaggttacattgcacaatatttgaataaggaaactattggaaagtttttccaagctgacattgcagaaaatgctttgaaaaattcctcagaaacagaaatacctactgtcagcgttttagctgatgaagaattccttcccttcaaagaaaatacatttgacctggtggttagcagtttaagtttgcattgggtgaatgaccttcctagagcacttgagcagattcattatattttaaaaccagatggagtgtttatcggtgcaatgtttggaggcgacacactctatgaacttcggtgttccttacagttagcggaaacggaaagggaaggaggattttctccacacatttctcctttcactgctgtcaatgacctgggacatctgcttgggagagctggctttaatactctgactgtggacactgatgaaattcaagttaactatcctggaatgtttgaattgatggaagatttacaaggtatgggtgagagtaactgtgcttggaatagaaaagccctgctgcatcgagacacaatgctggcagctgcggcagtgtacagagaaatgtacagaaatgaagatggttcagtacctgctacataccagatctattacatgataggatggaaatatcatgagtcacaggcaagaccagctgaaagaggttccgcaactgtgtcatttggagagctaggaaaaataaacaaccttatgccaccggggaaaaaatcacaataaatatttattcagtgttaa

SEQ ID NO: 67297 - DNA, 4892 bp, Homo sapiens
ggcagctcggccgactgggcccggagcggcgcggaggccgggcgctgacggtgtgtgtggaggccagtatgaagctgaaaaagcaggtgacagtgtgtggggctgccatcttctgtgtggcagtcttctcgctctacctcatgctggaccgagtgcaacacgatcccacccgacaccagaatggtgggaacttcccccggagccaaatttctgtgctgcagaaccgcattgagcagctggagcagcttttggaggagaaccatgagattatcagccatatcaaggactccgtgctggagctgacagccaacgcagagggcccgcccgccatgctgccctactacacggtcaatggctcctgggtggtgccaccggagccccggcccagcttcttctccatctccccgcaggactgccagtttgctttggggggccggggtcagaagccagagctgcagatgctcactgtgtcggaggagctgccgtttgacaacgtggatggtggtgtgtggaggcaaggcttcgacatctcctacgacccgcacgactgggatgctgaagacctgcaggtgtttgtggtgccccactctcacaatgacccaggctggatcaagacctttgacaagtactacacagagcagacccaacacatcctcaatagcatggtgtctaagctgcaggaggacccccggcggcgcttcctctgggcagaggtctccttcttcgccaagtggtgggacaacatcaatgtccaaaagagagcggcagtccgaaggctggtgggaaacgggcagctggagattgcgacaggaggctgggtgatgccagatgaggccaattcccactactttgcattgattgaccagctcatcgaaggacaccagtggctggagagaaatcttggtgcaaccccccgctctggctgggcagtggacccctttggatacagctccaccatgccttacctgctgcgccgtgccaacctcaccagcatgctgattcagagagtgcactatgccatcaagaagcactttgctgccacccacagcctagagttcatgtggaggcagacatgggactcggactccagcacagacatcttctgtcacatgatgcccttctacagctatgacgtcccccatacctgtggcccagatcccaagatctgctgccaatttgatttcaaacgcctgcctggtgggcgcatcaactgcccttggaaggtgccaccccgggccatcacagaggccaacgtggcagagagggcagccctgcttctggaccaataccggaagaagtcccagctgttccgaagcaacgtcctcctggtgcctcttggagatgacttccgatatgacaagccccaggagtgggatgcccagttcttcaactaccaacggctctttgacttcttcaacagcaggcctaacctccatgtgcaggcccagtttggcactctttctgactattttgatgccctgtacaagaggacaggggtggagccaggggcccggcctccagggtttcctgtgctgagcggggatttcttctcctatgcggaccgggaggatcattactggacaggctattacacttcccggcccttctacaagagcttagaccgagtcctggaagcccacctgcggggggcagaggttctgtacagcctggctgcagctcacgctcgccgctctggtctggctggccggtacccactgtctgatttcaccctcctgacggaagctcggcgcacattggggctcttccagcatcacgatgccatcactggcacggccaaggaggctgtggtggtggactatggggtcaggcttctgcgctcccttgtcaacctgaagcaggtcatcattcatgcagcccactatctggtgctgggggacaaggagacctaccactttgaccctgaggcgcccttcctccaagtggatgacactcgcttaagtcacgacgccctcccagagcgcacggtgatccagctggattcctcgcccaggtttgtggtcctattcaacccactggaacaggagcgattcagcatggtgtccctgctggtcaactctccccgcgtgcgtgtcctttcggaggagggtcagcccctggccgtgcagatcagcgcacactggagctctgccaccgaggcggtccctgacgtctaccaggtgtctgtgcctgtccgcctgccagccctgggcctgggcgtgctgcagctacagctgggcctggatgggcaccgcacgctgccctcctctgtgcgcatctacctgcacggccggcagctgtccgtcagcaggcacgaagcgtttcctctccgtgtcattgactctggcaccagcgacttcgccctcagcaaccgctacatgcaggtctggttctcaggccttactgggctcctcaagagcatccgaagggtggatgaggagcacgagcagcaggtggacatgcaggtccttgtctatggcacccgtacgtccaaagacaagagtggagcctacctcttcctgcccgatggcgaggcaagccctacgtccccaaggagccccccgtgctgcgtgtcactgaaggccctttcttctcagaggtggttgcgtactatgagcacattcaccaggcggtccggctttacaatctgccaggggtggaggggctgtctctggacatatcatccctggtggacatccgggactacgtcaacaaggagctggccctgcacatccatacagacatcgacagccagggtgcagccccgacggtatctgaagaagctccccctccaggccaacttctaccccatgccagtcatggcctatatccaggacgcacagaagcgcctcacgctgcacactgcccaggccctgggtgtctctagcctcaaagatggccagctggaggtgatcttggaccggcggctgatgcaggatgacaaccggggcctaggccaagggctcaaggacaacaagagaacctgcaaccgtttccgcctcctgctagagcggcgaaccgtgggcagtgaggtccaagatagccactctaccagctacccatccctcctcagccacctgacctccatgtacctgaacgccccggcgctcgctctgcctgtagccaggatgcagctcccaggccctggtctgcgctcatttcatcctctggcttcctcactgccctgtgacttccacctgctcaacctacgtacgctccaggctgaggaggacaccctaccctcggcggagaccgcactcatcttacaccgcaagggttttgactgcggcctggaggccaagaacttgggcttcaactgcaccacaagccaaggcaaggtagccctgggcagccttttccatggcctggatgtggtattccttcagccaacctccttgacgttactgtaccctctggcctccccgtccaacagcactgacgtctatttggagcccatggagattgctacctttcgcctccgcttgggttagggcttcttgtggcctgaagagaaagttcattcacagagactgcctcttaacatgaagatcattggacaagccacacgggtatcccatcccgatctgcctcccagaactgtgacacactgggctctgccctcattttctgtttattgctgctgctgtgttttcggcgcaacccacaaacccagtgatgggtaaatagggcagacgccagtgagatcagggagagaaggcccttggtcagagtgggcagtgccaggctctgctttgggttgtgagtggacacccaactgggcacaggctcaggcacccatcctttttccaaacagggatatagaagtggtggaagcagacagaagaggtaagggaggctaagtgggtaacagcccagcatcagggtcactgtggcaacagcaggctctaggggaatcctgtggttatgtagagactccatgtcctggtgtgatgagcaggatcagagtgactctgggaggacaggggtggggacccagagttagcagtggggatggagcagtagaaggaatcactgtttctcctaggagtctgaaggcctcgctgctttctgtgatggctttgcagtaagtgccgcctggcctgcatgcattggctaacaggctgcagaatggcaggaaggactcgctagagattgtcatggccagagatcataggtcacttcaggtagcaagacccctggcaaactgggcacttggcctatgtactgatttgtgggatggtggcaggggtgtggggtccttcaccctgcctgaattctctttggcttctgtgctctgtatgctgctgtccccaagggctctttcttattatggcagggagtggggattggtcctactttctttctctggaaaggaaagcctccaagactccatgtgcttgggcagcttgagaaggcgttcagcaccacgcctagcaggcagaccttgaagcctcacctttagtctatctgcagaggtattcagttcctggcacaggggactaggggcatgtagagtatatgaggaggcagtatggctgtgcaggagccttcatttcagcttcaattaatagggaagaatttatgatagctctatagatgctgaaaaggtatttcgtaagatttaaaatccatcccttattaaaactcttagtaaattaagtctggaaagaaacaccctaatctagataaaggtctgtttcagaaaccaacagtgatggcattctaaagagtcagacgccacaggcattcccattaaagtcagaaactagccaagggcaagctattattcagcagtgtcccggcactactaacccctgcaacaagccagatgaggaacataaggaagaattataattgtcattatttgtagacaataaaactgcctacctgtaaaa

SEQ ID NO: 67298 - DNA, 1985 bp, Homo sapiens
gcgtcgacgtagcagatttagtgatttgaggccccaagtagaggccccatactatttttgtccatacagcatcagatactgtccatgggctacacatactatatgtgtcctctgcctacacaacgatggcagtattattagcaacacttgtctttttactaaataaatgtgtattatatccccttgagtctgagcacgggctgggatttctaagataacatatggaattgtttaatgatggtcataccaaggatcctctggcttcctcactgccctgtgacttccacctgctcaacctacgtacgctccaggctgaggaggacaccctaccctcggcggagaccgcactcatcttacaccgcaagggttttgactgcggcctggaggccaagaacttgggcttcaactgcaccacaagccaaggcaaggtagccctgggcagccttttccatggcctggatgtggtattccttcagccaacctccttgacgttactgtaccctctggcctccccgtccaacagcactgacgtctatttggagcccatggagattgctacctttcgcctccgcttgggttagggcttcttgtggcctgaagagaaagttcattcacagagactgcctcttaacatgaagatcattggacaagccacacgggtatcccatcccgatctgcctcccagaactgtgacacactgggctctgccctcattttctgtttattgctgctgctgtgttttcggcgcaacccacaaacccagtgatgggtaaatagggcagacgccagtgagatcagggagagaaggcccttggtcagagtgggcagtgccaggctctgctttgggttgtgagtggacacccaactgggcacaggctcaggcacccatcctttttccaaacagggatatagaagtggtggaagcagacagaagaggtaagggaggctaagtgggtaacagcccagcatcagggtcactgtggcaacagcaggctctaggggaatcctgtggttatgtagagactccatgtcctggtgtgatgagcaggatcagagtgactctgggaggacaggggtggggacccagagttagcagtggggatggagcagtagaaggaatcactgtttctcctaggagtctgaaggcctcgctgctttctgtgatggctttgcagtaagtgccgcctggcctgcatgcattggctaacaggctgcagaatggcaggaaggactcgctagagattgtcatggccagagatcataggtcacttcaggtagcaagacccctggcaaactgggcacttggcctatgtactgatttgtgggatggtggcaggggtgtggggtccttcaccctgcctgaattctctttggcttctgtgctctgtatgctgctgtccccaagggctctttcttattatggcagggagtggggattggtcctactttctttctctggaaaggaaagcctccaagactccatgtgcttgggcagcttgagaaggcgttcagcaccacgcctagcaggcagaccttgaagcctcacctttagtctatctgcagaggtattcagttcctggcacaggggactaggggcatgtagagtatatgaggaggcagtatggctgtgcaggagccttcatttcagcttcaattaatagggaagaatttatgatagctctatagatgctgaaaaggtatttcgtaagatttaaaatccatcccttattaaaactcttagtaaattaagtctggaaagaaacaccctaatctagataaaggtctgtttcagaaaccaacagtgatggcattctaaagagtcagacgccacaggcattcccattaaagtcagaaactagccaagggcaagctattattcagcagtgtcccggcactactaacccctgcaacaagccagatgaggaacataaggaagaattataattgtcattatttgtagacaataaaactgcctacctgtaaaa

SEQ ID NO: 67299 - DNA, 4917 bp, Homo sapiens
ggcagctcggccgactgggcccggagcggcgcggaggccgggcgctgacggtgtgtgtggaggccagtatgaagctgaaaaagcaggtgacagtgtgtggggctgccatcttctgtgtggcagtcttctcgctctacctcatgctggaccgagtgcaacacgatcccacccgacaccagaatggtgggaacttcccccggagccaaatttctgtgctgcagaaccgcattgagcagctggagcagcttttggaggagaaccatgagattatcagccatatcaaggactccgtgctggagctgacagccaacgcagagggcccgcccgccatgctgccctactacacggtcaatggctcctgggtggtgccaccggagccccggcccagcttcttctccatctccccgcaggactgccagtttgctttggggggccggggtcagaagccagagctgcagatgctcactgtgtcggaggagctgccgtttgacaacgtggatggtggtgtgtggaggcaaggcttcgacatctcctacgacccgcacgactgggatgctgaagacctgcaggtgtttgtggtgccccactctcacaatgacccaggctggatcaagacctttgacaagtactacacagagcagacccaacacatcctcaatagcatggtgtctaagctgcaggaggacccccggcggcgcttcctctgggcagaggtctccttcttcgccaagtggtgggacaacatcaatgtccaaaagagagcggcagtccgaaggctggtgggaaacgggcagctggagattgcgacaggaggctgggtgatgccagatgaggccaattcccactactttgcattgattgaccagctcatcgaaggacaccagtggctggagagaaatcttggtgcaaccccccgctctggctgggcagtggacccctttggatacagctccaccatgccttacctgctgcgccgtgccaacctcaccagcatgctgattcagagagtgcactatgccatcaagaagcactttgctgccacccacagcctagagttcatgtggaggcagacatgggactcggactccagcacagacatcttctgtcacatgatgcccttctacagctatgacgtcccccatacctgtggcccagatcccaagatctgctgccaatttgatttcaaacgcctgcctggtgggcgcatcaactgcccttggaaggtgccaccccgggccatcacagaggccaacgtggcagagagggcagccctgcttctggaccaataccggaagaagtcccagctgttccgaagcaacgtcctcctggtgcctcttggagatgacttccgatatgacaagccccaggagtgggatgcccagttcttcaactaccaacggctctttgacttcttcaacagcaggcctaacctccatgtgcaggcccagtttggcactctttctgactattttgatgccctgtacaagaggacaggggtggagccaggggcccggcctccagggtttcctgtgctgagcggggatttcttctcctatgcggaccgggaggatcattactggacaggctattacacttcccggcccttctacaagagcttagaccgagtcctggaagcccacctgcggggggcagaggttctgtacagcctggctgcagctcacgctcgccgctctggtctggctggccggtacccactgtctgatttcaccctcctgacggaagctcggcgcacattggggctcttccagcatcacgatgccatcactggcacggccaaggaggctgtggtggtggactatggggtcaggcttctgcgctcccttgtcaacctgaagcaggtcatcattcatgcagcccactatctggtgctgggggacaaggagacctaccactttgaccctgaggcgcccttcctccaagtggatgacactcgcttaagtcacgacgccctcccagagcgcacggtgatccagctggattcctcgcccaggtttgtggtcctattcaacccactggaacaggagcgattcagcatggtgtccctgctggtcaactctccccgcgtgcgtgtcctttcggaggagggtcagcccctggccgtgcagatcagcgcacactggagctctgccaccgaggcggtccctgacgtctaccaggtgtctgtgcctgtccgcctgccagccctgggcctgggcgtgctgcagctacagctgggcctggatgggcaccgcacgctgccctcctctgtgcgcatctacctgcacggccggcagctgtccgtcagcaggcacgaagcgtttcctctccgtgtcattgactctggcaccagcgacttcgccctcagcaaccgctacatgcaggtctggttctcaggccttactgggctcctcaaggggtcagggctgtgttttttggcagagcatccgaagggtggatgaggagcacgagcagcaggtggacatgcaggtccttgtctatggcacccgtacgtccaaagacaagagtggagcctacctcttcctgcccgatggcgaggcaagccctacgtccccaaggagccccccgtgctgcgtgtcactgaaggccctttcttctcagaggtggttgcgtactatgagcacattcaccaggcggtccggctttacaatctgccaggggtggaggggctgtctctggacatatcatccctggtggacatccgggactacgtcaacaaggagctggccctgcacatccatacagacatcgacagccagggtgcagccccgacggtatctgaagaagctccccctccaggccaacttctaccccatgccagtcatggcctatatccaggacgcacagaagcgcctcacgctgcacactgcccaggccctgggtgtctctagcctcaaagatggccagctggaggtgatcttggaccggcggctgatgcaggatgacaaccggggcctaggccaagggctcaaggacaacaagagaacctgcaaccgtttccgcctcctgctagagcggcgaaccgtgggcagtgaggtccaagatagccactctaccagctacccatccctcctcagccacctgacctccatgtacctgaacgccccggcgctcgctctgcctgtagccaggatgcagctcccaggccctggtctgcgctcatttcatcctctggcttcctcactgccctgtgacttccacctgctcaacctacgtacgctccaggctgaggaggacaccctaccctcggcggagaccgcactcatcttacaccgcaagggttttgactgcggcctggaggccaagaacttgggcttcaactgcaccacaagccaaggcaaggtagccctgggcagccttttccatggcctggatgtggtattccttcagccaacctccttgacgttactgtaccctctggcctccccgtccaacagcactgacgtctatttggagcccatggagattgctacctttcgcctccgcttgggttagggcttcttgtggcctgaagagaaagttcattcacagagactgcctcttaacatgaagatcattggacaagccacacgggtatcccatcccgatctgcctcccagaactgtgacacactgggctctgccctcattttctgtttattgctgctgctgtgttttcggcgcaacccacaaacccagtgatgggtaaatagggcagacgccagtgagatcagggagagaaggcccttggtcagagtgggcagtgccaggctctgctttgggttgtgagtggacacccaactgggcacaggctcaggcacccatcctttttccaaacagggatatagaagtggtggaagcagacagaagaggtaagggaggctaagtgggtaacagcccagcatcagggtcactgtggcaacagcaggctctaggggaatcctgtggttatgtagagactccatgtcctggtgtgatgagcaggatcagagtgactctgggaggacaggggtggggacccagagttagcagtggggatggagcagtagaaggaatcactgtttctcctaggagtctgaaggcctcgctgctttctgtgatggctttgcagtaagtgccgcctggcctgcatgcattggctaacaggctgcagaatggcaggaaggactcgctagagattgtcatggccagagatcataggtcacttcaggtagcaagacccctggcaaactgggcacttggcctatgtactgatttgtgggatggtggcaggggtgtggggtccttcaccctgcctgaattctctttggcttctgtgctctgtatgctgctgtccccaagggctctttcttattatggcagggagtggggattggtcctactttctttctctggaaaggaaagcctccaagactccatgtgcttgggcagcttgagaaggcgttcagcaccacgcctagcaggcagaccttgaagcctcacctttagtctatctgcagaggtattcagttcctggcacaggggactaggggcatgtagagtatatgaggaggcagtatggctgtgcaggagccttcatttcagcttcaattaatagggaagaatttatgatagctctatagatgctgaaaaggtatttcgtaagatttaaaatccatcccttattaaaactcttagtaaattaagtctggaaagaaacaccctaatctagataaaggtctgtttcagaaaccaacagtgatggcattctaaagagtcagacgccacaggcattcccattaaagtcagaaactagccaagggcaagctattattcagcagtgtcccggcactactaacccctgcaacaagccagatgaggaacataaggaagaattataattgtcattatttgtagacaataaaactgcctacctgtaaaa

SEQ ID NO: 67300 - DNA, 4737 bp, Homo sapiens
ggcagctcggccgactgggcccggagcggcgcggaggccgggcgctgacggtgtgtgtggaggccagtatgaagctgaaaaagcaggtgacagtgtgtggggctgccatcttctgtgtggcagtcttctcgctctacctcatgctggaccgagtgcaacacgatcccacccgacaccagaatggtgggaacttcccccggagccaaatttctgtgctgcagaaccgcattgagcagctggagcagcttttggaggagaaccatgagattatcagccatatcaaggactccgtgctggagctgacagccaacgcagagggcccgcccgccatgctgccctactacacggtcaatggctcctgggtggtgccaccggagccccggcccagcttcttctccatctccccgcaggactgccagtttgctttggggggccggggtcagaagccagagctgcagatgctcactgtgtcggaggagctgccgtttgacaacgtggatggtggtgtgtggaggcaaggcttcgacatctcctacgacccgcacgactgggatgctgaagacctgcaggtgtttgtggtgccccactctcacaatgacccaggctggatcaagacctttgacaagtactacacagagcagacccaacacatcctcaatagcatggtgtctaagctgcaggaggacccccggcggcgcttcctctgggcagaggtctccttcttcgccaagtggtgggacaacatcaatgtccaaaagagagcggcagtccgaaggctggtgggaaacgggcagctggagattgcgacaggaggctgggtgatgccagatgaggccaattcccactactttgcattgattgaccagctcatcgaaggacaccagtggctggagagaaatcttggtgcaaccccccgctctggctgggcagtggacccctttggatacagctccaccatgccttacctgctgcgccgtgccaacctcaccagcatgctgattcagagagtgcactatgccatcaagaagcactttgctgccacccacagcctagagttcatgtggaggcagacatgggactcggactccagcacagacatcttctgtcacatgatgcccttctacagctatgacgtcccccatacctgtggcccagatcccaagatctgctgccaatttgatttcaaacgcctgcctggtgggcgcatcaactgcccttggaaggtgccaccccgggccatcacagaggccaacgtggcagagagggcagccctgcttctggaccaataccggaagaagtcccagctgttccgaagcaacgtcctcctggtgcctcttggagatgacttccgatatgacaagccccaggagtgggatgcccagttcttcaactaccaacggctctttgacttcttcaacagcaggcctaacctccatgtgcaggcccagtttggcactctttctgactattttgatgccctgtacaagaggacaggggtggagccaggggcccggcctccagggtttcctgtgctgagcggggatttcttctcctatgcggaccgggaggatcattactggacaggctattacacttcccggcccttctacaagagcttagaccgagtcctggaagcccacctgcggggggcagaggttctgtacagcctggctgcagctcacgctcgccgctctggtctggctggccggtacccactgtctgatttcaccctcctgacggaagctcggcgcacattggggctcttccagcatcacgatgccatcactggcacggccaaggaggctgtggtggtggactatggggtcaggcttctgcgctcccttgtcaacctgaagcaggtcatcattcatgcagcccactatctggtgctgggggacaaggagacctaccactttgaccctgaggcgcccttcctccaagtggatgacactcgcttaagtcacgacgccctcccagagcgcacggtgatccagctggattcctcgcccaggtttgtggtcctattcaacccactggaacaggagcgattcagcatggtgtccctgctggtcaactctccccgcgtgcgtgtcctttcggaggagggtcagcccctggccgtgcagatcagcgcacactggagctctgccaccgaggcggtccctgacgtctaccaggtgtctgtgcctgtccgcctgccagccctgggcctgggcgtgctgcagctacagctgggcctggatgggcaccgcacgctgccctcctctgtgcgcatctacctgcacggccggcagctgtccgtcagcaggcacgaagcgtttcctctccgtgtcattgactctggcaccagcgacttcgccctcagcaaccgctacatgcaggtctggttctcaggccttactgggctcctcaaggggtcagggctgtgttttttggcagagcatccgaagggtggatgaggagcacgagcagcaggtggacatgcaggtccttgtctatggcacccgtacgtccaaagacaagagtggagcctacctcttcctgcccgatggcgaggcaagccctacgtccccaaggagccccccgtgctgcgtgtcactgaaggccctttcttctcagaggtggttgcgtactatgagcacattcaccaggcggtccggctttacaatctgccaggggtggaggggctgtctctggacatatcatccctggtggacatccgggactacgtcaacaaggagctggccctgcacatccatacagacatcgacagccagggtatcttcttcacagacctcaatggctttcaggtgcagccccgacggtatctgaagaagctccccctccaggccaacttctaccccatgccagtcatggcctatatccaggacgcacagctacccatccctcctcagccacctgacctccatgtacctgaacgccccggcgctcgctctgcctgtagccaggatgcagctcccaggccctggtctgcgctcatttcatcctctggcttcctcactgccctgtgacttccacctgctcaacctacgtacgctccaggctgaggaggacaccctaccctcggcggagaccgcactcatcttacaccgcaagggttttgactgcggcctggaggccaagaacttgggcttcaactgcaccacaagccaaggcaaggtagccctgggcagccttttccatggcctggatgtggtattccttcagccaacctccttgacgttactgtaccctctggcctccccgtccaacagcactgacgtctatttggagcccatggagattgctacctttcgcctccgcttgggttagggcttcttgtggcctgaagagaaagttcattcacagagactgcctcttaacatgaagatcattggacaagccacacgggtatcccatcccgatctgcctcccagaactgtgacacactgggctctgccctcattttctgtttattgctgctgctgtgttttcggcgcaacccacaaacccagtgatgggtaaatagggcagacgccagtgagatcagggagagaaggcccttggtcagagtgggcagtgccaggctctgctttgggttgtgagtggacacccaactgggcacaggctcaggcacccatcctttttccaaacagggatatagaagtggtggaagcagacagaagaggtaagggaggctaagtgggtaacagcccagcatcagggtcactgtggcaacagcaggctctaggggaatcctgtggttatgtagagactccatgtcctggtgtgatgagcaggatcagagtgactctgggaggacaggggtggggacccagagttagcagtggggatggagcagtagaaggaatcactgtttctcctaggagtctgaaggcctcgctgctttctgtgatggctttgcagtaagtgccgcctggcctgcatgcattggctaacaggctgcagaatggcaggaaggactcgctagagattgtcatggccagagatcataggtcacttcaggtagcaagacccctggcaaactgggcacttggcctatgtactgatttgtgggatggtggcaggggtgtggggtccttcaccctgcctgaattctctttggcttctgtgctctgtatgctgctgtccccaagggctctttcttattatggcagggagtggggattggtcctactttctttctctggaaaggaaagcctccaagactccatgtgcttgggcagcttgagaaggcgttcagcaccacgcctagcaggcagaccttgaagcctcacctttagtctatctgcagaggtattcagttcctggcacaggggactaggggcatgtagagtatatgaggaggcagtatggctgtgcaggagccttcatttcagcttcaattaatagggaagaatttatgatagctctatagatgctgaaaaggtatttcgtaagatttaaaatccatcccttattaaaactcttagtaaattaagtctggaaagaaacaccctaatctagataaaggtctgtttcagaaaccaacagtgatggcattctaaagagtcagacgccacaggcattcccattaaagtcagaaactagccaagggcaagctattattcagcagtgtcccggcactactaacccctgcaacaagccagatgaggaacataaggaagaattataattgtcattatttgtagacaataaaactgcctacctgtaaaa

SEQ ID NO: 67301 - DNA, 4204 bp, Homo sapiens
ggcagctcggccgactgggcccggagcggcgcggaggccgggcgctgacggtgtgtgtggaggccagtatgaagctgaaaaagcaggtgacagtgtgtggggctgccatcttctgtgtggcagtcttctcgctctacctcatgctggaccgagtgcaacacgatcccacccgacaccagaatggtgggaacttcccccggagccaaatttctgtgctgcagaaccgcattgagcagctggagcagcttttggaggagaaccatgagattatcagccatatcaaggactccgtgctggagctgacagccaacgcagagggcccgcccgccatgctgccctactacacggtcaatggctcctgggtggtgccaccggagccccggcccagcttcttctccatctccccgcaggactgccagtttgctttggggggccggggtcagaagccagagctgcagatgctcactgtgtcggaggagctgccgtttgacaacgtggatggtggtgtgtggaggcaaggcttcgacatctcctacgacccgcacgactgggatgctgaagacctgcaggtgtttgtggtgccccactctcacaatgacccaggctggatcaagacctttgacaagtactacacagagcagacccaacacatcctcaatagcatggtgtctaagctgcaggaggacccccggcggcgcttcctctgggcagaggtctccttcttcgccaagtggtgggacaacatcaatgtccaaaagagagcggcagtccgaaggctggtgggaaacgggcagctggagattgcgacaggaggctgggtgatgccagatgaggccaattcccactactttgcattgattgaccagctcatcgaaggacaccagtggctggagagaaatcttggtgcaaccccccgctctggctgggcagtggacccctttggatacagctccaccatgccttacctgctgcgccgtgccaacctcaccagcatgctgattcagagagtgcactatgccatcaagaagcactttgctgccacccacagcctagagttcatgtggaggcagacatgggactcggactccagcacagacatcttctgtcacatgatgcccttctacagctatgacgtcccccatacctgtggcccagatcccaagatctgctgccaatttgatttcaaacgcctgcctggtgggcgcatcaactgcccttggaaggtgccaccccgggccatcacagaggccaacgtggcagagagggcagccctgcttctggaccaataccggaagaagtcccagctgttccgaagcaacgtcctcctggtgcctcttggagatgacttccgatatgacaagccccaggagtgggatgcccagttcttcaactaccaacggctctttgacttcttcaacagcaggcctaacctccatgtgcaggcccagtttggcactctttctgactattttgatgccctgtacaagaggacaggggtggagccaggggcccggcctccagggtttcctgtgctgagcggggatttcttctcctatgcggaccgggaggatcattactggacaggctattacacttcccggcccttctacaagagcttagaccgagtcctggaagcccacctgcggggggcagaggttctgtacagcctggctgcagctcacgctcgccgctctggtctggctggccggtacccactgtctgatttcaccctcctgacggaagctcggcgcacattggggctcttccagcatcacgatgccatcactggcacggccaaggaggctgtggtggtggactatggggtcaggcttctgcgctcccttgtcaacctgaagcaggtcatcattcatgcagcccactatctggtgctgggggacaaggagacctaccactttgaccctgaggcgcccttcctccaagtggatgacactcgcttaagtcacgacgccctcccagagcgcacggtgatccagctggattcctcgcccaggtttgtggtcctattcaacccactggaacaggagcgattcagcatggtgtccctgctggtcaactctccccgcgtgcgtgtcctttcggaggagggtcagcccctggccgtgcagatcagcgcacactggagctctgccaccgaggcggtccctgacgtctaccaggtgtctgtgcctgtccgcctgccagccctgggcctgggcgtgctgcagctacagctgggcctggatgggcaccgcacgctgccctcctctgtgcgcatctacctgcacggccggcagctgtccgtcagcaggcacgaagcgtttcctctccgtgtcattgactctggcaccagcgacttcgccctcagcaaccgctacatgcaggtctggttctcaggccttactgggctcctcaaggggtcagggctgtgttttttggcagagcatccgaagggtggatgaggagcacgagcagcaggtggacatgcaggtccttgtctatggcacccgtacgtccaaagacaagagtggagcctacctcttcctgcccgatggcgaggcaagccctacgtccccaaggagccccccgtgctgcgtgtcactgaaggccctttcttctcagaggtggttgcgtactatgagcacattcaccaggcggtccggctttacaatctgccaggggtggaggggctgtctctggacatatcatccctggtggacatccgggactacgtcaacaaggagctggccctgcacatccatacagacatcgacagccagggtatcttcttcacagacctcaatggctttcaggtgcagccccgacggtatctgaagaagctccccctccaggccaacttctaccccatgccagtcatggcctatatccaggacgcacagctacccatccctcctcagccacctgacctccatgtacctgaacgccccggcgctcgctctgcctgtagccaggatgcagctcccaggccctggtctgcgctcatttcatcctctggcttcctcactgccctgtgacttccacctgctcaacctacgtacgctccaggctgaggaggacaccctaccctcggcggagaccgcactcatcttacaccgcaagggttttgactgcggcctggaggccaagaacttgggcttcaactgcaccacaagccaaggcaaggtagccctgggcagccttttccatggcctggatgtggtattccttcagccaacctccttgacgttactgtaccctctggcctccccgtccaacagcactgacgtctatttggagcccatggagattgctacctttcgcctccgcttgggttagggcttcttgtggcctgaagagaaagttcattcacagagactgcctcttaacatgaagatcattggacaagccacacgggtatcccatcccgatctgcctcccagaactgtgacacactgggctctgccctcattttctgtttattgctgctgctgtgttttcggcgcaacccacaaacccagtgatgggtaaatagggcagacgccagtgagatcagggagagaaggcccttggtcagagtgggcagtgccaggctctgctttgggttgtgagtggacacccaactgggcacaggctcaggcacccatcctttttccaaacagggatatagaagtggtggaagcagacagaagaggtaagggaggctaagtgggtaacagcccagcatcagggtcactgtggcaacagcaggctctaggggaatcctgtggttatgtagagactccatgtcctggtgtgatgagcaggatcagagtgactctgggaggacaggggtggggacccagagttagcagtggggatggagcagtagaaggaatcactgtttctcctaggagtctgaaggcctcgctgctttctgtgatggctttgcagtaagtgccgcctggcctgcatgcattggctaacaggctgcagaatggcaggaaggactcgctagagattgtcatggccagagatcataggtcacttcaggtagcaagacccctggcaaactgggcacttggcctatgtactgatttgtgggatggtggcaggggtgtggggtccttcaccctgcctgaattctctttggcttctgtgctctgtatgctgctgtccccaagggctctttcttattatggcagggtaaggctccctaaggtccgctaga

SEQ ID NO: 67302 - DNA, 218 bp, Homo sapiens
ctcaaatcccgccaaagagcccaagcagtcctggcttttcctctcaaacatcagcctgctcagaaccaaaccagttgtgcacgagcagagaccaaaagaaggctgacttttgattctcttgttctgcttggtccccaccccgagtctggggagtcggttagagcactaggctgagggaggtgtgtttgaagtgggaaccaattgtcagttgattgagt

SEQ ID NO: 67303 - DNA, 423 bp, Homo sapiens
gaaaggaacagaagaaaattcttcataagttcctcatactataaaagacaacaatgtaagtactaatttgacaatattctttttttagatttatatatatatttttttaattatactttaagctctgggatacatgtgcagaacgtgcagctttgttacctaggtatacacatgccatggtggtttgctgcacccatcaacccatcgtctacattaagtatttctcctaatgctatccctcacctatcccctcactccctgacaggccccactgtgtgatgttccccttcctgtgtccacgtgttctcactgttccactcccatttatgaatgagaacatgcggtgtttggttttctgttcctgtgttagtttgctgagaatgatggtttccagcttcatctatgtccctgcaagggtcatga

SEQ ID NO: 67304 - DNA, 874 bp, Homo sapiens
tgtacaagaacttagtttgcctatctgagcaaattttacattcactagtgaatgcccatgtgaaagacaagcaggaaacttccaggggccaaggggcttagaaccaactgaactggtacaaaataaacattaggtatttcagtacgtagagtttgtggacaaaaagaataggctcttaccaattactatgctactagaatatccaattttgcttttaccaagccttagtgaaaagtgaatgaattctaacaagaagactcaaagacactggtgctccccctgtgtctcccttcacttattctgcatggtcagcacctcttcaaaagaccaataataatggtcccctacaagaagtatacaattgctcctctgatgtgaaagcatatgaagaaaataagtgtccaaagctgcataaatatttgcacccctttgagagtatgagaaagtgtgtgttttatgttgtgattgataggacaactttcatggcccactttgaactcttagcaggaactttggaatgtcctgagggtctgtctgcctttgtatggcaggaactctgttttcttagaaaatagtaaagaacagtttgtactcctttgttctaaagggtacctatagtttatgggaattggggaacttagtagaaaaatcaccaacgctctcatgtttctcataaaaaatgctcagctttatttggaaactttggccattgttttctttttcttctttcttcttctccttcctcttttgagttaaaaaggccacagtctgacctacttatatgtgtgatgaaatgtgcagactctgccaaggctatttattctaatgatttatctactcaagataaaaagaaataaagtgaagacaaatctga

SEQ ID NO: 67305 - DNA, 649 bp, Homo sapiens
gatcaattgcagggacctattggactatggggaaaatgagatggttctactcctgtattttaaagtcttccttttccttttggtttctttagtttgtagttaaggctttgcagacttgcatcccataatgtcttcttttctttcattttttttattttttgagacagagtctcactttgtcacccaggctggagtacagtggtgcgatcatagctcactgcagccttgaactcctggactcaagcagtcctcccacctcagcctcctgaatagctgaatacaggcatgcgctaccatacctggctaattattattattgtttttgtagaaatggggtcttgctctatagcccaggctggtcttgaactcctgggctcaagccatcctcctgccctggcctcccaaagtgctgggattataggcatgagccacggtgcccagcctttgtcttagtttttggtccccctcacccgaccccagagttctagaaccattcccttgcaaagaaagggactgctcacggctggggatggagaagtgctgtggtaggagccctttcttctctttcttccccagctggatcgccaaacctaccctgcggtcgtcgtcttcctggccccatagctcctcctcaccaagcatgtcttcc

SEQ ID NO: 67306 - DNA, 450 bp, Homo sapiens
acatctgtgcatcactgctcccttgctctctaagtgagaaaattcagaaagaagctgaaaacaaggtctacaaaatagcaagaattaaaggtaactctgatgtagataacgttatcttggcagggcacagtggctcatgcctgtaatcccagtactttgggaggcgaaggcaggcagatcgcttgaccccaggagtttgagaccagcctgggcaaaacagcaaaacctcgtctctgtctctctctctctctctctctctctctctatatatatatatatatatgcacaaaaattaacctggtgtggtggcgcacacctgtagccccagctacttgggaggctaaggtgggaggatggcttaagcccaggaggcagaggctgcaggcagctgagatcatgccactgcactccagcctgggtgacagagccagatcctgtcccaaaaacaaa

SEQ ID NO: 67307 - DNA, 347 bp, Homo sapiens
ttcttgagttattaagatttttgtgtttttgaaaagagagtctcaccaaattgcccagactagacttgaactcctgagctcaactgatcctccggcctcagcctcctgggtagctgggactataagctcataccaccatgcctggctgtagagttttttttttgttttgtttctaatcattcaagccagacattttcatgggtgccatattaaaatatttcatatttagataatgtaataaaaatacagtacagtaaacagcattatactatgcattattcggtttctgaagtttagctaaaggagacaactaagttcaggagactgtcagctgactgacctctgaa

SEQ ID NO: 67308 - DNA, 319 bp, Homo sapiens
ggtactagaaggagtgtggaagcatgcctctgggttcacaggggttgcaatcccaaatgtctgcagaggctggaaacacaacttacgtggaagccaggcatggtggtgtgcgcctgtagtcctagctacttgggaggctgaggcagaaggattatttgagcctgggaggttgaggctgcagtgagttatgatggtaccacagcactccagcctgggtgacagagagagatcctgtctctaaaaaaataataataataaattcaaatgaataataaaaataatgagaagaagataatgtacatgggtacctatggtacca

SEQ ID NO: 67309 - DNA, 823 bp, Homo sapiens
cacgcagagaagggattggaaacagtagcccggagaggaggctctcttggtaggatcccacggcaaccgaatggatgcacgttgtttatgacgttcttacccatgaaagcgctcaaggatccgcttgcttgcttacatgtgggatcagcactaccttccgtgctgccgaacatcttcttaagcgagggaaagaacaaaaagaaaagttggcaagaaagaaagggcaaagacagagagactgggagagaaagaggccccaatttcctctctctggtagttgctgaattggctctcgtgaaggcagaaagggaagggctgacttatgtccctctgccaggagaggggaaaggagggaggcatgatattgacttaaacgtgggggatttaaaaggcccctatgttcccactttgtgctttgcttctaacagacagcctgggacctttgaagtcggtctggcccagtggggagcgggcttctgtggagacaagatgctaacgggggcgggggaagggggccagggggcggccgaaactctattaggcatgctctagcaaaaagaaaggcaaatccaatgataatgtacatctgtttcagggaatttataagctttgaacattttttatgggcagataagtgggtccttttcttaccataacttagaacttcaaagctgagtgtgtggataatgcaaattgctgaaatatgagattttccctacaaagaggtttccaaaaaagacgaggaagaaaaagaggggggggggagagagaacgaaggctaactgatgccacagtcttttatgtacatggcaaaaacgggaca

SEQ ID NO: 67310 - DNA, 479 bp, Homo sapiens
agccaggtgttttctttcagaggcacacacaatgtaccagtctctaaacacctgcaacagccctcctaacgcccactgggaagtggggaaaggtgtggcacagtgactgacctttagccagctccctccttctaggaatcaggtgccatgctggggacgatcctatgtgtagactccattttatagagatgggaagtcagaaaatgctagaatcaagacttaaaactcagctttttgattctcaagttcatgagagcagacattatttcattaattcactccatacatatttattaaaggagtctcaatggataatctgagttggcttcagggtggtttatgaagcagagaagtaaaatgctttactaagtcacatggctagagaatgcatttaacttgcattatacatttagacacctttctctggtaggactgactcagagcccatttaaaataaattcaaggccgggtgtggtagc

SEQ ID NO: 67311 - DNA, 510 bp, Homo sapiens
tataaatatcattatgcttttgcttaactggggcaaaaatcatgtgcattatttcagtgtctgcttttaaaagtagatggtagtattttattttcagttaggtgaagcagaaaaatgtatccagcaaagtcttcattaaaaagcttaagatggctagaactaaatatacattgaacacaattactaatttatcaaatatgtttgcatgttggtcagtatatacaataaaaaatagtgtttaatttgaaatgttaaaaccctctctaggtccaaaaaatagaatggatgagacctactatttgatagcacagcagggtgactttagtcagtaataactatacatttaaaaataacttaaaagagtgtcattggattgtttgtaacccaatggataaatgagaggatggagaccttattctccacagtgtgctgctttcacattgcatgcctgtatcaaaacatctcatgtgcctcataaatatatacacctactatgtactcaaaaaatta

SEQ ID NO: 67312 - DNA, 496 bp, Homo sapiens
acccacatcattttataaacaaaaaatggtcattcagagaaaaggttccttcagtgtctctgctgctgttccttagtgagaaaatgacttctaaaagggaggcaaagaggcatgagaggcaagtctactgaagcaggactggtttcacttctggcaccaaagtcgatggcaacaatgacggatctggagacatgccttatgataaataccaaaaggcagcgacatcgtaggcatggcagctacaggcactgcagaccaagaagcagagcttcaagccccacactcacaaggctaaaacgtttcctcgtgtgagaaacagaaccaccactaacaatttttggaaataatatttgagtcttggctcccaactggataattttgttctgcaccaaaagcaattccattcaaattcccaaagtcttcaagcggcttcagactaatttcaagacacagtttccttccaagcccaatgaaatgaaaggcagaaaccaacaaa

SEQ ID NO: 67313 - DNA, 4123 bp, Homo sapiens
gcggccgcgctcgtctcgccgggctgttcgcgggcaggccctgccctgaagggacgaatcggcttggagcgcgggaggtggagtcggccccggcggtcgctccctggacccaacccgaggctgacccaggcccctgcccatgcggggcgcccctggctcggaagagtcccccgggccgggagcagctccaggcagcggccccggaggaagaggaagaagggacagtgctcagcttgggggacccggaccctcgccgcggcatttggagccgggggcagtcccgaactctgtgcttggcaccgccgctccgagtagggcagcgcctgccgggaccctgacccggaccccctgcgcctcgtaggcggcggcgccgccgcgccaccctgttcttccgtgtctccctctgcctggcggcagtcacggccaagagagtattatgagggaggccgaggacttcatgctccggacagagaaacggcgctgggattagggattgccacttctgagaggatgctgggaatctgcagggggagacggaaattcttggctgcctcgttgagtcttctctgcatcccagccatcacctggatttacctgttttctgggagcttcgaagatggaaagcccgtgtctctgtcaccgctggagtcccaggcacacagccccaggtacacggcctccagccagcgggagcgcgagagcctggaggtgcgcatgcgcgaggtggaggaggagaaccgcgccctccgcaggcagctcagcctggcccagggccgagccccatcccatcgccgaggcaaccactccaagacctactccatggaggagggcactggagacagcgagaaccttcgggctggcatcgtggcaggcaacagctccgagtgtgggcagcagccggtcgtggagaaatgcgagacaatccacgttgctattgtctgcgctggatacaatgccagccgggatgtcgtcaccctggtcaaatccgtcctgttccatagacggaaccctctgcacttccaccttattgctgactccattgcggagcagatcctggccacgctcttccagacctggatggtgcccgctgtgcgtgtggacttctacaatgcagacgagctcaagtctgaagtttcctggatccccaataaacattactctgggatttatggtctgatgaagcttgtcctgaccaagactcttcctgccaacctggagagagtcatcgtccttgacacggatatcacctttgccactgacattgcagagctgtgggctgtgttccacaagttcaaaggtcagcaagtcctgggcttggtggagaaccagagtgactggtaccttggaaacctgtggaaaaatcaccgcccatggccagcccttggaagaggctacaacacaggggtgatcctgttacttctggataagctgcggaagatgaaatgggagcagatgtggaggctgaccgcagagagggagctcatgggcatgctctctacatccttagctgaccaggatattttcaatgccgtcatcaaacaaaaccccttccttgtgtaccagctcccctgcttctggaatgtgcagctgtcagaccacacccgctccgagcagtgctacagagacgtgtctgatctaaaggtcattcactggaactcccccaagaagctccgggtgaagaacaagcatgtggagttttttcgcaacctctacctgaccttcctggagtatgacggcaatcttctgaggcgggaactgtttggctgccccagtgaggctgatgtcaacagtgaaaacctccagaagcagctgtctgagctggacgaggacgacctgtgctatgagttccggcgagagcgcttcactgtccaccgcacccacctgtacttcctgcactacgagtatgagcctgcagcagacagcacggacgtcaccctggtcgctcagctgtccatggacaggctccagatgctggaggccatctgcaagcactgggaggggcccatcagcctggccctctacctgtcagacgccgaggcccagcagttcctccgctacgcacagggctctgaggtgcttatgagccgccacaacgtgggctaccacatcgtgtacaaggagggccagttctaccccgtgaacctgctgcgcaacgtggccatgaagcacatcagcactccctacatgttcctgtctgacattgacttcctgcccatgtatgggctctatgagtacctcaggaagtctgtcatccagctcgatcttgccaacaccaagaaagcaatgattgtccccgcgttcgagacactgcgctaccggctgtccttccccaagtcaaaagcggagttgctgtcaatgctggacatggggaccctcttcacattcaggtaccacgtctggacgaaaggccacgcacccacaaacttcgccaagtggcggaccgccaccacgccttaccgggttgagtgggaggccgattttgagccgtatgttgttgtgagacgtgactgcccggagtacgaccggaggtttgtaggctttggctggaacaaagtggctcatatcatggagctggatgtgcaggagtatgagttcattgtgctgcccaacgcctacatgatccacatgcctcatgcccccagcttcgacattaccaagttccgttccaacaagcaataccgcatctgtctcaaaaccctcaaggaagagtttcagcaggacatgtcccgccgctacggctttgctgccctgaaatatctcacagccgagaacaacagctagcaccaagaagcccaccactagggggagacatgctgtaggggaagtgccactcgctgtttggggcccggccttcaaattcaaaattgagccatgctttttcggtttgtttttatttatctctttggcccagccaagctgccctcactacagagaccttggacaaggatccagccagtccctctctgccccacaaccctgcattcccagaggttagctatgcagcccacctagatgagtctcttcaagaatgggaaatcaaggggtgacagggagtaaaagggttatcatcttactgcaaagccacaagatcagggcagggctttaggatgttctggatgctttttaataattatgcttcccatcataactggggagaaagggaagtcagggttctaggggttattcgtcccaggaaatagaagtgaaattgtctttattaagtgaaaactttcccctttgccctgcaatgtagctgggcattcaaacggagggcaaaccgatgatctaaaccaaccacttggaaaaacccaatggggacattgtaaccagagggtcctggaggtggggttgatgggtttccttatccccaaagtcactcctgttttgttttgtttttctttgggggttttgtttatttttggggctggcaatccaaaatagaaaatctgatcctttgaggctctaaaggaaaatcagctgcctctaccaaccaccctctatcagcagtggcccaggaaggaggtcaagcatcttcggccgatatttaaacatgggcagcttccttcaggatgatcaccgaggctcccgtgactttgaactccctactctccagaatccaggggctatagcgatggggactgcggaattacgagggctggctgttttacaccggtcacattttctattggcagtgactgattcatgggaaagggctttgaaggaactacttcagtgcacacacaaggtacgaacctctcaggcctttcgaagaactttcataattcatgaaagcccagttctgaagattcacgtatccatctggagacctacaggaagaaagtgattgggttcctctggttcttgcctgcttcactgtggatgggaagaggtgacaacctcagtctccctttgggacctgtccaagggtaggcaaccaccttcaccttcacacagattgaggagacactggactttttacccattttctttaatcttcaatattaatattgtgtttacattgatgagaacaagagttaatgccctaccctctgctgggctgtttgtattgagttgcaatgtgaccagcgaaagctgcatttaataaatgaaagtacagactgtt

SEQ ID NO: 67314 - DNA, 1069 bp, Homo sapiens
gctaggggttattccgtcccaggaaccctgacttccctttctccccagttatgatgggaagcataattattaaaaagcatccagaacatcataactggggagaaagggaagtcagggttctaggggttattcgtcccaggaaatagaagtgaaattgtctttattaagtgaaaactttcccctttgccctgcaatgtagctgggcattcaaacggagggcaaaccgatgatctaaaccaaccacttggaaaaacccaatggggacattgtaaccagagggtcctggaggtggggttgatgggtttccttatccccaaagtcactcctgttttgttttgtttttctttgggggttttgtttatttttggggctggcaatccaaaatagaaaatctgatcctttgaggctctaaaggaaaatcagctgcctctaccaaccaccctctatcagcagtggcccaggaaggaggtcaagcatcttcggccgatatttaaacatgggcagcttccttcaggatgatcaccgaggctcccgtgactttgaactccctactctccagaatccaggggctatagcgatggggactgcggaattacgagggctggctgttttacaccggtcacattttctattggcagtgactgattcatgggaaagggctttgaaggaactacttcagtgcacacacaaggtacgaacctctcaggcctttcgaagaactttcataattcatgaaagcccagttctgaagattcacgtatccatctggagacctacaggaagaaagtgattgggttcctctggttcttgcctgcttcactgtggatgggaagaggtgacaacctcagtctccctttgggacctgtccaagggtaggcaaccaccttcaccttcacacagattgaggagacactggactttttacccattttctttaatcttcaatattaatattgtgtttacattgatgagaacaagagttaatgccctaccctctgctgggctgtttgtattgagttgcaatgtgaccagcgaaagctgcatttaataaatgaaagtacagactgtt

SEQ ID NO: 67315 - DNA, 1328 bp, Homo sapiens
gcggccgcgctcgtctcgccgggctgttcgcgggcaggccctgccctgaagggacgaatcggcttggagcgcgggaggtggagtcggccccggcggtcgctccctggacccaacccgaggctgacccaggcccctgcccatgcggggcgcccctggctcggaagagtcccccgggccgggagcagctccaggcagcggccccggaggaagaggaagaagggacagtgctcagcttgggggacccggaccctcgccgcggcatttggagccgggggcagtcccgaactctgtgcttggcaccgccgctccgagtagggcagcgcctgccgggaccctgacccggaccccctgcgcctcgtaggcggcggcgccgccgcgccaccctgttcttccgtgtctccctctgcctggcggcagtcacggccaagagagtattatgagggaggccgaggacttcatgctccggacagagaaacggcgctgggattagggattgccacttctgagaggatgctgggaatctgcagggggagacggaaattcttggctgcctcgttgagtcttctctgcatcccagccatcacctggatttacctgttttctgggagcttcgaagatggaaagcccgtgtctctgtcaccgctggagtcccaggcacacagccccaggtacacggcctccagccagcgggagcgcgagagcctggaggtgcgcatgcgcgaggtggaggaggagaaccgcgccctccgcaggcagctcagcctggcccagggccgagccccatcccatcgccgaggcaaccactccaagacctactccatggaggagggcactggagacagcgagaaccttcgggctggcatcgtggcaggcaacagctccgagtgtgggcagcagccggtcgtggagaaatgcgagacaatccacgttgctattgtctgcgctggatacaatgccagccgggatgtcgtcaccctggtcaaatccgtcctgttccatagacggaaccctctgcacttccaccttattgctgactccattgcggagcagatcctggccacgctcttccagacctggatggtgcccgctgtgcgtgtggacttctacaatgcagacgagctcaaggtatgggcaggaggggaggcacttccgtgatctcctctagctggaagcgttattacttgtggttgagcagactgtagcaatgccagaaatctcagctcctaactgaaaatgtgtagggcgtaaggaagttgtttgccagcagaatctgattttattatcgaagtattaaagtaacccctttgagtgcacaaaatccactttgg

SEQ ID NO: 67316 - DNA, 474 bp, Homo sapiens
cggccgcgctcgtctcgccgggctgttcgcgggcaggccctgccctgaagggacgaatcggcttggagcgcgggaggtggagtcggccccggcggtcgctccctggacccaacccgaggctgacccaggcccctgcccatgcggggcgcccctggctcggaagagtcccccgggccgggagcagctccaggcagcggccccggaggaagaggaagaagggacagtgctcagcttgggggacccggaccctcgccgcggcatttggagccgggggcagtcccgaactctgtgcttggcaccgccgctccgagtagggcagcgcctgccgggaccctgacccggaccccctgcgcctcgtaggcggcggcgccgccgcgccaccctgttcttccgtgtctccctctgcctggcggcagtcacggccaaggtaagagccccggagcgcgagagtcgccgcgggggcgccgtggtgtg

SEQ ID NO: 67317 - DNA, 4410 bp, Homo sapiens
gcggccgcgctcgtctcgccgggctgttcgcgggcaggccctgccctgaagggacgaatcggcttggagcgcgggaggtggagtcggccccggcggtcgctccctggacccaacccgaggctgacccaggcccctgcccatgcggggcgcccctggctcggaagagtcccccgggccgggagcagctccaggcagcggccccggaggaagaggaagaagggacagtgctcagcttgggggacccggaccctcgccgcggcatttggagccgggggcagtcccgaactctgtgcttggcaccgccgctccgagtagggcagcgcctgccgggaccctgacccggaccccctgcgcctcgtaggcggcggcgccgccgcgccaccctgttcttccgtgtctccctctgcctggcggcagtcacggccaagaacctacattaagaaacgcattcagatgcatcagccgtttgtaaagcacctgtcgtgagccagagagtattatgagggaggccgaggacttcatgctccggacagagaaacggcgctgggattagggattgccacttctgagaggatgctgggaatctgcagggggagacggaaattcttggctgcctcgttgagtcttctctgcatcccagccatcacctggatttacctgttttctgggagcttcgaagatggaaagcccgtgtctctgtcaccgctggagtcccaggcacacagccccaggtacacggcctccagccagcgggagcgcgagagcctggaggtgcgcatgcgcgaggtggaggaggagaaccgcgccctccgcaggcagctcagcctggcccagggccgagccccatcccatcgccgaggcaaccactccaagacctactccatggaggagggcactggagacagcgagaaccttcgggctggcatcgtggcaggcaacagctccgagtgtgggcagcagccggtcgtggagaaatgcgagacaatccacgttgctattgtctgcgctggatacaatgccagccgggatgtcgtcaccctggtcaaatccgtcctgttccatagacggaaccctctgcacttccaccttattgctgactccattgcggagcagatcctggccacgctcttccagacctggatggtgcccgctgtgcgtgtggacttctacaatgcagacgagctcaagtctgaagtttcctggatccccaataaacattactctgggatttatggtctgatgaagcttgtcctgaccaagactcttcctgccaacctggagagagtcatcgtccttgacacggatatcacctttgccactgacattgcagagctgtgggctgtgttccacaagttcaaaggtcagcaagtcctgggcttggtggagaaccagagtgactggtaccttggaaacctgtggaaaaatcaccgcccatggccagcccttggaagaggctacaacacaggggtgatcctgttacttctggataagctgcggaagatgaaatgggagcagatgtggaggctgaccgcagagagggagctcatgggcatgctctctacatccttagctgaccaggatattttcaatgccgtcatcaaacaaaaccccttccttgtgtaccagctcccctgcttctggaatgtgcagctgtcagaccacacccgctccgagcagtgctacagagacgtgtctgatctaaaggtcattcactggaactcccccaagaagctccgggtgaagaacaagcatgtggagttttttcgcaacctctacctgaccttcctggagtatgacggcaatcttctgaggcgggaactgtttggctgccccagtgaggctgatgtcaacagtgaaaacctccagaagcagctgtctgagctggacgaggacgacctgtgctatgagttccggcgagagcgcttcactgtccaccgcacccacctgtacttcctgcactacgagtatgagcctgcagcagacagcacggacgtcaccctggtcgctcagctgtccatggacaggctccagatgctggaggccatctgcaagcactgggaggggcccatcagcctggccctctacctgtcagacgccgaggcccagcagttcctccgctacgcacagggctctgaggtgcttatgagccgccacaacgtgggctaccacatcgtgtacaaggagggccagttctaccccgtgaacctgctgcgcaacgtggccatgaagcacatcagcactccctacatgttcctgtctgacattgacttcctgcccatgtatgggctctatgagtacctcaggaagtctgtcatccagctcgatcttgccaacaccaagaaagcaatgattgtccccgcgttcgagacactgcgctaccggctgtccttccccaagtcaaaagcggagttgctgtcaatgctggacatggggaccctcttcacattcaggtaccacgtctggacgaaaggccacgcacccacaaacttcgccaagtggcggaccgccaccacgccttaccgggttgagtgggaggccgattttgagccgtatgttgttgtgagacgtgactgcccggagtacgaccggaggtttgtaggctttggctggaacaaagtggctcatatcatggagctggatgtgcaggagtatgagttcattgtgctgcccaacgcctacatgatccacatgcctcatgcccccagcttcgacattaccaagttccgttccaacaagcaataccgcatctgtctcaaaaccctcaaggaagagtttcagcaggacatgtcccgccgctacggctttgctgccctgaaatatctcacagccgagaacaacagctagcaccaagaagcccaccactagggggagacatgctgtaggggaagtgccactcgctgtttggggcccggccttcaaattcaaaattgagccatgctttttcggtttgtttttatttatctctttggcccagccaagctgccctcactacagagaccttggacaaggatccagccagtccctctctgccccacaaccctgcattcccagaggttagctatgcagcccacctagatgagtctcttcaagaatgggaaatcaaggggtgacagggagtaaaagggttatcatcttactgcaaagccacaagatcagggcagggctttaggatgttctggatgctttttaataattatgcttcccatcataactggggagaaagggaagtcagggttctaggggttattcgtcccaggaaatagaagtgaaattgtctttattaagtgaaaactttcccctttgccctgcaatgtagctgggcattcaaacggagggcaaaccgatgatctaaaccaaccacttggaaaaacccaatggggacattgtaaccagagggtcctggaggtggggttgatgggtttccttatccccaaagtcactcctgttttgttttgtttttctttgggggttttgtttatttttggggctggcaatccaaaatagaaaatctgatcctttgaggctctaaaggaaaatcagctgcctctaccaaccaccctctatcagcagtggcccaggaaggaggtcaagcatcttcggccgatatttaaacatgggcagcttccttcaggatgatcaccgaggctcccgtgactttgaactccctactctccagaatccaggggctatagcgatggggactgcggaattacgagggctggctgttttacaccggtcacattttctattggcagtgactgattcatgggaaagggctttgaaggaactacttcagtgcacacacaaggtacgaacctctcaggcctttcgaagaactttcataattcatgaaagcccagttctgaagattcacgtatccatctggagacctacaggaagaaagtgattgggttcctctggttcttgcctgcttcactgtggatgggaagaggtgacaacctcagtctccctttgggacctgtccaagggtaggcaaccaccttcaccttcacacagattgaggagacactggactttttacccattttctttaatcttcaatattaatattgtgtttacattgatgagaacaagagttaatgccctaccctctgctgggctgtttgtattgagttgcaatgtgaccagcgaaagctgcatttaataaatgaaagtacagactgtttcttccccattcccctcccactcttgcaggaagctactgagacacaccttgacatagagagctaaattgcagtggataaacagcaacttcacactttctgttcccccattctatttttctcatcatttgaactttagccttttttttccccttttgcctgaagttagatcccactctgtctctaactcaaaccatcttcaagttttccattccgcatctttctc

SEQ ID NO: 67318 - DNA, 1654 bp, Homo sapiens
gcggccgcgctcgtctcgccgggctgttcgcgggcaggccctgccctgaagggacgaatcggcttggagcgcgggaggtggagtcggccccggcggtcgctccctggacccaacccgaggctgacccaggcccctgcccatgcggggcgcccctggctcggaagagtcccccgggccgggagcagctccaggcagcggccccggaggaagaggaagaagggacagtgctcagcttgggggacccggaccctcgccgcggcatttggagccgggggcagtcccgaactctgtgcttggcaccgccgctccgagtagggcagcgcctgccgggaccctgacccggaccccctgcgcctcgtaggcggcggcgccgccgcgccaccctgttcttccgtgtctccctctgcctggcggcagtcacggccaagagagtattatgagggaggccgaggacttcatgctccggacagagaaacggcgctgggattagggattgccacttctgagaggatgctgggaatctgcagggggagacggaaattcttggctgcctcgttgagtcttctctgcatcccagccatcacctggatttacctgttttctgggagcttcgaagatggaaagcccgtgtctctgtcaccgctggagtcccaggcacacagccccaggtacacggcctccagccagcgggagcgcgagagcctggaggtgcgcatgcgcgaggtggaggaggagaaccgcgccctccgcaggcagctcagcctggcccagggccgagccccatcccatcgccgaggcaaccactccaagacctactccatggaggagggcactggagacagcgagaaccttcgggctggcatcgtggcaggcaacagctccgagtgtgggcagcagccggtcgtggagaaatgcgagacaatccacgttgctattgtctgcgctggatacaatgccagccgggatgtcgtcaccctggtcaaatccgtcctgttccatagacggaaccctctgcacttccaccttattgctgactccattgcggagcagatcctggccacgctcttccagacctggatggtgcccgctgtgcgtgtggacttctacaatgcagacgagctcaagtctgaagtttcctggatccccaataaacattactctgggatttatggtctgatgaagcttgtcctgaccaagactcttcctgccaacctggagagagtcatcgtccttgacacggatatcacctttgccactgacattgcagagctgtgggctgtgttccacaagttcaaagatgagaatggtggtcgtatgtactagactcccacattttcctttgggaataaaggccttattacgccagctggtgggagcagtccctgcagcgggggctctcagaaaaggcatcagccctttttgcagttgcctctgttgaagtgagtggccatgcctgtggccacaccccttcgtgggacaccccacatcacggaatggctgatgaacatgaggtcctgcaggatcatctgccacactcggatactgcctcacaggctgattttcccctctgcctagtcctgctttctccccttccctttcataggtactgttctcaagagctctctctaataaacctcttgtatgctgacatcca

SEQ ID NO: 67319 - DNA, 1536 bp, Homo sapiens
  misc_feature (1)..(1): n is a, c, g, or t
naaataaggctaggtacgaggctggtgttaatcggccgaggctctctccagcccttctcctgtgtgcctgcctcctgccgccgccaccatgaccacctccatccgccagttcacctcctccagctccatcaagggctcctccggcctggggggcggctcgtcccgcacctcctgccggctgtctggcggcctgggtgccggctcctgcaggctgggatctgctggcggcctgggcagcaccctcgggggtagcagctactccagctgctacagctttggctctggtggtggctatggcagcagctttgggggtgttgatgggctgctggctggaggtgagaaggccaccatgcagaacctcaatgaccgcctggcctcctacctggacaaggtgcgtgccctggaggaggccaacactgagctggaggtgaagatccgtgactggtaccagaggcaggccccggggcccgcccgtgactacagccagtactacaggacaattgaggagctgcagaacaagatcctcacagccaccgtggacaatgccaacatcctgctacagattgacaatgcccgtctggctgctgatgacttccgcaccaagtttgagacagagcaggccctgcgcctgagtgtggaggccgacatcaatggcctgcgcagggtgctggatgagctgaccctggccagagccgacctggagatgcagattgagaacctcaaggaggagctggcctacctgaagaagaaccacgaggaggagatgaacgccctgcgaggccaggtgggtggtgagatcaatgtggagatggacgctgccccaggcgtggacctgagccgcatcctcaacgagatgcgtgaccagtatgagaagatggcagagaagaaccgcaaggatgccgaggattggttcttcagcaagacagaggaactgaaccgcgaggtggccaccaacagtgagctggtgcagagtggcaagagtgagatctcggagctccggcgcaccatgcaggccttggagatagagctgcagtcccagctcagcatgaaagcatccctggagggcaacctggcggagacagagaaccgctactgcgtgcagctgtcccagatccaggggctgattggcagcgtggaggagcagctggcccagcttcgctgcgagatggagcagcagaaccaggaatacaaaatcctgctggatgtgaagacgcggctggagcaggagattgccacctaccgccgcctgctggagggagaggatgcccacctgactcagtacaagaaagaaccggtgaccacccgtcaggtgcgtaccattgtggaagaggtccaggatggcaaggtcatctcctcccgcgagcaggtccaccagaccacccgctgaggactcagctaccccggccggccacccaggaggcagggaggcagccgccccatctgccccacagtctccggcctctccagcctcagccccctgcttcagtcccttccccatgcttccttgcctgatgacaataaagcttgttgactcag

SEQ ID NO: 67320 - DNA, 111 bp, Homo sapiens
tagatcgagctggtaccgtacatgatcatccggcctctccagcctcagccccctgcttcagtcccttccccatgcttccttgcctgatgacaataaagcttgttgactcag

SEQ ID NO: 67321 - DNA, 962 bp, Homo sapiens
gctgagctcaagctgggatctggcgggtgggtggggaggtagggagctccctcagaataaaggcagagggtaaagaccttgggagtccccacgtctccctcaagaagtcaggaactagcatcaagagccaggctacatgttctggcttgttctcaagtttccggtctgtgcctcccacacgctgggattaaccataaaaagttaacatttcaaatggcatgtttctgggctttgggatgtgggaagctggtgagaaggcacactctctccacagttagatttgggaggaggcctgacttgggagagggatccaggctcacaccgccctgtcctgtgtcctgtctgcagacagaggaactgaaccgcgaggtggccaccaacagtgagctggtgcagagtggcaagagtgagatctcggagctccggcgcaccatgcaggccttggagatagagctgcagtcccagctcagcatgaaagcatccctggagggcaacctggcggagacagagaaccgctactgcgtgcagctgtcccagatccaggggctgattggcagcgtggaggagcagctggcccagcttcgctgcgagatggagcagcagaaccaggaatacaaaatcctgctggatgtgaagacgcggctggagcaggagattgccacctaccgccgcctgctggagggagaggatgcccacctgactcagtacaagaaagaaccggtgaccacccgtcaggtgcgtaccattgtggaagaggtccaggatggcaaggtcatctcctcccgcgagcaggtccaccagaccacccgctgaggactcagctaccccggccggccacccaggaggcagggaggcagccgccccatctgccccacagtctccggcctctccagcctcagccccctgcttcagtcccttccccatgcttccttgcctgatgacaataaagcttgttgactcag

SEQ ID NO: 67322 - DNA, 742 bp, Homo sapiens
ctcggttgtgttgaagtcccctggacagtgggcaggggtggcagaggacacgagcagccactgcccgtaccccctctcctctctgtaagcccatgccctgtcttcccaggacttgtgagcctcttccctcgacggtcctcttctctcccggcctctccagcctcagccccctgcttcagtcccttccccatgcttccttgcctgatgacaataaagcttgttgactcagaaaaaaaaaaaaaaaaaaaaaaaaaaaaaaaaaaaaaaaaaaaaaaaaaaaaaaaagacagaaaaaaaaaaacaaaaaaaaaaaagaaagaagcgaaaagaacacagagcgcgacgaacggccactcaccctgcacgcacgcacagaacagccgggcggcaggccgccctccacgcgcggcgcgcccgaggggcgcgcccacgccacgagggaggagtgggccgcggagaggatgcaggcaggcggagggcgaggcgccaagccgcgtcggcggcccgccaaccgccgcccgctgccgacgagccgcgcacacgcggccgccacgcccccccgatcgctgactcgcgtagacgaaacagcgatgtgttctctcctggcacgcgagtcacagcggtggcgatagctcgccgtcgctctagtagataggagatcacatgcggcgacagaggaacgcaggaggggaggagcgggaaacatccgccctggaccagaggcctgttatctggcagcgct

SEQ ID NO: 67323 - DNA, 327 bp, Homo sapiens
  misc_feature (2)..(2): n is a, c, g, or t
  misc_feature (32)..(32): n is a, c, g, or t
  misc_feature (35)..(35): n is a, c, g, or t
  misc_feature (38)..(38): n is a, c, g, or t
gntgcagggaattgggacgaggcaccgtaccngcngcntgctggagggagaggatgcccacctgactcagtacaagaaagaaccggtgaccacccgtcaggtgcgtaccattgtggaagaggtccaggatggcaaggtcatctcctcccgcgagcaggtccaccagaccacccgctgaggactcagctaccccggccggccacccaggaggcagggaggcagccgccccatctgccccacagtctccggcctctccagcctcagccccctgcttcagtcccttccccatgcttccttgcctgatgacaataaagcttgttgactcag

SEQ ID NO: 67324 - DNA, 607 bp, Homo sapiens
  misc_feature (1)..(1): n is a, c, g, or t
  misc_feature (3)..(3): n is a, c, g, or t
  misc_feature (5)..(5): n is a, c, g, or t
  misc_feature (17)..(17): n is a, c, g, or t
  misc_feature (20)..(20): n is a, c, g, or t
  misc_feature (570)..(570): n is a, c, g, or t
  misc_feature (590)..(590): n is a, c, g, or t
  misc_feature (600)..(600): n is a, c, g, or t
ngntntcgaattcgagntcngtaccccaacgcatgtccaacactgagctggaggtgaagatccgtgactggtaccagaggcaggccccggggcccgcccgtgactacagccagtactacaggacaattgaggagctgcagaacaagatcctcacagccaccgtggacaatgccaacatcctgctacagattgacaatgcccgtctggctgctgatgacttccgcaccaagtttgagacagagcaggccctgcgcctgagtgtggaggccgacatcaatggcctgcgcagggtgctggatgagctgaccctggccagagccgacctggagatgcagattgagaacctcaaggaggagctggcctacctgaagaagaaccacgaggaggagatgaacgccctgcgaggccaggtgggtggtgagatcaatgtggagatggacgctgccccaggcgtggacctgagccgcatcctcaacgagatgcgtgaccagtatgagaagatggcagagaagaaccgcaaggatgccgaggattggttcttcagcaaaaaaaagaacctgaccccgaggnggcccccaccattaacttgngccaaaaggnaaaaata

SEQ ID NO: 67325 - DNA, 1024 bp, Homo sapiens
  misc_feature (23)..(23): n is a, c, g, or t
  misc_feature (62)..(62): n is a, c, g, or t
  misc_feature (882)..(883): n is a, c, g, or t
  misc_feature (897)..(897): n is a, c, g, or t
  misc_feature (905)..(905): n is a, c, g, or t
ggcaaaggctgggatacccgggnccccccccgatgtttggatatcgtcgacccacgcgctcngctctccagcccttctcctgtgtgcctgcctcctgccgccgccaccatgaccacctccatccgccagttcacctcctccagctccatcaagggctcctccggcctggggggcggctcgtcccgcacctcctgccggctgtctggcggcctgggtgccggctcctgcaggctgggatctgctggcggcctgggcagcaccctcgggggtagcagctactccagctgctacagctttggctctggtggtggctatggcagcagctttgggggtgttgatgggctgctggctggaggtgagaaggccaccatgcagaacctcaatgaccgcctggcctcctacctggacaaggtgcgtgccctggaggaggccaacactgagctggaggtgaagatccgtgactggtaccagaggcaggccccggggcccgcccgtgactacagccagtactacaggacaattgaggagctgcagaacaagatcctcacagccaccgtggacaatgccaacatcctgctacagattgacaatgcccgtctggctgctgatgacttccgcaccaagtttgagacagagcaggccctgcgcctgagtgtggaggccgacatcaatggcctgcgcagggtgctggatgagctgaccctggccagagccgacctggagatgcagattgagaacctcaaggaggagctggcctacctgaagaagaaccacgaggaggagatgaacgccctgcgaggccaggtgggtggtgagatcaatgtggagatggacgctgccccaggcgtggacctgagccgcatcctcaacgagatgcgtggnnaaaaccgaggtgcncgatggtntcccaaaacagggactaacgcgggggcccccctcggcggcgccgggaaaggaaactggccggccacgggctggagaaggccccaaaacgggaccgggagaccactggccccacagcgga

SEQ ID NO: 67326 - DNA, 1543 bp, Homo sapiens
taggctaggtgagcctgctgtgattcggcgaggcaattggggcccctctcctctccagcccttctcctgtgtgcctgcctcctgccgccgccaccatgaccacctccatccgccagttcacctcctccagctccatcaagggctcctccggcctggggggcggctcgtcccgcacctcctgccggctgtctggcggcctgggtgccggctcctgcaggctgggatctgctggcggcctgggcagcaccctcgggggtagcagctactccagctgctacagctttggctctggtggtggctatggcagcagctttgggggtgttgatgggctgctggctggaggtgagaaggccaccatgcagaacctcaatgaccgcctggcctcctacctggacaaggtgcgtgccctggaggaggccaacactgagctggaggtgaagatccgtgactggtaccagaggcaggccccggggcccgcccgtgactacagccagtactacaggacaattgaggagctgcagaacaagatcctcacagccaccgtggacaatgccaacatcctgctacagattgacaatgcccgtctggctgctgatgacttccgcaccaagtttgagacagagcaggccctgcgcctgagtgtggaggccgacatcaatggcctgcgcagggtgctggatgagctgaccctggccagagccgacctggagatgcagattgagaacctcaaggaggagctggcctacctgaagaagaaccacgaggaggagatgaacgccctgcgaggccaggtgggtggtgagatcaatgtggagatggacgctgccccaggcgtggacctgagccgcatcctcaacgagatgcgtgaccagtatgagaagatggcagagaagaaccgcaaggatgccgaggattggttcttcagcaagacagaggaactgaaccgcgaggtggccaccaacagtgagctggtgcagagtggcaagagtgagatctcggagctccggcgcaccatgcaggccttggagatagagctgcagtcccagctcagcatgaaagcatccctggagggcaacctggcggagacagagaaccgctactgcgtgcagctgtcccagatccaggggctgattggcagcgtggaggagcagctggcccagcttcgctgcgagatggagcagcagaaccaggaatacaaaatcctgctggatgtgaagacgcggctggagcaggagattgccacctaccgccgcctgctggagggagaggatgcccacctgactcagtacaagaaagaaccggtgaccacccgtcaggtgcgtaccattgtggaagaggtccaggatggcaaggtcatctcctcccgcgagcaggtccaccagaccacccgctgaggactcagctaccccggccggccacccaggaggcagggaggcagccgccccatctgccccacagtctccggcctctccagcctcagccccctgcttcagtcccttccccatgcttccttgcctgatgacaataaagcttgttgactcag

SEQ ID NO: 67327 - DNA, 1646 bp, Homo sapiens
cagccacctgggagctggcaggtggccagtggtgatgaaagcccagggaatggaaacagaggagcaagcctgttgtaatcgctacgcccacttggtggcctataaaggaagcgggcgaaccccggcagccctacacaacttggggcccctctcctctccagcccttctcctgtgtgcctgcctcctgccgccgccaccatgaccacctccatccgccagttcacctcctccagctccatcaagggctcctccggcctggggggcggctcgtcccgcacctcctgccggctgtctggcggcctgggtgccggctcctgcaggctgggatctgctggcggcctgggcagcaccctcgggggtagcagctactccagctgctacagctttggctctggtggtggctatggcagcagctttgggggtgttgatgggctgctggctggaggtgagaaggccaccatgcagaacctcaatgaccgcctggcctcctacctggacaaggtgcgtgccctggaggaggccaacactgagctggaggtgaagatccgtgactggtaccagaggcaggccccggggcccgcccgtgactacagccagtactacaggacaattgaggagctgcagaacaagatcctcacagccaccgtggacaatgccaacatcctgctacagattgacaatgcccgtctggctgctgatgacttccgcaccaagtttgagacagagcaggccctgcgcctgagtgtggaggccgacatcaatggcctgcgcagggtgctggatgagctgaccctggccagagccgacctggagatgcagattgagaacctcaaggaggagctggcctacctgaagaagaaccacgaggaggagatgaacgccctgcgaggccaggtgggtggtgagatcaatgtggagatggacgctgccccaggcgtggacctgagccgcatcctcaacgagatgcgtgaccagtatgagaagatggcagagaagaaccgcaaggatgccgaggattggttcttcagcaagacagaggaactgaaccgcgaggtggccaccaacagtgagctggtgcagagtggcaagagtgagatctcggagctccggcgcaccatgcaggccttggagatagagctgcagtcccagctcagcatgaaagcatccctggagggcaacctggcggagacagagaaccgctactgcgtgcagctgtcccagatccaggggctgattggcagcgtggaggagcagctggcccagcttcgctgcgagatggagcagcagaaccaggaatacaaaatcctgctggatgtgaagacgcggctggagcaggagattgccacctaccgccgcctgctggagggagaggatgcccacctgactcagtacaagaaagaaccggtgaccacccgtcaggtgcgtaccattgtggaagaggtccaggatggcaaggtcatctcctcccgcgagcaggtccaccagaccacccgctgaggactcagctaccccggccggccacccaggaggcagggaggcagccgccccatctgccccacagtctccggcctctccagcctcagccccctgcttcagtcccttccccatgcttccttgcctgatgacaataaagcttgttgactcag

SEQ ID NO: 67328 - DNA, 2129 bp, Homo sapiens
  misc_feature (1)..(1): n is a, c, g, or t
naaataaggctaggtacgaggctggtgttaatcggccgaggctctctccagcccttctcctgtgtgcctgcctcctgccgccgccaccatgaccacctccatccgccagttcacctcctccagctccatcaagggctcctccggcctggggggcggctcgtcccgcacctcctgccggctgtctggcggcctgggtgccggctcctgcaggctgggatctgctggcggcctgggcagcaccctcgggggtagcagctactccagctgctacagctttggctctggtggtggctatggcagcagctttgggggtgttgatgggctgctggctggaggtgagaaggccaccatgcagaacctcaatgaccgcctggcctcctacctggacaaggtgcgtgccctggaggaggccaacactgagctggaggtgaagatccgtgactggtaccagaggcaggccccggggcccgcccgtgactacagccagtactacaggacaattgaggagctgcagaacaagatcctcacagccaccgtggacaatgccaacatcctgctacagattgacaatgcccgtctggctgctgatgacttccgcaccaagtttgagacagagcaggccctgcgcctgagtgtggaggccgacatcaatggcctgcgcagggtgctggatgagctgaccctggccagagccgacctggagatgcagattgagaacctcaaggaggagctggcctacctgaagaagaaccacgaggaggagatgaacgccctgcgaggccaggtgggtggtgagatcaatgtggagatggacgctgccccaggcgtggacctgagccgcatcctcaacgagatgcgtgaccagtatgagaagatggcagagaagaaccgcaaggatgccgaggattggttcttcagcaagacagaggaactgaaccgcgaggtggccaccaacagtgagctggtgcagagtggcaagagtgagatctcggagctccggcgcaccatgcaggccttggagatagagctgcagtcccagctcagcatgaaagcatccctggagggcaacctggcggagacagagaaccgctactgcgtgcagctgtcccagatccaggggctgattggcagcgtggaggagcagctggcccagcttcgctgcgagatggagcagcagaaccaggaatacaaaatcctgctggatgtgaagacgcggctggagcaggagattgccacctaccgccgcctgctggagggagaggatgcccacctgactcagtacaagaaagaaccggtgaccacccgtcaggtgcgtaccattgtggaagaggtccaggatggcaaggtcatctcctcccgcgagcaggtccaccagaccacccgctgaggactcagctaccccggccggccacccaggaggcagggaggcagccgccccatctgccccacagtctccggcctctccagcctcagccccctgcttcagtcccttccccatgcttccttgcctgatgacaataaagcttgttgactcagaaaaaaaaaaaaaaaaaaaaaaaaaaaaaaaaaaaaaaaaaaaacagagagcgggcgcgcgcgcgtcctgctagaagatattatcctctctcgcgaggggggcccccagcttcttgagcgccgtctaccccgatttttttgttgttacccaagagtggttcctcctatgaaggaggagacggcccctattataataaccgcctagcagcagctgggacccgcgcggtttttaacaaaagctcgtccggtagacgcggggcaaaacaagcgcggcagcggtgcggagacaacctgtggggggaagaggacacccctaataatccggcgggggggggggcccactaccatcgtgggcgcacacacatctccccctccaacagagatatttaagaagccttctatagggggaaaaaatttttaaaactttttacgacgggtttttatgggggttgtctacaccatcgaggtggcaattattgccgctgcggccgggtattggcagagactttttggctctatcacaggggattattagtttttttgaaagccattttttttacccgcgggggcgtgtgtatgttgtattaagggac

SEQ ID NO: 67329 - DNA, 2049 bp, Homo sapiens
  misc_feature (1)..(1): n is a, c, g, or t
naaataaggctaggtacgaggctggtgttaatcggccgaggctctctccagcccttctcctgtgtgcctgcctcctgccgccgccaccatgaccacctccatccgccagttcacctcctccagctccatcaagggctcctccggcctggggggcggctcgtcccgcacctcctgccggctgtctggcggcctgggtgccggctcctgcaggctgggatctgctggcggcctgggcagcaccctcgggggtagcagctactccagctgctacagctttggctctggtggtggctatggcagcagctttgggggtgttgatgggctgctggctggaggtgagaaggccaccatgcagaacctcaatgaccgcctggcctcctacctggacaaggtgcgtgccctggaggaggccaacactgagctggaggtgaagatccgtgactggtaccagaggcaggccccggggcccgcccgtgactacagccagtactacaggacaattgaggagctgcagaacaagatcctcacagccaccgtggacaatgccaacatcctgctacagattgacaatgcccgtctggctgctgatgacttccgcaccaagtttgagacagagcaggccctgcgcctgagtgtggaggccgacatcaatggcctgcgcagggtgctggatgagctgaccctggccagagccgacctggagatgcagattgagaacctcaaggaggagctggcctacctgaagaagaaccacgaggaggagatgaacgccctgcgaggccaggtgggtggtgagatcaatgtggagatggacgctgccccaggcgtggacctgagccgcatcctcaacgagatgcgtgaccagtatgagaagatggcagagaagaaccgcaaggatgccgaggattggttcttcagcaagacagaggaactgaaccgcgaggtggccaccaacagtgagctggtgcagagtggcaagagtgagatctcggagctccggcgcaccatgcaggccttggagatagagctgcagtcccagctcagcatgaaagcatccctggagggcaacctggcggagacagagaaccgctactgcgtgcagctgtcccagatccaggggctgattggcagcgtggaggagcagctggcccagcttcgctgcgagatggagcagcagaaccaggaatacaaaatcctgctggatgtgaagacgcggctggagcaggagattgccacctaccgccgcctgctggagggagaggatgcccacctgactcagtacaagaaagaaccggtgaccacccgtcaggtgcgtaccattgtggaagaggtccaggatggcaaggtcatctcctcccgcgagcaggtccaccagaccacccgctgaggactcagctaccccggccggccacccaggaggcagggaggcagccgccccatctgccccacagtctccggcctctccagcctcagccccctgcttcagtcccttccccatgcttccttgcctgatgacaataaagcttgttgactcagaaaaaaaaaaaaaaaaaaaaaaaaaaaaaaaaaaaaaaaaaaaaaaaaaaaaaaaagacagaaaaaaaaaaacaaaaaaaaaaaagaaagaagcgaaaagaacacagagcgcgacgaacggccactcaccctgcacgcacgcacagaacagccgggcggcaggccgccctccacgcgcggcgcgcccgaggggcgcgcccacgccacgagggaggagtgggccgcggagaggatgcaggcaggcggagggcgaggcgccaagccgcgtcggcggcccgccaaccgccgcccgctgccgacgagccgcgcacacgcggccgccacgcccccccgatcgctgactcgcgtagacgaaacagcgatgtgttctctcctggcacgcgagtcacagcggtggcgatagctcgccgtcgctctagtagataggagatcacatgcggcgacagaggaacgcaggaggggaggagcgggaaacatccgccctggaccagaggcctgttatctggcagcgct

SEQ ID NO: 67330 - DNA, 1796 bp, Homo sapiens
  misc_feature (1)..(1): n is a, c, g, or t
naaataaggctaggtacgaggctggtgttaatcggccgaggctctctccagcccttctcctgtgtgcctgcctcctgccgccgccaccatgaccacctccatccgccagttcacctcctccagctccatcaagggctcctccggcctggggggcggctcgtcccgcacctcctgccggctgtctggcggcctgggtgccggctcctgcaggctgggatctgctggcggcctgggcagcaccctcgggggtagcagctactccagctgctacagctttggctctggtggtggctatggcagcagctttgggggtgttgatgggctgctggctggaggtgagaaggccaccatgcagaacctcaatgaccgcctggcctcctacctggacaaggtgcgtgccctggaggaggccaacactgagctggaggtgaagatccgtgactggtaccagaggcaggccccggggcccgcccgtgactacagccagtactacaggacaattgaggagctgcagaacaagatcctcacagccaccgtggacaatgccaacatcctgctacagattgacaatgcccgtctggctgctgatgacttccgcaccaagtttgagacagagcaggccctgcgcctgagtgtggaggccgacatcaatggcctgcgcagggtgctggatgagctgaccctggccagagccgacctggagatgcagattgagaacctcaaggaggagctggcctacctgaagaagaaccacgaggaggagatgaacgccctgcgaggccaggtgggtggtgagatcaatgtggagatggacgctgccccaggcgtggacctgagccgcatcctcaacgagatgcgtgaccagtatgagaagatggcagagaagaaccgcaaggatgccgaggattggttcttcagcaagacagaggaactgaaccgcgaggtggccaccaacagtgagctggtgcagagtggcaagagtgagatctcggagctccggcgcaccatgcaggccttggagatagagctgcagtcccagctcagcatgaaagcatccctggagggcaacctggcggagacagagaaccgctactgcgtgcagctgtcccagatccaggggctgattggcagcgtggaggagcagctggcccagcttcgctgcgagatggagcagcagaaccaggaatacaaaatcctgctggatgtgaagacgcggctggagcaggagattgccacctaccgccgcctgctggagggagaggatgcccacctgactcagtacaagaaagaaccggtgaccacccgtcaggtgcgtaccattgtggaagaggtccaggatggcaaggtcatctcctcccgcgagcaggtccaccagaccacccgctgaggactcagctaccccggccggccacccaggaggcagggaggcagccgccccatctgccccacagtctccggcctctccagcctcagccccctgcttcagtcccttccccatgcttccttgcctgatgacaataaagcttgttgactcagaaaaaaaaaaataaaacagtaaatcaaacacaaagaagaggcgggggcgcggcgctaaaaaaatattcccgcccagagggcgcaagagtgtcgtgggacccccaggtttttttgtcacaaagtgggcgcccataaggagagcgggtagtataagcgagaggacgagcgcgcgtataaacaccgcttggattcggggaacactgatcgtgggattctgggaagggaccttacttctggcggtgacgatttgggacactact

SEQ ID NO: 67331 - DNA, 1533 bp, Homo sapiens
  misc_feature (1)..(1): n is a, c, g, or t
naaataaggctaggtacgaggctggtgttaatcggccgaggctctctccagcccttctcctgtgtgcctgcctcctgccgccgccaccatgaccacctccatccgccagttcacctcctccagctccatcaagggctcctccggcctggggggcggctcgtcccgcacctcctgccggctgtctggcggcctgggtgccggctcctgcaggctgggatctgctggcggcctgggcagcaccctcgggggtagcagctactccagctgctacagctttggctctggtggtggctatggcagcagctttgggggtgttgatgggctgctggctggaggtgagaaggccaccatgcagaacctcaatgaccgcctggcctcctacctggacaaggtgcgtgccctggaggaggccaacactgagctggaggtgaagatccgtgactggtaccagaggcaggccccggggcccgcccgtgactacagccagtactacaggacaattgaggagctgcagaacaagatcctcacagccaccgtggacaatgccaacatcctgctacagattgacaatgcccgtctggctgctgatgacttccgcaccaagtttgagacagagcaggccctgcgcctgagtgtggaggccgacatcaatggcctgcgcagggtgctggatgagctgaccctggccagagccgacctggagatgcagattgagaacctcaaggaggagctggcctacctgaagaagaaccacgaggaggagatgaacgccctgcgaggccaggtgggtggtgagatcaatgtggagatggacgctgccccaggcgtggacctgagccgcatcctcaacgagatgcgtgaccagtatgagaagatggcagagaagaaccgcaaggatgccgaggattggttcttcagcaagacagaggaactgaaccgcgaggtggccaccaacagtgagctggtgcagagtggcaagagtgagatctcggagctccggcgcaccatgcaggccttggagatagagctgcagtcccagctcagcatgaaagcatccctggagggcaacctggcggagacagagaaccgctactgcgtgcagctgtcccagatccaggggctgattggcagcgtggaggagcagctggcccagcttcgctgcgagatggagcagcagaaccaggaatacaaaatcctgctggatgtgaagacgcggctggagcaggagattgccacctaccgccgcctgctggagggagaggatgcccacctgactcagtacaagaaagaaccggtgaccacccgtcaggtgcgtaccattgtggaagaggtccaggatggcaaggtcatctcctcccgcgagcaggtccaccagaccacccgctgaggactcagctaccccggccggccacccaggaggcagggaggcagccgccccatctgccccacagtctccggcctctccagcctcagccccctgcttcagtcccttccccatgacccgaagcgccacccgatgcgccccccaacgag

SEQ ID NO: 67332 - DNA, 1487 bp, Homo sapiens
  misc_feature (1)..(1): n is a, c, g, or t
  misc_feature (1477)..(1477): n is a, c, g, or t
  misc_feature (1479)..(1479): n is a, c, g, or t
naaataaggctaggtacgaggctggtgttaatcggccgaggctctctccagcccttctcctgtgtgcctgcctcctgccgccgccaccatgaccacctccatccgccagttcacctcctccagctccatcaagggctcctccggcctggggggcggctcgtcccgcacctcctgccggctgtctggcggcctgggtgccggctcctgcaggctgggatctgctggcggcctgggcagcaccctcgggggtagcagctactccagctgctacagctttggctctggtggtggctatggcagcagctttgggggtgttgatgggctgctggctggaggtgagaaggccaccatgcagaacctcaatgaccgcctggcctcctacctggacaaggtgcgtgccctggaggaggccaacactgagctggaggtgaagatccgtgactggtaccagaggcaggccccggggcccgcccgtgactacagccagtactacaggacaattgaggagctgcagaacaagatcctcacagccaccgtggacaatgccaacatcctgctacagattgacaatgcccgtctggctgctgatgacttccgcaccaagtttgagacagagcaggccctgcgcctgagtgtggaggccgacatcaatggcctgcgcagggtgctggatgagctgaccctggccagagccgacctggagatgcagattgagaacctcaaggaggagctggcctacctgaagaagaaccacgaggaggagatgaacgccctgcgaggccaggtgggtggtgagatcaatgtggagatggacgctgccccaggcgtggacctgagccgcatcctcaacgagatgcgtgaccagtatgagaagatggcagagaagaaccgcaaggatgccgaggattggttcttcagcaagacagaggaactgaaccgcgaggtggccaccaacagtgagctggtgcagagtggcaagagtgagatctcggagctccggcgcaccatgcaggccttggagatagagctgcagtcccagctcagcatgaaagcatccctggagggcaacctggcggagacagagaaccgctactgcgtgcagctgtcccagatccaggggctgattggcagcgtggaggagcagctggcccagcttcgctgcgagatggagcagcagaaccaggaatacaaaatcctgctggatgtgaagacgcggctggagcaggagattgccacctaccgccgcctgctggagggagaggatgcccacctgactcagtacaagaaagaaccggtgaccacccgtcaggtgcgtaccattgtggaagaggtccaggatggcaaggtcatctcctcccgcgagcaggtccaccagaccacccgctgaggactcagctaccccggccggccacccaggaggcagggaggcagccgccccatctgccccacagtctagtagccacagggacctcaagancnaccaccaa

SEQ ID NO: 67333 - DNA, 1439 bp, Homo sapiens
  misc_feature (1)..(1): n is a, c, g, or t
naaataaggctaggtacgaggctggtgttaatcggccgaggctctctccagcccttctcctgtgtgcctgcctcctgccgccgccaccatgaccacctccatccgccagttcacctcctccagctccatcaagggctcctccggcctggggggcggctcgtcccgcacctcctgccggctgtctggcggcctgggtgccggctcctgcaggctgggatctgctggcggcctgggcagcaccctcgggggtagcagctactccagctgctacagctttggctctggtggtggctatggcagcagctttgggggtgttgatgggctgctggctggaggtgagaaggccaccatgcagaacctcaatgaccgcctggcctcctacctggacaaggtgcgtgccctggaggaggccaacactgagctggaggtgaagatccgtgactggtaccagaggcaggccccggggcccgcccgtgactacagccagtactacaggacaattgaggagctgcagaacaagatcctcacagccaccgtggacaatgccaacatcctgctacagattgacaatgcccgtctggctgctgatgacttccgcaccaagtttgagacagagcaggccctgcgcctgagtgtggaggccgacatcaatggcctgcgcagggtgctggatgagctgaccctggccagagccgacctggagatgcagattgagaacctcaaggaggagctggcctacctgaagaagaaccacgaggaggagatgaacgccctgcgaggccaggtgggtggtgagatcaatgtggagatggacgctgccccaggcgtggacctgagccgcatcctcaacgagatgcgtgaccagtatgagaagatggcagagaagaaccgcaaggatgccgaggattggttcttcagcaagacagaggaactgaaccgcgaggtggccaccaacagtgagctggtgcagagtggcaagagtgagatctcggagctccggcgcaccatgcaggccttggagatagagctgcagtcccagctcagcatgaaagcatccctggagggcaacctggcggagacagagaaccgctactgcgtgcagctgtcccagatccaggggctgattggcagcgtggaggagcagctggcccagcttcgctgcgagatggagcagcagaaccaggaatacaaaatcctgctggatgtgaagacgcggctggagcaggagattgccacctaccgccgcctgctggagggagaggatgcccacctgactcagtacaagaaagaaccggtgaccacccgtcaggtgcgtaccattgtggaagaggtccaggatggcaaggtcatctcctcccgcgagcaggtccaccagaccacccgctgaggactcagctacccctttgccgaacccgggatcctcaagatcactacaccaa

SEQ ID NO: 67334 - DNA, 1407 bp, Homo sapiens
  misc_feature (1)..(1): n is a, c, g, or t
naaataaggctaggtacgaggctggtgttaatcggccgaggctctctccagcccttctcctgtgtgcctgcctcctgccgccgccaccatgaccacctccatccgccagttcacctcctccagctccatcaagggctcctccggcctggggggcggctcgtcccgcacctcctgccggctgtctggcggcctgggtgccggctcctgcaggctgggatctgctggcggcctgggcagcaccctcgggggtagcagctactccagctgctacagctttggctctggtggtggctatggcagcagctttgggggtgttgatgggctgctggctggaggtgagaaggccaccatgcagaacctcaatgaccgcctggcctcctacctggacaaggtgcgtgccctggaggaggccaacactgagctggaggtgaagatccgtgactggtaccagaggcaggccccggggcccgcccgtgactacagccagtactacaggacaattgaggagctgcagaacaagatcctcacagccaccgtggacaatgccaacatcctgctacagattgacaatgcccgtctggctgctgatgacttccgcaccaagtttgagacagagcaggccctgcgcctgagtgtggaggccgacatcaatggcctgcgcagggtgctggatgagctgaccctggccagagccgacctggagatgcagattgagaacctcaaggaggagctggcctacctgaagaagaaccacgaggaggagatgaacgccctgcgaggccaggtgggtggtgagatcaatgtggagatggacgctgccccaggcgtggacctgagccgcatcctcaacgagatgcgtgaccagtatgagaagatggcagagaagaaccgcaaggatgccgaggattggttcttcagcaagacagaggaactgaaccgcgaggtggccaccaacagtgagctggtgcagagtggcaagagtgagatctcggagctccggcgcaccatgcaggccttggagatagagctgcagtcccagctcagcatgaaagcatccctggagggcaacctggcggagacagagaaccgctactgcgtgcagctgtcccagatccaggggctgattggcagcgtggaggagcagctggcccagcttcgctgcgagatggagcagcagaaccaggaatacaaaatcctgctggatgtgaagacgcggctggagcaggagattgccacctaccgccgcctgctggagggagaggatgcccacctgactcagtacaagaaagaaccggtgaccacccgtcaggtgcgtaccattgtggaagaggtccaggatggcaaggtcatctcctcccgcgagcaggtccaccttccaccttccgccttctgccttccaccttgcca

SEQ ID NO: 67335 - DNA, 2383 bp, Homo sapiens
  misc_feature (1)..(1): n is a, c, g, or t
naaataaggctaggtacgaggctggtgttaatcggccgaggctctctccagcccttctcctgtgtgcctgcctcctgccgccgccaccatgaccacctccatccgccagttcacctcctccagctccatcaagggctcctccggcctggggggcggctcgtcccgcacctcctgccggctgtctggcggcctgggtgccggctcctgcaggctgggatctgctggcggcctgggcagcaccctcgggggtagcagctactccagctgctacagctttggctctggtggtggctatggcagcagctttgggggtgttgatgggctgctggctggaggtgagaaggccaccatgcagaacctcaatgaccgcctggcctcctacctggacaaggtgcgtgccctggaggaggccaacactgagctggaggtgaagatccgtgactggtaccagaggcaggccccggggcccgcccgtgactacagccagtactacaggacaattgaggagctgcagaacaagatcctcacagccaccgtggacaatgccaacatcctgctacagattgacaatgcccgtctggctgctgatgacttccgcaccaagtttgagacagagcaggccctgcgcctgagtgtggaggccgacatcaatggcctgcgcagggtgctggatgagctgaccctggccagagccgacctggagatgcagattgagaacctcaaggaggagctggcctacctgaagaagaaccacgaggaggagatgaacgccctgcgaggccaggtgggtggtgagatcaatgtggagatggacgctgccccaggcgtggacctgagccgcatcctcaacgagatgcgtgaccagtatgagaagatggcagagaagaaccgcaaggatgccgaggattggttcttcagcaagacagaggaactgaaccgcgaggtggccaccaacagtgagctggtgcagagtggcaagagtgagatctcggagctccggcgcaccatgcaggccttggagatagagctgcagtcccagctcagcatgaaagcatccctggagggcaacctggcggagacagagaaccgctactgcgtgcagctgtcccagatccaggggctgattggcagcgtggaggagcagctggcccagcttcgctgcgagatggagcagcagaaccaggaatacaaaatcctgctggatgtgaagacgcggctggagcaggagattgccacctaccgccgcctgctggagggagaggatgcccacctgactcagtacaagaaagaacgtaagtatctgcgtggcttcggccctgggggttgggtgcatgggacaggcagcccacctgcacgttgctggggcagggtccccaggagctccaggagttgatggctgtccctcagcagggagaagtgactcattagcactgaggattgatactcaggaaaagatcaaatgagagagacactgtctggtctgatgggggtggggcagggaactggtccttaccttggagatcctagtctgatggaggagacaggtcccagctctggagattgtcatctgatgggaagataggaacatggtctcatgatctttgctcttgacagcttttggatgagcaaaaacagtcctgtctctggggtctgtagcctgatgggagatagggacatggtccttgtcctccaaattccaatctgatggagaatatatgatcctagccttagggttcctagtctaatggaggagataggggcctggtttttgtcttggcgatcccagtctgatgggggagatggtagaaaatctatgtcctagagactgcagagaaatggagacggatttcatggagtctacatggctcctccctggcaggacacactggatcagaatcaaataacccatctggggaggcaagactcacacagggccaccggcagagggatgggatggaagggaggtggtggcagggacaggagggatgtgtgtgcagtgtgatgtcgaggtgccagtggaggcactcacagcacctgggggaggatgagggagagagccggctcctgtccatgagggctagggggcaagcgagggcctcctggcccctacccactttaaattgcctgcttctcctgcagcggtgaccacccgtcaggtgcgtaccattgtggaagaggtccaggatggcaaggtcatctcctcccgcgagcaggtccaccagaccacccgctgaggactcagctaccccggccggccacccaggaggcagggaggcagccgccccatctgccccacagtctccggcctctccagcctcagccccctgcttcagtcccttccccatgcttccttgcctgatgacaataaagcttgttgactcag

SEQ ID NO: 67336 - DNA, 1497 bp, Homo sapiens
  misc_feature (1)..(1): n is a, c, g, or t
naaataaggctaggtacgaggctggtgttaatcggccgaggctctctccagcccttctcctgtgtgcctgcctcctgccgccgccaccatgaccacctccatccgccagttcacctcctccagctccatcaagggctcctccggcctggggggcggctcgtcccgcacctcctgccggctgtctggcggcctgggtgccggctcctgcaggctgggatctgctggcggcctgggcagcaccctcgggggtagcagctactccagctgctacagctttggctctggtggtggctatggcagcagctttgggggtgttgatgggctgctggctggaggtgagaaggccaccatgcagaacctcaatgaccgccccaacactgagctggaggtgaagatccgtgactggtaccagaggcaggccccggggcccgcccgtgactacagccagtactacaggacaattgaggagctgcagaacaagatcctcacagccaccgtggacaatgccaacatcctgctacagattgacaatgcccgtctggctgctgatgacttccgcaccaagtttgagacagagcaggccctgcgcctgagtgtggaggccgacatcaatggcctgcgcagggtgctggatgagctgaccctggccagagccgacctggagatgcagattgagaacctcaaggaggagctggcctacctgaagaagaaccacgaggaggagatgaacgccctgcgaggccaggtgggtggtgagatcaatgtggagatggacgctgccccaggcgtggacctgagccgcatcctcaacgagatgcgtgaccagtatgagaagatggcagagaagaaccgcaaggatgccgaggattggttcttcagcaagacagaggaactgaaccgcgaggtggccaccaacagtgagctggtgcagagtggcaagagtgagatctcggagctccggcgcaccatgcaggccttggagatagagctgcagtcccagctcagcatgaaagcatccctggagggcaacctggcggagacagagaaccgctactgcgtgcagctgtcccagatccaggggctgattggcagcgtggaggagcagctggcccagcttcgctgcgagatggagcagcagaaccaggaatacaaaatcctgctggatgtgaagacgcggctggagcaggagattgccacctaccgccgcctgctggagggagaggatgcccacctgactcagtacaagaaagaaccggtgaccacccgtcaggtgcgtaccattgtggaagaggtccaggatggcaaggtcatctcctcccgcgagcaggtccaccagaccacccgctgaggactcagctaccccggccggccacccaggaggcagggaggcagccgccccatctgccccacagtctccggcctctccagcctcagccccctgcttcagtcccttccccatgcttccttgcctgatgacaataaagcttgttgactcag

SEQ ID NO: 67337 - DNA, 1559 bp, Homo sapiens
  misc_feature (1)..(1): n is a, c, g, or t
  misc_feature (1491)..(1491): n is a, c, g, or t
  misc_feature (1534)..(1534): n is a, c, g, or t
naaataaggctaggtacgaggctggtgttaatcggccgaggctctctccagcccttctcctgtgtgcctgcctcctgccgccgccaccatgaccacctccatccgccagttcacctcctccagctccatcaagggctcctccggcctggggggcggctcgtcccgcacctcctgccggctgtctggcggcctgggtgccggctcctgcaggctgggatctgctggcggcctgggcagcaccctcgggggtagcagctactccagctgctacagctttggctctggtggtggctatggcagcagctttgggggtgttgatgggctgctggctggaggtgagaaggccaccatgcagaacctcaatgaccgcctggcctcctacctggacaaggtgcgtgccctggaggaggccaacactgagctggaggtgaagatccgtgactggtaccagaggcaggccccggggcccgcccgtgactacagccagtactacaggacaattgaggagctgcagaacaagatcctcacagccaccgtggacaatgccaacatcctgctacagattgacaatgcccgtctggctgctgatgacttccgcaccaagtttgagacagagcaggccctgcgcctgagtgtggaggccgacatcaatggcctgcgcagggtgctggatgagctgaccctggccagagccgacctggagatgcagattgagaacctcaaggaggagctggcctacctgaagaagaaccacgaggaggagatgaacgccctgcgaggccaggtgggtggtgagatcaatgtggagatggacgctgccccaggcgtggacctgagccgcatcctcaacgagatgcgtgaccagtatgagaagatggcagagaagaaccgcaaggatgccgaggattggttcttcagcaagacagaggaactgaaccgcgaggtggccaccaacagtgagctggtgcagagtggcaagagtgagatctcggagctccggcgcaccatgcaggccttggagatagagctgcagtcccagctcagcatgaaagcatccctggagggcaacctggcggagacagagaaccgctactgcgtgcagctgtcccagatccaggggctgattggcagcgtggaggagcagctggcccagcttcgctgcgagatggagcagcagaaccaggaatacaaaatcctgctggatgtgaagacgcggctggagcaggagattgccacctaccgccgcctgctggagggagaggatgcccacctgagccgcatcctcaacgagatgcgtgaccagtatgagaagatggcagagaagaaccgcaaggatgccgaggattggttcttcagcaagacagaggaactgaaccgcgaggtggccaccaacagtgagctggtgcagagtggcaagagtgagatctcggagctccggcgcaccatgcagtccttggagatagagctgcagtcccagctcagcatgaaagncatcctggagggcaacctggcggagacagagaaccgctactgngtgcagctgtcccagtgctcagggg

SEQ ID NO: 67338 - DNA, 1358 bp, Homo sapiens
  misc_feature (1)..(1): n is a, c, g, or t
naaataaggctaggtacgaggctggtgttaatcggccgaggctctctccagcccttctcctgtgtgcctgcctcctgccgccgccaccatgaccacctccatccgccagttcacctcctccagctccatcaagggctcctccggcctggggggcggctcgtcccgcacctcctgccggctgtctggcggcctgggtgccggctcctgcaggctgggatctgctggcggcctgggcagcaccctcgggggtagcagctactccagctgctacagctttggctctggtggtggctatggcagcagctttgggggtgttgatgggctgctggctggaggtgagaaggccaccatgcagaacctcaatgaccgcctggcctcctacctggacaaggtgcgtgccctggaggaggccaacactgagctggaggtgaagatccgtgactggtaccagaggcaggccccggggcccgcccgtgactacagccagtactacaggacaattgaggagctgcagaacaagatcctcacagccaccgtggacaatgccaacatcctgctacagattgacaatgcccgtctggctgctgatgacttccgcaccaagtttgagacagagcaggccctgcgcctgagtgtggaggccgacatcaatggcctgcgcagggtgctggatgagctgaccctggccagagccgacctggagatgcagattgagaacctcaaggaggagctggcctacctgaagaagaaccacgaggaggagatgaacgccctgcgaggccaggtgggtggtgagatcaatgtggagatggacgctgccccaggcgtggacctgagccgcatcctcaacgagatgcgtgaccagtatgagaagatggcagagaagaaccgcaaggatgccgaggattggttcttcagcaagacagaggaactgaaccgcgaggtggccaccaacagtgagctggtgcagagtggcaagagtgagatctcggagctccggcgcaccatgcaggccttggagatagagctgcagtcccagctcagcatgaaagcatccctggagggcaacctggcggagacagagaaccgctactgcgtgcagctgtcccagatccaggggctgattggcagcgtggaggagcagctggcgttggccaacgctctcacatgtggcccaagaatcaagataacccgcatgaactcaacattttctctcagccagtaagctttgatacttgcctttctggtggcaaaaccaatggctggatttggcctcaatgaaacctacaaggtttctaaaaccagtgtggagagaatggggccttgaatatgggagaaaagaactgtgagcagcgttg

SEQ ID NO: 67339 - DNA, 2145 bp, Homo sapiens
taggctaggtgagcctgctgtgattcggcgaggcaattggggcccctctcctctccagcccttctcctgtgtgcctgcctcctgccgccgccaccatgaccacctccatccgccagttcacctcctccagctccatcaagggctcctccggcctggggggcggctcgtcccgcacctcctgccggctgtctggcggcctgggtgccggctcctgcaggctgggatctgctggcggcctgggcagcaccctcgggggtagcagctactccagctgctacagctttggctctggtggtggctatggcagcagctttgggggtgttgatgggctgctggctggaggtgagaaggccaccatgcagaacctcaatgaccgcctggcctcctacctggacaaggtgcgtgccctggaggaggccaacactgagctggaggtgaagatccgtgactggtaccagaggcaggccccggggcccgcccgtgactacagccagtactacaggacaattgaggagctgcagaacaagatcctcacagccaccgtggacaatgccaacatcctgctacagattgacaatgcccgtctggctgctgatgacttccgcaccaagtttgagacagagcaggccctgcgcctgagtgtggaggccgacatcaatggcctgcgcagggtgctggatgagctgaccctggccagagccgacctggagatgcagattgagaacctcaaggaggagctggcctacctgaagaagaaccacgaggagggtgaggtggctggggcagaaggtcaaagatgctgaggagtgggtggcagagccctggggctgggcaatggctgaggccgtgggagagagcagagcaggtgcaccgggattagtcaccttagagggcttccctgtctgcagagccctgatccttggggtccagtgtgcagggcagactcctctttgtaccacactgcttctctgtacacaaggaacctcccaggggcctgcagaggctccctctacctaccctgcctccctcatgagggtgggggataagtaaggaaatcttgtcccatttcaaactctcaaagctgaacatctacatagaagcttggaaattagaggggaacttttgggggcataggcctaataattagattttattttggagagtccttggtctaatgggggagatagagtctgatggtggaggcaatactgagcagaatgaataaaaatcatttagagggtcagatagagcagagggagaacaaaggaggggtccttgtgggaagtggggtccccatgtgggggaaggcttgggagtgagaggtcaggatgggtccagatgcgcacatccacatcccctttttccataggagatgaacgccctgcgaggccaggtgggtggtgagatcaatgtggagatggacgctgccccaggcgtggacctgagccgcatcctcaacgagatgcgtgaccagtatgagaagatggcagagaagaaccgcaaggatgccgaggattggttcttcagcaagacagaggaactgaaccgcgaggtggccaccaacagtgagctggtgcagagtggcaagagtgagatctcggagctccggcgcaccatgcaggccttggagatagagctgcagtcccagctcagcatgaaagcatccctggagggcaacctggcggagacagagaaccgctactgcgtgcagctgtcccagatccaggggctgattggcagcgtggaggagcagctggcccagcttcgctgcgagatggagcagcagaaccaggaatacaaaatcctgctggatgtgaagacgcggctggagcaggagattgccacctaccgccgcctgctggagggagaggatgcccacctgactcagtacaagaaagaaccggtgaccacccgtcaggtgcgtaccattgtggaagaggtccaggatggcaaggtcatctcctcccgcgagcaggtccaccagaccacccgctgaggactcagctaccccggccggccacccaggaggcagggaggcagccgccccatctgccccacagtctccggcctctccagcctcagccccctgcttcagtcccttccccatgcttccttgcctgatgacaataaagcttgttgactcag

SEQ ID NO: 67340 - DNA, 1507 bp, Homo sapiens
taggctaggtgagcctgctgtgattcggcgaggcaattggggcccctctcctctccagcccttctcctgtgtgcctgcctcctgccgccgccaccatgaccacctccatccgccagttcacctcctccagctccatcaagggctcctccggcctggggggcggctcgtcccgcacctcctgccggctgtctggcggcctgggtgccggctcctgcaggctgggatctgctggcggcctgggcagcaccctcgggggtagcagctactccagctgctacagctttggctctggtggtggctatggcagcagctttgggggtgttgatgggctgctggctggaggtgagaaggccaccatgcagaacctcaatgaccgcctggcctcctacctggacaaggtgcgtgccctggaggaggccaacactgagctggaggtgaagatccgtgactggtaccagaggcaggccccggggcccgcccgtgactacagccagtactacaggacaattgaggagctgcagaacaagatcctcacagccaccgtggacaatgccaacatcctgctacagattgacaatgcccgtctggctgctgatgacttccgcaccaagtttgagacagagcaggccctgcgcctgagtgtggaggccgacatcaatggcctgcgcagggtgctggatgagctgaccctggccagagccgacctggagatgcagattgagaacctcaaggaggagctggcctacctgaagaagaaccacgaggagatcaatgtggagatggacgctgccccaggcgtggacctgagccgcatcctcaacgagatgcgtgaccagtatgagaagatggcagagaagaaccgcaaggatgccgaggattggttcttcagcaagacagaggaactgaaccgcgaggtggccaccaacagtgagctggtgcagagtggcaagagtgagatctcggagctccggcgcaccatgcaggccttggagatagagctgcagtcccagctcagcatgaaagcatccctggagggcaacctggcggagacagagaaccgctactgcgtgcagctgtcccagatccaggggctgattggcagcgtggaggagcagctggcccagcttcgctgcgagatggagcagcagaaccaggaatacaaaatcctgctggatgtgaagacgcggctggagcaggagattgccacctaccgccgcctgctggagggagaggatgcccacctgactcagtacaagaaagaaccggtgaccacccgtcaggtgcgtaccattgtggaagaggtccaggatggcaaggtcatctcctcccgcgagcaggtccaccagaccacccgctgaggactcagctaccccggccggccacccaggaggcagggaggcagccgccccatctgccccacagtctccggcctctccagcctcagccccctgcttcagtcccttccccatgcttccttgcctgatgacaataaagcttgttgactcag

SEQ ID NO: 67341 - DNA, 1281 bp, Homo sapiens
  misc_feature (1)..(1): n is a, c, g, or t
naaataaggctaggtacgaggctggtgttaatcggccgaggctctctccagcccttctcctgtgtgcctgcctcctgccgccgccaccatgaccacctccatccgccagttcacctcctccagctccatcaagggctcctccggcctggggggcggctcgtcccgcacctcctgccggctgtctggcggcctgggtgccggctcctgcaggctgggatctgctggcggcctgggcagcaccctcgggggtagcagctactccagctgctacagctttggctctggtggtggctatggcagcagctttgggggtgttgatgggctgctggctggaggtgagaaggccaccatgcagaacctcaatgaccgccgcctgagtgtggaggccgacatcaatggcctgcgcagggtgctggatgagctgaccctggccagagccgacctggagatgcagattgagaacctcaaggaggagctggcctacctgaagaagaaccacgaggaggagatgaacgccctgcgaggccaggtgggtggtgagatcaatgtggagatggacgctgccccaggcgtggacctgagccgcatcctcaacgagatgcgtgaccagtatgagaagatggcagagaagaaccgcaaggatgccgaggattggttcttcagcaagacagaggaactgaaccgcgaggtggccaccaacagtgagctggtgcagagtggcaagagtgagatctcggagctccggcgcaccatgcaggccttggagatagagctgcagtcccagctcagcatgaaagcatccctggagggcaacctggcggagacagagaaccgctactgcgtgcagctgtcccagatccaggggctgattggcagcgtggaggagcagctggcccagcttcgctgcgagatggagcagcagaaccaggaatacaaaatcctgctggatgtgaagacgcggctggagcaggagattgccacctaccgccgcctgctggagggagaggatgcccacctgactcagtacaagaaagaaccggtgaccacccgtcaggtgcgtaccattgtggaagaggtccaggatggcaaggtcatctcctcccgcgagcaggtccaccagaccacccgctgaggactcagctaccccggccggccacccaggaggcagggaggcagccgccccatctgccccacagtctccggcctctccagcctcagccccctgcttcagtcccttccccatgcttccttgcctgatgacaataaagcttgttgactcag

SEQ ID NO: 67342 - DNA, 974 bp, Homo sapiens
  misc_feature (1)..(1): n is a, c, g, or t
naaataaggctaggtacgaggctggtgttaatcggccgaggctctctccagcccttctcctgtgtgcctgcctcctgccgccgccaccatgaccacctccatccgccagttcacctcctccagctccatcaagggctcctccggcctggggggcggctcgtcccgcacctcctgccggctgtctggcggcctgggtgccggctcctgcaggctgggatctgctggcggcctgggcagcaccctcgggggtagcagctactccagctgctacagctttggctctggtggtggctatggcagcagctttgggggtgttgatgggctgctggctggaggtgagaaggccaccatgcagaacctcaatgaccgcctggcctcctacctggacaaggtgcgtgccctggaggaggccaacactgagctggaggtgaagatccgtgactggtaccagaggcaggccccggggcccgcccgtgactacagccagtactacaggacaattgaggagctgcagaacaagatcctcacagccaccgtggacaatgccaacatcctgctacagattgacaatgcccgtctggctgctgatgacttccgcaccaagtttgagacagagcaggccctgcgcctgagtgtggaggccgacatcaatggcctgcgcagggtgctggatgagctgaccctggccagagccgacctggagatgcagattgagaacctcaaggaggagctggcctacctgaagaagaaccacgaggaggagatgaacgccctgcgaggccaggtgggtggtgagatcaatgtggagatggacgctgccccaggcgtggacctgagccgcatcctcaacgagatgcgtgaccagtatgagaagatggcagagaagaaccgcaaggatgccgaggattggttcttcagcaagacagaggaactgaaccgcaaggaggctcacagtgctaggaggctccagtgct

SEQ ID NO: 67343 - DNA, 1171 bp, Homo sapiens
  misc_feature (1)..(1): n is a, c, g, or t
naaataaggctaggtacgaggctggtgttaatcggccgaggctctctccagcccttctcctgtgtgcctgcctcctgccgccgccaccatgaccacctccatccgccagttcacctcctccagctccatcaagggctcctccggcctggggggcggctcgtcccgcacctcctgccggctgtctggcggcctgggtgccggctcctgcaggctgggatctgctggcggcctgggcagcaccctcgggggtagcagctactccagctgctacagctttggctctggtggtggctatggcagcagctttgggggtgttgatgggctgctggctggaggtgagaaggccaccatgcagaacctcaatgaccgcctggcctcctacctggacaaggtgcgtgccctggaggaggccaacactgagctggaggtgaagatccgtgactggtaccagaggcaggccccggggcccgcccgtgactacagccagtactacaggacaattgaggagctgcagaacaagatcctcacagccaccgtggacaatgccaacatcctgctacagattgacaatgcccgtctggctgctgatgacttccgcaccaagtttgagacagagcaggccctgcgcctgagtgtggaggccgacatcaatggcctgcgcagggtgctggatgagctgaccctggccagagccgacctggagatgcagattgagaacctcaaggaggagctggcctacctgaagaagaaccacgaggaggagatgaacgccctgcgaggccaggtgggtggtgagatcaatgtggagatggacgctgccccaggcgtggacctgagccgcatcctcaacgagatgcgtggagattgccacctaccgccgcctgctggagggagaggatgcccacctgactcagtacaagaaagaaccggtgaccacccgtcaggtgcgtaccattgtggaagaggtccaggatggcaaggtcatctcctcccgcgagcaggtccaccagaccacccgctgaggactcagctaccccggccggccacccaggaggcagggaggcagccgccccatctgccccacagtctccggcctctccagcctcagccccctgcttcagtcccttccccatgcttccttgcctgatgacaataaagcttgttgactcag

SEQ ID NO: 67344 - DNA, 1178 bp, Homo sapiens
taggctaggtgagcctgctgtgattcggcgaggcaattggggcccctctcctctccagcccttctcctgtgtgcctgcctcctgccgccgccaccatgaccacctccatccgccagttcacctcctccagctccatcaagggctcctccggcctggggggcggctcgtcccgcacctcctgccggctgtctggcggcctgggtgccggctcctgcaggctgggatctgctggcggcctgggcagcaccctcgggggtagcagctactccagctgctacagctttggctctggtggtggctatggcagcagctttgggggtgttgatgggctgctggctggaggtgagaaggccaccatgcagaacctcaatgaccgcctggcctcctacctggacaaggtgcgtgccctggaggaggccaacactgagctggaggtgaagatccgtgactggtaccagaggcaggccccggggcccgcccgtgactacagccagtactacaggacaattgaggagctgcagaacaagatcctcacagccaccgtggacaatgccaacatcctgctacagattgacaatgcccgtctggctgctgatgacttccgcaccaagtttgagacagagcaggccctgcgcctgagtgtggaggccgacatcaatggcctgcgcagggtgctggatgagctgaccctggccagagccgacctggagatgcagattgagaacctcaaggaggagctggcctacctgaagaagaaccacgaggaggagatgaacgccctgcgaggccaggtgggtggtgagatcaatgtggagatggacgctgccccaggcgtggacctgagccgcatcctcaacgagatgcgtggagattgccacctaccgccgcctgctggagggagaggatgcccacctgactcagtacaagaaagaaccggtgaccacccgtcaggtgcgtaccattgtggaagaggtccaggatggcaaggtcatctcctcccgcgagcaggtccaccagaccacccgctgaggactcagctaccccggccggccacccaggaggcagggaggcagccgccccatctgccccacagtctccggcctctccagcctcagccccctgcttcagtcccttccccatgcttccttgcctgatgacaataaagcttgttgactcag

SEQ ID NO: 67345 - DNA, 927 bp, Homo sapiens
  misc_feature (1)..(1): n is a, c, g, or t
naaataaggctaggtacgaggctggtgttaatcggccgaggctctctccagcccttctcctgtgtgcctgcctcctgccgccgccaccatgaccacctccatccgccagttcacctcctccagctccatcaagggctcctccggcctggggggcggctcgtcccgcacctcctgccggctgtctggcggcctgggtgccggctcctgcaggctgggatctgctggcggcctgggcagcaccctcgggggtagcagctactccagctgctacagctttggctctggtggtggctatggcagcagctttgggggtgttgatgggctgctggctggaggtgagaaggccaccatgcagaacctcaatgaccgcctggcctcctacctggacaaggtgcgtgccctggaggaggccaacactgagctggaggtgaagatccgtgactggtaccagaggcaggccccggggcccgcccgtgactacagccagtactacaggacaattgaggagctgcagaacaagatcctcacagccaccgtggacaatgccaacatcctgctacagattgacaatgcccgtctggctgctgatgacttccgcaccaagtttgagacagagcaggccctgcgcctgagtgtggaggccgacatcaatggcctgcgcagggtgctggatgagctgaccctggccagagccgacctggagatgcagattgagaacctcaaggaggagctggcctacctgaagaagaaccacgaggaggagatgaacgccctgcgaggccaggtgggtggtgagatcaatgtggagatggacgctgccccaggcgtggacctgagccgcatcctcaacgagatgcgtgccgtctggagatggggaaccgaggtgcgggtggttcagaaagggaggacggggggccagggtggggg

SEQ ID NO: 67346 - DNA, 435 bp, Homo sapiens
gaagcctcccggtacccccgagcttgagggagggagcttgaccccaacccagcttcgctgcgagatggagcagcagaaccaggaatacaaaatcctgctggatgtgaagacgcggctggagcaggagattgccacctaccgccgcctgctggagggagaggatgcccacctgactcagtacaagaaagaaccggtgaccacccgtcaggtgcgtaccattgtggaagaggtccaggatggcaaggtcatctcctcccgcgagcaggtccaccagaccacccgctgaggactcagctaccccggccggccacccaggaggcagggaggcagccgccccatctgccccacagtctccggcctctccagcctcagccccctgcttcagtcccttccccatgcttccttgcctgatgacaataaagcttgttgactcag

SEQ ID NO: 67347 - DNA, 1054 bp, Homo sapiens
taggctaggtgagcctgctgtgattcggcgaggcaattggggcccctctcctctccagcccttctcctgtgtgcctgcctcctgccgccgccaccatgaccacctccatccgccagttcacctcctccagctccatcaagggctcctccggcctggggggcggctcgtcccgcacctcctgccggctgtctggcggcctgggtgccggctcctgcaggctgggatctgctggcggcctgggcagcaccctcgggggtagcagctactccagctgctacagctttggctctggtggtggctatggcagcagctttgggggtgttgatgggctgctggctggaggtgagaaggccaccatgcagaacctcaatgaccgcctggcctcctacctggacaaggtgcgtgccctggaggaggccaacactgagctggaggtgaagatccgtgactggtaccagaggcaggccccggggcccgcccgtgactacagccagtactacaggacaattgaggagctgcagaacaagatcctcacagccaccgtggacaatgccaacatcctgctacagattgacaatgcccgtctggctgctgatgacttccgcaccaagtttgagacagagcaggccctgcgcctgagtgtggaggccgacatcaatggcctgcgcagggtgctggatgagctgaccctggccagagccgacctggagatgcagattggagatgaacgccctgcgaggccaggtgggtggtgagatcaatgtggagatggacgctgccccaggcgtggacctgagccgcatcctcaacgagatgcgtgggtgccggctcctgcaggctgggatctgctggcggcctgggcagcaccctcgggggtagcagctactccagctgctacagctttggctctggtggtggctatggcagcagctttgggggtgttgatgggctgctggctggaggtgagaaggcccggcctctccagcctcagccccctgcttcagtcccttccccatgcttccttgcctgatgacaataaagcttgttgactcag

SEQ ID NO: 67348 - DNA, 415 bp, Homo sapiens
  misc_feature (1)..(1): n is a, c, g, or t
naaataaggctaggtacgaggctggtgttaatcggccgaggctctctccagcccttctcctgtgtgcctgcctcctgccgccgccaccatgaccacctccatccgccagttcacctcctccagctccatcaagggctcctccggcctggggggcggctcgtcccgcacctcctgccggctgtctggcggcctgggtgccggctcctgcaggctgggatctgctggcggcctgggcagcaccctcgggggtagcagctactccagctgctacagctttggctctggtggtggctatggcagcagctttgggggtgttgatgggctgctggctggccggcctctccagcctcagccccctgcttcagtcccttccccatgcttccttgcctgatgacaataaagcttgttgactcag

SEQ ID NO: 67349 - DNA, 208 bp, Homo sapiens
agaaccgctactgcgtgcagctgtcccagatccaggggctgattggcagcgtggaggagcagctggcccagcttcgctgcgagatggagcagcagaaccaggaatacaaaatcctgctggatgtgaagacgcggctggagcaggagattgccacctaccgccgcctgctggagggagaggatgcccaagtgagtgggggcgcctgggg

SEQ ID NO: 67350 - DNA, 715 bp, Homo sapiens
  misc_feature (38)..(38): n is a, c, g, or t
ggcctggtggcgaattcggcacgaggcctaatgaccgnctggcctcctacctggacaaggtgcgtgccctggaggaggccaacactgagctggaggtgaagatccgtgactggtaccagaggcaggccccggggcccgcccgtgactacagccagtactacaggacaattgaggagctgcagaacaagatcctcacagccaccgtggacaatgccaacatcctgctacagattgacaatgcccgtctggctgctgatgacttccgcaccaagtttgagacagagcaggccctgcgcctgagtgtggaggccgacatcaatggcctgcgcagggtgctggatgagctgaccctggccagagccgacctggagatgcagattggagatgaacgccctgcgaggccaggtgggtggtgagatcaatgtggagatggacgctgccccaggcgtggacctgagccgcatcctcaacgagatgcgtgggtgccggctcctgcaggctgggatctgctggcggcctgggcagcaccctcgggggtagcagctactccagctgctacagctttggctctggtggtggctatggcagcagctttgggggtgttgatgggctgctggctggaggtgagaaggcccggcctctccagcctcagccccctgcttcagtcccttccccatgcttccttgcctgatgacaataaagcttgttgactcag

SEQ ID NO: 67351 - DNA, 1030 bp, Homo sapiens
  misc_feature (1)..(1): n is a, c, g, or t
  misc_feature (895)..(895): n is a, c, g, or t
naaataaggctaggtacgaggctggtgttaatcggccgaggctctcctgccgccgccaccatgaccacctccatccgccagttcacctcctccagctccatcaagggctcctccggcctggggggcggctcgtcccgcacctcctgccggctgtctggcggcctgggtgccggctcctgcaggctgggatctgctggcggcctgggcagcaccctcgggggtagcagctactccagctgctacagctttggctctggtggtggctatggcagcagctttgggggtgttgatgggctgctggctggaggtgagaaggccaccatgcagaacctcaatgaccgcctggcctcctacctggacaaggtgcgtgccctggaggaggccaacactgagctggaggtgaagatccgtgactggtaccagaggcaggccccggggcccgcccgtgactacagccagtactacaggacaattgaggagctgcagaacaagatcctcacagccaccgtggacaatgccaacatcctgctacagattgacaatgcccgtctggctgctgatgacttccgcaccaagtttgagacagagcaggccctgcgcctgagtgtggaggccgacatcaatggcctgcgcagggtgctggatgagctgaccctggccagagccgacctggagatgcagattgagaacctcaaggaggagctggcctacctgaagaagaaccacgaggaggagatgaacgccctgcgaggccaggtgggtggtgagatcaatgtggagatggacgctgccccaggcgtggacctgagccgcatcctcaacgagatgcgtgaccagtatgagaagatggcagagaagaaccgcaaggatgccgaggattggttcttcagcagangggattgtacgcgggggcccactggcgtgtcgaggcgagtggactttggctccggcccaggctgggaaatgggccccgtgatcggggccctggcaaccttgtgccccggtgggggaggccctaaggcaaatcggg

SEQ ID NO: 67352 - DNA, 1222 bp, Homo sapiens
gctgagctcaagctgggatctggcgggtgggtggggaggtagggagctccctcagaataaaggcagagggtaaagaccttgggagtccccacgtctccctcaagaagtcaggaactagcatcaagagccaggctacatgttctggcttgttctcaagtttccggtctgtgcctcccacacgctgggattaaccataaaaagttaacatttcaaatggcatgtttctgggctttgggatgtgggaagctggtgagaaggcacactctctccacagttagatttgggaggaggcctgacttgggagagggatccaggctcacaccgccctgtcctgtgtcctgtctgcagacagaggaactgaaccgcgaggtggccaccaacagtgagctggtgcagagtggcaagagtgagatctcggagctccggcgcaccatgcaggccttggagatagagctgcagtcccagctcagcatgaaagcatccctggagggcaacctggcggagacagagaaccgctactgcgtgcagctgtcccagatccaggggctgattggcagcgtggaggagcagctggcccagcttcgctgcgagatggagcagcagaaccaggaatacaaaatcctgctggatgtgaagacgcggctggagcaggagattgccacctaccgccgcctgctggagggagaggatgcccacctgactcagtacaagaaagaaccggtgaccacccgtcaggtgcgtaccattgtggaagaggtccaggatggcaaggtcatctcctcccgcgagcaggtccaccagaccacccgctgaggactcagctaccccggccggccacccaggaggcagggaggcagccgccccatctgccccacagtctccggcctctccagcctcagccccctgcttcagtcccttccccatgcttccttgcctgatgacaataaagcttgttgactcagaaaaaaaaaaataaaacagtaaatcaaacacaaagaagaggcgggggcgcggcgctaaaaaaatattcccgcccagagggcgcaagagtgtcgtgggacccccaggtttttttgtcacaaagtgggcgcccataaggagagcgggtagtataagcgagaggacgagcgcgcgtataaacaccgcttggattcggggaacactgatcgtgggattctgggaagggaccttacttctggcggtgacgatttgggacactact

SEQ ID NO: 67353 - DNA, 733 bp, Homo sapiens
gaggacagcagcatggagaaagatcctagaaaaggcctctgacttccttcacctcctccagctccatcaagggctcctccggcctggggggcggctcgtcccgcacctcctgccggctgtctggcggcctgggtgccggctcctgcaggctgggatctgctggcggcctgggcagcaccctcgggggtagcagctactccagctgctacagctttggctctggtggtggctatggcagcagctttgggggtgttgatgggctgctggctggaggtgagaaggccaccatgcagaacctcaatgaccgcctggcctcctacctggacaaggtgcgtgccctggaggaggccaacactgagctggaggtgaagatccgtgactggtaccagaggcaggccccggggcccgcccgtgactacagccagtactacaggacaattgaggagctgcagaacaagatcctcacagccaccgtggacaatgccaacatcctgctacagattgacaatgcccgtctggctgctgatgacttccgcaccaagtttgagacagagcaggccctgcgcctgagtgtggaggccgacatcaatggcctgcgcagggtgctggatgagctgaccctggccagagccgacctggagatgcagattgagaacctcaaggaggagctggcctacctgaagaagaaccacgaggagggagaccaccagaggcataactcctgggatcgacc

SEQ ID NO: 67354 - DNA, 849 bp, Homo sapiens
  misc_feature (38)..(38): n is a, c, g, or t
ggcctggtggcgaattcggcacgaggcctaatgaccgnctggcctcctacctggacaaggtgcgtgccctggaggaggccaacactgagctggaggtgaagatccgtgactggtaccagaggcaggccccggggcccgcccgtgactacagccagtactacaggacaattgaggagctgcagaacaagatcctcacagccaccgtggacaatgccaacatcctgctacagattgacaatgcccgtctggctgctgatgacttccgcaccaagtttgagacagagcaggccctgcgcctgagtgtggaggccgacatcaatggcctgcgcagggtgctggatgagctgaccctggccagagccgacctggagatgcagattggagatgaacgccctgcgaggccaggtgggtggtgagatcaatgtggagatggacgctgccccaggcgtggacctgagccgcatcctcaacgagatgcgtgggtgccggctcctgcaggctgggatctgctggcggcctgggcagcaccctcgggggtagcagctactccagctgctacagctttggctctggtggtggctatggcagcagctttgggggtgttgatgggctgctggctggaggtgagaaggcccggcctctccagcctcagccccctgcttcagtcccttccccatgcttccttgcctgatgacaataaagcttgttgactcagtaaaaaaaaaaaaaaaatgaggttttatttggggggggggaaagaggtttggaatgggcatggtatgttgttctgcccagtttttgtaaggggaattgcggtcctaggaggataatgaagcgttctgtttgaac

SEQ ID NO: 67355 - DNA, 1878 bp, Homo sapiens
  misc_feature (1)..(1): n is a, c, g, or t
naaataaggctaggtacgaggctggtgttaatcggccgaggctctctccagcccttctcctgtgtgcctgcctcctgccgccgccaccatgaccacctccatccgccagttcacctcctccagctccatcaagggctcctccggcctggggggcggctcgtcccgcacctcctgccggctgtctggcggcctgggtgccggctcctgcaggctgggatctgctggcggcctgggcagcaccctcgggggtagcagctactccagctgctacagctttggctctggtggtggctatggcagcagctttgggggtgttgatgggctgctggctggaggtgagaaggccaccatgcagaacctcaatgaccgcctggcctcctacctggacaaggtgcgtgccctggaggaggccaacactgagctggaggtgaagatccgtgactggtaccagaggcaggccccggggcccgcccgtgactacagccagtactacaggacaattgaggagctgcagaacaagatcctcacagccaccgtggacaatgccaacatcctgctacagattgacaatgcccgtctggctgctgatgacttccgcaccaagtttgagacagagcaggccctgcgcctgagtgtggaggccgacatcaatggcctgcgcagggtgctggatgagctgaccctggccagagccgacctggagatgcagattgagaacctcaaggaggagctggcctacctgaagaagaaccacgaggaggagatgaacgccctgcgaggccaggtgggtggtgagatcaatgtggagatggacgctgccccaggcgtggacctgagccgcatcctcaacgagatgcgtgaccagtatgagaagatggcagagaagaaccgcaaggatgccgaggattggttcttcagcaagacagaggaactgaaccgcgaggtggccaccaacagtgagctggtgcagagtggcaagagtgagatctcggagctccggcgcaccatgcaggccttggagatagagctgcagtcccagctcagcatgaaagcatccctggagggcaacctggcggagacagagaaccgctactgcgtgcagctgtcccagatccaggggctgattggcagcgtggaggagcagctggcccagcttcgctgcgagatggagcagcagaaccaggaatacaaaatcctgctggatgtgaagacgcggctggagcaggagattgccacctaccgccgcctgctggagggagaggatgcccacctgactcagtacaagaaagaaccggtgaccacccgtcaggtgcgtaccattgtggaagaggtccaggatggcaaggtcatctcctcccgcgagcaggtccaccagaccacccgctgaggactcagctaccccggccggccacccaggaggcagggaggcagccgccccatctgccccacagtctccggcctctccagcctcagccccctgcttcagtcccttccccatgcttccttgcctgatgacaataaagcttgttgactcaggctaaaaaaaaaaaaaaaataaagaacaaaaccaacaaaaaaaaaaaaaaaaaaaaaaaaaaaaaaaaaaaaaaagaggggggggcgcccaaaaaaaaccccgaggggggcacacaaaagagacacaggcacaaggtgaggacaaacagaggggcgccacaaagaggcaggcgcaaaaagacaacaagaagcgcgacgacagtcacaacagcgcgcacggaaaaaaaacacgcgaaagaagacacacttggaagagacaccacaaactcggggggggacacacaagggggggagcacacacagcagaagaggcgccagaggcgaaatagaggcagggcacac

SEQ ID NO: 67356 - DNA, 1487 bp, Homo sapiens
  misc_feature (1)..(1): n is a, c, g, or t
naaataaggctaggtacgaggctggtgttaatcggccgaggctctctccagcccttctcctgtgtgcctgcctcctgccgccgccaccatgaccacctccatccgccagttcacctcctccagctccatcaagggctcctccggcctggggggcggctcgtcccgcacctcctgccggctgtctggcggcctgggtgccggctcctgcaggctgggatctgctggcggcctgggcagcaccctcgggggtagcagctactccagctgctacagctttggctctggtggtggctatggcagcagctttgggggtgttgatgggctgctggctggaggtgagaaggccaccatgcagaacctcaatgaccgcctggcctcctacctggacaaggtgcgtgccctggaggaggccaacactgagctggaggtgaagatccgtgactggtaccagaggcaggccccggggcccgcccgtgactacagccagtactacaggacaattgaggagctgcagaacaagatcctcacagccaccgtggacaatgccaacatcctgctacagattgacaatgcccgtctggctgctgatgacttccgcaccaagtttgagacagagcaggccctgcgcctgagtgtggaggccgacatcaatggcctgcgcagggtgctggatgagctgaccctggccagagccgacctggagatgcagattgagaacctcaaggaggagctggcctacctgaagaagaaccacgaggaggagatgaacgccctgcgaggccaggtgggtggtgagatcaatgtggagatggacgctgccccaggcgtggacctgagccgcatcctcaacgagatgcgtgaccagtatgagaagatggcagagaagaaccgcaaggatgccgaggattggttcttcagcaagacagaggaactgaaccgcgaggtggccaccaacagtgagctggtgcagagtggcaagagtgagatctcggagctccggcgcaccatgcaggccttggagatagagctgcagtcccagctcagcatgaaagcatccctggagggcaacctggcggagacagagaaccgctactgcgtgcagctgtcccagatccaggggctgattggcagcgtggaggagcagctggcccagcttcgctgcgagatggagcagcagaaccaggaatacaaaatcctgctggatgtgaagacgcggctggagcaggagattgccacctaccgccgcctgctggagggagaggatgcccacctgactcagtacaagaaagaaccggtgaccacccgtcaggtgcgtaccattgtggaagaggtccaggatggcaaggtcatctcctcccgcgagcaggtccaccagaccacccgctgaggactcagctaccccggccggccacccaggaggcagggaggcagccgccccatctgccccacagtctttctctctacctgaaacgatcctcaagtactaa

SEQ ID NO: 67357 - DNA, 1674 bp, Homo sapiens
  misc_feature (1)..(1): n is a, c, g, or t
naaataaggctaggtacgaggctggtgttaatcggccgaggctctctccagcccttctcctgtgtgcctgcctcctgccgccgccaccatgaccacctccatccgccagttcacctcctccagctccatcaagggctcctccggcctggggggcggctcgtcccgcacctcctgccggctgtctggcggcctgggtgccggctcctgcaggctgggatctgctggcggcctgggcagcaccctcgggggtagcagctactccagctgctacagctttggctctggtggtggctatggcagcagctttgggggtgttgatgggctgctggctggaggtgagaaggccaccatgcagaacctcaatgaccgcctggcctcctacctggacaaggtgcgtgccctggaggaggccaacactgagctggaggtgaagatccgtgactggtaccagaggcaggccccggggcccgcccgtgactacagccagtactacaggacaattgaggagctgcagaacaagatcctcacagccaccgtggacaatgccaacatcctgctacagattgacaatgcccgtctggctgctgatgacttccgcaccaagtttgagacagagcaggccctgcgcctgagtgtggaggccgacatcaatggcctgcgcagggtgctggatgagctgaccctggccagagccgacctggagatgcagattgagaacctcaaggaggagctggcctacctgaagaagaaccacgaggaggagatgaacgccctgcgaggccaggtgggtggtgagatcaatgtggagatggacgctgccccaggcgtggacctgagccgcatcctcaacgagatgcgtgaccagtatgagaagatggcagagaagaaccgcaaggatgccgaggattggttcttcagcaagacagaggaactgaaccgcgaggtggccaccaacagtgagctggtgcagagtggcaagagtgagatctcggagctccggcgcaccatgcaggccttggagatagagctgcagtcccagctcagcatgaaagcatccctggagggcaacctggcggagacagagaaccgctactgcgtgcagctgtcccagatccaggggctgattggcagcgtggaggagcagctggcccagcttcgctgcgagatggagcagcagaaccaggaatacaaaatcctgctggatgtgaagacgcggctggagcaggagattgccacctaccgccgcctgctggagggagaggatgcccacctgactcagtacaagaaagaaccggtgaccacccgtcaggtgcgtaccattgtggaagaggtccaggatggcaaggtcatctcctcccgcgagcaggtccacaatggtacgcacctaccgccgggagaggatgcccacctgactcagtacaagaaagaaccggtgaccacccgtcaggtgcgtaccattgtggaagaggtccaggatggcaaggtcatctcctcccgcgagcaggtccaccagaccacccgctgaggactcagctaccccggccggccacccaggaggcagggaggcagccgccccatctgccccacagtctccggcctctccagcctcagccccctgcttcagtcccttccccatgcttccttgcctgatgacaataaagcttgttgactcag

SEQ ID NO: 67358 - DNA, 1610 bp, Homo sapiens
cagccacctgggagctggcaggtggccagtggtgatgaaagcccagggaatggaaacagaggagcaagcctgttgtaatcgctacgcccacttggtggcctataaaggaagcgggcgaaccccggcagccctacacaacttggggcccctctcctctccagcccttctcctgtgtgcctgcctcctgccgccgccaccatgaccacctccatccgccagttcacctcctccagctccatcaagggctcctccggcctggggggcggctcgtcccgcacctcctgccggctgtctggcggcctgggtgccggctcctgcaggctgggatctgctggcggcctgggcagcaccctcgggggtagcagctactccagctgctacagctttggctctggtggtggctatggcagcagctttgggggtgttgatgggctgctggctggaggtgagaaggccaccatgcagaacctcaatgaccgcctggcctcctacctggacaaggtgcgtgccctggaggaggccaacactgagctggaggtgaagatccgtgactggtaccagaggcaggccccggggcccgcccgtgactacagccagtactacaggacaattgaggagctgcagaacaagatcctcacagccaccgtggacaatgccaacatcctgctacagattgacaatgcccgtctggctgctgatgacttccgcaccaagtttgagacagagcaggccctgcgcctgagtgtggaggccgacatcaatggcctgcgcagggtgctggatgagctgaccctggccagagccgacctggagatgcagattgagaacctcaaggaggagctggcctacctgaagaagaaccacgaggagatcaatgtggagatggacgctgccccaggcgtggacctgagccgcatcctcaacgagatgcgtgaccagtatgagaagatggcagagaagaaccgcaaggatgccgaggattggttcttcagcaagacagaggaactgaaccgcgaggtggccaccaacagtgagctggtgcagagtggcaagagtgagatctcggagctccggcgcaccatgcaggccttggagatagagctgcagtcccagctcagcatgaaagcatccctggagggcaacctggcggagacagagaaccgctactgcgtgcagctgtcccagatccaggggctgattggcagcgtggaggagcagctggcccagcttcgctgcgagatggagcagcagaaccaggaatacaaaatcctgctggatgtgaagacgcggctggagcaggagattgccacctaccgccgcctgctggagggagaggatgcccacctgactcagtacaagaaagaaccggtgaccacccgtcaggtgcgtaccattgtggaagaggtccaggatggcaaggtcatctcctcccgcgagcaggtccaccagaccacccgctgaggactcagctaccccggccggccacccaggaggcagggaggcagccgccccatctgccccacagtctccggcctctccagcctcagccccctgcttcagtcccttccccatgcttccttgcctgatgacaataaagcttgttgactcag

SEQ ID NO: 67359 - DNA, 1476 bp, Homo sapiens
  misc_feature (1)..(1): n is a, c, g, or t
naaataaggctaggtacgaggctggtgttaatcggccgaggctctctccagcccttctcctgtgtgcctgcctcctgccgccgccaccatgaccacctccatccgccagttcacctcctccagctccatcaagggctcctccggcctggggggcggctcgtcccgcacctcctgccggctgtctggcggcctgggtgccggctcctgcaggctgggatctgctggcggcctgggcagcaccctcgggggtagcagctactccagctgctacagctttggctctggtggtggctatggcagcagctttgggggtgttgatgggctgctggctggaggtgagaaggccaccatgcagaacctcaatgaccgcctggcctcctacctggacaaggtgcgtgccctggaggaggccaacactgagctggaggtgaagatccgtgactggtaccagaggcaggccccggggcccgcccgtgactacagccagtactacaggacaattgaggagctgcagaacaagatcctcacagccaccgtggacaatgccaacatcctgctacagattgacaatgcccgtctggctgctgatgacttccgcaccaaggtgctggatgagctgaccctggccagagccgacctggagatgcagattgagaacctcaaggaggagctggcctacctgaagaagaaccacgaggaggagatgaacgccctgcgaggccaggtgggtggtgagatcaatgtggagatggacgctgccccaggcgtggacctgagccgcatcctcaacgagatgcgtgaccagtatgagaagatggcagagaagaaccgcaaggatgccgaggattggttcttcagcaagacagaggaactgaaccgcgaggtggccaccaacagtgagctggtgcagagtggcaagagtgagatctcggagctccggcgcaccatgcaggccttggagatagagctgcagtcccagctcagcatgaaagcatccctggagggcaacctggcggagacagagaaccgctactgcgtgcagctgtcccagatccaggggctgattggcagcgtggaggagcagctggcccagcttcgctgcgagatggagcagcagaaccaggaatacaaaatcctgctggatgtgaagacgcggctggagcaggagattgccacctaccgccgcctgctggagggagaggatgcccacctgactcagtacaagaaagaaccggtgaccacccgtcaggtgcgtaccattgtggaagaggtccaggatggcaaggtcatctcctcccgcgagcaggtccaccagaccacccgctgaggactcagctaccccggccggccacccaggaggcagggaggcagccgccccatctgccccacagtctccggcctctccagcctcagccccctgcttcagtcccttccccatgcttccttgcctgatgacaataaagcttgttgactcag

SEQ ID NO: 67360 - DNA, 1143 bp, Homo sapiens
  misc_feature (1)..(1): n is a, c, g, or t
naaataaggctaggtacgaggctggtgttaatcggccgaggctctctccagcccttctcctgtgtgcctgcctcctgccgccgccaccatgaccacctccatccgccagttcacctcctccagctccatcaagggctcctccggcctggggggcggctcgtcccgcacctcctgccggctgtctggcggcctgggtgccggctcctgcaggctgggatctgctggcggcctgggcagcaccctcgggggtagcagctactccagctgctacagctttggctctggtggtggctatggcagcagctttgggggtgttgatgggctgctggctggaggtgagaaggccaccatgcagaacctcaatgaccgcctggcctcctacctggacaaggtgcgtgccctggaggaggccaacactgagctggaggtgaagatccgtgactggtaccagaggcaggccccggggcaccagtatgagaagatggcagagaagaaccgcaaggatgccgaggattggttcttcagcaagacagaggaactgaaccgcgaggtggccaccaacagtgagctggtgcagagtggcaagagtgagatctcggagctccggcgcaccatgcaggccttggagatagagctgcagtcccagctcagcatgaaagcatccctggagggcaacctggcggagacagagaaccgctactgcgtgcagctgtcccagatccaggggctgattggcagcgtggaggagcagctggcccagcttcgctgcgagatggagcagcagaaccaggaatacaaaatcctgctggatgtgaagacgcggctggagcaggagattgccacctaccgccgcctgctggagggagaggatgcccacctgactcagtacaagaaagaaccggtgaccacccgtcaggtgcgtaccattgtggaagaggtccaggatggcaaggtcatctcctcccgcgagcaggtccaccagaccacccgctgaggactcagctaccccggccggccacccaggaggcagggaggcagccgccccatctgccccacagtctccggcctctccagcctcagccccctgcttcagtcccttccccatgcttccttgcctgatgacaataaagcttgttgactcag

SEQ ID NO: 67361 - DNA, 677 bp, Homo sapiens
gtcactctagaggatctctagaatggcagagaaaacgcagatgcgaggatggtcttcagcaagacagaggaactgaaccgcgaggtggccaccaacagtgagctggtgcagagtggcaagagtgagatctcggagctccggcgcaccatgcaggccttggagatagagctgcagtcccagctcagcatgaaagcatccctggagggcaacctggcggagacagagaaccgctactgcgtgcagctgtcccagatccaggggctgattggcagcgtggaggagcagctggcccagcttcgctgcgagatggagcagcagaaccaggaatacaaaatcctgctggatgtgaagacgcggctggagcaggagattgccacctaccgccgcctgctggagggagaggatgcccacctgactcagtacaagaaagaaccggtgaccacccgtcaggtgcgtaccattgtggaagaggtccaggatggcaaggtcatctcctcccgcgagcaggtccaccagaccacccgctgaggactcagctaccccggccggccacccaggaggcagggaggcagccgccccatctgccccacagtctccggcctctccagcctcagccccctgcttcagtcccttccccatgcttccttgcctgatgacaataaagcttgttgactcag

SEQ ID NO: 67362 - DNA, 1004 bp, Homo sapiens
  misc_feature (1)..(1): n is a, c, g, or t
  misc_feature (862)..(863): n is a, c, g, or t
  misc_feature (877)..(877): n is a, c, g, or t
  misc_feature (885)..(885): n is a, c, g, or t
naaataaggctaggtacgaggctggtgttaatcggccgaggctctctccagcccttctcctgtgtgcctgcctcctgccgccgccaccatgaccacctccatccgccagttcacctcctccagctccatcaagggctcctccggcctggggggcggctcgtcccgcacctcctgccggctgtctggcggcctgggtgccggctcctgcaggctgggatctgctggcggcctgggcagcaccctcgggggtagcagctactccagctgctacagctttggctctggtggtggctatggcagcagctttgggggtgttgatgggctgctggctggaggtgagaaggccaccatgcagaacctcaatgaccgcctggcctcctacctggacaaggtgcgtgccctggaggaggccaacactgagctggaggtgaagatccgtgactggtaccagaggcaggccccggggcccgcccgtgactacagccagtactacaggacaattgaggagctgcagaacaagatcctcacagccaccgtggacaatgccaacatcctgctacagattgacaatgcccgtctggctgctgatgacttccgcaccaagtttgagacagagcaggccctgcgcctgagtgtggaggccgacatcaatggcctgcgcagggtgctggatgagctgaccctggccagagccgacctggagatgcagattgagaacctcaaggaggagctggcctacctgaagaagaaccacgaggaggagatgaacgccctgcgaggccaggtgggtggtgagatcaatgtggagatggacgctgccccaggcgtggacctgagccgcatcctcaacgagatgcgtggnnaaaaccgaggtgcncgatggtntcccaaaacagggactaacgcgggggcccccctcggcggcgccgggaaaggaaactggccggccacgggctggagaaggccccaaaacgggaccgggagaccactggccccacagcgga

SEQ ID NO: 67363 - DNA, 802 bp, Homo sapiens
taggctaggtgagcctgctgtgattcggcgaggcaattggggcccctctcctctccagcccttctcctgtgtgcctgcctcctgccgccgccaccatgaccacctccatccgccagttcacctcctccagctccatcaagggctcctccggcctggggggcggctcgtcccgcacctcctgccggctgtctggcggcctgggtgccggctcctgcaggctgggatctgctggcggcctgggcagcaccctcgggggtagcagctactccagctgctacagctttggctctggtggtggctatggcagcagctttgggggtgttgatgggctgctggctggaggtgagaaggccaccatgcagaacctcaatgaccgcctggcctcctacctggacaaggtgcgtgccctggaggaggccaacactgagctggaggtgaagatccgtgactggtaccagaggcaggccccggggcccgcccgtgactacagccagtactacaggacaattgaggagctgcagaacaagatcctcacagccaccgtggacaatgccaacatcctgctacagattgacaatgcccgtctggctgctgatgacttccgcaccaagtttgagacagagcaggccctgcgcctgagtgtggaggccgacatcaatggcctgcgcagggtgctggatgagctgaccctggccagagccgacctggagatgcagattgagaacctcaaggaggagctggcctacctgaagaagaaccacgaggagggagaccaccagaggcataactcctgggatcgacc

SEQ ID NO: 67364 - DNA, 294 bp, Homo sapiens
gaagctggtgagaaggcacactctctccacagttagatttgggaggaggcctgacttgggagagggatccaggctcacaccgccctgtcctgtgtcctgtctgcagacagaggaactgaaccgcgaggtggccaccaacagtgagctggtgcagagtggcaagagtgagatctcggagctccggcgcaccatgcaggccttggagatagagctgcagtcccagctcagcatggtaggaacagtcctgtgcatgggggagggcccagaagagggcattgaccatcctcactgacc

SEQ ID NO: 67365 - DNA, 567 bp, Homo sapiens
cattggcatcaggctctgtgaggatactgcgcgtccagctctgtttctgttccttttcctgccaggatgaccggaaagaagggatgaccgcgtttgtggaaaagagaaaggccaacttcaaagaccagtgagaaccagctgcccctgcttcacacctctgcttggagaggacaagtgcagcctgtcagttttagaagcaagtaaatcatcctcttttcaagagcagtgtccgtggtgtgcagttcctctccaattgctgcgtggtcgtggcccgacctctcacggcatgacagccttcgtcacccagcctgtgagggtcctgactggagcaccttctaaatctaagattctgctgaggagcccccgctggtccctctgggcatgctgtgctcggacggaaagcggggcctgtgggtccttgtgtccctgccgctgaagaatggggctgctctgagggaaacgctgtctgctgccttcatacagatgctgattaaagtgatagcgattcagattaaaaaaaaaaaaatggggttttgggggggaaaggtgaagccgtgtggtctgacg

SEQ ID NO: 67366 - DNA, 238 bp, Homo sapiens
tagaatcgagcgtcgaaccaggacattccagcctgtgagggtcctgactggagcaccttctaaatctaagattctgctgaggagcccccgctggtccctctgggcatgctgtgctcggacggaaagcggggcctgtgggtccttgtgtccctgccgctgaagaatggggctgctctgagggaaacgctgtctgctgccttcatacagatgctgattaaagtgatagcgattcagatta

SEQ ID NO: 67367 - DNA, 171 bp, Homo sapiens
tactgctcgaattcaagcttctaacgatgtacggggacatgctgtgctcggacggaaagcggggcctgtgggtccttgtgtccctgccgctgaagaatggggctgctctgagggaaacgctgtctgctgccttcatacagatgctgattaaagtgatagcgattcagatta

SEQ ID NO: 67368 - DNA, 1628 bp, Homo sapiens
ggcgggcggggggaggcggcgcagagcccggcaggcgccgccgttgcctccgcctccgcgcggtctccccggggccagctgggaccccgagggctggggcgggggcgggggcgcgggcgactgcggcggggcctggagggcgctggtcccagcccagggcggggtcccggggacgcccctcggccttagatccgcgagcggcagctcgggcctgggggcggggcctggaggagagcgacccgctcactctgcccgggctgatctcgcgagggccgcctggtctcgcggcgctggcctgtgggcggagcgagccctgaaaggctataggcgagggggcggctccgcggggccgggcgaggagtccagagagccatggccgccctgcgtgtcctgctgtcctgcgcccgcggcccgctgaggcccccggttcgctgtcccgcctggcgtcccttcgcctcgggtgctaactttgagtacatcatcgcagaaaaaagagggaagaataacaccgtggggttgatccaactgaaccgccccaaggccctcaatgcactttgcgatggcctgattgacgagctcaaccaggccctgaagatcttcgaggaggacccggccgtgggggccattgtcctcaccggcggggataaggcctttgcagctggagctgatatcaaggaaatgcagaacctgagtttccaggactgttactccagcaagttcttgaagcactgggaccacctcacccaggtcaagaagccagtcatcgctgctgtcaatggctatgcctttggcgggggctgtgagcttgccatgatgtgtgatatcatctatgccggtgagaaggcccagtttgcacagccggagatcttaataggaaccatcccaggtgcgggcggcacccagagactcacccgtgctgttgggaagtcgctggcgatggagatggtcctcaccggtgaccggatctcagcccaggacgccaagcaagcaggtcttgtcagcaagatttgtcctgttgagacactggtggaagaagccatccagtgtgcagaaaaaattgccagcaattctaaaattgtagtagcgatggccaaagaatcagtgaatgcagcttttgaaatgacattaacagaaggaagtaagttggagaagaaactcttttattcaacctttgccactgatgaccggaaagaagggatgaccgcgtttgtggaaaagagaaaggccaacttcaaagaccagtgagaaccagctgcccctgcttcacacctctgcttggagaggacaagtgcagcctgtcagttttagaagcaagtaaatcatcctcttttcaagagcagtgtccgtggtgtgcagttcctctccaattgctgcgtggtcgtggcccgacctctcacggcatgacagccttcgtcacccagcctgtgagggtcctgactggagcaccttctaaatctaagattctgctgaggagcccccgctggtccctctgggcatgctgtgctcggacggaaagcggggcctgtgggtccttgtgtccctgccgctgaagaatggggctgctctgagggaaacgctgtctgctgccttcatacagatgctgattaaagtgatagcgattcagatta

SEQ ID NO: 67369 - DNA, 1351 bp, Homo sapiens
  misc_feature (35)..(35): n is a, c, g, or t
taaagggcctgggtttacccgccccccccgggtancgggataggctataggcgagggggcggctccgcggggccgggcgaggagtccagagagccatggccgccctgcgtgtcctgctgtcctgcgcccgcggcccgctgaggcccccggttcgctgtcccgcctggcgtcccttcgcctcgggtgctaactttgagtacatcatcgcagaaaaaagagggaagaataacaccgtggggttgatccaactgaaccgccccaaggccctcaatgcactttgcgatggcctgattgacgagctcaaccaggccctgaagatcttcgaggaggacccggccgtgggggccattgtcctcaccggcggggataaggcctttgcagctggagctgatatcaaggaaatgcagaacctgagtttccaggactgttactccagcaagttcttgaagcactgggaccacctcacccaggtcaagaagccagtcatcgctgctgtcaatggctatgcctttggcgggggctgtgagcttgccatgatgtgtgatatcatctatgccggtgagaaggcccagtttgcacagccggagatcttaataggaaccatcccaggtgcgggcggcacccagagactcacccgtgctgttgggaagtcgctggcgatggagatggtcctcaccggtgaccggatctcagcccaggacgccaagcaagcaggtcttgtcagcaagatttgtcctgttgagacactggtggaagaagccatccagtgtgcagaaaaaattgccagcaattctaaaattgtagtagcgatggccaaagaatcagtgaatgcagcttttgaaatgacattaacagaaggaagtaagttggagaagaaactcttttattcaacctttgccactgatgaccggaaagaagggatgaccgcgtttgtggaaaagagaaaggccaacttcaaagaccagtgagaaccagctgcccctgcttcacacctctgcttggagaggacaagtgcagcctgtcagttttagaagcaagtaaatcatcctcttttcaagagcagtgtccgtggtgtgcagttcctctccaattgctgcgtggtcgtggcccgacctctcacggcatgacagccttcgtcacccagcctgtgagggtcctgactggagcaccttctaaatctaagattctgctgaggagcccccgctggtccctctgggcatgctgtgctcggacggaaagcggggcctgtgggtccttgtgtccctgccgctgaagaatggggctgctctgagggaaacgctgtctgctgccttcatacagatgctgattaaagtgatagcgattcagatta

SEQ ID NO: 67370 - DNA, 1910 bp, Homo sapiens
ggcgggcggggggaggcggcgcagagcccggcaggcgccgccgttgcctccgcctccgcgcggtctccccggggccagctgggaccccgagggctggggcgggggcgggggcgcgggcgactgcggcggggcctggagggcgctggtcccagcccagggcggggtcccggggacgcccctcggccttagatccgcgagcggcagctcgggcctgggggcggggcctggaggagagcgacccgctcactctgcccgggctgatctcgcgagggccgcctggtctcgcggcgctggcctgtgggcggagcgagccctgaaaggctataggcgagggggcggctccgcggggccgggcgaggagtccagagagccatggccgccctgcgtgtcctgctgtcctgcgcccgcggcccgctgaggcccccggttcgctgtcccgcctggcgtcccttcgcctcgggtgctaactttgagtacatcatcgcagaaaaaagagggaagaataacaccgtggggttgatccaactgaaccgccccaaggccctcaatgcactttgcgatggcctgattgacgagctcaaccaggccctgaagatcttcgaggaggacccggccgtgggggccattgtcctcaccggcggggataaggcctttgcagctggagctgatatcaaggaaatgcagaacctgagtttccaggactgttactccagcaagttcttgaagcactgggaccacctcacccaggtcaagaagccagtcatcgctgctgtcaatggctatgcctttggcgggggctgtgagcttgccatgatgtgtgatatcatctatgccggtgagaaggcccagtttgcacagccggagatcttaataggaaccatcccaggtgcgggcggcacccagagactcacccgtgctgttgggaagtcgctggcgatggagatggtcctcaccggtgaccggatctcagcccaggacgccaagcaagcaggtcttgtcagcaagatttgtcctgttgagacactggtggaagaagccatccagtgtgcagaaaaaattgccagcaattctaaaattgtagtagcgatggccaaagaatcagtgaatgcagcttttgaaatgacattaacagaaggaagtaagttggagaagaaactcttttattcaacctttgccactgatgaccggaaagaagggatgaccgcgtttgtggaaaagagaaaggccaacttcaaagaccagtgagaaccagctgcccctgcttcacacctctgcttggagaggacaagtgcagcctgtcagttttagaagcaagtaaatcatcctcttttcaagagcagtgtccgtggtgtgcagttcctctccaattgctgcgtggtcgtggcccgacctctcacggcatgacagccttcgtcacccagcctgtgagggtcctgactggagcaccttctaaatctaagattctgctgaggagcccccgctggtccctctgggcatgctgtgctcggacggaaagcggggcctgtgggtccttgtgtccctgccgctgaagaatggggctgctctgagggaaacgctgtctgctgccttcatacagatgctgattaaagtgatagcgattcagattaaaaaaaaaaaaaaaaaaaaaaaaaaaaaaaaaaaaggggggggcgcgcgcccaaaaagttatccccctggggggcgcccagctctttcgcgctgtctacccggctttctcttggtcacaaggggggccccttagtaggggggctcggtattaatagacgcaaggagccggggccggccggttttaacacacggttcggcgcgggggaagacctgcttcccttgtggccctttcgcgagggaccctttactctggggggcggacttctcggggcgctccctag

SEQ ID NO: 67371 - DNA, 1212 bp, Homo sapiens
aggctggtaccgtccgggaggtacggatcgtcccttcgcctcgggtgctaactttgagtacatcatcgcagaaaaaagagggaagaataacaccgtggggttgatccaactgaaccgccccaaggccctcaatgcactttgcgatggcctgattgacgagctcaaccaggccctgaagatcttcgaggaggacccggccgtgggggccattgtcctcaccggcggggataaggcctttgcagctggagctgatatcaaggaaatgcagaacctgagtttccaggactgttactccagcaagttcttgaagcactgggaccacctcacccaggtcaagaagccagtcatcgctgctgtcaatggctatgcctttggcgggggctgtgagcttgccatgatgtgtgatatcatctatgccggtgagaaggcccagtttgcacagccggagatcttaataggaaccatcccaggtgcgggcggcacccagagactcacccgtgctgttgggaagtcgctggcgatggagatggtcctcaccggtgaccggatctcagcccaggacgccaagcaagcaggtcttgtcagcaagatttgtcctgttgagacactggtggaagaagccatccagtgtgcagaaaaaattgccagcaattctaaaattgtagtagcgatggccaaagaatcagtgaatgcagcttttgaaatgacattaacagaaggaagtaagttggagaagaaactcttttattcaacctttgccactgatgaccggaaagaagggatgaccgcgtttgtggaaaagagaaaggccaacttcaaagaccagtgagaaccagctgcccctgcttcacacctctgcttggagaggacaagtgcagcctgtcagttttagaagcaagtaaatcatcctcttttcaagagcagtgtccgtggtgtgcagttcctctccaattgctgcgtggtcgtggcccgacctctcacggcatgacagccttcgtcacccagcctgtgagggtcctgactggagcaccttctaaatctaagattctgctgaggagcccccgctggtccctctgggcatgctgtgctcggacggaaagcggggcctgtgggtccttgtgtccctgccgctgaagaatggggctgctctgagggaaacgctgtctgctgccttcatacagatgctgattaaagtgatagcgattcagatta

SEQ ID NO: 67372 - DNA, 1299 bp, Homo sapiens
  misc_feature (35)..(35): n is a, c, g, or t
taaagggcctgggtttacccgccccccccgggtancgggataggctataggcgagggggcggctccgcggggccgggcgaggagtccagagagccatggccgccctgcgtgtcctgctgtcctgcgcccgcggcccgctgaggcccccggttcgctgtcccgcctggcgtcccttcgcctcgggtgctaactttgagtacatcatcgcagaaccctcaatgcactttgcgatggcctgattgacgagctcaaccaggccctgaagatcttcgaggaggacccggccgtgggggccattgtcctcaccggcggggataaggcctttgcagctggagctgatatcaaggaaatgcagaacctgagtttccaggactgttactccagcaagttcttgaagcactgggaccacctcacccaggtcaagaagccagtcatcgctgctgtcaatggctatgcctttggcgggggctgtgagcttgccatgatgtgtgatatcatctatgccggtgagaaggcccagtttgcacagccggagatcttaataggaaccatcccaggtgcgggcggcacccagagactcacccgtgctgttgggaagtcgctggcgatggagatggtcctcaccggtgaccggatctcagcccaggacgccaagcaagcaggtcttgtcagcaagatttgtcctgttgagacactggtggaagaagccatccagtgtgcagaaaaaattgccagcaattctaaaattgtagtagcgatggccaaagaatcagtgaatgcagcttttgaaatgacattaacagaaggaagtaagttggagaagaaactcttttattcaacctttgccactgatgaccggaaagaagggatgaccgcgtttgtggaaaagagaaaggccaacttcaaagaccagtgagaaccagctgcccctgcttcacacctctgcttggagaggacaagtgcagcctgtcagttttagaagcaagtaaatcatcctcttttcaagagcagtgtccgtggtgtgcagttcctctccaattgctgcgtggtcgtggcccgacctctcacggcatgacagccttcgtcacccagcctgtgagggtcctgactggagcaccttctaaatctaagattctgctgaggagcccccgctggtccctctgggcatgctgtgctcggacggaaagcggggcctgtgggtccttgtgtccctgccgctgaagaatggggctgctctgagggaaacgctgtctgctgccttcatacagatgctgattaaagtgatagcgattcagatta

SEQ ID NO: 67373 - DNA, 1335 bp, Homo sapiens
ggcgggcggggggaggcggcgcagagcccggcaggcgccgccgttgcctccgcctccgcgcggtctccccggggccagctgggaccccgagggctggggcgggggcgggggcgcgggcgactgcggcggggcctggagggcgctggtcccagcccagggcggggtcccggggacgcccctcggccttagatccgcgagcggcagctcgggcctgggggcggggcctggaggagagcgacccgctcactctgcccgggctgatctcgcgagggccgcctggtctcgcggcgctggcctgtgggcggagcgagccctgaaaggctataggcgagggggcggctccgcggggccgggcgaggagtccagagagccatggccgccctgcgtgtcctgctgtcctgcgcccgcggcccgctgaggcccccggttcgctgtcccgcctggcgtcccttcgcctcgggtgctaactttgagtacatcatcgcagaaaaaagagggaagaataacaccgtggggttgatccaactgaaccgccccaaggccctcaatgcactttgcgatggcctgattgacgagctcaaccaggccctgaagatcttcgaggaggacccggccgtgggggccattgtcctcaccggcggggataaggcctttgcagctggagctgatatcaaggaaatgcagaacctgagtttccaggactgttactccagcaagttcttgaagcactgggaccacctcacccaggtcaagaagccagtcatcgctgctgtcaatggctatgcctttggcgggggctgtgagcttgccatgatgtgtgatatcatctatgccggtgagaaggcccagtttgcacagccggagatcttaataggaaccatcccaggtgcgggcggcacccagagactcacccgtgctgttgggaagtcgctggcgatggagatggtcctcaccggtgaccggatctcagcccaggacgccaagcaagcaggtcttgtcagcaagatttgtcctgttgagacactggtggaagaagccatccagtgtgcagaaaaaattgccagcaattctaaaattgtagtagcgatggccaaagaatcagtgaatgcagcttttgaaatgacattaacagaaggaagtaagttggagaagaaactcttttattcaacctttgccactgatgaccggaaagaagggatgaccgcgtttgtggaaaagagaaaggccaacttcaaagaccagtgagaaccagctgcccctgcttcacacctctgcttggagaggacaagtgcagcctgtcagttttagaagcaagtaaatcatcctcttttcaag

SEQ ID NO: 67374 - DNA, 1564 bp, Homo sapiens
ggcgggcggggggaggcggcgcagagcccggcaggcgccgccgttgcctccgcctccgcgcggtctccccggggccagctgggaccccgagggctggggcgggggcgggggcgcgggcgactgcggcggggcctggagggcgctggtcccagcccagggcggggtcccggggacgcccctcggccttagatccgcgagcggcagctcgggcctgggggcggggcctggaggagagcgacccgctcactctgcccgggctgatctcgcgagggccgcctggtctcgcggcgctggcctgtgggcggagcgagccctgaaaggctataggcgagggggcggctccgcggggccgggcgaggagtccagagagccatggccgccctgcgtgtcctgctgtcctgcgcccgcggcccgctgaggcccccggttcgctgtcccgcctggcgtcccttcgcctcgggtgctaactttgagtacatcatcgcagaaaaaagagggaagaataacaccgtggggttgatccaactgaaccgccccaaggccctcaatgcactttgcgatggcctgattgacgagctcaaccaggccctgaagatcttcgaggaggacccggccgtgggggccattgtcctcaccggcggggataaggcctttgcagctggagctgatatcaaggaaatgcagaacctgagtttccaggactgttactccagcaagttcttgaagcactgggaccacctcacccaggtcaagaagccagtcatcgctgctgtcaatggctatgcctttggcgggggctgtgagcttgccatgatgtgtgatatcatctatgccggtgagaaggcccagtttgcacagccggagatcttaataggaaccatcccaggtgcgggcggcacccagagactcacccgtgctgttgggaagtcgctggcgatggagatggtcctcaccggtgaccggatctcagcccaggacgccaagcaagcaggtcttgtcagcaagatttgtcctgttgagacactggtggaagaagccatccagtgtgcagaaaaaattgccagcaattctaaaattgtagtagcgatggccaaagaatcagtgaatgcagcttttgaaatgacattaacagaaggaagtaagttggagaagaaactcttttattcaacctttgccactgatgaccggaaagaagggatgaccgcgtttgtggggagaggacaagtgcagcctgtcagttttagaagcaagtaaatcatcctcttttcaagagcagtgtccgtggtgtgcagttcctctccaattgctgcgtggtcgtggcccgacctctcacggcatgacagccttcgtcacccagcctgtgagggtcctgactggagcaccttctaaatctaagattctgctgaggagcccccgctggtccctctgggcatgctgtgctcggacggaaagcggggcctgtgggtccttgtgtccctgccgctgaagaatggggctgctctgagggaaacgctgtctgctgccttcatacagatgctgattaaagtgatagcgattcagatta

SEQ ID NO: 67375 - DNA, 1648 bp, Homo sapiens
  misc_feature (806)..(806): n is a, c, g, or t
  misc_feature (839)..(839): n is a, c, g, or t
ggcgggcggggggaggcggcgcagagcccggcaggcgccgccgttgcctccgcctccgcgcggtctccccggggccagctgggaccccgagggctggggcgggggcgggggcgcgggcgactgcggcggggcctggagggcgctggtcccagcccagggcggggtcccggggacgcccctcggccttagatccgcgagcggcagctcgggcctgggggcggggcctggaggagagcgacccgctcactctgcccgggctgatctcgcgagggccgcctggtctcgcggcgctggcctgtgggcggagcgagccctgaaaggctataggcgagggggcggctccgcggggccgggcgaggagtccagagagccatggccgccctgcgtgtcctgctgtcctgcgcccgcggcccgctgaggcccccggttcgctgtcccgcctggcgtcccttcgcctcgggtgctaactttgagtacatcatcgcagaaaaaagagggaagaataacaccgtggggttgatccaactgaaccgccccaaggccctcaatgcactttgcgatggcctgattgacgagctcaaccaggccctgaagatcttcgaggaggacccggccgtgggggccattgtcctcaccggcggggataaggcctttgcagctggagctgatatcaaggaaatgcagaacctgagtttccaggactgttactccagcaagttcttgaagcactgggaccacctcacccaggtcaagaagccagtcatcgctgctgtcaatggctatgcctttggcgggggctgtgagcntgccatgatgtatgtagaagacagacggagaanccgatgatagaataccctaatgttacacaagccaaagaaaatgaaatggagccattccgcaaaaacatcagacacccaaaaagacacccagatcagagaaaaagtcagcaaacaacaaaaagatgaccgatgcgctgaacctaatgcacagcccaaacaccaatcaagcagagtcttgtcagcaagatttgtcctgttgagacactggtggaagaagccatccagtgtgcagaaaaaattgccagcaattctaaaattgtagtagcgatggccaaagaatcagtgaatgcagcttttgaaatgacattaacagaaggaagtaagttggagaagaaactcttttattcaacctttgccactgatgaccggaaagaagggatgaccgcgtttgtggaaaagagaaaggccaacttcaaagaccagtgagaaccagctgcccctgcttcacacctctgcttggagaggacaagtgcagcctgtcagttttagaagcaagtaaatcatcctcttttcaagagcagtgtccgtggtgtgcagttcctctccaattgctgcgtggtcgtggcccgacctctcacggcatgacagccttcgtcacccagcctgtgagggtcctgactggagcaccttctaaatctaagattctgctgaggagcccccgctggtccctctgggcatgctgtgctcggacggaaagcggggcctgtgggtccttgtgtccctgccgctgaagaatggggctgctctgagggaaacgctgtctgctgccttcatacagatgctgattaaagtgatagcgattcagatta

SEQ ID NO: 67376 - DNA, 662 bp, Homo sapiens
gggctgcaggaattcggacgagcaggtcttgtcagcaagatttgtcctgttgagacactggtggaagaagccatccagtgtgcagaaaaaattgccagcaattctaaaattgtagtagcgatggccaaagaatcagtgaatgcagcttttgaaatgacattaacagaaggaagtaagttggagaagaaactcttttattcaacctttgccactgatgaccggaaagaagggatgaccgcgtttgtggaaaagagaaaggccaacttcaaagaccagtgagaaccagctgcccctgcttcacacctctgcttggagaggacaagtgcagcctgtcagttttagaagcaagtaaatcatcctcttttcaagagcagtgtccgtggtgtgcagttcctctccaattgctgcgtggtcgtggcccgacctctcacggcatgacagccttcgtcacccagcctgtgagggtcctgactggagcaccttctaaatctaagattctgctgaggagcccccgctggtccctctgggcatgctgtgctcggacggaaagcggggcctgtgggtccttgtgtccctgccgctgaagaatggggctgctctgagggaaacgctgtctgctgccttcatacagatgctgattaaagtgatagcgattcagatta

SEQ ID NO: 67377 - DNA, 1299 bp, Homo sapiens
  misc_feature (1169)..(1169): n is a, c, g, or t
  misc_feature (1191)..(1196): n is a, c, g, or t
  misc_feature (1210)..(1211): n is a, c, g, or t
  misc_feature (1213)..(1213): n is a, c, g, or t
  misc_feature (1215)..(1216): n is a, c, g, or t
  misc_feature (1218)..(1220): n is a, c, g, or t
  misc_feature (1228)..(1228): n is a, c, g, or t
  misc_feature (1232)..(1232): n is a, c, g, or t
  misc_feature (1238)..(1239): n is a, c, g, or t
  misc_feature (1251)..(1252): n is a, c, g, or t
  misc_feature (1263)..(1263): n is a, c, g, or t
  misc_feature (1276)..(1276): n is a, c, g, or t
ggcgggcggggggaggcggcgcagagcccggcaggcgccgccgttgcctccgcctccgcgcggtctccccggggccagctgggaccccgagggctggggcgggggcgggggcgcgggcgactgcggcggggcctggagggcgctggtcccagcccagggcggggtcccggggacgcccctcggccttagatccgcgagcggcagctcgggcctgggggcggggcctggaggagagcgacccgctcactctgcccgggctgatctcgcgagggccgcctggtctcgcggcgctggcctgtgggcggagcgagccctgaaaggctataggcgagggggcggctccgcggggccgggcgaggagtccagagagccatggccgccctgcgtgtcctgctgtcctgcgcccgcggcccgctgaggcccccggttcgctgtcccgcctggcgtcccttcgcctcgggtgctaactttgagtacatcatcgcagaaaaaagagggaagaataacaccgtggggttgatccaactgaaccgccccaaggccctcaatgcactttgcgatggcctgattgacgagctcaaccaggccctgaagatcttcgaggaggacccggccgtgggggccattgtcctcaccggcggggataaggcctttgcagctggagctgatatcaaggaaatgcagaacctgagtttccaggactgttactccagcaagttcttgaagcactgggaccacctcacccaggtcaagaagccagtcatcgctgctgtcaatggctatgcctttggcgggggctgtgagcttgccatgatgtgtgatatcatctatgccggtgagaaggcccagtttgcacagccggagatcttaataggaaccatcccaggtgcgggcggcacccagagactcacccgtgctgttgggaagtcgctggcgatggagatggtcctcaccggtgaccggatctcagcccaggacgccaagcaagcaggtcttgtcagcaagatttgtcctgttgagacactggtggaagaagccatccagtgtgcagaaaaaattgccagcaattctaaaattgtagtagcgatggccaaagaatcagtgaatgcagtttgaatgacttaccgagagagtagtggggaagaacctttttcacctgcctgtaccgnaaagggaccgttgggaaacagnnnnnngacggaaccgccgnncncnngnnngaaggggnaacnaacccnnaggcggggcccnnggggcgcccgnagcccgggggganaaaagcccggagggggcggggaa

SEQ ID NO: 67378 - DNA, 529 bp, Homo sapiens
actactactactaaattcgcggccactcgacagaaggaagtaagttggagaagaaactcttttattcaacctttgccactgatgaccggaaagaagggatgaccgcgtttgtggaaaagagaaaggccaacttcaaagaccagtgagaaccagctgcccctgcttcacacctctgcttggagaggacaagtgcagcctgtcagttttagaagcaagtaaatcatcctcttttcaagagcagtgtccgtggtgtgcagttcctctccaattgctgcgtggtcgtggcccgacctctcacggcatgacagccttcgtcacccagcctgtgagggtcctgactggagcaccttctaaatctaagattctgctgaggagcccccgctggtccctctgggcatgctgtgctcggacggaaagcggggcctgtgggtccttgtgtccctgccgctgaagaatggggctgctctgagggaaacgctgtctgctgccttcatacagatgctgattaaagtgatagcgattcagatta

SEQ ID NO: 67379 - DNA, 514 bp, Homo sapiens
cattggcatcaggctctgtgaggatactgcgcgtccagctctgtttctgttccttttcctgccaggatgaccggaaagaagggatgaccgcgtttgtggaaaagagaaaggccaacttcaaagaccagtgagaaccagctgcccctgcttcacacctctgcttggagaggacaagtgcagcctgtcagttttagaagcaagtaaatcatcctcttttcaagagcagtgtccgtggtgtgcagttcctctccaattgctgcgtggtcgtggcccgacctctcacggcatgacagccttcgtcacccagcctgtgagggtcctgactggagcaccttctaaatctaagattctgctgaggagcccccgctggtccctctgggcatgctgtgctcggacggaaagcggggcctgtgggtccttgtgtccctgccgctgaagaatggggctgctctgagggaaacgctgtctgctgccttcatacagatgctgattaaagtgatagcgattcagatta

SEQ ID NO: 67380 - DNA, 538 bp, Homo sapiens
cgtgtctggccgcctctgccgtcggagctgtggccagcctggcccacatgtctgagagcacagtgaccgcagtgccgagatcactcagcactcaggaaggggcacgtgcggcacttcccgtgtggaagccgcccttgcttagcgtccagaggctggggtgctccagccacgctgctccccagcggccactcactcgagaagggatagacaagtgctgtttctgcacatcactcactgactttcttgtgtttcaggtcttgtcagcaagatttgtcctgttgagacactggtggaagaagccatccagtgtgcagaaaaaattgccagcaattctaaaattgtagtagcgatggccaaagaatcagtgaatgcaggtaggggatctgccaggaagacactggagaggtctccgtggctgtcaggagcattcctcagcagcaggctttctggctccaaatgaatatgccttaagccctcctgggcagaaatgcttctcagtgtctcagttctgctgtctgtagagtcgtggtttctggtc

SEQ ID NO: 67381 - DNA, 796 bp, Homo sapiens
  misc_feature (63)..(63): n is a, c, g, or t
atcttcagggcctggttgagctcgtcaatcaggccatcgcaaagtgcattgagggccttgggnggttcagttggatcacccgtgctgttgggaagtcgctggcgatggagatggtcctcaccggtgaccggatctcagcccaggacgccaagcaagcaggtcttgtcagcaagatttgtcctgttgagacactggtggaagaagccatccagtgtgcagaaaaaattgccagcaattctaaaattgtagtagcgatggccaaagaatcagtgaatgcagcttttgaaatgacattaacagaaggaagtaagttggagaagaaactcttttattcaacctttgccactgatgaccggaaagaagggatgaccgcgtttgtggaaaagagaaaggccaacttcaaagaccagtgagaaccagctgcccctgcttcacacctctgcttggagaggacaagtgcagcctgtcagttttagaagcaagtaaatcatcctcttttcaagagcagtgtccgtggtgtgcagttcctctccaattgctgcgtggtcgtggcccgacctctcacggcatgacagccttcgtcacccagcctgtgagggtcctgactggagcaccttctaaatctaagattctgctgaggagcccccgctggtccctctgggcatgctgtgctcggacggaaagcggggcctgtgggtccttgtgtccctgccgctgaagaatggggctgctctgagggaaacgctgtctgctgccttcatacagatgctgattaaagtgatagcgattcagatta

SEQ ID NO: 67382 - DNA, 1294 bp, Homo sapiens
ttcgggatatgtcgaccaggccctcggtccagagagccatggccgccctgcgtgtcctgctgtcctgcgcccgcggcccgctgaggcccccggttcgctgtcccgcctggcgtcccttcgcctcgggtgctaactttgagtacatcatcgcagaaaaaagagggaagaataacaccgtggggttgatccaactgaaccgccccaaggccctcaatgcactttgcgatggcctgattgacgagctcaaccaggccctgaagatcttcgaggaggacccggccgtgggggccattgtcctcaccggcggggataaggcctttgcagctggagctgatatcaaggaaatgcagaacctgagtttccaggactgttactccagcaagttcttgaagcactgggaccacctcacccaggtcaagaagccagtcatcgctgctgtcaatggctatgcctttggcgggggctgtgagcttgccatgatgtgtgatatcatctatgccggtgagaaggcccagtttgcacagccggagatcttaataggaaccatcccaggtgcgggcggcacccagagactcacccgtgctgttgggaagtcgctggcgatggagatggtcctcaccggtgaccggatctcagcccaggacgccaagcaagcaggtcttgtcagcaagatttgtcctgttgagacactggtggaagaagccatccagtgtgcagaaaaaattgccagcaattctaaaattgtagtagcgatggccaaagaatcagtgaatgcagcttttgaaatgacattaacagaaggaagtaagttggagaagaaactcttttattcaacctttgccactgatgaccggaaagaagggatgaccgcgtttgtggaaaagagaaaggccaacttcaaagaccagtgagaaccagctgcccctgcttcacacctctgcttggagaggacaagtgcagcctgtcagttttagaagcaagtaaatcatcctcttttcaagagcagtgtccgtggtgtgcagttcctctccaattgctgcgtggtcgtggcccgacctctcacggcatgacagccttcgtcacccagcctgtgagggtcctgactggagcaccttctaaatctaagattctgctgaggagcccccgctggtccctctgggcatgctgtgctcggacggaaagcggggcctgtgggtccttgtgtccctgccgctgaagaatggggctgctctgagggaaacgctgtctgctgccttcatacagatgctgattaaagtgatagcgattcagatta

SEQ ID NO: 67383 - DNA, 1681 bp, Homo sapiens
ggcgggcggggggaggcggcgcagagcccggcaggcgccgccgttgcctccgcctccgcgcggtctccccggggccagctgggaccccgagggctggggcgggggcgggggcgcgggcgactgcggcggggcctggagggcgctggtcccagcccagggcggggtcccggggacgcccctcggccttagatccgcgagcggcagctcgggcctgggggcggggcctggaggagagcgacccgctcactctgcccgggctgatctcgcgagggccgcctggtctcgcggcgctggcctgtgggcggagcgagccctgaaaggctataggcgagggggcggctccgcggggccgggcgaggagtccagagagccatggccgccctgcgtgtcctgctgtcctgcgcccgcggcccgctgaggcccccggttcgctgtcccgcctggcgtcccttcgcctcgggtgctaactttgagtacatcatcgcagaaaaaagagggaagaataacaccgtggggttgatccaactgaaccgccccaaggccctcaatgcactttgcgatggcctgattgacgagctcaaccaggccctgaagatcttcgaggaggacccggccgtgggggccattgtcctcaccggcggggataaggcctttgcagctggagctgatatcaaggaaatgcagaacctgagtttccaggactgttactccagcaagttcttgaagcactgggaccacctcacccaggtcaagaagccagtcatcgctgctgtcaatggctatgcctttggcgggggctgtgagcttgccatgatgtgtgatatcatctatgccggtgagaaggcccagtttgcacagccggagatcttaataggaaccatcccaggtgcgggcggcacccagagactcacccgtgctgttgggaagtcgctggcgatggagatggtcctcaccggtgaccggatctcagcccaggacgccaagcaagcaggtcttgtcagcaagatttgtcctgttgagacactggtggaagaagccatccagtgtgcagaaaaaattgccagcaattctaaaattgtagtagcgatggccaaagaatcagtgaatgcagcttttgaaatgacattaacagaaggaagtaagttggagaagaaactcttttattcaacctttgccactgatgaccggaaagaagggatgaccgcgtttgtggaaaagagaaaggccaacttcaaagaccagtgagaaccagctgcccctgcttcacacctctgcttggagaggacaagtgcagcctgtcagttttagaagcaagtaaatcatcctcttttcaagagcagtgtccgtggtgtgcagttcctctccaattgctgcgtggtcgtggcccgacctctcacggcatgacagccttcgtcacccagcctgtgagggtcctgactggagcaccttctaaatctaagattctgctgaggagcccccgctggtccctctgggcatgctgtgctcggacggaaagcggggcctgtgggtccttgtgtccctgccgctgaagaatggggctgctctgagggaaacgctgtctgctgccttcatacagatgctgattaaagtgatagcgattcagattaaaaaaaaaaaaatggggttttgggggggaaaggtgaagccgtgtggtctgacg

SEQ ID NO: 67384 - DNA, 1960 bp, Homo sapiens
ggcgggcggggggaggcggcgcagagcccggcaggcgccgccgttgcctccgcctccgcgcggtctccccggggccagctgggaccccgagggctggggcgggggcgggggcgcgggcgactgcggcggggcctggagggcgctggtcccagcccagggcggggtcccggggacgcccctcggccttagatccgcgagcggcagctcgggcctgggggcggggcctggaggagagcgacccgctcactctgcccgggctgatctcgcgagggccgcctggtctcgcggcgctggcctgtgggcggagcgagccctgaaaggctataggcgagggggcggctccgcggggccgggcgaggagtccagagagccatggccgccctgcgtgtcctgctgtcctgcgcccgcggcccgctgaggcccccggttcgctgtcccgcctggcgtcccttcgcctcgggtgctaactttgagtacatcatcgcagaaaaaagagggaagaataacaccgtggggttgatccaactgaaccgccccaaggccctcaatgcactttgcgatggcctgattgacgagctcaaccaggccctgaagatcttcgaggaggacccggccgtgggggccattgtcctcaccggcggggataaggcctttgcagctggagctgatatcaaggaaatgcagaacctgagtttccaggactgttactccagcaagttcttgaagcactgggaccacctcacccaggtcaagaagccagtcatcgctgctgtcaatggctatgcctttggcgggggctgtgagcttgccatgatgtgtgatatcatctatgccggtgagaaggcccagtttgcacagccggagatcttaataggaaccatcccaggtgcgggcggcacccagagactcacccgtgctgttgggaagtcgctggcgatggagatggtcctcaccggtgaccggatctcagcccaggacgccaagcaagcaggtcttgtcagcaagatttgtcctgttgagacactggtggaagaagccatccagtgtgcagaaaaaattgccagcaattctaaaattgtagtagcgatggccaaagaatcagtgaatgcagcttttgaaatgacattaacagaaggaagtaagttggagaagaaactcttttattcaacctttgccactgatgaccggaaagaagggatgaccgcgtttgtggaaaagagaaaggccaacttcaaagaccagtgagaaccagctgcccctgcttcacacctctgcttggagaggacaagtgcagcctgtcagttttagaagcaagtaaatcatcctcttttcaagagcagtgtccgtggtgtgcagttcctctccaattgctgcgtggtcgtggcccgacctctcacggcatgacagccttcgtcacccagcctgtgagggtcctgactggagcaccttctaaatctaagattctgctgaggagcccccgctggtccctctgggcatgctgtgctcggacggaaagcggggcctgtgggtccttgtgtccctgccgctgaagaatggggctgctctgagggaaacgctgtctgctgccttcatacagatgctgattaaagtgatagcgattcagattaaaaaaaaaaaaaaaaaaaaaaaaaaaaaaatgtgtgtgtggggggcgcttgggcccttggaaaaagtttttaaaaccattcgggtggggggggggggccccatgtggtgataagtgaaaccggggcacaaagcggtgtttcccagggaaaaaccgcgggacgcaaggacaaaagggcgcggggggaatctcccacccataataaaaaagcgcccggggcggaaaccggaacggtcttctgaaactaatcccagaaggggagtccgagaggccactcgcgggggactctattcacccggggagctccaaagcgaggccggaaataaaaatacg

SEQ ID NO: 67385 - DNA, 1667 bp, Homo sapiens
ggcgggcggggggaggcggcgcagagcccggcaggcgccgccgttgcctccgcctccgcgcggtctccccggggccagctgggaccccgagggctggggcgggggcgggggcgcgggcgactgcggcggggcctggagggcgctggtcccagcccagggcggggtcccggggacgcccctcggccttagatccgcgagcggcagctcgggcctgggggcggggcctggaggagagcgacccgctcactctgcccgggctgatctcgcgagggccgcctggtctcgcggcgctggcctgtgggcggagcgagccctgaaaggctataggcgagggggcggctccgcggggccgggcgaggagtccagagagccatggccgccctgcgtgtcctgctgtcctgcgcccgcggcccgctgaggcccccggttcgctgtcccgcctggcgtcccttcgcctcgggtgctaactttgagtacatcatcgcagaaaaaagagggaagaataacaccgtggggttgatccaactgaaccgccccaaggccctcaatgcactttgcgatggcctgattgacgagctcaaccaggccctgaagatcttcgaggaggacccggccgtgggggccattgtcctcaccggcggggataaggcctttgcagctggagctgatatcaaggaaatgcagaacctgagtttccaggactgttactccagcaagttcttgaagcactgggaccacctcacccaggtcaagaagccagtcatcgctgctgtcaatggctatgcctttggcgggggctgtgagcttgccatgatgtgtgatatcatctatgccggtgagaaggcccagtttgcacagccggagatcttaataggaaccatcccaggtgcgggcggcacccagagactcacccgtgctgttgggaagtcgctggcgatggagatggtcctcaccggtgaccggatctcagcccaggacgccaagcaagcaggtcttgtcagcaagatttgtcctgttgagacactggtggaagaagccatccagtgtgcagaaaaaattgccagcaattctaaaattgtagtagcgatggccaaagaatcagtgaatgcagcttttgaaatgacattaacagaaggaagtaagttggagaagaaactcttttattcaacctttgccactgatgaccggaaagaagggatgaccgcgtttgtggaaaagagaaaggccaacttcaaagaccagtgagaaccagctgcccctgcttcacacctctgcttggagaggacaagtgcagcctgtcagttttagaagcaagtaaatcatcctcttttcaagagcagtgtccgtggtgtgcagttcctctccaattgctgcgtggtcgtggcccgacctctcacggcatgacagccttcgtcacccagcctgtgagggtcctgactggagcaccttctaaatctaagattctgctgaggagcccccgctggtccctctgggcatgctgtgctcggacggaaagcggggcctgtgggtccttgtgtccctgccgctgaagaatggggctgctctgagggaaacgctgtctgctgccttcatacagatgctgattaaagtgatagcgattcagattaaaaaaaagtcgacggccgcgaatttagtagtagtagtcg

SEQ ID NO: 67386 - DNA, 1575 bp, Homo sapiens
  misc_feature (1490)..(1490): n is a, c, g, or t
  misc_feature (1500)..(1500): n is a, c, g, or t
  misc_feature (1565)..(1565): n is a, c, g, or t
ggcgggcggggggaggcggcgcagagcccggcaggcgccgccgttgcctccgcctccgcgcggtctccccggggccagctgggaccccgagggctggggcgggggcgggggcgcgggcgactgcggcggggcctggagggcgctggtcccagcccagggcggggtcccggggacgcccctcggccttagatccgcgagcggcagctcgggcctgggggcggggcctggaggagagcgacccgctcactctgcccgggctgatctcgcgagggccgcctggtctcgcggcgctggcctgtgggcggagcgagccctgaaaggctataggcgagggggcggctccgcggggccgggcgaggagtccagagagccatggccgccctgcgtgtcctgctgtcctgcgcccgcggcccgctgaggcccccggttcgctgtcccgcctggcgtcccttcgcctcgggtgctaactttgagtacatcatcgcagaaaaaagagggaagaataacaccgtggggttgatccaactgaaccgccccaaggccctcaatgcactttgcgatggcctgattgacgagctcaaccaggccctgaagatcttcgaggaggacccggccgtgggggccattgtcctcaccggcggggataaggcctttgcagctggagctgatatcaaggaaatgcagaacctgagtttccaggactgttactccagcaagttcttgaagcactgggaccacctcacccaggtcaagaagccagtcatcgctgctgtcaatggctatgcctttggcgggggctgtgagcttgccatgatgtgtgatatcatctatgccggtgagaaggcccagtttgcacagccggagatcttaataggaaccatcccaggtgcgggcggcacccagagactcacccgtgctgttgggaagtcgctggcgatggagatggtcctcaccggtgaccggatctcagcccaggacgccaagcaagcaggtcttgtcagcaagatttgtcctgttgagacactggtggaagaagccatccagtgtgcagaaaaaattgccagcaattctaaaattgtagtagcgatggccaaagaatcagtgaatgcagcttttgaaatgacattaacagaaggaagtaagttggagaagaaactcttttattcaacctttgccactgatgaccggaaagaagggatgaccgcgtttgtggaaaagagaaaggccaacttcaaagaccagtgagaaccagctgcccctgcttcacacctctgcttggagaggacaagtgcagcctgtcagttttagaagcaagtaaatcatcctcttttcaagagcagtgtccgtggtgtgcagttcctctccaattgctgcgtggtcgtggcccgacctctcacggcatgacagccttcgtcacccagcctgtgagggtcctgactggagcaccttctaaatctaagattctgctgaggagcccgctgtctctggcngcgtgtcgangcagcgggcagtggtctgtgtctgcgtgtagagggctgctgagtagtgtgctgctcaaaagtgtnatgaactcat

SEQ ID NO: 67387 - DNA, 1243 bp, Homo sapiens
gcagaacggtaatcggcagaaatgccgtgtgtgctctgcgcggcgctgaggccttcgctgtcgccgcgtctgtgggtgctaactttgagtacatcatcgcagaaaaaagagggaagaataacaccgtggggttgatccaactgaaccgccccaaggccctcaatgcactttgcgatggcctgattgacgagctcaaccaggccctgaagatcttcgaggaggacccggccgtgggggccattgtcctcaccggcggggataaggcctttgcagctggagctgatatcaaggaaatgcagaacctgagtttccaggactgttactccagcaagttcttgaagcactgggaccacctcacccaggtcaagaagccagtcatcgctgctgtcaatggctatgcctttggcgggggctgtgagcttgccatgatgtgtgatatcatctatgccggtgagaaggcccagtttgcacagccggagatcttaataggaaccatcccaggtgcgggcggcacccagagactcacccgtgctgttgggaagtcgctggcgatggagatggtcctcaccggtgaccggatctcagcccaggacgccaagcaagcaggtcttgtcagcaagatttgtcctgttgagacactggtggaagaagccatccagtgtgcagaaaaaattgccagcaattctaaaattgtagtagcgatggccaaagaatcagtgaatgcagcttttgaaatgacattaacagaaggaagtaagttggagaagaaactcttttattcaacctttgccactgatgaccggaaagaagggatgaccgcgtttgtggaaaagagaaaggccaacttcaaagaccagtgagaaccagctgcccctgcttcacacctctgcttggagaggacaagtgcagcctgtcagttttagaagcaagtaaatcatcctcttttcaagagcagtgtccgtggtgtgcagttcctctccaattgctgcgtggtcgtggcccgacctctcacggcatgacagccttcgtcacccagcctgtgagggtcctgactggagcaccttctaaatctaagattctgctgaggagcccccgctggtccctctgggcatgctgtgctcggacggaaagcggggcctgtgggtccttgtgtccctgccgctgaagaatggggctgctctgagggaaacgctgtctgctgccttcatacagatgctgattaaagtgatagcgattcagatta

SEQ ID NO: 67388 - DNA, 1570 bp, Homo sapiens
ggcgggcggggggaggcggcgcagagcccggcaggcgccgccgttgcctccgcctccgcgcggtctccccggggccagctgggaccccgagggctggggcgggggcgggggcgcgggcgactgcggcggggcctggagggcgctggtcccagcccagggcggggtcccggggacgcccctcggccttagatccgcgagcggcagctcgggcctgggggcggggcctggaggagagcgacccgctcactctgcccgggctgatctcgcgagggccgcctggtctcgcggcgctggcctgtgggcggagcgagccctgaaaggctataggcgagggggcggctccgcggggccgggcgaggagtccagagagccatggccgccctgcgtgtcctgctgtcctgcgcccgcggcccgctgaggcccccggttcgctgtcccgcctggcgtcccttcgcctcgggtgctaactttgagtacatcatcgcagaaaaaagagggaagaataacaccgtggggttgatccaactgaaccgccccaaggccctcaatgcactttgcgatggcctgattgacgagctcaaccaggccctgaagatcttcgaggaggacccggccgtgggggccattgtcctcaccggcggggataaggcctttgcagctggagctgatatcaaggaaatgcagaacctgagtttccaggactgttactccagcaagttcttgaagcactgggaccacctcacccaggtcaagaagccagtcatcgctgctgtcaatggctatgcctttggcgggggctgtgagcttgccatgatgtgtgatatcatctatgccggtgagaaggcccagtttgcacagccggagatcttaataggaaccatcccaggtgcgggcggcacccagagactcacccgtgctgttgggaagtcgctggcgatggagatggtcctcaccggtgaccggatctcagcccaggacgccaagcaagcaggtcttgtcagcaagatttgtcctgttgagacactggtggaagaagccatccagtgtgcagaaaaaattgccagcaattctaaaattgtagtagcgatggccaaagaatcagtgaatgcagcttttgaaatgacattaacagaaggaagtaagttggagaagaaactcttttattcaacctttgccactgatgaccggaaagaagggatgaccgcgtttgtggaaaagagaaaggccaacttcaaagaccagtgagaaccagctgcccctgcttcacacctctgcttagcagtgtccgtggtgtgcagttcctctccaattgctgcgtggtcgtggcccgacctctcacggcatgacagccttcgtcacccagcctgtgagggtcctgactggagcaccttctaaatctaagattctgctgaggagcccccgctggtccctctgggcatgctgtgctcggacggaaagcggggcctgtgggtccttgtgtccctgccgctgaagaatggggctgctctgagggaaacgctgtctgctgccttcatacagatgctgattaaagtgatagcgattcagatta

SEQ ID NO: 67389 - DNA, 989 bp, Homo sapiens
tcctttccactcctgctagctggagctgatatcaaggaaatgcagaacctgagtttccaggactgttactccagcaagttcttgaagcactgggaccacctcacccaggtcaagaagccagtcatcgctgctgtcaatggctatgcctttggcgggggctgtgagcttgccatgatgtgtgatatcatctatgccggtgagaaggcccagtttgcacagccggagatcttaataggaaccatcccaggtgcgggcggcacccagagactcacccgtgctgttgggaagtcgctggcgatggagatggtcctcaccggtgaccggatctcagcccaggacgccaagcaagcaggtcttgtcagcaagatttgtcctgttgagacactggtggaagaagccatccagtgtgcagaaaaaattgccagcaattctaaaattgtagtagcgatggccaaagaatcagtgaatgcagcttttgaaatgacattaacagaaggaagtaagttggagaagaaactcttttattcaacctttgccactgatgaccggaaagaagggatgaccgcgtttgtggaaaagagaaaggccaacttcaaagaccagtgagaaccagctgcccctgcttcacacctctgcttggagaggacaagtgcagcctgtcagttttagaagcaagtaaatcatcctcttttcaagagcagtgtccgtggtgtgcagttcctctccaattgctgcgtggtcgtggcccgacctctcacggcatgacagccttcgtcacccagcctgtgagggtcctgactggagcaccttctaaatctaagattctgctgaggagcccccgctggtccctctgggcatgctgtgctcggacggaaagcggggcctgtgggtccttgtgtccctgccgctgaagaatggggctgctctgagggaaacgctgtctgctgccttcatacagatgctgattaaagtgatagcgattcagatta

SEQ ID NO: 67390 - DNA, 1266 bp, Homo sapiens
ggtgacagaagacgtgcggagggagacgcagagacagaggagaggccggcagccacccagtctcgggggagcacttagctcccccgccccggctcccaccctgtccggggggctcctgaagccctcagccccaaccccgggctccccatggaagccagctgtgccccaggaggagcaggaggaggtggaggtcggcttgaatgcccacggtgcgcccggggacccctgtagccccatccacgctcctagcgcgcgtgccctagatggtcaccgggcggggatagggcctttgcacgctggagctgatatcaaggaaatgcagaacctgagtttccaggactgttactccagcaagttcttgaagcactgggaccacctcacccaggtcaagaagccagtcatcgctgctgtcaatggctatgcctttggcgggggctgtgagcttgccatgatgtgtgatatcatctatgccggtgagaaggcccagtttgcacagccggagatcttaataggaaccatcccaggtgcgggcggcacccagagactcacccgtgctgttgggaagtcgctggcgatggagatggtcctcaccggtgaccggatctcagcccaggacgccaagcaagcaggtcttgtcagcaagatttgtcctgttgagacactggtggaagaagccatccagtgtgcagaaaaaattgccagcaattctaaaattgtagtagcgatggccaaagaatcagtgaatgcagcttttgaaatgacattaacagaaggaagtaagttggagaagaaactcttttattcaacctttgccactgatgaccggaaagaagggatgaccgcgtttgtggaaaagagaaaggccaacttcaaagaccagtgagaaccagctgcccctgcttcacacctctgcttggagaggacaagtgcagcctgtcagttttagaagcaagtaaatcatcctcttttcaagagcagtgtccgtggtgtgcagttcctctccaattgctgcgtggtcgtggcccgacctctcacggcatgacagccttcgtcacccagcctgtgagggtcctgactggagcaccttctaaatctaagattctgctgaggagcccccgctggtccctctgggcatgctgtgctcggacggaaagcggggcctgtgggtccttgtgtccctgccgctgaagaatggggctgctctgagggaaacgctgtctgctgccttcatacagatgctgattaaagtgatagcgattcagatta

SEQ ID NO: 67391 - DNA, 904 bp, Homo sapiens
ctgcccctgatgttcccgggctcttgtgctgcctggcctctgacccctggacctagtctcagggcctatcttaagccccttggaatttgctggctgcacagctgtgatgtcttcttgggttcactcatcacagtgccagccatgaccagcccctccctgcaggtgcgggcggcacccagagactcacccgtgctgttgggaagtcgctggcgatggagatggtcctcaccggtgaccggatctcagcccaggacgccaagcaagcaggtcttgtcagcaagatttgtcctgttgagacactggtggaagaagccatccagtgtgcagaaaaaattgccagcaattctaaaattgtagtagcgatggccaaagaatcagtgaatgcagcttttgaaatgacattaacagaaggaagtaagttggagaagaaactcttttattcaacctttgccactgatgaccggaaagaagggatgaccgcgtttgtggaaaagagaaaggccaacttcaaagaccagtgagaaccagctgcccctgcttcacacctctgcttggagaggacaagtgcagcctgtcagttttagaagcaagtaaatcatcctcttttcaagagcagtgtccgtggtgtgcagttcctctccaattgctgcgtggtcgtggcccgacctctcacggcatgacagccttcgtcacccagcctgtgagggtcctgactggagcaccttctaaatctaagattctgctgaggagcccccgctggtccctctgggcatgctgtgctcggacggaaagcggggcctgtgggtccttgtgtccctgccgctgaagaatggggctgctctgagggaaacgctgtctgctgccttcatacagatgctgattaaagtgatagcgattcagatta

SEQ ID NO: 67392 - DNA, 1290 bp, Homo sapiens
  misc_feature (35)..(35): n is a, c, g, or t
  misc_feature (448)..(448): n is a, c, g, or t
  misc_feature (481)..(481): n is a, c, g, or t
taaagggcctgggtttacccgccccccccgggtancgggataggctataggcgagggggcggctccgcggggccgggcgaggagtccagagagccatggccgccctgcgtgtcctgctgtcctgcgcccgcggcccgctgaggcccccggttcgctgtcccgcctggcgtcccttcgcctcggccctcaatgcactttgcgatggcctgattgacgagctcaaccaggccctgaagatcttcgaggaggacccggccgtgggggccattgtcctcaccggcggggataaggcctttgcagctggagctgatatcaaggaaatgcagaacctgagtttccaggactgttactccagcaagttcttgaagcactgggaccacctcacccaggtcaagaagccagtcatcgctgctgtcaatggctatgcctttggcgggggctgtgagcntgccatgatgtatgtagaagacagacggagaanccgatgatagaataccctaatgttacacaagccaaagaaaatgaaatggagccattccgcaaaaacatcagacacccaaaaagacacccagatcagagaaaaagtcagcaaacaacaaaaagatgaccgatgcgctgaacctaatgcacagcccaaacaccaatcaagcagagtcttgtcagcaagatttgtcctgttgagacactggtggaagaagccatccagtgtgcagaaaaaattgccagcaattctaaaattgtagtagcgatggccaaagaatcagtgaatgcagcttttgaaatgacattaacagaaggaagtaagttggagaagaaactcttttattcaacctttgccactgatgaccggaaagaagggatgaccgcgtttgtggaaaagagaaaggccaacttcaaagaccagtgagaaccagctgcccctgcttcacacctctgcttggagaggacaagtgcagcctgtcagttttagaagcaagtaaatcatcctcttttcaagagcagtgtccgtggtgtgcagttcctctccaattgctgcgtggtcgtggcccgacctctcacggcatgacagccttcgtcacccagcctgtgagggtcctgactggagcaccttctaaatctaagattctgctgaggagcccccgctggtccctctgggcatgctgtgctcggacggaaagcggggcctgtgggtccttgtgtccctgccgctgaagaatggggctgctctgagggaaacgctgtctgctgccttcatacagatgctgattaaagtgatagcgattcagatta

SEQ ID NO: 67393 - DNA, 1208 bp, Homo sapiens
ggcgggcggggggaggcggcgcagagcccggcaggcgccgccgttgcctccgcctccgcgcggtctccccggggccagctgggaccccgagggctggggcgggggcgggggcgcgggcgactgcggcggggcctggagggcgctggtcccagcccagggcggggtcccggggacgcccctcggccttagatccgcgagcggcagctcgggcctgggggcggggcctggaggagagcgacccgctcactctgcccgggctgatctcgcgagggccgcctggtctcgcggcgctggcctgtgggcggagcgagccctgaaaggctataggcgagggggcggctccgcggggccgggcgaggagtccagagagccatggccgccctgcgtgtcctgctgtcctgcgcccgcggcccgctgaggcccccggttcgctgtcccgcctggcgtcccttcgcctcgggtgctaactttgagtacatcatcgcagaaaaaagagggaagaataacaccgtggggttgatccaactgaaccgccccaaggccctcaatgcactttgcgatggcctgattgacgagctcaaccaggccctgaagatcttcgaggaggacccggccgtgggggccattgtcctcaccggcggggataaggcctttgcagctggagctgatatcaaggaaatgcagaacctgagtttccaggactgttactccagcaagttcttgaagcactgggaccacctcacccaggtcaagaagccagtcatcgctgctgtcaatggctatgcctttggcgggggctgtgagcttgccatgatgtgtgatatcatctatgccggtgagaaggcccagtttgcacagccggagatcttaataggaaccatcccaggtgcgggcggcacccagagactcacccgtgctgttgggaagtcgctggcgatggagatggtcctcaccggtgaccggatctcagcccaggacgccaagcaagcaggtcttgtcagcaagatttgtcctgttgagacactggtggaagaagccatccagtgtgcagaaaaaattgccagcaattctaaaattgtagtagcgatggccaaagaatcagtgaatgcagcttttgaaatgacattaacagaaggaagaaagggactctgggggatgacgggggtgggatcatgggagacgtcagtagtatttgtcccgagtctcca

SEQ ID NO: 67394 - DNA, 1217 bp, Homo sapiens
ggcgggcggggggaggcggcgcagagcccggcaggcgccgccgttgcctccgcctccgcgcggtctccccggggccagctgggaccccgagggctggggcgggggcgggggcgcgggcgactgcggcggggcctggagggcgctggtcccagcccagggcggggtcccggggacgcccctcggccttagatccgcgagcggcagctcgggcctgggggcggggcctggaggagagcgacccgctcactctgcccgggctgatctcgcgagggccgcctggtctcgcggcgctggcctgtgggcggagcgagccctgaaaggctataggcgagggggcggctccgcggggccgggcgaggagtccagagagccatggccgccctgcgtgtcctgctgtcctgcgcccgcggcccgctgaggcccccggttcgctgtcccgcctggcgtcccttcgcctcgggtgctaactttgagtacatcatcgcagaaaaaagagggaagaataacaccgtggggttgatccaactgaaccgccccaaggccctcaatgcactttgcgatggcctgattgacgagctcaaccaggccctgaagatcttcgaggaggacccggccgtgggggccattgtcctcaccggcggggataaggcctttgcagctggagctgatatcaaggaaatgcagaacctgagtttccaggactgttactccagcaagttcttgaagcactgggaccacctcacccaggtcaagaagccagtcatcgctgctgtcaatggctatgcctttggcgggggctgtgagcttgccatgatgtgtgatatcatctatgccggtgagaaggcccagtttgcacagccggagatggagaggacaagtgcagcctgtcagttttagaagcaagtaaatcatcctcttttcaagagcagtgtccgtggtgtgcagttcctctccaattgctgcgtggtcgtggcccgacctctcacggcatgacagccttcgtcacccagcctgtgagggtcctgactggagcaccttctaaatctaagattctgctgaggagcccccgctggtccctctgggcatgctgtgctcggacggaaagcggggcctgtgggtccttgtgtccctgccgctgaagaatggggctgctctgagggaaacgctgtctgctgccttcatacagatgctgattaaagtgatagcgattcagatta

SEQ ID NO: 67395 - DNA, 703 bp, Homo sapiens
gtgatgtcttcttgggttcactcatcacagtgccagccatgaccagcccctccctgcaggtgcgggcggcacccagagactcacccgtgctgttgggaagtcgctggcgatggagatggtcctcaccggtgaccggatctcagcccaggacgccaagcaagcaggtatgggttggggctgcccgcaagagccacctggaaacccggggtgggagccccacagaaacccagggcggcatccaggtgtccccctcgggggagccccacagaaacccggggcagcatccaggtgtccccctcatgggtgccccacagaaaccctgagctgcatccagttgtctccctcgtgggagccccacagaaacccagagctgcatccaggtgtcccccatgggggagccccacagaaacccagggcggcatccaggtgtccccctcgtgggagccccacagaaaccccgggcagcatccaagtgcccccacggtggttgcatgagcttttgggtcctgaggacctgggagaagactgactgccttttgtttctacattttgaagtactgtatgtacggaagtgaaccacacgtaagtatctggtacagaataacagcccagcaattgcgtccccaaaatgcagtgtaagcaatgggcatctccaggcctcagtggccggtcctcccactgccctgttggtgatcacagtccc

SEQ ID NO: 67396 - DNA, 702 bp, Homo sapiens
caatcaaacccataaataccacagactctaatagccatggattgctgtgcctctcgaggctgcagtgtccccaccgggcctgccaccaccatctgctcctctgacaaatcctgccgctgtggagtctgcctgcccagcacctgcccacacacagtttggttactggagcccacctgctgtgacaactgtcccccaccctgccacattcctcagccctgcgtgcccacctgcttcctgctcaactcctgccagccaactccaggcctggagaccctcaacctcaccaccttcactcagccctgctgtgagccctgcctcccaagaggctgctaatggatggctactttgctcagtgcctgagattgaaaaagtcaacatagaagctttagcattcacctatctcagtacctacaactaatgtactctgctttagaaattggaacaaggatggtactaccacaatcaccccctgcaaaaaaaaagagaccaagaaactttcaatgaccattcagctataaccaactgcagtttgaatcagtggatgcctatagcttcctgaagctgttcgattccttcatattaaagtgtctctttctgtgggtggtttgggaattctgttttcagtcttgggtggtatctttctgaaaattaaggaagttcttcatgattatcctaataaattttacatctctggcatagccc

SEQ ID NO: 67397 - DNA, 613 bp, Homo sapiens
  misc_feature (192)..(192): n is a, c, g, or t
agtcgtgagccaccgtgcctggccatcaaagcatttttaatatagaaggtcagttgagttgctgcctaggatgcaacctgatcttaatttacaaagtaattaaattattataaaataagtttgcattcatagattaaaaagtacacatttattttattattattatttttttttgagatggagtttcgctcnttgttgcccaggctggagtgcaatggtgcaatcttggctcactgccacttccacctcctgggttcaagtgattctcctgcctcagcctcccgagtagctgggattacaggcatgcgccaccatgcctggctcattttgtatttttaggagagatggggtttctccatgttggtcaggctggtctcgaactcccgacctcaggtgatctgcccacctcggactcccaaagtgctgggattacaggtgtgaaacaccacgtcctgctaaaaagtacacatttaaaatctaagttccattttcccgtcatgtttattaatttgtcccattgcaggatatgtttctgttgtccgcatgggtagagataattttaaaagcttggttaagtaagaactgattttcttaattattgccctttaggtta

SEQ ID NO: 67398 - DNA, 3668 bp, Homo sapiens
ataggtatttcaggacagccaggagggggcgcacatccgccgagaaactgtgagcaagagcgtctgtgctgaaccatggcgccaccagagggcgcgcgatcccgccccaaccaacttcccgctgaagtgccagaagcagcgaggagcttcaacttcctcagggcagcacggggatcgtgttaatttggtgttcttcattggtgatgattattccccaccttctaagagacaaagaccaacgagccaccacagccaccagtcccagaacctgccaatgctggggaacggaaaatgagggagttcaactctggccctcacaatccagtggaggagacgaaactcatctgcctctgtccctctgggcacgcctcatgccaggtgcatctgtggacaggggccatgctcctgggcttccaaagttggagagagctgccaggctcaggtctgaaggccagaattctacagtaagtcctactgagtcaaggtgggagcagggtcggtagcttccgaggctctgcgggagaatccgtttcctggccgtagaggtggcctgcactccgcagcttgtgctgcccgtctcgaatgactggagtttcctgcttctgtcactacacctcccaccctctccatcacctgctctgctcttacaaggatccgaagaaatggaatcatcgtatcgctgatctacgtaaacaaactgaagaattgtctgaaagaaaatatgacatgaacttatgaattcaacaggtgaagatttacaacttgataaatcaactttgtcagctcgagctgtaaaagccaaaggtccggtgatgatcccatacccttttttccagtctcatgttgaagatttttatgtagaaggccttcccaaaggaattttttttttttttttttttttgagatggagttttcactcttatcgcccaggctggggtgcaatggcgcaaccttgctggtcactgcaacctctgcctcctgggttcaagaaattctcctgccttagcctcccaagtcactgggattacaggtgcccaccaccataccaggctaatttttgtatttttagtggagatgcggtttcaccatgttggccgggccagtctcgaactcctgacgtcaagtgatcttcccgcctcgactcctgatatcaagtgatcttcccgcctcggcctcccagagtgctgagattacagacgtgaacccatgcctggccaggaattttgttttttaggaaggctttctactaatggaattcctggccttgagaggatgttactttagaaggaaaggatttttttgttattaaaagctggacctaccatgaaagacttctgaatccaagaagagaaactgactgggcaacatgttattcagaaacaggaccttgccctgtcactcaggatagagttcagtggtcctatcatggctcattatagcctcaaactcccaggctcaagcaatcctaccatgtcagccttcccagtagctgggactacagataccgggtctcacactgtcacccaggctggagtacagtggcacaacctctgctcactgcagcctccacctgccaggctcaagcaattctcctgcctcagcctcccgagtagctgggattacaggaagtgagctcacaatgactcaagctgccacatactgttgattgtgaaatgccagttgaagcatatgtcctgcaagcttaggggtgctacaagttgaccactgcagcagtaaagatgactctgaagaatggcgtgggatggttcctttcaaatgcacttgagcagcggtctccaaccacagggccacagagctggagctggatctaccatgaaagacttgtgaatccaggaagagagactgactgggcaacatgttattcagaatctccctgtgccatccaggctggagtgcagtgatgtgatcatagctcgctgtagctttggccttctgagatcaagcaatcctcccatctcaacctcccaagtagctgggactacacatgcatgtcacccatgcccagatcatttttgtagagtcagagtttcaccgtggtggccaggttggccatgttggccaaatggggtcttcttttgttgcccaggctggccacaagttcctgggctcaagtgatcctcccacctcgtccttgtagagatgagatttagttatgtcgtccaggctgatctcaaactcctgggctaaatcgattgactcacctcagcctctcaagtatgttatgaaggttatatgttaggaagggtcccaggaggtagacccacacagatgggatttgggcataggtttggtttcccagggggcagtgctgagctctttgccagtgggaaatgggatgctggtgatttccagtaggtgacctcacagtgactcaagctaccacttactgttgattgtgacgaaatgccagctgaggcacatgccttgggagctaagtggttgctgcccttgaccactgtgaagactggtgtgggaagggtcgttttggatgcacttgagcaggggtccccaacccctgagccatggagccgcaaggagccacacagcaggaggtgggaacatccagttgcaggaaaacaagcttaacacgcccactgattctacattatgctcctacctcccggcagcctctccaggcccagaactttctccagtcagcctctacagaccaagctcatgactcaaaatggcctatttaggcccataccctacgtcacggcagcctccgcagatgaggctactgcctcacaacagcctccacaggcacagctccatcgttacaatggcctctttagacccagctcctgcctcccagccttctctccaggccctgaacattctcaggtctccctctgttgtccaaggctggagtgtagtagtgctatcgcagctgactgcagcctcaaccttccaggctgaagcgatcctcccacgtcgacctcccacgtggctgagactacaggtgcttgccactatgcccaactaatatttggaattttcatatacgtggattccagaggggtgacagcgaaacgtgactgcaggacaagttcgagcatcttaaaatgattcaacaggaggagataaggaagctcgaggaagagaaaaaacaactggaaggagaaatcatagatttttataaaatgaaagctgcctctgaagcactgcagactcagctgagcaccgatacaaagaaagacaaacatcgtaagaagcaatagtttctcttactattctgagagccttattctacatcccatcttcctgtgagtttgtctttgtagcatttaactctaattgcagttctcattttaaaaactggcttgcttattgtatattttccccaactaaagcgtgaactcctagcagggcgtggtggctcatgcctgtagtctcagcactgtgggaggccgaggtgggtcgactacctgaggttaggagttcgagaccagcctgaccaacatgatgaaacgctgtctctactaaaaatacaaaaattagctaggcgtggtggctgggacctgtaatcacagctacttgggaggctgaggcaggagaatcacttgaaccctgaaggtggaggttgcagtgagcagagatctcaccagtacactccagcctgggtgacaagagcaaaactgcatctc

SEQ ID NO: 67399 - DNA, 502 bp, Homo sapiens
ataggtatttcaggacagccaggagggggcgcacatccgccgagaaactgtgagcaagagcgtctgtgctgaaccatggcgccaccagagggcgcgcgatcccgccccaaccaacttcccgctgaagtgccagaagcagcgaggagcttcaacttcctcagggcagcacggggatcgtgttaatttggtgttcttcattggtgagtaaaaagctcctgtccacggccctgagtgccaaggagtgagtctttagagcactcagcagaggaagaaattcatctagaaaaataaagcccccaaatctcactatttggagtacaccctaatatcattgtcaacgtccaagacacagtggctgctaatatatattcttacagtggcctctaatataataatcacactgtgctctacattactatgatatctacactgtgccctaacacctatataatattcacaccatgcgctaacactgatgtaatccacaacatcgcttccaata

SEQ ID NO: 67400 - DNA, 1048 bp, Homo sapiens
ctagtcacttgtgattgttcctttataggtttgaaagatgtctcaggccaacttattggatgcagttttaatctaaaactctatacattgtacccccaactcacagacttcttgtatccatgaaaccctcttctgttttcatagtcttaatatggccccaataaagccatccttttggaggactcagaaaaggccccccacaacctctgcaacacaataattatagttaactcttattgagcactgactgtgcaccaggcatttttcaggtattgattcatttgatcctcaaaattcattagaggtaggtactattataatgacaaggccaaggaacagagattaaacaatttgcccaaattcacattattagcagagctgagattgaagcatagtctggctatggaatctgtattcttaatgaccatgctatactgcctaagattaaccttttacttcagttacagggattgtttttatctctctgaaagtgcccccaataagccacaacaataaattaatcaattgtctcggtcacctcttttgcccaaatttacgtattggaaaaaattcaaacaagccagaaagatgaaagaatagtacagaatccaatcaaagatcaggcactgcatgtcatgtcttcatttcctttaatctaaaacatgcctctactttctttgatctttcatgacactggcattttttaagagtcaaagatagttgtcttgtaaattgtcccacaatccagatttgtctgtttcctcatgatgaaattcaagttaagcatttttgggaaaaatactgcataggtgatgtatccttcctgcctcgtaaccgcagatggcctgtaatactaagtttgatcacttgactaaggtgatcttccaggtctctccattgtaattattttgctggctacagtggctcccacttgtaatcccagcactttggaaggccgaggtgggaggattgcttgagcccaggagttctacaccagcctgagcaacatggggaaactctgtcactactgaaaatacaaaagtacaaa

SEQ ID NO: 67401 - DNA, 1056 bp, Homo sapiens
ctagtcacttgtgattgttcctttataggtttgaaagatgtctcaggccaacttattggatgcagttttaatctaaaactctatacattgtacccccaactcacagacttcttgtatccatgaaaccctcttctgttttcatagtcttaatatggccccaataaagccatccttttggaggactcagaaaaggccccccacaacctctgcaacacaataattatagttaactcttattgagcactgactgtgcaccaggcatttttcaggtattgattcatttgatcctcaaaattcattagaggtaggtactattataatgacaaggccaaggaacagagattaaacaatttgcccaaattcacattattagcagagctgagattgaagcatagtctggctatggaatctgtattcttaatgaccatgctatactgcctaagattaaccttttacttcagttacagggattgtttttatctctctgaaagtgcccccaataagccacaacaataaattaatcaattgtctcggtcacctcttttgcccaaatttacgtattggaaaaaattcaaacaagccagaaagatgaaagaatagtacagaatccaatcaaagatcaggcactgcatgtcatgtcttcatttcctttaatctaaaacatgcctctactttctttgatctttcatgacactggcattttttaagagtcaaagatagttgtcttgtaaattgtcccacaatccagatttgtctgtttcctcatgatgaaattcaagttaagcatttttgggaaaaatactgcataggtgatgtatccttcctgcctcgtaaccgcagatggcctgtaatactaagtttgatcacttgactaaggtgatcttccaggtctctccattgtaattattttgctggctacagtggctcccacttgtaatcccagcactttggaaggccgaggcaggaaggatacatcacctatgcagtatttttcccaaaaatgcttaacttgaatttcatcatgaggaaacagacaaatctggattgtggtcgacg

SEQ ID NO: 67402 - DNA, 590 bp, Homo sapiens
accaggtggtggcaggaggaaatgttcccagtgggggtcattaaaagcgaagccaagagaaagtcctcgcagttcagcaagtgtctaagttgccaaaatggcacgttctaatgaacctcaacaaggcaaccttgcctctccttgagccagaagcccacatcaaatagaagcagggctcacagtagagattcaagctctcaggtgtgtttaaggaattcaaaaaccatgaaaacaaactacgggaaaaataatctgaacttgaaaagtataaaaaaaaagattactacattattaggaaaaactacaggtttatgattatcaagcagtcatagtgacagaaatttcattaatcagaagtcctgctgctcaaatgataaataaaaatacatctcaatgatttcatttaatgcatgtgttcacatgggtgccgcagtgtgatcttaaagttgcataaaaacagggtttcttgggcccagcgtggtggatcatgcctgtaatcccagcattttgggaggccaaggtgggaggattgcttgaggccaggagtttgagactagcctgggcaacatagcaagattctatctctactt

SEQ ID NO: 67403 - DNA, 227 bp, Homo sapiens
gtccctgcaatggctccctgttgtctaagacatcaagtttggatgtatggatcttccccctgggcaacccctgatctgaccttgccctcccatcgacccatcatggccagctgctccccacacgcacccatccatcaggaagatgccctccatggacaccccatgctgcctgttgccatctctctccacccctgcacagagcccctccttcaaggcgaacagcctct

SEQ ID NO: 67404 - DNA, 781 bp, Homo sapiens
cacgcgtccgcggacgcgtgggctcagactcagccaacagagattgttgatttgcctcttaagcaagagattcattgcagctcagcatggctcagaccagctcatacttcatgctgatctcctgcctgatgtttctgtctcagagccaaggccaagaggcccagacagagttgccccaggcccggatcagctgcccagaaggcaccaatgcctatcgctcctactgctactactttaatgaagaccgtgagacctgggttgatgcagatctctattgccagaacatgaattcgggcaacctggtgtctgtgctcacccaggccgagggtgcctttgtggcctcactgattaaggagagtggcactgatgacttcaatgtctggattggcctccatgaccccaaaaagaaccgccgctggcactggagcagtgggtccctggtctcctacaagtcctggggcattggagccccaagcagtgttaatcctggctactgtgtgagcctgacctcaagcacaggattccagaaatggaaggatgtgccttgtgaagacaagttctcctttgtctgcaagttcaaaaactagaggcagctggaaaatacatgtctagaactgatccagcaattacaacggagtcaaaaattaaaccggaccatctctccaactcaactcaacctggacactctcttctctgctgagtttgccttgttaatcttcaatagttttacctaccccagtctttggaaccttaaataataaaaataaacatgtttccacta

SEQ ID NO: 67405 - DNA, 1192 bp, Homo sapiens
cacgcgtccgcggacgcgtgggctcagactcagccaacagagattgttgatttgcctcttaagcaagagattcattgcagctcagcatggctcagaccagctcatacttcatgctgatctcctgcctgatgtttctgtctcagagccaaggccaagaggcccagacagagttgccccaggcccggatcagctgcccagaaggcaccaatgcctatcgctcctactgctactactttaatgaagaccgtgagacctgggttgatgcagatctctattgccagaacatgaattcgggcaacctggtgtctgtgctcacccaggccgagggtgcctttgtggcctcactgattaaggagagtggcactgatgacttcaatgtctggattggcctccatgaccccaaaaagaaccgccgctggcactggagcagtgggtccctggtctcctacaagtcctggggcattggagccccaagcagtgttaatcctggctactgtgtgagcctgacctcaagcacaggattccagaaatggaaggatgtgccttgtgaagacaagttctcctttgtctgcaagttcaaaaactagaggcagctggaaaatacatgtctagaactgatccagcaattacaacggagtcaaaaattaaaccggaccatctctccaactcaactcaacctggacactctcttctctgctgagtttgccttgttaatcttcaatagttttacctaccccagtctttggaaccttaaataataaaaataaacatgtttccactaaaaaaaaaaaacagaaaaacaaaaaaaaggcggcgaccggcacaaaaaaataacccacaggggggggccacgaaatataaacattaccccagagtagcggcgaccaaggtggccccaaatgaagggagccgcggaccatacaacaccaggacaagggccacgacgattacacaacggcccgagccgaggggcaaaaccggcgcgcccggggggcccccgtgggagagcgacacaccacaccaccgggcggggcgcaccaaccaggcgagccaaccacccccacacacgagatataagaccccgcagcggaccaataaaacagtcaacagtaccaataggtcgacacacaccacgccactattaagacggccaggacaaagtggacgaccggaagagagatgtagcagacat

SEQ ID NO: 67406 - DNA, 954 bp, Homo sapiens
gaggttttagctgtaatgaagcctcagtgggatccaaagttgtttttcagttactgagtctgtataatccccactctcaagagaaacatttgaaggtgtgggtgtctcagaggaccttcctggtctcagaaattctgagaggaggttttaaggaaggtaataggtgctttgctctccatctctcagaacccccttccctgtgttctcctacagagattgttgatttgcctcttaagcaagagattcattgcagctcagcatggctcagaccagctcatacttcatgctgatctcctgcctgatgtttctgtctcagagccaaggccaagaggcccagacagagttgccccaggcccggatcagctgcccagaaggcaccaatgcctatcgctcctactgctactactttaatgaagaccgtgagacctgggttgatgcagatctctattgccagaacatgaattcgggcaacctggtgtctgtgctcacccaggccgagggtgcctttgtggcctcactgattaaggagagtggcactgatgacttcaatgtctggattggcctccatgaccccaaaaagaaccgccgctggcactggagcagtgggtccctggtctcctacaagtcctggggcattggagccccaagcagtgttaatcctggctactgtgtgagcctgacctcaagcacaggattccagaaatggaaggatgtgccttgtgaagacaagttctcctttgtctgcaagttcaaaaactagaggcagctggaaaatacatgtctagaactgatccagcaattacaacggagtcaaaaattaaaccggaccatctctccaactcaactcaacctggacactctcttctctgctgagtttgccttgttaatcttcaatagttttacctaccccagtctttggaaccttaaataataaaaataaacatgtttccacta

SEQ ID NO: 67407 - DNA, 799 bp, Homo sapiens
  misc_feature (27)..(27): n is a, c, g, or t
  misc_feature (34)..(34): n is a, c, g, or t
  misc_feature (56)..(56): n is a, c, g, or t
acgactcacttcaagaccagggtgggnaccgggnccccttaccccagcgagtgggnagagattgttgatttgcctcttaagcaagagattcattgcagctcagcatggctcagaccagctcatacttcatgctgatctcctgcctgatgtttctgtctcagagccaaggccaagaggcccagacagagttgccccaggcccggatcagctgcccagaaggcaccaatgcctatcgctcctactgctactactttaatgaagaccgtgagacctgggttgatgcagatctctattgccagaacatgaattcgggcaacctggtgtctgtgctcacccaggccgagggtgcctttgtggcctcactgattaaggagagtggcactgatgacttcaatgtctggattggcctccatgaccccaaaaagaaccgccgctggcactggagcagtgggtccctggtctcctacaagtcctggggcattggagccccaagcagtgttaatcctggctactgtgtgagcctgacctcaagcacaggattccagaaatggaaggatgtgccttgtgaagacaagttctcctttgtctgcaagttcaaaaactagaggcagctggaaaatacatgtctagaactgatccagcaattacaacggagtcaaaaattaaaccggaccatctctccaactcaactcaacctggacactctcttctctgctgagtttgccttgttaatcttcaatagttttacctaccccagtctttggaaccttaaataataaaaataaacatgtttccacta

SEQ ID NO: 67408 - DNA, 547 bp, Homo sapiens
  misc_feature (82)..(82): n is a, c, g, or t
  misc_feature (145)..(145): n is a, c, g, or t
  misc_feature (159)..(159): n is a, c, g, or t
aaattttcgggggggccaaaaacctttggggtggtttcttggtgggctttcaaaaccccaaggggccggggagggggtgccnttttggtggggccttcaactgggattaaaggggaggagtggcaactggatggactttcaattntgggatggcttcanggaccccaaaaaggaaccgccgctggcactggagcagtgggtccctggtctcctacaagtcctggggcattggagccccaagcagtgttaatcctggctactgtgtgagcctgacctcaagcacaggattccagaaatggaaggatgtgccttgtgaagacaagttctcctttgtctgcaagttcaaaaactagaggcagctggaaaatacatgtctagaactgatccagcaattacaacggagtcaaaaattaaaccggaccatctctccaactcaactcaacctggacactctcttctctgctgagtttgccttgttaatcttcaatagttttacctaccccagtctttggaaccttaaataataaaaataaacatgtttccacta

SEQ ID NO: 67409 - DNA, 976 bp, Homo sapiens
cacgcgtccgcggacgcgtgggctcagactcagccaacagagattgttgatttgcctcttaagcaagagattcattgcagctcagcatggctcagaccagctcatacttcatgctgatctcctgcctgatgtttctgtctcagagccaaggccaagaggcccagacagagttgccccaggcccggatcagctgcccagaaggcaccaatgcctatcgctcctactgctactactttaatgaagaccgtgagacctgggttgatgcagatctctattgccagaacatgaattcgggcaacctggtgtctgtgctcacccaggccgagggtgcctttgtggcctcactgattaaggagagtggcactgatgacttcaatgtctggattggcctccatgaccccaaaaagaaccgccgctggcactggagcagtgggtccctggtctcctacaagtcctggggcattggagccccaagcagtgttaatcctggctactgtgtgagcctgacctcaagcacaggtgagaggcagagaatccatccacctgtttctgttctctcctgcttagctccagggatggaactgggactgggatagaggaaaggtgaactcctcattaaggaaatgaatgtttggtttttgtcctgagtcctaaagccaggagggtcatactctttcgggtctcccagttgtaactcttctcattgacttataggattccagaaatggaaggatgtgccttgtgaagacaagttctcctttgtctgcaagttcaaaaactagaggcagctggaaaatacatgtctagaactgatccagcaattacaacggagtcaaaaattaaaccggaccatctctccaactcaactcaacctggacactctcttctctgctgagtttgccttgttaatcttcaatagttttacctaccccagtctttggaaccttaaataataaaaataaacatgtttccacta

SEQ ID NO: 67410 - DNA, 602 bp, Homo sapiens
ttatttatcctgtgctttattggtgaacacttaggttgtgtgttagagtatagtttaagcttctggaaataaaaaaataccctcctatatgttttgctttaaacaaacaaatttgtttctgtttattaaacagttgagaggaaagtggtagctggtagggaactctgcagtcctttattacacagcttctgtctctgaatacaaaatggccatagcagcttcattcagctatatgccagccagcaggaaacaggaagaacagtgcatgctactcctattacatgtcacccagaagttctggcatatatcctgttggccagaaagtcatcacatggccattcccacttacaaagatggttgggaaatctagctatgtaattggctaaaatgcaggagttctgctgttaaaggagaaaccaaaagaacattgctggatacttaagtagtactgtcagttacccacagattgtcttctaccttgctactatcaataatgtaataaatatccttgaaaatgtttttgggtacacatgtaagtatattttcaggataaattcttaaaagtagaattgcttagtcaatggatatgtgcatcttttatt

SEQ ID NO: 67411 - DNA, 177 bp, Homo sapiens
tcgcttctcacttccccatgctgccctggacgccaggcctttggagggcaggcccgggttgtgtgttccccacggagccttgcgggccctcagtggatgtgtggagtgagatgagtatcttccgtgactgcagggcccctcgtatttctggtgcgttgcttggtttgagtttcacac

SEQ ID NO: 67412 - DNA, 628 bp, Homo sapiens
tcttgaggccagcatttttaaaaatgtgagatcagctttgaatggaaactaggtctctgatctaaaaaacaatgggcagaaagatttactctgcttctgtttagcatttttatcagtataaatttaggcagaagcctgagtcttaaaagtttagattctaaggcagggttccctaaataaaacaccttccgtgctcagtgtgaaagagtccattggcctgttgccaaaccagaatctaaatgcctagtcattcaaattaaatttaaaaacagaagcaaaacaaaaattagcactccacaaaacatattttaaggctggatctggctccagactaagagttaatgatgcttgaattaaagataggaaaatggaagaaggtggaaatgccaagaagtggatgttgttattgataacttttttgtataaccaatataaatgtaattatctgcctaaaaaagaaaaagaagaccctttatccctttaaatcattttcagaaatgtctgcataatgagttgagtttcattccctctaatgcctaaatgacaccttgtaataaattaccagctttgttaaataaggttttaactcctctgggcccctcagacaccgttgatatactaaccagta

SEQ ID NO: 67413 - DNA, 734 bp, Homo sapiens
atttcaggttcttgggggtagccaaaatgaggttctttgtccctctgttcctggtgggcatcctgttccctgccatcctggccaagcaattcacaaaatgtgagctgtcccagctgctgaaagacatagatggttatggaggcatcgctttgcctgaattgatctgtaccatgtttcacaccagtggttatgacacacaagccatagttgaaaacaatgaaagcacggaatatggactcttccagatcagtaataagctttggtgcaagagcagccaggtccctcagtcaaggaacatctgtgacatctcctgtgacaagttcctggatgatgacattactgatgacataatgtgtgccaagaagatcctggatattaaaggaattgactactggttggcccataaagccctctgcactgagaagctggaacagtggctttgtgagaagttgtgagtgtctgctgtccttggcacccctgcccactccacactcctggaatacctcttccctaatgccacctcagtttgtttctttctgttcccccaaagcttatctgtctctgagccttgggccctgtagtgacatcaccgaattcttgaagactattttccagggatgcctgagtggtgcactgagctctagacccttactcagtgccttcgatggcactttcactacagcacagatttcacctctgtcttgaataaaggtcccactttgaagtcactggct

SEQ ID NO: 67414 - DNA, 436 bp, Homo sapiens
gggattggttccaagttgggtattgcccctgcatgaatcacacgggactgagtctggcctctccttggggactctaaaagctggctaggtccattaccatgagagtcccttaggattaacaggccttttgtttgcctgaaatattcttcaaattctgagtcttaaaattctaataactcttaaggcaaagtactagtagcatctgtctgtgaacacttaacctgatttctctcactcagaagcaattattcctgcccaattatatagtatactagttgtaactatttagcatataggttttctgaattatatgataatgtttatatatcttaaaagataattttcataaaaaggtaagatcatgactcatacagatataaaaatgaacatgcattaaacatttaattcatgagggaaataagtagatgtttcaact

SEQ ID NO: 67415 - DNA, 242 bp, Homo sapiens
agattttatagaccagtggaatacaggccttgtcatatgaagatcaggtgacaagtatgctgcctaccagcctccacagcaatatgccctttcacgaatccaaaggactgcatgacacaccataggatatagtcaagaagcctttggacatgggagtttcaagctcaaaggagaattcatacctgaagagaaatttggaagccatcaatacattggtagttgataagctcatgaaaagagat

SEQ ID NO: 67416 - DNA, 612 bp, Homo sapiens
gaggaagttgaagaggaagcagcaggtttccaaatatttcaaccgcaaatgtattgttatcattcttcttattatttatttgtttgttttgtttttttgagacggaggctcactctgttgctggcacgatctcggctcactgcaacctctgcctcccgggttcaagaaattctcctgcctcggcctccctagtagctgggattacaggcatgcaccaccacgcccggctaatttttgtgtgtttttagtagagacagggtttcggctggtctccaaactctgacctcaggtgatccgccctcctcggcctcccaaagtgctgggattacaggcgtgagccaccgcacccggccctataattctttttattattatcattattatcattggtgccttttctttgttgtaaaactgtatgccgattgactatttggcaaatgtagaaaagtaggaaagaaatcatccatagtaccaggacacaatcactctggatattttggtgtgtttcctttcagtcttttttccatgcacaaccattttcatataattttatcatactgtatctgcaacttttatgtcctgcttttcccttgaatattgtgtcataagcat

SEQ ID NO: 67417 - DNA, 488 bp, Homo sapiens
gaggaagttgaagaggaagcagcaggtttccaaatatttcaaccgcaaatgtattgttatcattcttcttattatttatttgtttgttttgtttttttgagacggaggctcactctgttgctggcacgatctcggctcactgcaacctctgcctcccgggttcaagaaattctcctgcctcggcctccctagtagctgggattacaggcgtgagccaccgcacccggccctataattctttttattattatcattattatcattggtgccttttctttgttgtaaaactgtatgccgattgactatttggcaaatgtagaaaagtaggaaagaaatcatccatagtaccaggacacaatcactctggatattttggtgtgtttcctttcagtcttttttccatgcacaaccattttcatataattttatcatactgtatctgcaacttttatgtcctgcttttcccttgaatattgtgtcataagcat

SEQ ID NO: 67418 - DNA, 708 bp, Homo sapiens
ttggagcagtggcttctggctttctgattatggctgttgcctgcaatttaaagtcctaatgttcattttgtttgaagagggatggaggaggagttagacacatggaatgtgtgtgtgtgtgtgtgtgtgtgtgtgtgtgtgtgtgtgtgtttcaagatgaactcaatagcatcaacaaataatgagggttcagaaagtttatatttaacttgttgaaaatccacctagctatgagcctaatttcctgaagaataaatgtaaggtgagatgatatgttttggataccaataagatccagtacctgctacgtttatagggatagaaattgaacaaatggcaacatttcaaaatctgccaaaaagagccccaactgattgttttcatgtttataatctccaacttacagaatttcacagaggaacaagccgtaaagttgcctgaagataagtcctggctatgaattaatgttgaacaacatgaaaagattacaggtacttggaaataaacttctgaggaactcatcagaatttcaaattatgcaagtattatgataatacttgagaatctcaaaatcatttcaactatcaatttctgtgggattttataataatttgcagcttcaatgacaaaataatttaaaatgatgttttctaactctacctacacaattattctgactttataggaaataaattacatttatttgga

SEQ ID NO: 67419 - DNA, 366 bp, Homo sapiens
tgagacatgatttatcttcatcattctcacttttctgggagtaggtctcttggccttctttatctggttttttaaccttcatcccatatggatacactgtccaagttacggtaagtgctgctcataggaaaataaatggaaatttgccttgtggctaggtcagaattcaacagaaatcctgggttactaggtaaccttttttttgagatggagccttgctctgtcgcccaggatggaatgcagtggcacgaactcagctcactgcaaactttgcctcccgggatcaagcgattctcctgccttagcctcccgagtagctgggattacaggtgcctgccaccacgcccagctaattttttgtatttg

SEQ ID NO: 67420 - DNA, 571 bp, Homo sapiens
tggaatccttttgtggattcttgaatgacaaggtgggtggaatatctaatgaatgggggaatctctctcatattgtgtataaaaatatcatagttaataaaatgttaagtgaattccaaatcaaattcagaatcatagaggggatagatcatttccccagtgttttcatcttattctaactttaagctaaatttttattctttattcagttattctagtaaaaatgtggtgatagaggtgatgaaggggccttaagaaaaaacttgaggccgggcacggtggctcacgcctgtaatcccagcactttgggaggccgaggcgggcggatcacgaggactggagtttaagaccagacttcctaccgtggtgaaaccccatctctactaaaaatacaaaaatttagccaggctggtagcgggcacctgtaatcccagctactcaggagcctgaggaaggagaatcacttgaacccaggaggtggaggttgcagtgagctgagatcatgccactgcactcgagcctgggtgacaagagcgaaactctgtgtcaaaaacaaacaaacaagcaaaca

SEQ ID NO: 67421 - DNA, 334 bp, Homo sapiens
cttaccatggatgtatatccatgcctaggcacagcctggtgaattactttccggaaaaaaaaagtttgccttaagatttaattaattttcacagtttaataatatctcagggcatttattctgcatttaagataaagagcatagatttgtatatattatggaaataaatggaattctcattttgataagaaaatgtgaaagcccaacccatttaccagcattgataagagggagagatgggacgtgtttgcgcacttagtggatgctcatttggctatatgtaaagaagactttaattttcataatatatatttagaaccttaatatgtgaata

SEQ ID NO: 67422 - DNA, 1069 bp, Homo sapiens
cattggcgtttttttggtcttacgccctagggtggggagaggactccggtgcctccgggtctgggctgggccgcaaagggcggggcctgggcccggcgcgggccgggagcagaggccgagaccctgcaggtgattcctggggctgccagctaaggtcccttatgatttctgctctggctttgcagttttcagcctttcccaagagcagcagaaaatgaacaagttccagggacccgtgacattaaaggatgttattgtggaattcaccaaggaagaatggaagttactgacccctgctcagaggactctgtataaggatgtgatgctggaaaactatagtcaccttgtctcagtgggttaccatgtgaataagccaaatgcagtcttcaagttgaagcaaggaaaagagccatggatattagaagtagaatttccacatcggggcttccctgaagacctatggagcattcatgatctagaagcaagataccaggaaagccaagctggaaattcaaggaatggagaactcacaaaacatcagaaaactcataccacagagaaagcctgtgaatgtaaggaatgtgggaagttcttctgccagaagtctgccctcatagtacatcagcatactcactcaaagggcaaatcctatgactgtgataaatgtgggaaatctttctctaaaaatgaagacctcataagacatcagaaaattcacacgagagataaaacctatgagtgtaaagaatgtaagaaaatattttaccacctatcatctctcagtagacatctgagaacccatgcaggagagaaaccctatgaatgtaatcagtgtgaaaaatccttctaccagaaaccacatctcacagaacatcagaaaacacacacaggggagaaaccttttgaatgtactgaatgtgggaagttcttctatgtgaaggcatacctcatggtacatcagaaaacacacacaggggagaaaccctatgagtgtaaggagtgtgggaaagccttttcccagaagtcacacctcacagtacatcagagaatgcacacaggggagaaaccc

SEQ ID NO: 67423 - DNA, 1092 bp, Homo sapiens
cattggcgtttttttggtcttacgccctagggtggggagaggactccggtgcctccgggtctgggctgggccgcaaagggcggggcctgggcccggcgcgggccgggagcagaggccgagaccctgcaggtgattcctggggctgccagctaaggtcccttatgatttctgctctggctttgcagttttcagcctttcccaagagcagcagaaaatgaacaagttccagaagaatccattgccaaattcaagggacccgtgacattaaaggatgttattgtggaattcaccaaggaagaatggaagttactgacccctgctcagaggactctgtataaggatgtgatgctggaaaactatagtcaccttgtctcagtgggttaccatgtgaataagccaaatgcagtcttcaagttgaagcaaggaaaagagccatggatattagaagtagaatttccacatcggggcttccctgaagacctatggagcattcatgatctagaagcaagataccaggaaagccaagctggaaattcaaggaatggagaactcacaaaacatcagaaaactcataccacagagaaagcctgtgaatgtaaggaatgtgggaagttcttctgccagaagtctgccctcatagtacatcagcatactcactcaaagggcaaatcctatgactgtgataaatgtgggaaatctttctctaaaaatgaagacctcataagacatcagaaaattcacacgagagataaaacctatgagtgtaaagaatgtaagaaaatattttaccacctatcatctctcagtagacatctgagaacccatgcaggagagaaaccctatgaatgtaatcagtgtgaaaaatccttctaccagaaaccacatctcacagaacatcagaaaacacacacaggggagaaaccttttgaatgtactgaatgtgggaagttcttctatgtgaaggcatacctcatggtacatcagaaaacacacacaggggagaaaccctatgagtgtaaggagtgtgggaaagccttttcccagaagtcacacctcacagtacatcagagaatgcacacaggggagaaaccc

SEQ ID NO: 67424 - DNA, 242 bp, Homo sapiens
gacttatctctgaagtctgtaggagataacttcctccccattactagccagcagggtggcctgagtttccttgtctggagctgcaggatatttgttctatcctgtttacagccaatggggggccctttttcttccctacagtgagccttttcatctgcacagagggagatacaaaatcggaaatgatcttaattaaatgttttccgtccagaaacaactagtccactaccttgatctggcgg

SEQ ID NO: 67425 - DNA, 2087 bp, Homo sapiens
caggctcttcttgtgcctttaaaaatatatcttgaagattttaataaccccagtttcagttactgaggtggttatgaacaaattattacgttccccttattgaaacagtatttatctgttaattcttcgttgttggcatgatgtatgtggtgtttaaaaattcatcctcttagctgcactggggccttttacagaatgagtgtaaaggcacggtgctgaaggctgggagaaggaaccagaacagttttctataggtcatgaagttctactggtaactttctcctgtaaattatccttgtaatatctttgagacatgattttacggtgtctgaacacttccagtaatgtttaaactgttgattgctggacagctccttttgaactgtaatccacttccgtctgctttatgcacattgactgtagttccattctcttgagcatcatacacactataaatgcaaagcaccaagctttaggggtggagggcaggttgaacacataattctgtttacagaatttgcctgataatctttatgcttgtaagactatccacttgggacggacttctaaaacatctttgcgtatttgttctttttttttcctttctgtcttattgcaataatcccaaagatttttacctgctttgtctaatgatattgtctactttgaagaagagtcaattcatgatgatcctgaacagtgaagattcttcgaaaacttttttttttttttttttactttccattatggtgaattatcttgaacaagtactattgactgtgagtgggagacactcttctgaacgttgtagaaaatgtagagtggagattagacatgggttgttcccttgagaactcaagtgttggtattcagtgttctcatgttaggatctttgtaccttcagttctctttattcctgaagtgctgtgcttttccctcagtgcccttctcatcattcaaatttctgctcaaatgaaacctcctcagagagacttcccctgatgacactaactaaaataactcttttctcccatcattctctattttatcatgttttatattcttcatgataggcatcactatatgatatggaatattcttaagtgtttacttgtttgtttttttgtcttcaccttctagaatgtaagtttgcaagggtagggactttgtcttgtttaccactgtttcttcagtacctggcatataatgggcagtcaataaatactttaagattattaagctaccaatactgtaaattctgtttttgacaaggagaagctactgaagtagtataacctaggaaaaaacttaccttgaatggtacattccagtaactgaaacttgcagcaaaaaatcttaaccattttggggttacatacaccattgagaatcttataaaagctatgtattttctttctttctctctccttcctccctctgtccctccctccctcctttcctctcttcctggccccctttccctttctctttccctttccctgggtctcactctgtcacccaggctggagtgcagagtcatgatcacagctcactgcagcctctacttctagggctcaactgatcctcccacctcagcctcccaagtaactgggactacaggcacatgccaccatgcctggctaattaaaaaaaattttttttgtttttggttgagatgggggtctcattgtattgtccaggctggtgtcgaactcgtgggttcaagtgatccttctgcctcagccttccaaagtgctgggattacaggcttgagcaactgcactcagcctaaaactgtatgttctctctagaaaaaggtacatactcttattgtactcagaatttcagtatcaattcagagaattctcagaacccagaaatccctgctttgaagaaaggaataaccctgagtatttgaaaattcttaaaaatacatgttgttatgtcttccatttttgcccattgatgtgcatgaaacaagcacagttccctttccacatgaaagcctttaagatagtcttttaacaaatatttatgatgtaccatatcacatactgtgcacatagtgtatagacactatgtattcc

SEQ ID NO: 67426 - DNA, 663 bp, Homo sapiens
acgcaagtcaggtagggccttgtaggacactgtcaggatttggcttttaccaagagcaagatgagaagttgctagaaggttcggagcatagagtgatatgatctgacttcagttgaagaggaagctttgggactgctgtgttgagagtataccctgagagggcagacaatggaagcggctgaaagaccggttaggaagctcttgcaataatcctggtaagagatcatagttgcttgggccatgatgttagcaggggaggtgataagaagcagttggattccagaaatgttttaaagaatcgatatcacacagtttgctgatgaattagacattgaataagagaaagaaaaatcttaagaataaccttagaatgtttggcctgagctattgaaagtttggagttgccatcagtgtaagacaggaatcctgcaggtgaggctgactgggaaggaaagccttatagtttaaggtgtctacagatgttgcaagtagaaatgatgattaggcaattagatatatggacctggagttcagggaaaatgtatagcctgaagatacatatttaaaatttgtatgcgtttggttggtatttgaagccatgatactggaactagagaatgagtagcgacagaagaggattctctagactgaggcccagggtgg

SEQ ID NO: 67427 - DNA, 490 bp, Homo sapiens
gaacccctacattttgaaagacttgatattttgaagttaacgtttgggctttgaaaagtgaaaagtcatatttttatagttcaagaacatccctctctgccaccaaattcacacgagaaacataaaacttattttcctccatgttcaattttaagaattttgcccatcgaatactcatgcttcaaggaaacacactctctcatcaaaatctttcttactaaacaagcacctctgtcagaagtgtcttaatttcttatcacagaattttatccacacaaggagcaataaataattcatgtcactgcctctttgttgtgtgtccctgaactgcacagagctggaaggctgacagctgtgtcaggacaagcaccaaagatctgacatgacaagtgactaacaagtttctttcagttcacagtgaaagaagacaatggcccaaagtgcagaaagaaatcctaaaacaaaataaaactgcttctttctttttaac

SEQ ID NO: 67428 - DNA, 268 bp, Homo sapiens
ggcacgagggaaattgagagcaagagaaaaaaaagttaattatactgattttctcagattcatttcattgttgatgttgttagtcacagaccttaggtccccaggaagaagctctggagtgaggctgtgactacaatgtccttggggtctgccacttgatctgggggttatgtgggctcactccagagctagaagcatcgttcatttttgcctcaaaacaatgcccacatgtcagaagaactttcacaattcacaggaacagtgacct

SEQ ID NO: 67429 - DNA, 1369 bp, Homo sapiens
gggtactgaggaaaagctttgctgaaattggagatcaaataccagctctgccagtaagaagttgcatctcccagtgaaatgctgctgctgccatttcaactgttagctgttctctttcctggtggtaacagtgaacatgccttccaggggccgacctcctttcatgttatccagacctcgtcctttaccaatagtacctgggcacaaactcaaggctcaggctggttggatgatttgcagattcatggctgggatagcgactcaggcactgccatattcctgaagccttggtctaaaggtaactttagtgataaggaggttgctgagttagaggagatattccgagtctacatctttggattcgctcgagaagtacaagactttgccggtgatttccagatgaaatacccctttgagatccagggcatagcaggctgtgagctacattctggaggtgccatagtaagcttcctgaggggagctctaggaggattggatttcctgagtgtcaagaatgcttcatgtgtgccttccccagaaggtggcagcagggcacagaaattctgtgcactaatcatacaatatcaaggtatcatggaaactgtgagaattctcctctatgaaacctgcccccgatatctcttgggcgtcctcaatgcaggaaaagcagatctgcaaagacaagtgaagcctgaggcctggctgtccagtggccccagtcctggacctggccgtctgcagcttgtgtgccatgtctcaggattctacccaaagcccgtgtgggtgatgtggatgcggggtgagcaggagcagcagggcactcagctaggggacatcctgcccaatgctaactggacatggtatctccgagcaaccctggatgtggcagatggggaggcggctggcctgtcctgtcgggtgaagcacagcagtttagagggccaggacatcatcctctactggagaaaccccacctccattggctcaattgttttggcaataatagtgccttccttgctccttttgctatgccttgcattatggtatatgaggcgccggtcatatcagaatatcccatgagccatcatcatgtctcctctcccattcgcaataagtaccaagaagcccaagatatcagcccaaaagtcaatcttatcatatttcaaatgattttcaaatttgatgaaatcagagttttcatgtattttaaaataaattattatttaaacatcagcaaaaaagtacttaaaactgtaaatttattatgagactgtactaacagtgtgattcaccctgattttacacacattaaaatgttagaaaaaatgtgtctcaaaataaatgaaatataatacatatgacttaaaag

SEQ ID NO: 67430 - DNA, 1204 bp, Homo sapiens
gggtactgaggaaaagctttgctgaaattggagatcaaataccagctctgccagtaagaagttgcatctcccagtgaaatgctgctgctgccatttcaactgttagctgttctctttcctggtggtaacagtgaacatgccttccaggggccgacctcctttcatgttatccagacctcgtcctttaccaatagtacctgggcacaaactcaaggctcaggctggttggatgatttgcagattcatggctgggatagcgactcaggcactgccatattcctgaagccttggtctaaaggtaactttagtgataaggaggttgctgagttagaggagatattccgagtctacatctttggattcgctcgagaagtacaagactttgccggtgatttccagatgaaatacccctttgagatccagggcatagcaggctgtgagctacattctggaggtgccatagtaagcttcctgaggggagctctaggaggattggatttcctgagtgtcaagaatgcttcatgtgtgccttccccagaaggtggcagcagggcacagaaattctgtgcactaatcatacaatatcaaggtatcatggaaactgtgagaattctcctctatgaaacctgcccccgatatctcttgggcgtcctcaatgcaggaaaagcagatctgcaaagacaagtgaagcctgaggcctggctgtccagtggccccagtcctggacctggccgtctgcagcttgtgtgccatgtctcaggattctacccaaagcccgtgtgggtgatgtggatgcggggaaaccccacctccattggctcaattgttttggcaataatagtgccttccttgctccttttgctatgccttgcattatggtatatgaggcgccggtcatatcagaatatcccatgagccatcatcatgtctcctctcccattcgcaataagtaccaagaagcccaagatatcagcccaaaagtcaatcttatcatatttcaaatgattttcaaatttgatgaaatcagagttttcatgtattttaaaataaattattatttaaacatcagcaaaaaagtacttaaaactgtaaatttattatgagactgtactaacagtgtgattcaccctgattttacacacattaaaatgttagaaaaaatgtgtctcaaaataaatgaaatataatacatatgacttaaaag

SEQ ID NO: 67431 - DNA, 440 bp, Homo sapiens
aagtggaattgtaaatatttgtctttttgtgacttatttcatttagcgtaatatcctcattgtagcatatgaaagggcttccttccttttttgaaactgaacaatattccaccatatgcgtataacacattttgttcatccattcgtctatctatggacacttgggttgctttcacttttaactatcatgaataatattactatgagcatgggtgtacaaacatcttttatgtggagctcttttgttcttctgtttttaacaggtcatatcagaatatcccatgagccatcatcatgtctcctctcccattcgcaataagtaccaagaagcccaagatatcagcccaaaagtcaatcttatcatatttcaaatgattttcaaatttgatgaaatcagagttttcatgtattttaaaataaattattatttaaacatcagc

SEQ ID NO: 67432 - DNA, 282 bp, Homo sapiens
aagaggctcagggctgtgggaggcacatttttctctgaaaagcagtttggatgaggaagagatttggcagttggaagagagaagaagtcactacagggtactgaggaaaagctttgctgaaattggagatcaaataccagctctgccagtaagaagttgcatctcccagtgaaatgctgctgctgccatttcaactgttagctgttctctttcctggtggtaacagtgaacatggtaagagtcactctggcagctcccagcactggtgcaggggtttggatt

SEQ ID NO: 67433 - DNA, 440 bp, Homo sapiens
atgtatgcatctttgtttattaagtgatgggatttagcttaataatctagataaaaagcttttgccagatcaatatatgacaaatgttgatttccactttgttcttgcctttcagctctcctgaagctttttttttttatgaagagaaggttttaattctaataaagtccaatttgtcatatttttgtcttgataatttatgcattttgtgtcccaagaaatcttggcctgtgccaaagtcatggacatacttatctatgttatctactagaaatattgttttcaattttcaccttaaaatttaaaatccacttgtctcgaaatttgttaacaatataagataggtttatttctttctcacataaataaccagatgacccaaggctaattaccgagatgctgtcttctctccactgctcttctgtgcctgttttgtaata

SEQ ID NO: 67434 - DNA, 4408 bp, Homo sapiens
  misc_feature (1177)..(1177): n is a, c, g, or t
  misc_feature (1185)..(1185): n is a, c, g, or t
tgtttttgttgtgttatgtttccttgatttttcatgttccttggagttttgcattgctgccctcacatgtgaacaaggagtcacctcctccttcaatccttactaactgacttcaggatacaaagactttcattagtcagcctgacattctaggggtctcgcagacctttactatggatacacctgccccactcctcttgtttcctcttcaagaagaagctttatgtttgaatgtcttctcttgatcctgcaaagccaggctgggtgctgactgcctctcttttgtttttcctagggcattgccctgaagtactcaaagttaattgccttctcccagtcccagagagttaagccagatgtctgtgtgtgcttgtgcatgatttgcagaggctatgggtagggatggacagaagggcatgcagagtgcttggagacacatacgagaaagttaaatgggtccacaagtgttgcatcttttgatgttcatgggcagggttcatggagttcatgatgcaatgagtagaaacaatggccctttgtttagttctttactgaagttgctgtgagctctcaccccttttccctgttcttagctttcccaagactattcaactgagccagtttcttctgtgttatgggtgaagtgagataaaagtaggcctcttgggcaacattctgactagctatgctttcactttcccctgtgaaacaaatcgtgggccaagaatgtctctcttggcactgagctgtgtgctgccttgggaaaggggtgatgcaagtaaaatgaaactgttttccttaccctcttcaaggtaatcgtggatcatttttttctcccatggtgcgttgggacctctcccctggtccctgggctctacctaatatacttttgtctgtgggtagttgtcaaaattggtgttgctatggggataagaactgaaaactcttatcccaccatctttctaatgtcactcttctctgaatggattacattagaaaagaacaaggtgttcaccttctttaatgatgtagttacaaggaatctacctctgggagagacagttatgttttcataaatcctaaggcaaaacattagatatgaattctttttatttttatattttctttttctttttcaattctatctatctatctatctatctatctatctatctantctatctntctatctatctatctatctatctatctatctatctatctatctatctatctatctatctatctatctatctatctatctagtagagacagggtcttactgtgttgcccaggctggtctcaaactcctgggctcaagtgatcctcccacctcagcctcacaaaatgctgccaccatgctcagccagatatgagttctttttctaaaggaagggtttatttaaaaggagtcatagaccatcactggattctagtttcctgagagacatagagggtactctggcattgaagagagacactagaaggatggacatttttggaatgtttaacaagtctctcactttacagcatcagcagcagagagtgttaagcttgaaaaaataagaaaaaagtataaaattatgatcttagtgaattaatgacatattgccaagacttaggccatcatttatatattaacattaatgggatgtgaatgtttataataaaagacaaaaagatgagcttaaagaaattagacctattacccaaacataaatatttacttttacatgttgtcagagagtatttgtacctgtcatattgctgttttgcaaattagagagttaaattgactcctttttatagatattctatttccgtcctaaaactctttccatcactaaatctctcactaaactttgtggtgttacataatcctcactttctagttagtggcaatcataaaaacagataaaaaggctttcattattaggagtggcatggatgaagtagttgatactattggcaagatagaacatgacaaagagagcatgaccattatgacttatgcattaagtgaggtgttttgggctctttctggctatgcaccatatggtaaggaaatgatatctctgtcaggatagactagattgtaatgcagtaacaaatgaccctacttaaaaaaaattattgttatttgaatatttgcaaaatttaaggatcatgacatcatgatgaacatctatagaaatacatagctctctacctaagtacaaaatagagatatagagataaagtacaactgattcagatagttaaattattatgctattatttaatgttctcatgtgcagttttatgtattccagataatctttctaaataacttatgtagacatttatattttggtcagtctatttttttatttccaagtaatttaatttttgtcccaattgaattttaagaatagagctaaattaaaactgttactcagagctttttattcacttttatgttaataaagggttccttagagatgatatacctagttttctgtaagtggtttttattttcttggtaatctacaagtcagattttaggcaacacctgttgaaaaaaggttagggcaccatttacatgtttttcaaattgtaaagttctaatgcaggtttctgcagttagaatattcatgacacaaactgtttcaaatacaacttaaattgagattcaggtttaaatgttgatttatgaaagttcttctttaatgaaacttgtttttatgagatctctgaattgcaagaagtaggacttcagctttggaactgaaatagctcttggctatttgttttaatcactttccacacaaacctcacttctgaacggtcatcttatttagagttattatcaacttacttgccttagtgctgacattgttgatggattcgaagaagtgaaattggcaatcctgtatctaatgctagtgtctttggaacaacaaaaggagtttcaaagggaggctgaaattgaacacttaatattataaatcatgatatatgtatttttttgttttgtcttgtcttttactttggagaggggtttctttactgcatggacagttgtattcattaaatatatagaaaggtcatggctttcctaaaactttgggctgttctttaaaaattaatcttattctcatcaggagtttgtcacttctaaactgatctgagttaatttattggaactgtgagtaagagacattacataatttgggcacaaggagagaatctgtgtcctggaacttgctgatggcaccttcaaaggtgacccagttgaccagaaagtgttgatttccactttgtaattttaaaaatatatgacaatcaaagggcatttcatgacccaggagggagtggaagtagcaaataagcatgattattgcaaaagcttactagattgagtagaaggaatatgcactgctgtcaaaaagttgcaatgtaaaatagtcaaaactttttctatggctctgatgatagcaatcaacaaaatgaggaaaatgatgtggcaggattcagaatctgactaaggagtactaacagagaaaattatcatgttcttggctttagagacaaataaatgggccatgtgggcccaatcttttgtaacttaaaaaatgggaaaagctacgggagagttaacgttaccattttatgccttaagtgagatgttttgggctctttctggctacaaggtttggaaccacaattggattaatggtagttggctttaatggtccgtgggaagctaaaggttacaggcaatcatttcatcagcctcctggctggcctcaatggaaataaaattgtcagactgtaactttaaggaggctgagttagcaaatatattaatttcctattgttgttgttataaattattacaaatttagtggcttaaaacaacacaaatatattatgtcacggttctataagtcagaagttcaccatgggtctcactgggctaaatcaaggtatccacaggaggctgcaggaaacacgtttctttgccttttcaggcttctagaaactccgtgcattccttggctcatggcccctttttccatcttccaagtagcagtatagcattaccacaactacttcactgactctgcttctgtggtcatactgccttctctcgtctgtaacctgaccctcatgcatccctcttttcatttactgaaaaagcaatgactgtgacatgactaaataaagaaaatttatcatatttcttaaaataatgtatcaaaataattgtatttatcaaaatgacagcaaattaaaaatttaaaaagaaaacagataacaaatcaatacgcagggtatgaaattactccagatgaaatgaatggacaagtgattagaaaataattatattcatggttgctcaagatataaagagatagcagttact

SEQ ID NO: 67435 - DNA, 356 bp, Homo sapiens
ctgcactccagcctgggtgacagagtgagactccatctcaaaaaaaaaaaaaaaaaaaaaaaaaaagtttcttcctttctaacaggaacctgggggatccacctgtgtgacttagctatgaaatgctcccctgggactgaacaagttggctttctgagtggaaggaccagcattggctatgttcttgttggacagtaccaaccaaggtctcccacagatgctggtgttggcagaggtttcgccgtgctgtttgcacagcttgtgttggattctaggtcaattgcttcttccaggctggagtgcagtggcgcaatcttggctcactgcaagctccgcctcccaggttcacgccattc

SEQ ID NO: 67436 - DNA, 892 bp, Homo sapiens
tgagacctactgcattgataacgaagctctctacgacatttgcttcagaaccctaaagctgaccacgcccacctatggtgacctgaaccacctggtgtctgctaccatgagtggggtcaccacctgcctgcgcttcccaggccagctcaatgctgacctgcggaagctggctgtgaacatggtcccgtttccccggctgcacttcttcatgcccggctttgccccactgaccagccggggcagccagcagtaccgggcgctgaccgtgcccgagctcacccagcagatgtttgatgccaagaacatgatggctgcctgcgacccccgccatggccgctacctgacggttgccgccgttttcaggggtcgcatgcccatgagggaggtggatgaacaaatgttcaacattcaagataagaacagcagctactttgctgactggttccccaacaacgtaaaaacagccgtctgtgacatcccactccgggggctaaaaatgtcagccaccttcattgggaataatacggccatccaggaactcttcacatgtgtctcagagcagtttacagcaatgttcaggcgcaaggccttcctccactggtacacaggcgagggcatggatgagatggaattcaccgaggccgagagcaacatgaacgacctggtgtctgaatatcagcaatatcaggatgccacggccgaggaggaggaggatgaggagtatgccgaggaggaggtggcctagaactctccttttctaggtaaaggggggaagcagtgtggattctttactgtgttctgacagccatgtgtcactatacgcttgttaatttgtgtcttcacatctcctgctgcgttttaaagcatttttatagtatgcggttttgactaa

SEQ ID NO: 67437 - DNA, 196 bp, Homo sapiens
agccaccgtgcccggccccagagagattttctaacctgaaaagggtgcgtacaaaattatcaagcactggggataatgtggggcacccactatggaacttgggaaatgggtgtgaccactttggaaacaatttggcagcaccttgtaaagttaaaaatgtgcataccttcagacccaacaaccccactcccaggca

SEQ ID NO: 67438 - DNA, 620 bp, Homo sapiens
ggcctggtgcccaagtgtctgattcagtgggttggtccttaggactggcatttctaacaagttcccaggtgaggtgaggctgatgctgtggtctgggaacacattttgagactccagcccctagcctggtaacacctggggttttgacgcagaagtgccacgttccacgcttggcacatagtaattgatttcattctaacgctagccgacttcatgtattgaatagtttcccatctcagtgtctaagaagctccacagctggagatggcggcccttggtctcggagcccccctccttgtgatttctgctttgtgattgctttgatgaaccatttgggtccaggtgctcctgatcacaccacctcccctatttgggacttgtgccccactcccgctgtgagggctacaccgagctctgggggcctgttcggattaacaaggagatcttgctaaaggtatcttggtgctaagttaagggagatagttcgccatgggctaggatctctcagtgctggtgaccttgggtgagtgtctccctgtaaagtgataaggatgcctgctggaaagggtggtgggaggattaagtgcgttaaagaggccctcctcccaagcttttagttg

SEQ ID NO: 67439 - DNA, 948 bp, Homo sapiens
tgagaaagatgtgtaaatacaggacgataaaggaatgtgccagggcgacagagcgagactccatctcaaaaacaaaaacaaaaacaaaacaaaacaaaacaaaacagactttttgtaccagagctctaagagttaaaaatttcaggcaaattacccataaaaatcccgatggtggaagggtggaacaagagaacttgggtcaccacacaactctatgacagtcattgtagatggtatgcacagagtttgttgtgacacagcaaccctgataagtatacaagaaatgaaagccttagctaaatgtttctttataggattgcaatttctagttttatttaataaacacagttataagaaccaatgcagcactgaacaggacaagagataaatgagcctgtctctgagtatgcatcacaccctataccatgtttagttcagaacagccaaggttagcaacctcctccttcaaatatcacaattctatgtgcatccatcactcagcagcaataacgtttcttattgcttctaaaggcaatgccatacacttggaaagctgtaatttcactgcaacacatacatgcacactacacacaaacacatttatatgctctctcgccagtctggtgagcagcaatccttgactcaagtcttcagtctgcaccttcgaaagtaccagaaatgtccctttaggaagacagttcagatttactttcattacatgttcccctccttgtattccagggcaagagaggaaagataatagaaaagatattgaaggcccacattaaatcaacccaacttacatttagtatgtgcagtacacatttaaattatgctgtaacagagatttctactgctacaacacaacttgtttccttttttctggatgacacagataaagtgaatttttcaaaccctctcagggcaatgtatgtgtggcaaaaaaaa

SEQ ID NO: 67440 - DNA, 226 bp, Homo sapiens
gaggatgtattcctaatgaactttaaagatcctaaaaatccagttgtatatggagtgtttacgacttccagtaacattttcaagggatcagccgtgtgtatgtatagcatgagtgatgtgagaagggtgttccttggtccatatgcccacagggatggacccaactatcaatgggtgccttatcaaggaagagtcccctatccacggccaggaactgtaagtagct

SEQ ID NO: 67441 - DNA, 4625 bp, Homo sapiens
  misc_feature (391)..(391): n is a, c, g, or t
  misc_feature (776)..(776): n is a, c, g, or t
  misc_feature (1588)..(1588): n is a, c, g, or t
  misc_feature (1685)..(1686): n is a, c, g, or t
  misc_feature (3346)..(3346): n is a, c, g, or t
  misc_feature (4623)..(4623): n is a, c, g, or t
cctgtctcccggacgaggacctcaaccccttcccccgctcggggaccccggccacccgcagcccggccgcgctgcgcccagaaacccatgagtcttcctcagcagctgtcgaaacttgccggcggttgcttgctcacctttgctgtctccccttcagaaaaggctggaggggagggcgaggaaggcttggcgtggggacgcccgtcgagtctctcagtgaggaatgagaggccagcttctcctgcggggtatgaaggaggaactgtatctcctatatatattaagtttcatttataaagacatcagagagcacctgagaatgtttcaaggtcaccaaaagctttctgaaaatgcctttctgcaaagaaggtttccagagatagaagataantcaggaagcttagaagaggtcaacctgggaagacaggattctttctccccacccgtggctctgcaggaagcaataccctcccctctgggcaaggtcgaccctccaagtccagatgagaagagttccctctgtctgctctttcctctgcctgatgacccagaggctttgcagctgtgatcctggcagcccctggccacctcagggagctgcagaattcaaaccctggaaatggagctctgcttgcagctgcacctggggcctgacctgcttaggacaggcctgtctggacctaagagaaccccactgccacccactcagctactccctaacagactgcagagaccaagtctttttcatttctttatatccattgatttctcgagtnattgaaactcaatatttactgagcacctacaatgtgccaggcactgtgataggcactgaagaaagggcaaaggacgagcagataaatttcctacttgcagggaacaccgtggtagtgagtaaaatgagacattgcaaataaacacataaatatataatatgtcaactggcaataattgatgcgaagaatgattaagcaaaacaaggaaatgcagagacagggaaggagcatctatctggtatgaagtagtcagagaaggcctctctggtcagatgacatttgggcagaacctggggcctgtctcagcaccacctgttccttcctcggccacttgctccctgcagccaccaaaggcccctgtggttttcccgcctgaggctcaccagccacaggcctagaatatctggcttctctccccacgtccaaactcagctgaaatgccaaactgcaggaccttgtttcctgagcaactgccaatggggctgaatgatgcaactcggaaaggaagaggatttcattccccctgaatggactttgcaccagtgggagacaggaaacaggagattggaggatactgggcagctgaactgcctcaccctttccccctgccccgtctggtgcacaatttctccacacagcctgctgtgtgtggccaagcctgtgcgccgactgagtgttatgggttgaactatgttcctcagaaagatatgtcgaagtcctaacccccagtaactgtgaatgtggctttatagtatttggaaacagggtctttgctgatgcaatcaagttaagatgaagtcattaagggggtnggggcctaatccaatctcttgtccttagaaggagaaagacagagacacatcaggggaagatggtgaggtgacaatggaggcagagattggagcaatnnatctaaatgctaggcaacgccacagagagctgcaaacaccaaggctagaagaggcagggaaggagcctcccctacaggtttcagagggagcatggcctcaccatacctttacttcagacttctagcatccagaactgtgacacaacacatttctgttgttctgagtgacaacagtgtgtggtgtgttattacagctgctctagaaactaacatatcgagcagccagctgtgtgggattgtacctcccaagtaaccctctaagacttaacctttgcccagggctctgtctctagagaactgtgacaatgataggtagacctgaataaagcgaaggatgatatctgcagggatatttgaggacagggagtgctgacaagggaggagccagtgcaaaggccccgaggtggcagtatgcttggtgtgttggaggagcaggaaggtgaccagggtgtttggggagtgaataaggggaagagtgctcagaggagaagtcagaggaggggccaaagacatgttctctagggccagaaaggcctttggatcttttcgacattatcttcttgacatgtaatttatatagtagtaaaatgaacaaaatgggtgactattttgtgaattttttagatacataaaaccacgtgatcactatccagatcaaatgttgaacatttccatcaccccagagagttcactcctgctaccttccagtcaatacaacttaccaatcctgaggcaaccagtactctctcttttatcatcataaatttgttttaacctgttccttaatggcatataaatgaaactacatagcatgcttttgctcaaaatagtgcttgtgaggttcatccaggttgctgtatgtatacttcaattattattattgctgagtagtattccattgcctggatatatcacaaattatttatccattcttctgctgaatatttgagttatttgcagtttaggcctataataaatgaagccgctaggaacatttatgtgttcctcttattttggttgcatgcaatcatttctcttggtataaacctagcagtgtattttctgggtcaactggcttaggtttaggttaactgtattcgtttacaccattttatactcccgtcagcaatatatgagttccaggtattctgcatcctcaccaacacttggagcctttctggtaggtgtgtagtggcattgcattgtgctttcaatatgcatttttctgctgactaatgcactcctttttatatgcctattattcacatatctccttttatgaagtaggtattcaagtcttttattcacattttatgttttgttatggccacatctcacttccagaatctgtattggttatctatcgcgcattaaaaaagtactctaaagcttgacagctaaaaacaacaaacattcattctctcacacagtctctgcaggtcaggaacctgggtgcagcttcatggggtggttctggctcagggtctcaggttgcatttgagctgctgtctgaggttacagccctacctatcaaagctgaaccagagccagactccatgtctaaactcacttatgtgagcttcagtgtgagaaatgtatgaattttgtttgatgaaatattgaaaagcttaacaacttcctcctactctcattggcctcntggtgcccagtatctgagtctgaaaaatctcatctataggaatcaatggcagcaaagacagaaccaaggtcccacggctattggggaggttggcagatgagtgaggaaaaaggggtgtcagcaatctaaaaatattcaggctcacagaaatataactgtttgaaatgactcacttttattaagatcctgccatctcacttaccagcttaaaaaaaaatagatcacagcagaatgtttcaaattctccataaatggccatttgatccagcaacctacctgtggaaatttatgccaagattagaatctacaaaatacatacagagatgcacattgaagtattatttattaggaatctaaattgtggaatcattaaagagaatacatattccctcaaaagaataccatggtgttattaaaagtagtcattatgagtggttaggatataatataatattacaggaaattcttaggatataccatcaagtagaaaaacttttcttcccagcttttcaatgtgaaaatgtttaaacctacaggaaagttgtaaggccagaacaataaatgcttgtatagccttcatctagattctccaacagtgaccacagttgccacatctctttaagtgtaatgctcatcctttgagagtaagtgcagacattttgataccatgctctaagtactacaacacctatctaaaattgtagaaggaaactcttctatgattttcacactcaagacatttaacactgatataaagtttatattcaaatttctccaaaagatttaaaactatctctttggcttgtgttatccaggactcaatggaggattgagcattgcatttagttgttgtgcctctttagttttttttgatctaaaacaatccctcaaccatttttaaaaattctttcatgacattgacatttttaaaagactctggaacagtcattttacagaatatccttcaatttggatgtgtctgtttcctcaagattagaaattacatgaacttcttggctaacttctccattttattttgtgttcaaaatatattactctttcccatgtcctgtgaaaataaaaaatctctaatgtgtttgtgaaaaagattaagctaagattttgtttggatgcagtgtgatttggacttaggtgtgtgtatctgaacttcatcctttgtcatcaaaagaatagtataataactaagaacatgtagcttaagaaatccaggcacttgagagccactgtaagtaaactctaattcccacagcagaaanaa

SEQ ID NO: 67442 - DNA, 457 bp, Homo sapiens
cagccggcctgtggatgaggcggcggaaaccacatcctcttcatcatcctctcacgaggaaggacactgacagcttcggagaaggctgcccagtgtctgcgggtgcccttgggagatggccttgggacacggtgcctgtgcctgtgtgtgtacaccacgtgtgaacgccaactgggaacacggccccttcgtaggcaaacccaggcctcctggaagtcacaagttgatagctgtactcgccccttttggaagacgcacgcccaaggcacccgtgtgtgcacacgtatccgtgtgtggacctctgtccacacgtgtgtgttttgaaaagcctttctcaccacatgttaggatcacaagtgttcaaaatctaggcacacttttcagaagttatttctggaaaaaatgttgaatctcataacagcaataaaaggaaaataccgcctcagccaacaaaaaa

SEQ ID NO: 67443 - DNA, 775 bp, Homo sapiens
ctctctgggaagagtgttccagacggaggagagggcagatacagagaaagcatggggtgggaggatttggcgtgtttgaggccacaagcaggcagtgtagctagagaggggactgagatgaagttcaagggataattagcaccacagtgttggaagaagttcgaagtgtattataagtgtagtaggaagccattaataggtgttgaacaggggaatgatggaatctgagttcaattctcaaaagaccactctggccctaccattgtctcaagcgctcaagctgtagacctggaagacccccatcctgtcagtcgtaaactctccagtcttcatttgaaagatcttttgaatccatgtgtttctcaccaccctgcccctgatcctctagtcaggacctccatcatctcttgccagtggtacagcagtagcccctgagctggcctctccccctttcgttcttccaggcacatgtaccactttcttgctctgcagtgttgttttctgcctgttgatgttgtgtcctttcacaggtcaaggttaaaagtcacctcctctgtgaagtctttactggctccaccccagccccctgtaactgcttttttaaactgcgtctctggaggcttggcctgcacccctagccaggtgctttatgctcgtgcccaggcagcattgaggccaggactcggccactggccctgtgagttctccttaaactggatcagtctctccagcacccaggtcctgtagggccatggttctcagaacacagacaggt

SEQ ID NO: 67444 - DNA, 233 bp, Homo sapiens
tgcatatagatatccaatgttccagcgtcactgttgaaaagtttcctttctctactttcacttttgcaccaacctaataaatgaaaaagggctttgtgcctttgtcacacatcattttctcatatgtacatgggtctatttctagattctctattctgggaagaaatatactgattactgaaacttattgtggaatgcataaaaaattaagacggattggtggataaaaaaga

SEQ ID NO: 67445 - DNA, 1494 bp, Homo sapiens
ggtgggaatggcaggctgcgtcccactgctccagggcctggtcctggtcctcgccctccatcgtgtggagccctcagtatttctcccggcctccaaagcaaacgacgttctggtgaggtggaagcgtgcgggctcctatcttctggaagaactcttcgagggaaacttggaaaaagaatgttatgaagaaatctgtgtctatgaagaagcaagagaagtgtttgaaaatgaagtagtcactgatgaattctggagacgatataagggcggctccccgtgcatctcccagccctgcctccacaacggctcttgccaggacagcatctggggctacacctgcacctgctcccccggctatgagggcagcaactgcgagctggctaaaaatgaatgtcacccagagcggactgatgggtgtcaacacttctgcctcccaggacaggaatcctacacgtgcagctgtgctcagggctacaggcttggtgaggaccacaaacagtgtgtgccccacgaccagtgtgcctgcggggtgctgacctctgagaagcgtgcaccggatctacaggacctcccgtggcaggtaaagttaacaaattccgaaggaaaagacttctgtggtggtgttataatacgggaaaattttgtactgacaacagcaaaatgttcactgttacacaggaatattactgtaaaaacatattttaacagaacgagccaagacccgctgatgatcaagataacgcacgtccatgtgcacatgcggtatgacgcggacgcgggggagaatgacctgtcactgctggagctggagtggcccatccagtgcccaggtgcggggctccccgtgtgcacccctgagaaagacttcgctgagcacctcctcatcccacgcaccaggggcctcctcagcggctgggcacgcaatggcactgacctgggcaactcgctgaccacgcggcctgtcacacttgtggagggggaggagtgcgggcaggtcctgaatgtgactgtcaccaccaggacctactgtgagagaagcagcgtggcggccatgcactggatggatggaagtgtggtcaccagagaacacagaggctcctggtttctcacgggggtcctgggctcgcagccagtaggagggcaggctcacatggtccttgtcaccaaggtctccaggtactcactctggtttaaacagatcatgaactaactgaaactcagctagccagaatgaacaacacaaccggaagcgggattccaagctggcactgccactgtggagggcgctgaaacttcatcacacactgagaggccgtcacagccccagaccacccgcttggcccacgcagcagcagagccgccgtttgctgggttgtttaccgagcactgtgacctttctttccctggaactctttatctcaatagagaccttaaaagaaaacatgagatacgttaaataataaaataagataatctgtcagtcataaaaaaacc

SEQ ID NO: 67446 - DNA, 1606 bp, Homo sapiens
ggtgggaatggcaggctgcgtcccactgctccagggcctggtcctggtcctcgccctccatcgtgtggagccctcagtatttctcccggcctccaaagcaaacgacgttctggtgaggtggaagcgtgcgggctcctatcttctggaagaactcttcgagggaaacttggaaaaagaatgttatgaagaaatctgtgtctatgaagaagcaagagaagtgtttgaaaatgaagtagtcactgatgaattctggagacgatataagggcggctccccgtgcatctcccagccctgcctccacaacggctcttgccaggacagcatctggggctacacctgcacctgctcccccggctatgagggcagcaactgcgagctggctaaaaatgaatgtcacccagagcggactgatgggtgtcaacacttctgcctcccaggacaggaatcctacacgtgcagctgtgctcagggctacaggcttggtgaggaccacaaacagtgtgtgccccacgaccagtgtgcctgcggggtgctgacctctgagaagcgtgcaccggatctacaggacctcccgtggcaggcctctaacacaattatctcctgcctgagttgaggtgcagccctcgtgtccacaatgctccgtacccgagtgtggctgccgtgtggatggcacagcctcaggggccccccttgtaaagttaacaaattccgaaggaaaagacttctgtggtggtgttataatacgggaaaattttgtactgacaacagcaaaatgttcactgttacacaggaatattactgtaaaaacatattttaacagaacgagccaagacccgctgatgatcaagataacgcacgtccatgtgcacatgcggtatgacgcggacgcgggggagaatgacctgtcactgctggagctggagtggcccatccagtgcccaggtgcggggctccccgtgtgcacccctgagaaagacttcgctgagcacctcctcatcccacgcaccaggggcctcctcagcggctgggcacgcaatggcactgacctgggcaactcgctgaccacgcggcctgtcacacttgtggagggggaggagtgcgggcaggtcctgaatgtgactgtcaccaccaggacctactgtgagagaagcagcgtggcggccatgcactggatggatggaagtgtggtcaccagagaacacagaggctcctggtttctcacgggggtcctgggctcgcagccagtaggagggcaggctcacatggtccttgtcaccaaggtctccaggtactcactctggtttaaacagatcatgaactaactgaaactcagctagccagaatgaacaacacaaccggaagcgggattccaagctggcactgccactgtggagggcgctgaaacttcatcacacactgagaggccgtcacagccccagaccacccgcttggcccacgcagcagcagagccgccgtttgctgggttgtttaccgagcactgtgacctttctttccctggaactctttatctcaatagagaccttaaaagaaaacatgagatacgttaaataataaaataagataatctgtcagtcataaaaaaacc

SEQ ID NO: 67447 - DNA, 197 bp, Homo sapiens
tgatttttattctcatgttgctgccgcaaatgcagaccagtgtgcctgcggggtgctgacctctgagaagcgtgcaccggatctacaggacctcccgtggcaggtaacagagcgctctccgcgtgcttcaatttattgttatgactttcacctcacttgtcatttcctaaatagaaatgttgacaactaagtgaatc

SEQ ID NO: 67448 - DNA, 1560 bp, Homo sapiens
ggtgggaatggcaggctgcgtcccactgctccagggcctggtcctggtcctcgccctccatcgtgtggagccctcagccacttcactgaaggaacgacatggactccattctgactctgcctgcacaggcgtccaggaaagcttatttctcccggcctccaaagcaaacgacgttctggtgaggtggaagcgtgcgggctcctatcttctggaagaactcttcgagggaaacttggaaaaagaatgttatgaagaaatctgtgtctatgaagaagcaagagaagtgtttgaaaatgaagtagtcactgatgaattctggagacgatataagggcggctccccgtgcatctcccagccctgcctccacaacggctcttgccaggacagcatctggggctacacctgcacctgctcccccggctatgagggcagcaactgcgagctggctaaaaatgaatgtcacccagagcggactgatgggtgtcaacacttctgcctcccaggacaggaatcctacacgtgcagctgtgctcagggctacaggcttggtgaggaccacaaacagtgtgtgccccacgaccagtgtgcctgcggggtgctgacctctgagaagcgtgcaccggatctacaggacctcccgtggcaggtaaagttaacaaattccgaaggaaaagacttctgtggtggtgttataatacgggaaaattttgtactgacaacagcaaaatgttcactgttacacaggaatattactgtaaaaacatattttaacagaacgagccaagacccgctgatgatcaagataacgcacgtccatgtgcacatgcggtatgacgcggacgcgggggagaatgacctgtcactgctggagctggagtggcccatccagtgcccaggtgcggggctccccgtgtgcacccctgagaaagacttcgctgagcacctcctcatcccacgcaccaggggcctcctcagcggctgggcacgcaatggcactgacctgggcaactcgctgaccacgcggcctgtcacacttgtggagggggaggagtgcgggcaggtcctgaatgtgactgtcaccaccaggacctactgtgagagaagcagcgtggcggccatgcactggatggatggaagtgtggtcaccagagaacacagaggctcctggtttctcacgggggtcctgggctcgcagccagtaggagggcaggctcacatggtccttgtcaccaaggtctccaggtactcactctggtttaaacagatcatgaactaactgaaactcagctagccagaatgaacaacacaaccggaagcgggattccaagctggcactgccactgtggagggcgctgaaacttcatcacacactgagaggccgtcacagccccagaccacccgcttggcccacgcagcagcagagccgccgtttgctgggttgtttaccgagcactgtgacctttctttccctggaactctttatctcaatagagaccttaaaagaaaacatgagatacgttaaataataaaataagataatctgtcagtcataaaaaaacc

SEQ ID NO: 67449 - DNA, 1369 bp, Homo sapiens
ggtgggaatggcaggctgcgtcccactgctccagggcctggtcctggtcctcgccctccatcgtgtggagccctcagtatttctcccggcctccaaagcaaacgacgttctggtgaggtggaagcgtgcgggctcctatcttctggaagaactcttcgagggaaacttggaaaaagaatgttatgaagaaatctgtgtctatgaagaagcaagagaagtgtttgaaaatgaagtagtcactgatgaattctggagacgatataagggcggctccccgtgcatctcccagccctgcctccacaacggctcttgccaggacagcatctggggctacacctgcacctgctcccccggctatgagggcagcaactgcgagctggctaaaaatgaatgtcacccagagcggactgatgggtgtcaacacttctgcctcccaggacaggaatcctacacgtgcagctgtgctcagggctacaggcttggtgaggaccacaaacagtgtgtgccccacgaccagtgtgcctgcggggtgctgacctctgagaagcgtgcaccggatctacaggacctcccgtggcaggcctctaacacaattatctcctgcctgagttgaggtgcagccctcgtgtccacaatgctccgtacccgagtgtggctgccgtgtggatggcacagcctcaggggccccccttgtaaagttaacaaattccgaaggaaaagacttctgtggtggtgttataatacgggaaaattttgtactgacaacagcaaaatgttcactgttacacaggaatattactgtaaaaacatgtccatgtgcacatgcggtatgacgcggacgcgggggagaatgacctgtcactgctggagctggagtggcccatccagtgcccaggacctactgtgagagaagcagcgtggcggccatgcactggatggatggaagtgtggtcaccagagaacacagaggctcctggtttctcacgggggtcctgggctcgcagccagtaggagggcaggctcacatggtccttgtcaccaaggtctccaggtactcactctggtttaaacagatcatgaactaactgaaactcagctagccagaatgaacaacacaaccggaagcgggattccaagctggcactgccactgtggagggcgctgaaacttcatcacacactgagaggccgtcacagccccagaccacccgcttggcccacgcagcagcagagccgccgtttgctgggttgtttaccgagcactgtgacctttctttccctggaactctttatctcaatagagaccttaaaagaaaacatgagatacgttaaataataaaataagataatctgtcagtcataaaaaaacc

SEQ ID NO: 67450 - DNA, 895 bp, Homo sapiens
gtttcatgtctttcctcaactggctcacatttctagaaaggtgataagatgaagcacaaagtgctgggattacaggcatgaccaaatgtgctcctttaccaattgtttctgtctcaggaattggtttcttgttgcactgtgatacacatgaagccatatacctttttcagctcattatccccagaatgtatttgtacattattaacacagaatagacacctaataaatatttctaaatttttattgttcttccttgccacaaaacagcaatcacttttttttagcatgatgtacatgcccttctatcatcttgccctgaactatttatcaaatcttatttcttcccactcccccatttgtttcccgtgctgtggctgtacagaactacttagagctctgtcaactctccatgctattttataataatcaacactaatgaaaagaaagggggctttataacagaggcagaactcattatgttctaaaaaatacacgcatgtttcccatgttgaatagtgtcccgcagaaagtcatgtccagctggaacccaggaatgttaaactatttggaaacagggtctctgcagataacacttagttaagacaaggtcacaatgcattagggtgggctgtaaagccaatggctgtgtcctttcaggaaggtcgtgggaacatacagagacctacagggaagacggccatgggacaagggaggcagagtctggagttacgctgcctacagtcacggaatgccaaggacagctggaaaccaccagaagctaagaaggagattttacctgaaagcctctcaaagaaatcaatcatactcacacctcctttttgaatttctggcctcgtgaatggtgaaaaaataaatttctgtcgtcttaagcccc

SEQ ID NO: 67451 - DNA, 470 bp, Homo sapiens
cacagaatcttgctctatctcccaggctggactgcagtggtgcgatcttggctcactgcaacctctacttcccaggttaagcgatttctcctgtctcagcctcctgagtagctgggattacaggcgtgtgccaccacgcctagccaatttttgtatttttagtagaaacagggtttcaccatgttggccaggctgatcttaaactcctgcaggaaatccacctgcctcggcctcccagagtgttaggattacaggcatgagccaccacgcctggccgggcagggactctttcttacggagcaccttacacttagtaagtgttgggtaagtatttgtttagtggttcaaataatgtttttatagaaagattgcagttttgatccttccaaagaacatctgttgttgaggtttttctaatagaagtaataattcactttaatctatttatacattttcttcctgtctgtatt

SEQ ID NO: 67452 - DNA, 315 bp, Homo sapiens
cctcccaaagttctgggattacaggtgtgagtcactgtgcctggccttaatccactatcaatgtgtattttgaaatcaccaagagttctggacaagagaggtattggagagggtgacagtgagctagggataaaccaaaggggagtgatgaggggcttggtagatgactgtgatgaagatgagtagaaggctgtggagtctaatgcttgtgcctcagaggagctgggggtggggggttcctgaggagagagggaccatggtctgggaggagtgcatgaagtgcatggaggacacttatgcctctggaatcactgt

SEQ ID NO: 67453 - DNA, 189 bp, Homo sapiens
ttgcctgtaatattcttcttcccttgattaaaagcatggggttctgaagttaaacaaacctgggttcaaatccaagctccattcacttaataaccatccagctttaattaatttctctaagactcttttctcatccataaaatgggtatattaactgcattcagctagtaggtaggttaaacgtggtag

SEQ ID NO: 67454 - DNA, 413 bp, Homo sapiens
gacataactaaatgagagaaaatccaatgatttaggcattttaaaagcaaaatagaaagggtttgggagaaaaggaattttactcttcagattaatacattcactcctaagctttagcattgttataaaacaaaagatggctgggagcagtggctcacacctgtaattccagaactttgggaggccaaggtgggaggatcacttgaggccaggagttcaagaccagcctgagcaacatagcaagtccccatctctacaaaaaatacataaaatggcccagcatggtggtgcatacctgtagtcccagttactcagggggctgaggtgggaggaacacttgaaccctggagtctgaggttgcagtgagctgtgattgtgcctccagcctgggtgacagagcaagaccctgtctc

SEQ ID NO: 67455 - DNA, 567 bp, Homo sapiens
aaggacaagaatccttcaaaaaacaggaaaaaactcgtaaaacaccaaaagggcctagttctgtagaagacattaaatcaaaaatgcaagcaagtatagaaaaaggtggttctcttcccaaagtggaagccaagttcatcaattatgtgaagaattgcttccggacaactgaccaggagactattcaagatcctggcagtggaggaagtctctttagaaaatagtttaaacaatttgttaacatttttccatcttatttcatttctctaacagtcaatatctggctgtcctttctataatgcagagtgagaactttccctactgtgtttaataaatgttgtccaggttccattgccaagaatgtgttgtccaaaatgcctgtttcattattaaagatggaacttcaccctttgcttggttttaaatatgtatggaatgttatgataggacatagtagtagcagtggtcagaacatggaaatggtggggagacaaaaatatacatgtgaactaaaacttggcattttaataaagtagcatggtttctattgaaaaaaaagattacgac

SEQ ID NO: 67456 - DNA, 439 bp, Homo sapiens
tattgagagtatttctttcatgttgaaatcaagcaactttcttggtaaaattctatttcttaacgcagtcagtaattggtgggtgaggtgaccacatgccctgaggaggcaggtaggcccatctagagcaggagctgggctcatgcagatggatctttgaccctacctctgttcctcatagttggatgaccctggccaactcacttcaccctgttactttccttatctgcaaaattcatgtctccaaaattcccttgtggggttgctgtgaggatgagttgaaatgatgtgtgtggtgtcacagcatgatttccttgatccatggaagttattaagttgttggcagtccacttcttgcttttgtggagttgtatttttgttctagctcttttgttcacagacggggtgactatgtaatttatcatccaaactgggaatt

SEQ ID NO: 67457 - DNA, 530 bp, Homo sapiens
tgcaacctctgtctcctgggttcaagcgattttcctgcctcagcctcccaagtagctgggattacaggcatgcgtcatcatacctagctaatttgtcccatagaatctcatcttctggattttgtggctattttttcatggtgttgattcattcataaggtaaaatttatatacagtgaaatgcattttatgggtacaattcaatgagttttgaaaagtgtgcacatccatgtaaccaccacccagattaagacacagaacattcccgtcacctcagaatgtttcccggtgccttcttcctacccctcatacagtaacattgtaataatttctattgccacatatatgtttacctgttctgaaacttcacagaaatggaattatatattatgtatttgtttgttactggctttttatcatttaatttttttttattcatccacacccactgcatgtgtcagtatttcattccttcttgttattgtgtagtatacgaatatataaatatatcactatttttgcaatctcct

SEQ ID NO: 67458 - DNA, 550 bp, Homo sapiens
cttctgctcatcagaagatcttattagatttaaaaatagccaggatccgtggctcatgcccatcctcccaagtagctgggattacaggcatgcgtcatcatacctagctaatttgtcccatagaatctcatcttctggattttgtggctattttttcatggtgttgattcattcataaggtaaaatttatatacagtgaaatgcattttatgggtacaattcaatgagttttgaaaagtgtgcacatccatgtaaccaccacccagattaagacacagaacattcccgtcacctcagaatgtttcccggtgccttcttcctacccctcatacagtaacattgtaataatttctattgccacatatatgtttacctgttctgaaacttcacagaaatggaattatatattatgtatttgtttgttactggctttttatcatttaatttttttttattcatccacacccactgcatgtgtcagtatttcattccttcttgttattgtgtagtatacgaatatataaatatatcactatttttgcaatctcct

SEQ ID NO: 67459 - DNA, 2260 bp, Homo sapiens
gatgaagtgctttctgggggcagagcactttcatgtatcatcttactgagtcactacaatcctcactctgtgaggtgatgatatattagccccattacacagaggagaagggctcagaaaagttcttagctcacctgaagtcacacagctaaaagtggcaaagatgggctttggatttttaatccaagtcagtcttgacagaaaagcccatggcctgtataccatatacaacaagttgcctctcttacaattctccttcctcaggctgggtgcgctggctcacacctgtaatcccagcactttgggaggctgaggcaggcagattacctgaggtcaggagtttgagagcagcctggccaacatggtgaaactccgtctctactaaaaatacaaaaattcgccaggcgtggtggtgggcgcctgtagtcccagctacttgggaagctgaggcaggagaattactggaacccgggaggcggaggctgcacagtgagccaagattgcaccactgcactccaggctgggcaacagagtgtgactccgtctcaaaaaaacaaaaacaaaaacaacttctccctcctccacagactcctccctggtcaccactagtgatccaccttatggatctcccaaggccacctctgcctctgctctgtgttgtattatttggggacctgtggtctggcatgcattgtacttggtgccccaaagggctgtggcatctgataagtgatttatcctcaggcacagatttgcactatgtcaccactacttgtatgtagaagtgagtcaccggctggcaaatgggcatagctgctgggcagtggatgcagctccatgcatgttattctcatttgatacaggatctcattggcttctcacagcaatcctgtgcactataggtattgctcccgggaacagatgaggaaacaggagagtgcgagattacagtaattttgtaaatgggaggatttgtgaaggtttcagacatacaccctctctcatatgtcaaggatatgaagtctaatgaatcccctaaagcagcaggggttggcaagctgtggccctggggccaaatcagcctactgcctgtttttgtaaataaagttttattggaacacagtcacacccatcatcaatgtattatctagggctgctttctgttcattggtagtttgttgagtagccacagcagagacaggcttgcaaagtgaaaatactatctggccctttacagaaaaaaagggtcagtgtccctgctctaaagaagtatgtgtgaggtgccctggccacttatgggaagaaaagctgagcctattcagcaaggttttaggtggctcagattttatagaggaacaaacattgagctggcctgggaaggatgagcagaaggtcgtcgagtgtgttgggggctgggggactctacgcagtgggagctccttacatacaggcatgagaaagcctggtgtgcccctcagagtgtcatggagcctatggtaggagaatacggtgcataggaaagagtgaaggtaggagagtctgcatgctagatgggccaggcctgggatttctgtagtctagtgtgtcaggcagaggctctcaagctgggcttcatgacacaatgacctgtggaatgctcaaaaaatacatattcccaggctcctggctactgaattagaagagtcaggagaatgccctttaatctgctttttaaaccatgccccagataattctaatacaacaaattggaaggcctgatgagaccccactcagggaagggagggagggaggctggagactggagaccgctgccagggagcagggaggggcagtgggatcaggagggaaggcagggttggcagtgtcacttggacagggccaccatgccccaatcttgtatctcccacggcaccttgcacatagcatgtgtttactaggtatttattcaccaagtaaaataaggattctttgttcttgcatgttaaggagtgacacccaaaacacctgtaaaaagccagcagagggtaacattttaggcattttgggccacatgagttgtctgtctgttccatattcttttcttgttttttctttttctttttttcttgagacagggtctcgctctgtcacctgggctggagtacagtggcacaatctcggctcactgcaacctctgcctcccaggttcaagcgattctcctacctcagccaccatccccgcccccatcccagtaactgggaccacaggtgcgtgccaccg

SEQ ID NO: 67460 - DNA, 502 bp, Homo sapiens
ttctactttgaatatatgctgattctgttattgtgcttttcagtatcttagttgtggaagcatttgaaaatggcttgattctgtggacaccagagaaacctaagttatacttagatttaaaattgaccttttttttaagaaaaaatactcactgacaaaatgattttttaaaaattacagttgaagcatttaaaaaatataaacgttaaaatgtaatatcccagctgggtgcggtgactcacacctgtaatcccagcactttgggaggccgaggtaggcagatcacttgagcccaggagtttgagaccagcctggccaacgtggcgaaacctcatctctactaaaaatacaaaaattagctgggtgtggtgcacgcctgtaatcccagctacttgggaggctgaggtttgagaaccacttgaacccgggaggcagaggttgcagtaagccaagatcacaccactgcactccagcctgggcaacagagcaagactctgtctca

SEQ ID NO: 67461 - DNA, 690 bp, Homo sapiens
ctctgctgtttgtcctggaccctgccaagagagggaatttttacatattgatgagctcagcagccaggaatcaaatccgagttcgtctacagctgattcggcaggtaccagggcgtccgcgatggtgagtgatagcaccgcgatggtggtattgctccatatgcctgagaccctaacaaaagcctaattacaactcatatgcctggagccaggacatgtgcaggatgactctgccaagagaggggattattacatattgcagagcccagcacctaggtggagtgactctcatctttttcttctaccccgtatatagccagcttggtgacctactatttgaggctatacccaggcccagaccacagatgaaattgtgcaatatgtggaacaaacacctaaacaatatataacaccttccttggctctgtctacaaagggcacttttatatatcactgggaccatcaaccaggtgatgttaattatcttcctgaaacctgtctacaaagagagttgtgtcgtatacctaggcccgtcatgtaagtgatgtcagtcccttctactgccttggccctgcacttacagtgcattgtgacacataacaaggtactgcacacagacgatgtgattctcctttttgggttctgccaaaaggaagcattgtaataaatcgcttggctcagtaaaaaagt

SEQ ID NO: 67462 - DNA, 818 bp, Homo sapiens
atcccctctcctgcttaagtccttcccacagagagcggtttgatatgtcactgaaaccagcatccaggtggtattgctccatatgcctgagaccctaacaaaagcctaattacaactcatatgcctggagccaggacatgtgcaggatggtgatgtaactttcctctctggaatgggtcctgcacaaaggaatgatagtaacatattgcaaagccagacacacagccatgatggtccaagttatattgggattcagccaatagaagatattttgcctgtcatccctaagcttaggacaatagggtcctgcccacaagaaagattgtgacatctcactggacaagcacccacccagactctgccaagagaggggattattacatattgcagagcccagcacctaggtggagtgactctcatctttttcttctaccccgtatatagccagcttggtgacctactatttgaggctatacccaggcccagaccacagatgaaattgtgcaatatgtggaacaaacacctaaacaatatataacaccttccttggctctgtctacaaagggcacttttatatatcactgggaccatcaaccaggtgatgttaattatcttcctgaaacctgtctacaaagagagttgtgtcgtatacctaggcccgtcatgtaagtgatgtcagtcccttctactgccttggccctgcacttacagtgcattgtgacacataacaaggtactgcacacagacgatgtgattctcctttttgggttctgccaaaaggaagcattgtaataaatcgcttggctcagtaaaaaagt

SEQ ID NO: 67463 - DNA, 1099 bp, Homo sapiens
ctctgctgtttgtcctggaccctgccaagagagggaatttttacatattgatgagctcagcagccaggaatcaaatccgagttcgtctacagctgattcggcaggtaccagggcgtccgcgatggtgagtgatagcaccgcgatggtggtattgctccatatgcctgagaccctaacaaaagcctaattacaactcatatgcctggagccaggacatgtgcaggatggtgatgtaactttcctctctggaatgggtcctgcacaaaggaatgatagtaacatattgcaaagccagacacacagccatgatggtccaagttatattgggattcagccaatagaagatattttgcctgtcatccctaagcttaggacaatagggtcctgcccacaagaaagattgtgacatctcactggacaagcacccacccagactctgccaagagaggggattattacatattgcagagcccagcacctaggtggagtgactctcatctttttcttctaccccgtatatagccagcttggtgacctactatttgaggctatacccaggcccagaccacagatgaaattgtgcaatatgtggaacaaacacctaaacaatatataacaccttccttggctctgtctacaaagggcacttttatatatcactgggaccatcaaccaggtgatgttgtgccatataactgagaccgtatcaaaagcctaataacaagacgtatgtctggagccccgatatgcacaggatggtgatataaccctcttctctggaatgggccccacacaaaggaaggatagtgacatattgcaagcccaggcacacaggcccagagcacagttgaaattgtgacatatgtacaccaagcaaccaagcaatgtataacacctcatttggcaatggaatcgagggcacttttacatatcactgagaccagcgcccagctgatgtgaaatattggcctgaaccctgcctacaaaagcattgtggcttttatctagctccattacataagtgatgtgacttccttctactgccttggccctgcacttatggtgaatcgtgacacaaaattgggtagagcaaccaggt

SEQ ID NO: 67464 - DNA, 1017 bp, Homo sapiens
ctctgctgtttgtcctggaccctgccaagagagggaatttttacatattgatgagctcagcagccaggaatcaaatccgagttcgtctacagctgattcggcaggtaccagggcgtccgcgatggtgagtgatagcaccgcgatggtggtattgctccatatgcctgagaccctaacaaaagcctaattacaactcatatgcctggagccaggacatgtgcaggatggtgatgtaactttcctctctggaatgggtcctgcacaaaggaatgatagtaacatattgcaaagccagacacacagccatgatggtccaagttatattgggattcagccaatagaagatattttgcctgtcatccctaagcttaggacaatagggtcctgcccacaagaaagattgtgacatctcactggacaagcacccacccagactctgccaagagaggggattattacatattgcagagcccagcacctaggtggagtgactctcatctttttcttctaccccgtatatagccagcttggtgacctactatttgaggctatacccaggcccagaccacagatgaaattgtgcaatatgtggaacaaacacctaaacaatatataacaccttccttggctctgtctacaaagggcacttttatatatcactgggaccatcaaccaggtgatataaccctcttctctggaatgggccccacacaaaggaaggatagtgacatattgcaagcccaggcacacaggcccagagcacagttgaaattgtgacatatgtacaccaagcaaccaagcaatgtataacacctcatttggcaatggaatcgagggcacttttacatatcactgagaccagcgcccagctgatgtgaaatattggcctgaaccctgcctacaaaagcattgtggcttttatctagctccattacataagtgatgtgacttccttctactgccttggccctgcacttatggtgaatcgtgacacaaaattgggtagagcaaccaggt

SEQ ID NO: 67465 - DNA, 444 bp, Homo sapiens
ccaaaaatgggattatgacatatacctttcttcatttcacagccatgatggtccaagttatattgggattcagccaatagaagatattttgcctgtcatccctaagcttaggacaataggtaaaatcctgggttgcatatttgtacaaagctcacagaagtttacaacacttactcataatgtataaacttgggtggtacagacagtttcataacaaggcccggcaaaaagttaagattgtgactctcaattacacacccaggtgaaagtaaaatctgtcaccatcccacatttacaaagcccactgttgcagtactgagtctaataggtgaaaacagtacaaagatggaattttgactctcatatgtgcatcgggccacaggtgcgattgtgactcatttttggatccatctcacaggcataaaatgtgtctcattcctgaac

SEQ ID NO: 67466 - DNA, 559 bp, Homo sapiens
aggtgtgaagaccgtgcttcagagctgggcactgggagagggcagacacaaaccggagtgcagagtacagggctattctcagctccctgcgtgaaaccagggagctctgcctctgctgatggagctgcgccaagtccttatttgatggccgcgtcctgctggagacactgagtttgcagtggcaccaaatcctctgtgtgtgccctttgttgtggccgctccacatttccaggatggtctccacccagaatttgatttgaacgttgagaccacataatagggttttctggagagagcagggccggcttctcaagctggtctgaaaatgaaagacagggaagagaaaggagaaaggagactggtctggggattgtatggtgattagcggttaggtttgggcgagggttccgtgtgggcaggggcttacatggtttgaaccttctgctgcagccaagcgggagagcatccagactttcttatcagcttgcccagatgtggggcagaaggggaagagcgagggatggggcttaaaaaaaaaagctgtcagcagttaaagagc

SEQ ID NO: 67467 - DNA, 1307 bp, Homo sapiens
tttgttcacgtgctgtaatatattttatttaacttgattaatcatggacttattgtgaccaaataaagttgaaaaaagatatatatcaaatacacctgatatgtatatatatagcatatttctatatatagacatactctgtaaagaacacgttcttttctgctgtccatgaagtgtatttgatatatatcttttttcaactttatttgttcacgtgctgtaatatattttatttaacttgattaatcatggacttattgtgaccactcacactaccaattgatttctgttgttttctctcatttcaagaagttttcactttacatgagtactgagtgattgtgtagcaattttatgatagtgaaaggttggaaacaacctgcaggtccatcattaaggaaatggggtaaacaaattagggaagagccacacaaagggacactatgcagtcattaaaatgatgctgtagagcagtctcgttctccagcgttcagtctcaggatcactttccactcttgattattgaggatcccaaagaacttttgtttatatgggttatatctgtcaatagttagcatattcaaaataaaaatgaaggaattttaaactatgtatttattaacttgcataatgataagtctatttcatgttctcctgaaaaacatatttttattaaaaataactttttttaagacaaaaaagttaatgagaagaatggcatcattttacacttttgcaaatctctttaatatatgtctggcttattagaagacagctggctggctttgcatatcacacattatgcagcctttggaaaaccccactatacactcaagagagagaatgagagtgaagtggcagacaatgtcttattattgggaaaatacttttgacccaatggactgcattaaatggtctcggggatctccagaggtccccagaccatacactgaggaccagcgatgcaaagtaatatttaacaagagaaaactatttatatgatacactgttacgtgaagaaatgcaatatgcgattaatcacattaaaaatatctaccccctgtaatcccagcactttgggaggccgaggcgggctgatcacccgaggtcaggagttcaagaccagcctgaccaacatggagaaaccccgtctctactaaaaatacaaaattagcggggcatgatggcaggtgcctgtaatcccagctactcaggaagctgaggcaggagaattggaggcggaggttgcggtgagctgagatcgcgccactgctctccagcctgggcaacaagagcgaaactctgtc

SEQ ID NO: 67468 - DNA, 152 bp, Homo sapiens
ggggataagaaggttagcaatcagggaaatataaccatgaaagaaaggcacagagaaatgtatcattgctggccttgcaggtggaggaagggtcaggagccaaggagtgtagatggtcctagacactggacgggggcaaggaaatagattct

SEQ ID NO: 67469 - DNA, 354 bp, Homo sapiens
cactcacaaacactcttacggcaggtgagggcagggtgggaaggaggttgtggttaaggtaagaggagcccggattcctctctctctttccttacccagacgggcctttccttctgtggccttagcctgggttcctatctgtagcatgcagaggactggcccaccctgggctgagaccctctctccaaccgggtcaggaagctgggcctggttcctttgccccaccctgctctcctcacacaaaacattcctctccctggagctggtgtgggccctgcatgctgactcagtcattttagacctcccagctctctggcccagctgctgaaggaatggaactggtgggagaggggt

SEQ ID NO: 67470 - DNA, 630 bp, Homo sapiens
gtggaataggccctggtgaccttgagcagattcctttcacttgtctggaccactctggctcctacaggggttctgtctgtgaaatcaggggccctaggtgacttcttgggacacttactgttctggctagccatttcatggatgacgagactgaggtccaggaaagagggacttgtccaaggtcatttgcctgtggtggtttgaggtagtaatataatcaaaatgacaataagaaaagggttaactaagttcagttaggctctttgaggatttctcagaaggtaggtgttgatgagaatctccaggaccttccagcactctccctgccccagcagtcctgaaagccctgtctgtgcctacctgtctctcctagaatctgcactaagggggcagggctggggctcttcatctgtcctctgatggtcgctcggatctgatggtttcctaggaactaactgtgggcccagacttgtgaccatttgtgatggaggagagagaagataagaaggctgtgtttatagtctcttgcctactggcccttgaggaagtggcctggggcttccagcaacacttgtgagcttccagttcctgctgcaacttatgggtcaactcaagctttaaggcgttctg

SEQ ID NO: 67471 - DNA, 4479 bp, Homo sapiens
ggcggggcccgaccggcgctctgtgtggccgaggccatgaagccgcagccgcccggctaggccccgggcggctctagcccagggcggcccgcggggcgctgggcctggctcccggctccggtttccgggccggcgggtggccgctcaccatgcccggcaagcaccagcatttccaggaacctgaggtcggctgctgcgggaaatacttcctgtttggcttcaacattgtcttctgggtgctgggagccctgttcctggctatcggcctctgggcctggggtgagaagggcgttctctcgaacatctcagcgctgacagatctgggaggccttgaccccgtgtggctgtttgtggtagttggaggcgtcatgtcggtgctgggctttgctggctgcattggggccctccgggagaacaccttcctgctcaagtttttctccgtgttcctcggtctcatcttcttcctggagctggcaacagggatcctggcctttgtcttcaaggactggattcgagaccagctcaacctcttcatcaacaacaacgtcaaggcctaccgggacgacattgacctccagaacctcattgactttgctcaggaatacgtgagtccagtgtccagcctgggacacctgtaggaggcgccttcctggcagacgaatgagggagcaagttccctgtgatgggaccatctccttacccacctgggctagcgggccccaggagagagacccaggagtgtcctcgtccgaggagagccagcccctgctgatccttatgggtccccatttgcctagtgccatagggccacggccttgggaaacagagggcacgggctccacactagcagctcccaggccagggcctacgacacacgggagaatggaggaaatgtgacataaaatatagatttctacttctgctaaaccttgggcccacggtattggctgcagctatgttgctgctgccccttcactggtacagaggctctctgtttgccattgttcccaacactctgtattttattatatctgtcagcccttatctctcatttatactatgtttggcctctgtgtatattagagtttagacccctgatggaaggtctgccctcaaacttgcaaacttaaccccagtgaagagcagccagagaagagttcctgaaaccctatctgcctcccacctgcaccatctcgcccactcacccctaaccacaaacacacagtcacacactgtcacccacagtcacacccacacctagtcacacactcgcaggcacacttgatcacacctacacctacacatggtcccacagtcacacatgagtcacacccgatcacacccacacacggcgacaggcccttggcaccattcaccaccaagagtcagctctggatccagaggtgaagcagagctggtgcctgcttcaagcagctctcaacccagggcagaggcagacatagccaggcagttatgatgcagttcattcattcattcagcacaggattgttaagggcctaccatatgccggacccagagccaggccctgaggattcggcggggaagaaagctgggacctgtcctctcagggctggcagtcgggaagagacagatggtgaacaagcagaacaaacaaatgtgtgcatgtacatacgtgtgtatgcaaaattgtacattgtggtaagagtcaaaatgaagggtggagaatgggaaggcctctgcgtggagagcttgaagcctcccaaaggaggagaaggaagagaagggagagtgttctgtagcaggagcagctggcgctgagcaggtgccaggaggcaggtggaggctgagccctgccctgggaccagcacatgcagggcatgtggcaggcctgactcctccagctctctggctcggccacggggcctgcctgtgtctgctgccgagcttgagctcccccagccctgtgggctgctctccagcccctgcgctgctgctcagtgagggctgtgtgcacccgtgtgccccacaagaccatggttcatggcagatcccaaactcgccattgctcctgcctaggggacagcttagggtgttctgggtgggggtgatggggtgtgggatgatgccagccggcatggaggaaatggggtggcacggctatgggggtggcaggattcccctcctgtccctgcactgaagagaggagggctttgtagaacctctggggcaagtgtgggaggcctgctgcagacatggggcccagcggtctctgctgccacagggcttggcccagcgcctgcctctcaggtagtctggaggaagccacagtcattgaaccagtatccttgtcccactccctccctttttctagcctctcttgggtcggggaagggggagctcagtgtcccctcccttgcacccctctgcctccaccagcctggaggttgggcccaggcctgtgggggtggggaggtggccacccacttggctgtcccagccctgtcccagacagccctgtattcctgcagcctgggcttgttcccaaacagggtgaggctcctggggtgggcctggctcacctggggctctcccctgcccccacagtggtcttgctgcggagcccgaggccccaatgactggaacctcaatatctacttcaactgcactgacttgaaccccagccgggagcgctgcggggtgcccttctcctgctgcgtcagggaccctgcggaggatgtcctcaacacccagtgtggctacgacgtccggctcaaactggagctggagcagcagggcttcatccacaccaaaggctgcgtgggccagtttgagaagtggctgcaggacaacctgattgtggtggcgggagtcttcatgggcatcgccctcctccagatctttggcatctgcctggcccagaacctcgtgagtgacatcaaggcagtgaaagccaactgggagcaaatggaatgatgactttgaaaaccactggcttacgcccaccatttccgaggtcctgtccacggcggggcctcagcagaactctctgactggggcccctggcccggccccacccagccgacatgttttctttggcctgggtggtttataccctgagccaacctttaaaaattggtagatttcacataaaagtccagatccacagcttctcttgaagaatgaccacctggctacgccggctcttcggtggcaacactacctgggacactgcctccccagtcaccaagggccccagctggcccgttctactcacctaagtgccgcctgacccttgtacactaggagctggcctcccacctctgcagggttatttcctgcacctcgaggccgctgcgggccaatctggagtgaaacacggggacctgaaggatggagaggctggaccccgctttgaagagggtgcagcctgggaagggcggccttgctggggactgcggtgggagtagagtgcccaggagagggtctgaggggtgggatgggggtcaggacaattttgcaaaagaagtagctggaagccatgggactggcgggagcctgtttgggggatctggatggttgactcctaggagtcaagttcagcatcttcgccgtggctgcagagctgcctgatgggcactagagggcacgccagccccacactccctgggtctggcttcctcccgcaacctcactctagtagagcctgtgcctgcctactagcgctctggggttcggagagtttgggaatttctcagagccaactggctcaggcttgggaaggctggctgctgccctcagctccgcctcatcagctatgtgaaggggtgtgtatggagtgatcctgccgccccctccctgggctggtccagagatctcaaactccgatgcccctggggccacgtatgttgtgtaaatggatgaaacaggcccttgagttgggagcctgcttcactttgactttcccactgttgctggagacaaagacatcgtgatgagagaaagttcgcacaatctagtcggtaacagccactttccttgagaccaagagagtgcggtggggatgggggggagagcacgggtccccgtctgacagtggccgctgccatattcaggtgtagctaattgctctggtgtgggaatgcaggcctaatgacagaaatctggagaagccagaaatacagatttgtatgtgagatgtcctgattttttaagttgttggcagaaattaattcagaaatcaaatctgcaggccaaacaaggtgcaggacccagctttggccccatgcccctgtaggtccctctgggacagtcaccgctggggtcctggctgctctgtcattgagggatgctgggcactgctgccgggtggccagggtatggggcatgtgcccagcaatgtggctccttggccccgctggccagtgtcctgggcccctgacaggcgctggctgtgagtggtttgtacatgctacaataaatgcagctggcagcattgtg

SEQ ID NO: 67472 - DNA, 2465 bp, Homo sapiens
ggcggggcccgaccggcgctctgtgtggccgaggccatgaagccgcagccgcccggctaggccccgggcggctctagcccagggcggcccgcggggcgctgggcctggctcccggctccggtttccgggccggcgggtggccgctcaccatgcccggcaagcaccagcatttccaggaacctgaggtcggctgctgcgggaaatacttcctgtttggcttcaacattgtcttctgggtgctgggagccctgttcctggctatcggcctctgggcctggggtgagaagggcgttctctcgaacatctcagcgctgacagatctgggaggccttgaccccgtgtggctgtttgtggtagttggaggcgtcatgtcggtgctgggctttgctggctgcattggggccctccgggagaacaccttcctgctcaagtttttctccgtgttcctcggtctcatcttcttcctggagctggcaacagggatcctggcctttgtcttcaaggactggattcgagaccagctcaacctcttcatcaacaacaacgtcaaggcctaccgggacgacattgacctccagaacctcattgactttgctcaggaatactggtcttgctgcggagcccgaggccccaatgactggaacctcaatatctacttcaactgcactgacttgaaccccagccgggagcgctgcggggtgcccttctcctgctgcgtcagggaccctgcggaggatgtcctcaacacccagtgtggctacgacgtccggctcaaactggagctggagcagcagggcttcatccacaccaaaggctgcgtgggccagtttgagaagtggctgcaggacaacctgattgtggtggcgggagtcttcatgggcatcgccctcctccagatctttggcatctgcctggcccagaacctcgagcaaatggaatgatgactttgaaaaccactggcttacgcccaccatttccgaggtcctgtccacggcggggcctcagcagaactctctgactggggcccctggcccggccccacccagccgacatgttttctttggcctgggtggtttataccctgagccaacctttaaaaattggtagatttcacataaaagtccagatccacagcttctcttgaagaatgaccacctggctacgccggctcttcggtggcaacactacctgggacactgcctccccagtcaccaagggccccagctggcccgttctactcacctaagtgccgcctgacccttgtacactaggagctggcctcccacctctgcagggttatttcctgcacctcgaggccgctgcgggccaatctggagtgaaacacggggacctgaaggatggagaggctggaccccgctttgaagagggtgcagcctgggaagggcggccttgctggggactgcggtgggagtagagtgcccaggagagggtctgaggggtgggatgggggtcaggacaattttgcaaaagaagtagctggaagccatgggactggcgggagcctgtttgggggatctggatggttgactcctaggagtcaagttcagcatcttcgccgtggctgcagagctgcctgatgggcactagagggcacgccagccccacactccctgggtctggcttcctcccgcaacctcactctagtagagcctgtgcctgcctactagcgctctggggttcggagagtttgggaatttctcagagccaactggctcaggcttgggaaggctggctgctgccctcagctccgcctcatcagctatgtgaaggggtgtgtatggagtgatcctgccgccccctccctgggctggtccagagatctcaaactccgatgcccctggggccacgtatgttgtgtaaatggatgaaacaggcccttgagttgggagcctgcttcactttgactttcccactgttgctggagacaaagacatcgtgatgagagaaagttcgcacaatctagtcggtaacagccactttccttgagaccaagagagtgcggtggggatgggggggagagcacgggtccccgtctgacagtggccgctgccatattcaggtgtagctaattgctctggtgtgggaatgcaggcctaatgacagaaatctggagaagccagaaatacagatttgtatgtgagatgtcctgattttttaagttgttggcagaaattaattcagaaatcaaatctgcaggccaaacaaggtgcaggacccagctttggccccatgcccctgtaggtccctctgggacagtcaccgctggggtcctggctgctctgtcattgagggatgctgggcactgctgccgggtggccagggtatggggcatgtgcccagcaatgtggctccttggccccgctggccagtgtcctgggcccctgacaggcgctggctgtgagtggtttgtacatgctacaataaatgcagctggcagcattgtg

SEQ ID NO: 67473 - DNA, 488 bp, Homo sapiens
  misc_feature (55)..(55): n is a, c, g, or t
  misc_feature (57)..(57): n is a, c, g, or t
aaaattttttttttttggggggggggccccccccccccctttcccggaaaagggngnccaagaattcggcacgaggtctgacagtggccgctgccatattcaggtgtagctaattgctctggtgtgggaatgcaggcctaatgacagaaatctggagaagccagaaatacagatttgtatgtgagatgtcctgattttttaagttgttggcagaaattaattcagaaatcaaatctgcaggccaaacaaggtgcaggacccagctttggccccatgcccctgtaggtccctctgggacagtcaccgctggggtcctggctgctctgtcattgagggatgctgggcactgctgccgggtggccagggtatggggcatgtgcccagcaatgtggctccttggccccgctggccagtgtcctgggcccctgacaggcgctggctgtgagtggtttgtacatgctacaataaatgcagctggcagcattgtg

SEQ ID NO: 67474 - DNA, 2689 bp, Homo sapiens
ggcggggcccgaccggcgctctgtgtggccgaggccatgaagccgcagccgcccggctaggccccgggcggctctagcccagggcggcccgcggggcgctgggcctggctcccggctccggtttccgggccggcgggtggccgctcaccatgcccggcaagcaccagcatttccaggaacctgaggtcggctgctgcgggaaatacttcctgtttggcttcaacattgtcttctggttctccgtgttcctcggtctcatcttcttcctggagctggcaacagggatcctggcctttgtcttcaaggactggattcgagaccagctcaacctcttcatcaacaacaacgtcaaggcctaccgggacgacattgacctccagaacctcattgactttgctcaggaatacgaggatgtcctcaacacccagtgtggctacgacgtccggctcaaactggagctggagcagcagggcttcatccacaccaaaggctgcgtgggccagtttgagaagtggctgcaggacaacctgattgtggtggcgggagtcttcatgggcatcgccctcctccaggtacccttgtggccccacgtgcccctccccttgccggggccgccctcactctcccctcacctgtcctctgtcttacagatctttggcatctgcctggcccagaacctcgtgagtgacatcaaggcagtgaaagccaactggtgaggccgccagaggccatggccacatgcctggcctacgcaggcctctggggggccccccaggaccctcctactatactcctgacgggcaaggctgcaggagatgttcctgctgggactgagccttgaggggttcgcctgaaccgctgtgctgtccacccacggaggaagttgctgtgcctccgcctgggcctcttgtcccgtatgcgtgtgtacacacacatgcaggcacacgtgtgcacagggagccaccgtctcggctacatttggggtggtggactctccagggactaggaagggcgcagctcagagggtgcaggccaagtggggtgggaggtgctgtgtggagggtcccccccgttccctgccccccagtgctgggacgcacctttctgtgcgtagctgtatggggcgcgttgcctgagccactgcctcacacagcttcagagcactcttttctatgagctgtaactttgagcctgccaggaacccacctcagcctcagtgtcccagactctgaaatgggtccaagaattttctttctcttgcttgcctctcaggagcaaatggaatgatgactttgaaaaccactggcttacgcccaccatttccgaggtcctgtccacggcggggcctcagcagaactctctgactggggcccctggcccggccccacccagccgacatgttttctttggcctgggtggtttataccctgagccaacctttaaaaattggtagatttcacataaaagtccagatccacagcttctcttgaagaatgaccacctggctacgccggctcttcggtggcaacactacctgggacactgcctccccagtcaccaagggccccagctggcccgttctactcacctaagtgccgcctgacccttgtacactaggagctggcctcccacctctgcagggttatttcctgcacctcgaggccgctgcgggccaatctggagtgaaacacggggacctgaaggatggagaggctggaccccgctttgaagagggtgcagcctgggaagggcggccttgctggggactgcggtgggagtagagtgcccaggagagggtctgaggggtgggatgggggtcaggacaattttgcaaaagaagtagctggaagccatgggactggcgggagcctgtttgggggatctggatggttgactcctaggagtcaagttcagcatcttcgccgtggctgcagagctgcctgatgggcactagagggcacgccagccccacactccctgggtctggcttcctcccgcaacctcactctagtagagcctgtgcctgcctactagcgctctggggttcggagagtttgggaatttctcagagccaactggctcaggcttgggaaggctggctgctgccctcagctccgcctcatcagctatgtgaaggggtgtgtatggagtgatcctgccgccccctccctgggctggtccagagatctcaaactccgatgcccctggggccacgtatgttgtgtaaatggatgaaacaggcccttgagttgggagcctgcttcactttgactttcccactgttgctggagacaaagacatcgtgatgagagaaagttcgcacaatctagtcggtaacagccactttccttgagaccaagagagtgcggtggggatgggggggagagcacgggtccccgtctgacagtggccgctgccatattcaggtgtagctaattgctctggtgtgggaatgcaggcctaatgacagaaatctggagaagccagaaatacagatttgtatgtgagatgtcctgattttttaagttgttggcagaaattaattcagaaatcaaatctgcaggccaaacaaggtgcaggacccacaatgtggctccttggccccgctggccagtgtcctgggcccctgacaggcgctggctgtgagtggtttgtacatgctacaataaatgcagctggcagcattgtg

SEQ ID NO: 67475 - DNA, 1000 bp, Homo sapiens
tcaggtcactaggcatcaacagtaggcgtacaacgcatgggcactggcccggtcgtttagaaaagggggatctggatggttgactcctaggagtcaagttcagcatcttcgccgtggctgcagagctgcctgatgggcactagagggcacgccagccccacactccctgggtctggcttcctcccgcaacctcactctagtagagcctgtgcctgcctactagcgctctggggttcggagagtttgggaatttctcagagccaactggctcaggcttgggaaggctggctgctgccctcagctccgcctcatcagctatgtgaaggggtgtgtatggagtgatcctgccgccccctccctgggctggtccagagatctcaaactccgatgcccctggggccacgtatgttgtgtaaatggatgaaacaggcccttgagttgggagcctgcttcactttgactttcccactgttgctggagacaaagacatcgtgatgagagaaagttcgcacaatctagtcggtaacagccactttccttgagaccaagagagtgcggtggggatgggggggagagcacgggtccccgtctgacagtggccgctgccatattcaggtgtagctaattgctctggtgtgggaatgcaggcctaatgacagaaatctggagaagccagaaatacagatttgtatgtgagatgtcctgattttttaagttgttggcagaaattaattcagaaatcaaatctgcaggccaaacaaggtgcaggacccagctttggccccatgcccctgtaggtccctctgggacagtcaccgctggggtcctggctgctctgtcattgagggatgctgggcactgctgccgggtggccagggtatggggcatgtgcccagcaatgtggctccttggccccgctggccagtgtcctgggcccctgacaggcgctggctgtgagtggtttgtacatgctacaataaatgcagctggcagcattgtg

SEQ ID NO: 67476 - DNA, 2719 bp, Homo sapiens
ggcggggcccgaccggcgctctgtgtggccgaggccatgaagccgcagccgcccggctaggccccgggcggctctagcccagggcggcccgcggggcgctgggcctggctcccggctccggtttccgggccggcgggtggccgctcaccatgcccggcaagcaccagcatttccaggaacctgaggtcggctgctgcgggaaatacttcctgtttggcttcaacattgtcttctggttctccgtgttcctcggtctcatcttcttcctggagctggcaacagggatcctggcctttgtcttcaaggactggattcgagaccagctcaacctcttcatcaacaacaacgtcaaggcctaccgggacgacattgacctccagaacctcattgactttgctcaggaatacgaggatgtcctcaacacccagtgtggctacgacgtccggctcaaactggagctggagcagcagggcttcatccacaccaaaggctgcgtgggccagtttgagaagtggctgcaggacaacctgattgtggtggcgggagtcttcatgggcatcgccctcctccaggtacccttgtggccccacgtgcccctccccttgccggggccgccctcactctcccctcacctgtcctctgtcttacagatctttggcatctgcctggcccagaacctcgtgagtgacatcaaggcagtgaaagccaactggtgaggccgccagaggccatggccacatgcctggcctacgcaggcctctggggggccccccaggaccctcctactatactcctgacgggcaaggctgcaggagatgttcctgctgggactgagccttgaggggttcgcctgaaccgctgtgctgtccacccacggaggaagttgctgtgcctccgcctgggcctcttgtcccgtatgcgtgtgtacacacacatgcaggcacacgtgtgcacagggagccaccgtctcggctacatttggggtggtggactctccagggactaggaagggcgcagctcagagggtgcaggccaagtggggtgggaggtgctgtgtggagggtcccccccgttccctgccccccagtgctgggacgcacctttctgtgcgtagctgtatggggcgcgttgcctgagccactgcctcacacagcttcagagcactcttttctatgagctgtaactttgagcctgccaggaacccacctcagcctcagtgtcccagactctgaaatgggtccaagaattttctttctcttgcttgcctctcaggagcaaatggaatgatgactttgaaaaccactggcttacgcccaccatttccgaggtcctgtccacggcggggcctcagcagaactctctgactggggcccctggcccggccccacccagccgacatgttttctttggcctgggtggtttataccctgagccaacctttaaaaattggtagatttcacataaaagtccagatccacagcttctcttgaagaatgaccacctggctacgccggctcttcggtggcaacactacctgggacactgcctccccagtcaccaagggccccagctggcccgttctactcacctaagtgccgcctgacccttgtacactaggagctggcctcccacctctgcagggttatttcctgcacctcgaggccgctgcgggccaatctggagtgaaacacggggacctgaaggatggagaggctggaccccgctttgaagagggtgcagcctgggaagggcggccttgctggggactgcggtgggagtagagtgcccaggagagggtctgaggggtgggatgggggtcaggacaattttgcaaaagaagtagctggaagccatgggactggcgggagcctgtttgggggatctggatggttgactcctaggagtcaagttcagcatcttcgccgtggctgcagagctgcctgatgggcactagagggcacgccagccccacactccctgggtctggcttcctcccgcaacctcactctagtagagcctgtgcctgcctactagcgctctggggttcggagagtttgggaatttctcagagccaactggctcaggcttgggaaggctggctgctgccctcagctccgcctcatcagctatgtgaaggggtgtgtatggagtgatcctgccgccccctccctgggctggtccagagatctcaaactccgatgcccctggggccacgtatgttgtgtaaatggatgaaacaggcccttgagttgggagcctgcttcactttgactttcccactgttgctggagacaaagacatcgtgatgagagaaagttcgcacaatctattcaggtgtagctaattgctctggtgtgggaatgcaggcctaatgacagaaatctggagaagccagaaatacagatttgtatgtgagatgtcctgattttttaagttgttggcagaaattaattcagaaatcaaatctgcaggccaaacaaggtgcaggacccagctttggccccatgcccctgtaggtccctctgggacagtcaccgctggggtcctggctgctctgtcattgagggatgctgggcactgctgccgggtggccagggtatggggcatgtgcccagcaatgtggctccttggccccgctggccagtgtcctgggcccctgacaggcgctggctgtgagtggtttgtacatgctacaataaatgcagctggcagcattgtg

SEQ ID NO: 67477 - DNA, 2123 bp, Homo sapiens
ggcggggcccgaccggcgctctgtgtggccgaggccatgaagccgcagccgcccggctaggccccgggcggctctagcccagggcggcccgcggggcgctgggcctggctcccggctccggtttccgggccggcgggtggccgctcaccatgcccggcaagcaccagcatttccaggaacctgaggtcggctgctgcgggaaatacttcctgtttggcttcaacattgtcttctggttctccgtgttcctcggtctcatcttcttcctggagctggcaacagggatcctggcctttgtcttcaaggactggattcgagaccagctcaacctcttcatcaacaacaacgtcaaggcctaccgggacgacattgacctccagaacctcattgactttgctcaggaatacgaggatgtcctcaacacccagtgtggctacgacgtccggctcaaactggagctggagcagcagggcttcatccacaccaaaggctgcgtgggccagtttgagaagtggctgcaggacaacctgattgtggtggcgggagtcttcatgggcatcgccctcctccaggtacccttgtggccccacgtgcccctccccttgccggggccgccctcactctcccctcacctgtcctctgtcttacagatctttggcatctgcctggcccagaacctcgtgagtgacatcaaggcagtgaaagccaactggtgaggccgccagaggccatggccacatgcctggcctacgcaggcctctggggggccccccaggaccctcctactatactcctgacgggcaaggctgcaggagatgttcctgctgggactgagccttgaggggttcgcctgaaccgctgtgctgtccacccacggaggaagttgctgtgcctccgcctgggcctcttgtcccgtatgcgtgtgtacacacacatgcaggcacacgtgtgcacagggagccaccgtctcggctacatttggggtggtggactctccagggactaggaagggcgcagctcagagggtgcaggccaagtggggtgggaggtgctgtgtggagggtcccccccgttccctgccccccagtgctgggacgcacctttctgtgcgtagctgtatggggcgcgttgcctgagccactgcctcacacagcttcagagcactcttttctatgagctgtaactttgagcctgccaggaacccacctcagcctcagtgtcccagactctgaaatgggtccaagaattttctttctcttgcttgcctctcaggagcaaatggaatgatgactttgaaaaccactggcttacgcccaccatttccgaggtcctgtccacggcggggcctcagcagaactctctgactggggcccctggcccggccccacccagccgacatgttttctttggcctgggtggtttataccctgagccaacctttaaaaattggtagatttcacataaaagtccagatccacagcttctcttgaagaatgaccacctggctacgccggctcttcggtggcaacactacctgggacactgcctccccagtcaccaagggccccagctggcccgttctactcacctaagtgccgcctgacccttgtacactaggagctggcctcccacctctgcagggttatttcctgcacctcgaggccgctgcgggccaatctggagtgaaacacggggacctgaaggatggagaggctggaccccgctttgaagagggtgcagcctgggaagggcggccttgctggggactgcggtgggagtagagtgcccaggagagggtctgaggggtgggatgggggtcaggacaattttgcaaaagaagtagctggaagccatgggactggcgggagcctgtttgggggatctggatggttgactcctaggagtcaagttcagcatcttcgccgtggctgcagagctgcctgatgggcactagagggcacgccagccccacactccctgggtctggcttcctcccgcaacctcactctagtagagcgactcgttgactgcctcctccctgcaattttttacgggtgcctccggctgtcgacaggcccgctgtgagccgcagtcttgtgggtgcaagtgacaacagccgggcg

SEQ ID NO: 67478 - DNA, 2811 bp, Homo sapiens
ggcggggcccgaccggcgctctgtgtggccgaggccatgaagccgcagccgcccggctaggccccgggcggctctagcccagggcggcccgcggggcgctgggcctggctcccggctccggtttccgggccggcgggtggccgctcaccatgcccggcaagcaccagcatttccaggaacctgaggtcggctgctgcgggaaatacttcctgtttggcttcaacattgtcttctggttctccgtgttcctcggtctcatcttcttcctggagctggcaacagggatcctggcctttgtcttcaaggactggattcgagaccagctcaacctcttcatcaacaacaacgtcaaggcctaccgggacgacattgacctccagaacctcattgactttgctcaggaatacgaggatgtcctcaacacccagtgtggctacgacgtccggctcaaactggagctggagcagcagggcttcatccacaccaaaggctgcgtgggccagtttgagaagtggctgcaggacaacctgattgtggtggcgggagtcttcatgggcatcgccctcctccaggtacccttgtggccccacgtgcccctccccttgccggggccgccctcactctcccctcacctgtcctctgtcttacagatctttggcatctgcctggcccagaacctcgtgagtgacatcaaggcagtgaaagccaactggtgaggccgccagaggccatggccacatgcctggcctacgcaggcctctggggggccccccaggaccctcctactatactcctgacgggcaaggctgcaggagatgttcctgctgggactgagccttgaggggttcgcctgaaccgctgtgctgtccacccacggaggaagttgctgtgcctccgcctgggcctcttgtcccgtatgcgtgtgtacacacacatgcaggcacacgtgtgcacagggagccaccgtctcggctacatttggggtggtggactctccagggactaggaagggcgcagctcagagggtgcaggccaagtggggtgggaggtgctgtgtggagggtcccccccgttccctgccccccagtgctgggacgcacctttctgtgcgtagctgtatggggcgcgttgcctgagccactgcctcacacagcttcagagcactcttttctatgagctgtaactttgagcctgccaggaacccacctcagcctcagtgtcccagactctgaaatgggtccaagaattttctttctcttgcttgcctctcaggagcaaatggaatgatgactttgaaaaccactggcttacgcccaccatttccgaggtcctgtccacggcggggcctcagcagaactctctgactggggcccctggcccggccccacccagccgacatgttttctttggcctgggtggtttataccctgagccaacctttaaaaattggtagatttcacataaaagtccagatccacagcttctcttgaagaatgaccacctggctacgccggctcttcggtggcaacactacctgggacactgcctccccagtcaccaagggccccagctggcccgttctactcacctaagtgccgcctgacccttgtacactaggagctggcctcccacctctgcagggttatttcctgcacctcgaggccgctgcgggccaatctggagtgaaacacggggacctgaaggatggagaggctggaccccgctttgaagagggtgcagcctgggaagggcggccttgctggggactgcggtgggagtagagtgcccaggagagggtctgaggggtgggatgggggtcaggacaattttgcaaaagaagtagctggaagccatgggactggcgggagcctgtttgggggatctggatggttgactcctaggagtcaagttcagcatcttcgccgtggctgcagagctgcctgatgggcactagagggcacgccagccccacactccctgggtctggcttcctcccgcaacctcactctagtagagcctgtgcctgcctactagcgctctggggttcggagagtttgggaatttctcagagccaactggctcaggcttgggaaggctggctgctgccctcagctccgcctcatcagctatgtgaaggggtgtgtatggagtgatcctgccgccccctccctgggctggtccagagatctcaaactccgatgcccctggggccacgtatgttgtgtaaatggatgaaacaggcccttgagttgggagcctgcttcactttgactttcccactgttgctggagacaaagacatcgtgatgagagaaagttcgcacaatctagtcggtaacagccactttccttgagaccaagagagtgcggtggggatgggggggagagcacgggtccccgtctgacagtggccgctgccatattcaggtgtagctaattgctctggtgtgggaatgcaggcctaatgacagaaatctggagaagccagaaatacagatttgtatgtgagatgtcctgattttttaagttgttggcagaaattaattcagaaatcaaatctgcaggccaaacaaggtgcaggacccagctttggccccatgcccctgtaggtccctctgggacagtcaccgctggggtcctggctgctctgtcattgagggatgctgggcactgctgccgggtggccagggtatggggcatgtgcccagcaatgtggctccttggccccgctggccagtgtcctgggcccctgacaggcgctggctgtgagtggtttgtacatgctacaataaatgcagctggcagcattgtg

SEQ ID NO: 67479 - DNA, 2891 bp, Homo sapiens
  misc_feature (2818)..(2818): n is a, c, g, or t
ggcggggcccgaccggcgctctgtgtggccgaggccatgaagccgcagccgcccggctaggccccgggcggctctagcccagggcggcccgcggggcgctgggcctggctcccggctccggtttccgggccggcgggtggccgctcaccatgcccggcaagcaccagcatttccaggaacctgaggtcggctgctgcgggaaatacttcctgtttggcttcaacattgtcttctggttctccgtgttcctcggtctcatcttcttcctggagctggcaacagggatcctggcctttgtcttcaaggactggattcgagaccagctcaacctcttcatcaacaacaacgtcaaggcctaccgggacgacattgacctccagaacctcattgactttgctcaggaatacgaggatgtcctcaacacccagtgtggctacgacgtccggctcaaactggagctggagcagcagggcttcatccacaccaaaggctgcgtgggccagtttgagaagtggctgcaggacaacctgattgtggtggcgggagtcttcatgggcatcgccctcctccaggtacccttgtggccccacgtgcccctccccttgccggggccgccctcactctcccctcacctgtcctctgtcttacagatctttggcatctgcctggcccagaacctcgtgagtgacatcaaggcagtgaaagccaactggtgaggccgccagaggccatggccacatgcctggcctacgcaggcctctggggggccccccaggaccctcctactatactcctgacgggcaaggctgcaggagatgttcctgctgggactgagccttgaggggttcgcctgaaccgctgtgctgtccacccacggaggaagttgctgtgcctccgcctgggcctcttgtcccgtatgcgtgtgtacacacacatgcaggcacacgtgtgcacagggagccaccgtctcggctacatttggggtggtggactctccagggactaggaagggcgcagctcagagggtgcaggccaagtggggtgggaggtgctgtgtggagggtcccccccgttccctgccccccagtgctgggacgcacctttctgtgcgtagctgtatggggcgcgttgcctgagccactgcctcacacagcttcagagcactcttttctatgagctgtaactttgagcctgccaggaacccacctcagcctcagtgtcccagactctgaaatgggtccaagaattttctttctcttgcttgcctctcaggagcaaatggaatgatgactttgaaaaccactggcttacgcccaccatttccgaggtcctgtccacggcggggcctcagcagaactctctgactggggcccctggcccggccccacccagccgacatgttttctttggcctgggtggtttataccctgagccaacctttaaaaattggtagatttcacataaaagtccagatccacagcttctcttgaagaatgaccacctggctacgccggctcttcggtggcaacactacctgggacactgcctccccagtcaccaagggccccagctggcccgttctactcacctaagtgccgcctgacccttgtacactaggagctggcctcccacctctgcagggttatttcctgcacctcgaggccgctgcgggccaatctggagtgaaacacggggacctgaaggatggagaggctggaccccgctttgaagagggtgcagcctgggaagggcggccttgctggggactgcggtgggagtagagtgcccaggagagggtctgaggggtgggatgggggtcaggacaattttgcaaaagaagtagctggaagccatgggactggcgggagcctgtttgggggatctggatggttgactcctaggagtcaagttcagcatcttcgccgtggctgcagagctgcctgatgggcactagagggcacgccagccccacactccctgggtctggcttcctcccgcaacctcactctagtagagcctgtgcctgcctactagcgctctggggttcggagagtttgggaatttctcagagccaactggctcaggcttgggaaggctggctgctgccctcagctccgcctcatcagctatgtgaaggggtgtgtatggagtgatcctgccgccccctccctgggctggtccagagatctcaaactccgatgcccctggggccacgtatgttgtgtaaatggatgaaacaggcccttgagttgggagcctgcttcactttgactttcccactgttgctggagacaaagacatcgtgatgagagaaagttcgcacaatctagtcggtaacagccactttccttgagaccaagagagtgcggtggggatgggggggagagcacgggtccccgtctgacagtggccgctgccatattcaggtgtagctaattgctctggtgtgggaatgcaggcctaatgacagaaatctggagaagccagaaatacagatttgtatgtgagatgtcctgattttttaagttgttggcagaaattaattcagaaatcaaatctgcaggccaaacaaggtgcaggacccagctttggccccatgcccctgtaggtccctctgggacagtcaccgctggggtcctggctgctctgtcattgagggatgctgggcactgctgccgggtggccagggtatggggcatgtgcccagcaatgtggctccttggccccgctggccagtgtcctgggcccctgacaggcgctggctgtgagtggtttgtacatgctacaataaatgcagctggcagcattgtgaaaaaanaaacaaaaaaaccccgagtttattaatcattggccgggaaataaaacccttttttttgaaaagcggggccaca

SEQ ID NO: 67480 - DNA, 2527 bp, Homo sapiens
ggcggggcccgaccggcgctctgtgtggccgaggccatgaagccgcagccgcccggctaggccccgggcggctctagcccagggcggcccgcggggcgctgggcctggctcccggctccggtttccgggccggcgggtggccgctcaccatgcccggcaagcaccagcatttccaggaacctgaggtcggctgctgcgggaaatacttcctgtttggcttcaacattgtcttctggttctccgtgttcctcggtctcatcttcttcctggagctggcaacagggatcctggcctttgtcttcaaggactggattcgagaccagctcaacctcttcatcaacaacaacgtcaaggcctaccgggacgacattgacctccagaacctcattgactttgctcaggaatacgaggatgtcctcaacacccagtgtggctacgacgtccggctcaaactggagctggagcagcagggcttcatccacaccaaaggctgcgtgggccagtttgagaagtggctgcaggacaacctgattgtggtggcgggagtcttcatgggcatcgccctcctccaggtacccttgtggccccacgtgcccctccccttgccggggccgccctcactctcccctcacctgtcctctgtcttacagatctttggcatctgcctggcccagaacctcgtgagtgacatcaaggcagtgaaagccaactggtgaggccgccagaggccatggccacatgcctggcctacgcaggcctctggggggccccccaggaccctcctactatactcctgacgggcaaggctgcaggagatgttcctgctgggactgagccttgaggggttcgcctgaaccgctgtgctgtccacccacggaggaagttgctgtgcctccgcctgggcctcttgtcccgtatgcgtgtgtacacacacatgcaggcacacgtgtgcacagggagccaccgtctcggctacatttggggtggtggactctccagggactaggaagggcgcagctcagagggtgcaggccaagtggggtgggaggtgctgtgtggagggtcccccccgttccctgccccccagtgctgggacgcacctttctgtgcgtagctgtatggggcgcgttgcctgagccactgcctcacacagcttcagagcactcttttctatgagctgtaactttgagcctgccaggaacccacctcagcctcagtgtcccagactctgaaatgggtccaagaattttctttctcttgcttgcctctcaggagcaaatggaatgatgactttgaaaaccactggcttacgcccaccatttccgaggtcctgtccacggcggggcctcagcagaactctctgactggggcccctggcccggccccacccagccgacatgttttctttggcctgggtggtttataccctgagccaacctttaaaaattggtagatttcacataaaagtccagatccacagcttctcttgaagaatgaccacctggctacgccggctcttcggtggcaacactacctgggacactgcctccccagtcaccaagggccccagctggcccgttctactcacctaagtgccgcctgacccttgtacactaggagctggcctcccacctctgcagggttatttcctgcacctcgaggccgctgcgggccaatctggagtgaaacacggggacctgaaggatggagaggctggaccccgctttgaagagggtgcagcctgggaagggcggccttgctggggactgcggtgggagtagagtgcccaggagagggtctgaggggtgggatgggggtcaggacaattttgcaaaagaagtagctggaagccatgggactggcgggagcctgtttgggggatctggatggttgactcctaggagtcaagttcagcatcttcgccgtggctgcagagctgcctgatgggcactagagggcacgccagccccacactccctgggtctggcttcctcccgcaacctcactctagtagagcctgtgcctgcctactagcgctctggggttcggagagtttgggaatttctcagagccaactggctcaggcttgggaaggctggctgctgccctcagctccgcctcatcagctatgtgaaggggtgtgtatggagtgatcctgccgccccctccctgggctggtccagagatctcaaactccgatgcccctggggccacgtatgttgtgtaaatggatgaaacaggcccttgagttgggagcctgcttcactttgactttcccactgttgctggagacaaagacatcgtgatgagagaaagttcgcacaatctagtcggtaacagccactttccttgagaccaagagagtgcggtggggatgggggggagagcacgggtccccgtctgacagtggccgctgccatattcaggtgtagctaattgctctggtgtgggaatgcaggcctaatgacagaaatctggagaagccagaaatacagatttgtgagattcctgataactaggcgggacc

SEQ ID NO: 67481 - DNA, 311 bp, Homo sapiens
actctcaggttagttctaggctttcaacattgtaaatagtgctttggcgtaactgtgcttgtttgttgccctcctaaattaatagtgctttcctcttcaccaaagaagtggtagttcttactttttgtgtgagtccacataaagaagttttaattcagatctcacttttaaatactttggtttacagagaggagttgaattaacttttattcctaagtgactctaagaccattagattttaaaaagcatttgggatacagcaactgtcttctgctgttaaatttttttattttttattttattttattttt

SEQ ID NO: 67482 - DNA, 600 bp, Homo sapiens
gagtgaaaggtagtaaaatgaaagtaatgagaagcaggcttcatttatgctcaggaaaaaagtgacagtatctgtataaatatttacattcttgaaattatggtcaaagatatgaattctacttaaaaattgtggctaacaacatgaaatcaaagcaaaggcacagtggtaggaaagttcaacatgagtttgtggaataacaggtaatctgttttggaaggagtttatgaaagcaatagtggcgtaataggtagtaatgagacagtcctcatttaccgtaaacatttaaaaaggcaatacttctttaaacatccacattttaaaaaatatggtcaaaaacattaaaccaaatacttctgtgtacagagacagtcatttaaagatacttatttaatcccaaaagctttctaggaggacactcagtttccactattgacaaagaggtggtcctgtggactcccagcagataagaattataaagattacattttaaaaactatgtcaaatactggaaaatgtccaaaatatagatggaaacgggaagagagtttaatttcaaaaaattgcaaatggaagaagtataaattgtgaatttttggc

SEQ ID NO: 67483 - DNA, 287 bp, Homo sapiens
tagtggatactcagtacatcttatttgagaaaactcaccaatggctgatgctcagtttgggtgcgacaaggccgacccctagtgaggagctgcaagggtgtcagggagtggggcggtgacaggggaggaggcttcctgggggtcttcctgataccaggctctgggagaggctctcgggcagctccaaggtggggtcttggtttgggtgttccccacgagcagcccttgacacaaggatttgagttcaatttgttaatttttgggaaattaacaaatttaatttccca

SEQ ID NO: 67484 - DNA, 2143 bp, Homo sapiens
atttgagtctaggaaacctggctcagggacccacactcttaaaaatcatgccgtaatgtcattatgctgtattgcctaagacaaatgcatatatacactggtacaaataccttgtccgaaaaatgcccatagccttactgaagagactatttacaaatacggtatagatgaacaatgatgtgtgacagtagttgtcactggctcttccctaggtagccagggaaaggctcatttatttgagaaaagcaaaggcatagaagggatatttttgtgtaggaatgggaggttggggatgtgtaagagatgagattgggaaaaacctcattgtgtgtatatctatttatttataaaaatattcatgtactaccacagtatattatgtgctttataaaaaacattcaaaaaagacaaaaatgaaaaattatacataaacaggatttctaattatctttccccacccctattgtattttcttgaacacctaggaatatccttactctgggctatagaaataatggaaggttgttacataaatatatttaatataggtaaatattacattctgctttatttataggtatgttcacagattaattatagggccatctatgtgctttttttttttttttaagacaattttattcttcattcatgtctcacatggcgtatctgacctggtgctccatacataatgggcatgcattagggtgactggcttgctccttttactttgtgcccaactgtctcaggtacatgttagtgtttaacaaacaaccccaaaacttggatggaggctaaataacaatggctcagaattctgtgggttactccacagcttcagctttcttacagctattctgggcctggatggtctaagacgggctctcacgtatttggctgttggttagttggactaggagagcctcagccgggtcatctcatctcagctgtatgtgactctcaacttacaagaagctagaccaggcttccccacatggtggtctcaggataacattccaagaacgtgagagttgaagctcccaacatctcatttgtgaaagaatgtcacaatgtcagcccagattcaagattgaggaaatagattacacctctacatggaagaagatacaaggccacattgcaaaggaatggaaggaattaactgcagccatctttgaaaaagttcaccacacccacagattcagatttctgtgaaaatctaataaaagtctagtttaaaagaggagcgaaatatatttggttctttacttcttttcatttcctggaagtacatagggtttggtttttgttttttttttttacatgatgaattcctatgttttcctcttgcccacatagtcctgtgtggaacaatagtctactgataagaatcaacttgtatcctgctgctaatcaatgagaatttctctgccctcatcaacttaatctaggatatcccttccagaataccaagataatgtaagcttttatttagcagggtaatttgctaaacattgttcataagtagtgcccttttagcttaaggcagccctgagctgcaacagaagactgaatggagctctgtatacattctagcttcctcacctcactcttaaagtgggttagatgaaatctggtaggagaacatagatcatttgccagtgatgatattcataagtggtaaaaaaaggaatgacctgaaacatttttatactgtgtttgttattcttctaaagagattagagttttactgagaccaccaattctctttggaggctggggatagtagcatcaacattctcactgattaatgaagtggtgttcacattggatttgtgaacagacccatcatatgcagacttctggtctactgaggagcatgtgtctctacatgtttacagtggtggagtttccttgcccctctgccaataaccacaaaatgatcagtaatgagaaataattaagtatctagaggaagaaaacaaagacatgaatttcatgatactctcatgctttgtattatcagtgacttcattgtttctcttggcaaatttttaatgcatctgtgcttggcccaggggtgcatactagggtaaagaaaaattttgtaatagcaacagtggtttgggattttcagggtacc

SEQ ID NO: 67485 - DNA, 898 bp, Homo sapiens
attaccaacatgcgcctggccaggtctcagtcttttagcaaccctggatctctggactgtaaacttcacttggactttgtagttcctccattcctcccttaagtgggacaggatgagtcaagtgggctgatgttggctatttctcttcctccaggtgaaaggcaggagctggagttgggtatctcccttctggtcagttaggctctgataaaacccctgcaggtttagctcacgttaaatagttcaccgcgctcagccctagtttaatggtttttagtatattcccagagttatgctattttaggacatttttataaccttacaaagagtccctgcccattagcagtagctcctcattccctacttttccagctactgacaatcactaatgtactttctaaggatttgcctattgtgggcatttcatttttatttttaattgattgattgattgatggatggatggagtctcgctgtgtggcccaggcttggagtgcagtgtcatgagctcagctcactgcagcctctgtctccttgttcaagcgattctcctgcctcatcctcccgagtagctgggattacaggtgggcaccaccacgcctggctaatttttgtatttttagtagagacagggtttcactatgttggccaggctggtctcaaactcctgacctcacgtaattcactcgcctcggccttccagattgctgggattacaggcgtgagtcactatgcccggccaattctaggcatttcatgtaatgtaatcatatgttctatggccatatgtgtctggcttcttagcataatgttttcaaggttcatcatctatgtatcagtacttcatttctttttgttttaacagactttattttatagagcagttttaggtttacag

SEQ ID NO: 67486 - DNA, 474 bp, Homo sapiens
tgttgaccttcacctacacagatgactcacatatgtttccataagctggcagtaagtttaagaagcataccatgccctgaggaaaaagaagtaatgttagctcttctactcttggccaaagaacctaattctgtatattacttctgtctttggtttggctattatagacaataaattattgatctgattataattgagaaaagtaagctcttctaaagaagtaaaatatggatctagggaaaggaagttagctcccagagcatttacaatttcccaggaattctgtgactttaccaaccctaggcagtgctgatactttaaaagcattcatttcacttgcttttttttggctcaccccctatcccccaggtatacagtactcttacataattgtggaagaatcttacaagggggtaatgtagatcagactttcctgctttcatttttaacctccctaaattataaatatttatt

SEQ ID NO: 67487 - DNA, 320 bp, Homo sapiens
ggatcatgcctttggtgttatagttaaaatgtcattgccatacccaagatcatctaagttttctcctacattattttctaggagttttatacttttgcattgtacatttagctatttggtctgctttgagttaatttttgtgaagagtgtaaagcctgtgtataaattcatctttttgcatgtgatgtctagttgttccagcatgatttgttgaaaagatatgtttgctccattgtattgcctttgcatcattgtcaaagatcagctcattatatttatgtggttctatttccaagctctctattttgtcctattgatct

SEQ ID NO: 67488 - DNA, 360 bp, Homo sapiens
taatataataaaatactacatagcaataaaaatttaaaaattattattacctgcaaaagcatagataaattgcacaaatataatattgaccaaataagccagatacaaaagaagatgtaattccattttgataaattttagaagaggcaaactaatgcatgatgttaaaatcagagtagtggttacttttgaggaatgaaaagggatggtagttggaaaacagcttttagggagtttctggggtgttggcaatgttctatttcttgatttggattgtggttttgtaggcatattcactgtaggataatcagttgactttatgatctgtacatgtttctatatgtatgttgctcttaaatt

SEQ ID NO: 67489 - DNA, 549 bp, Homo sapiens
tccttcctaacagcaaatatcttccactgagatcgtgtggttttaatcatacaaggagagtggcagaagaacagaaagattgaaaccaaggacagagaacacctgaaattgcttcagggtcatatgtcacagcgctgggcatttcatttgggtatctatcatcattcccattctgcaatgaggaaatgctgtcagagtgattaagtaatttgcccatggtctcacatagaagcctgtcttctccagggaacacagcactcagaatcgtctcggcccctgcataagcctgcatgagcctgggctctggggacccatcctggtgcatcattcgttggctctgtgacaatgggcacatcgtttaacctctcttggcttcattctccttactggaatgatggagagagttttgcctatttcagaggcttgctcttctatacgtgagcctataagtaacttgtcttaagaatttccactccttctgtactctgatttaaatttgaaggcatcaaaacaaaaacaatcaagatttcagattccaaatactttcat

SEQ ID NO: 67490 - DNA, 1089 bp, Homo sapiens
aaggtcaccagtcatattggatccctattctaatgatctcctttgaatttgattacatttaaaagatcttatttctaaagaagatcacatgcacaggtactgaagcttcagatttcaacatatattttgggaggacaacattcagcctgtaacactgattattctattataccttcttctgaacttctgaaagttgaagcatcctagctgagtcttcagacttcttcttttgcatactccctcagtaataatcttatcgggtcctaagtctttaaacatcacctcaacattaaagtttccaaacattatattattgatgccaatttgtttcctgaattccaaattcatatgttcaactgcaaaatctatatttctaactaaagaaatccaaaacaaagccttttttctgattcctgccgaccctcccatcaaacatgtccttctattctttctcatcttaggaaatgaaaatactatttctcactgttgctcacattaaaaatttgaataactttaaactttgttaaaacccagtaaatctgaaatttagcatcctaaatttaccatctagcatcgtctgatatccttgcccagtcatcattgttttttgtttctaatttaactttagcccttgcaatagttctctaattggtcttcctgtttacattattacacattgtattccatcatctgcaaactaaccacagtagtcattttcatgttcaaaacttttattggcttctcattacacatagaacaaagttcatatttttaaactctaaacaatattgttctatgtaatctagcattgcatcctcctcctcaatctcacttccttcccttcttcctgttgctcactccactagctttctagcttctgtttgaataagtcaagcactttcctacctcaagggctttgcaatagttcctttctgccgggcacagttttctcaaccttctcatgaatttctttccacaaatattctttttttttttttttttttgatggagtcttgctctgtcaccacccaggctggagtgtagtggtgtgatctcagctcactgcaacctccacctcctggattcaag

SEQ ID NO: 67491 - DNA, 408 bp, Homo sapiens
tagctttgttcactttttgcaacaaaatgtatgggccgatttattttcccattatattgtaacttcttgaaaagctcttttacagtggctttgtttcaataagcccttaagttaagggctgattgcacttagaaataagttgcacttagaaataattatttggctattaattggattttgacaagaaccaatgtaaaatttcatttttatattttcttaacaagaagaaaaatattctatgaaagcaaagtaatgctaacttaatgaatctgcttattgtatggattaatcactaatattattcccatgtattttgttttactaaagatttttaagaatccagtggctatttgaacctactgttatctaactttgagcaacaataaatgaaacattaatcagtaaaga

SEQ ID NO: 67492 - DNA, 250 bp, Homo sapiens
aaagctatgtaaatataataatagcattttttgagtattctgttctaaaagctttacataaactaactcatttattacttatagccttagaagtaatatgaattatcatcatcaccatcttagaaaagaggaaacagaccacagagaggtgataagtgcctttctcaagccttcttatttaggagagggcatatttgaaaccaaccagtctggagccaggtagagccccagctcacacccttaaatatta

SEQ ID NO: 67493 - DNA, 510 bp, Homo sapiens
gatcttgtctcaaaaaaataaaagaagaaatcagccgggccgcagtggcttatgcctgtaatcctagcactttgggaggctgaggcgggtggatcacttgaggtcaggagttcaaaaccagcctggccaacatgacgaaaccctgtctctactaaaaatacaaaaattagccaggcatggtggtgcgctcctgtagtcccagctacttgggagattgaaacagaagaatagcctgaacccaggaggtggaagttgtagtgagccgagatcatgccactgcactccaggttgggtgacagagagaggctccatctcataaaaaaagaaaagaaaaagcatttctgaaaggaataaaaaacaaattgataacatcccctaatctctagttgttgggatgtagtatccttcatttgatcaggaaatcatatgattgttcttaaattattaagttggcagaatttgtgtggtttcataatgatgcttgtaagatgatattttaatggaaatgtt

SEQ ID NO: 67494 - DNA, 2697 bp, Homo sapiens
  misc_feature (1328)..(1328): n is a, c, g, or t
  misc_feature (1392)..(1393): n is a, c, g, or t
  misc_feature (1773)..(1773): n is a, c, g, or t
  misc_feature (2139)..(2139): n is a, c, g, or t
  misc_feature (2371)..(2371): n is a, c, g, or t
  misc_feature (2385)..(2385): n is a, c, g, or t
gcatgtggaacacacgtgacatttattacgttttctgtcttacgtgggtgcagttgttggttccccaaaacaattacagagtaaaatcgaagatcactaagtacagatcaccatgacagatataatgataatgaaaaaattcgaaatattacaagaattaccaaaatgtgaaacagagatatgaagtgagcacaagctgtttgaaaacgggacccacagatgtgccccaacggagttaccacaaacttccaatttgtaaaaacaagtgcagtatctgcgaggcacaatagagcaaggcgcaacaaaacgaggtccgcctgtgcgtgcgaacccctcgcagggaggctgtaaacacaacgcaggaacatcatgaaaaagcccgttccggcgctgggctgcagagggcgctgtcgggtaaacaggtcatttcgcggcacaaagcagctcacagcgcatctctgaagtaacgcggtcagattcacctttccaacatgtgccatgcaacaaactgggtcactgaaaaccgcggaagtttattcctcaccccccccccgcccccggaccaggtgggttgcgccctcagggagctgagccgtccccgtgaggccccttcgctgccagcacagttcagctgtgccgtccccaccgctgcggtgcctgtagctggtgtgcggaggaatcgtggtcagaaatgtgcacacgtggtccagacagacggccccgtgagtctccgaacagaaaagaggggggcgaggcggagtcctgaaggctaggcttgcagaggcgggagaaccaggcagggggccacgggcctgcggggctccggacagcgacaagggcggcgccccccacccgcctgcgctcccggaaggccgagtctgtcagcgctgcctgcggtgtgtggcagctgcgcgctccttccctgtggggcagagctggctggagccaccgcctgaagaaactgggctctgtcctccgctccggggaggggatcgtggccagtggatgctgagttccttctgttgcctgccgcagcccacagcgaagtcactctgaagagcatctcgctggcctgcgcttctgcttctaggcggctctgaccttgacacccctttcctcttctgcttatgccttcgaatcctacattaagggaaatggggatcctgttttgaaaccaaatgagaaagaaccacaaccctcaacttcaaaacacttccagtctcctgaaggttttttagattcggagatctccacccatttcccagggtccttgaaatgtttcctggagccgcgcctctcccagtgctctggctggagacagcagcggnggctgtcttcctccgcgtccttgtgagcacccagtttggggtggaagagtcaaaaaaaaaaaannccaggaacgccccaccctgtcgttctcagggtcccccggctcccccgggcttcctctctccgcctctcgtcttcctgcgtttgtctgatgggcactgcccgaggtttccggttgcacctgcgggacggaggaaaacgcacgcctgttccatcttcttaggaggggaattctgaggctttttgaatgaccaccgtgtagcgccttaattctccttcactttcaccggttttgtctgccccacctcaggaagactgtctgtgttctttcctccatagcccgggcaccgaaggcacatgccgtgcatacaaatttcctgtctcgtctcagactccacgtgagctcgttattacttcaatttaatctgcgcacgtttcaccctnggagagatactgccagatgtggcagcttctcctgacagatggcccgaggccattcttgccctaaaacttcaaatgctcacataaaaccatccttcctaacaacacaggttttcccatttctgtgaggttgacctttacacctgaagagtcatcgaaacccagctagtgataaagaagtgaagatttcaaaaaaacggagggagaatggaatctggtctctggttttcaagcgattccagttgcttgatttagtctcattggaatgtttgagcatttgaggaaaaggcccttaactctatttgccaaaccccataaagtaggagctgaactgacatttaaaatcggagcagccttgacgggcttgcnttcttacttgcgtcctttaaatctttcctggaacagagttgagaacgtataaatgtataaatgcgtgaaaacaggcaatgaacaaagtgttcattccagtctcgtgtctaaattccccggaacatgttttttctcctgccttttctctgaactccatgcaggtcaagtcacagccttttttttttttttcttttttcacagactctcactctgtctcccaggctggagtgcngtggcgcgatctcngctcactgcaacctccgcctcccaggttcaagcaattctcctgcatcagcctctggagtagctgggaccacaggtgcacacccccacgcctggatgaggtcataggctttgtcagctgtacccgcagtctccctgtgcacccagccacggttagaggtcactgtcttgaccctggcggtgacccttgctctttgcagttgtgccacccactctgcatccctacttgcagcagcttaatctggcctctttcaaaataatttcaaccgacggtaattgtatatatttcttaggtacaatgtgaagttttgatgt

SEQ ID NO: 67495 - DNA, 3015 bp, Homo sapiens
gagcaggcggcaccatggactgagcacctcccaggttccaagccctgggccagactggaacatggggggccagaacccaagaggatcctgaggagacagacggcagcaaacaaaatcatgcacaatggtgaaaggtgctctccctgacccatggggacccatggtaggaccctcgggagggtggcaggttggagggcccgtaagcctccccaggcaacactgatagtaccaaaagctggggagattcagggacctggaaactgtcatccaggtctgctgggaacgtgacatggcatagccactttggcagccagttgggcagtggctcacaaagttcaatggacttgaaccacgcgtccccaaagtgtcacagatattgaacccactgatttgaaaactgacgtccacatgaaacctgcaggccaggttcactgcttgattcctcgtcactcacacacggagccttcggggatggccttcaacacgggaatggggagaacaaggctggtcctcccttcaaacggaagacccagtgagaaaagggaacgagccagtgatgcccgcatgaacgtgggtggatcctaggtgcattttgctaagggaaagaagccagacccaataagctaccaaagtaggattcccattcttaggccattgtggaaaaggccaaaccatagggactgagaagcagtctgggtggccaggggctgacggatcggggagaggctgggtgcataggggccaccctggagacttggaggatgaaggagtcgctccaggaggggctggagtggtagccgggagactctgcacattggtttagaaccatggaggacctgtacacccaaagactgaattggcgtgtgtgcaaactgaaaaaaaaaaagatcattcagagtgaaaaggatcaggcaagtcactgtacaactgggctatttgcatgtcacagatgtggattttactgaaacatttcttcaacagtcaaagtccctgaagagctcactgcttatctggtgaatcatctgaacctgaaatgggatttgttgttagggtttgtagacaaagtgaaactaacagcatctgcacaacacaaaccaaagccccctttctctgtttcccaggcagcaggaactattctacatcctcctggcatattcgaagtataacccagtgagtattcctggcagtgaggttcccaggccgtatttccatattcacaggagtgggtgtctggtgggagtgtcgttgcttcttttaaagttagtatttgtgacccaccaggatataggaggtaggattccagctcaccgctggcataaacctccagcaagggggtggtctcaaggggtcaagctgagacacagaggagtcagggcctggactcctggtgtcacctgggcctgaccaccacttatcggaacaagcccctcctcctggggctgccccaaagcccgggagcttggcagcatcacacacagaatggtgctatcaggagacattttggacaaggtgctgaagtgcccgatggatatggctcttgtcatgaaatgaatttgcatcctgaggaagtctcttcttcagaggaagccttcccagtcacctctgccctctccgatgacatgagtcctcccaggtgacctcagccctcccaagtgacttacttccacggtgactctggctgttgcaggtggtgggctactgcagggacctgagccacatcgctgccttgttcctcctttatctgcctgaggaggacacattctgggcactggtgcagctgctggccagtgagaggcactcctgcaggcttgttgggagcctttaggacgtctctgctgacggtcccaaaggaacccggaactgaccccccagagcccaagtcagacgcctttcatccccatcagcagaaggcatctcatcctccccgtggctgccctctgtgtcctggagccacgccctccggctctgattctgtgcagctggctctccgcaacctgagagtcctcctgcccttcagttgctcaggctccagctgcccttggtacccacgaaagggtaccaagcccagatggcagcatctccccatcccgtgtcccttggcccagccccacttccaggagacgaccacaaagcccagcacccaccctgttctggccgccccctgtcgtggcctcaaagtcaggcttgccctcccggcaccctggcccaggaggcctccaggggcacctccagccaggctccaggggatgttcccacccctcctccccagggccaaggccacatggtggggtcaccagatgggagggtgggaggcctcggggtctggggggctctgcagctgcccagctcttccagctgatggctccacatcttgggggaaggctctgatttcatgacgggctgggggcttctcaggattccacagcccaaatggcgggacagttcaggggctccaagaccatcaggagcatgtggtacccacatcacaacccaagaccatggggcatctggacaaggaaggtctatgcacacagggttcctcattcagctggcttctccgggtgctgaatgatgggatctctctcgggctcaccccgtgcctgtgggatatgtatttgctggaaggggaacagatgttgatgctgataacaagcattgcctttaaggttcaaaggagcctctatgaagaaactaacaaggaaacatggggacctgccacccccagggccctcaagggcactggaagagccagacccatttgtgagagcctccactcctccctgcaagcgctgacagcctcagagagcagcagaggcccctcactcctgcagactcctccaagggtgccaggacaacaagccttgagccggggagacaagggaatcagtgtctcattatctctaccatctctaccatctcggagagggagatgtggcaggataatagggtaatagtggggtgagggtcagcaggaaaacatgaacaaatgtctctgtgtcataaacaaggttaagg

SEQ ID NO: 67496 - DNA, 937 bp, Homo sapiens
  misc_feature (4)..(4): n is a, c, g, or t
  misc_feature (6)..(6): n is a, c, g, or t
  misc_feature (11)..(11): n is a, c, g, or t
  misc_feature (16)..(17): n is a, c, g, or t
  misc_feature (24)..(24): n is a, c, g, or t
  misc_feature (28)..(28): n is a, c, g, or t
  misc_feature (31)..(31): n is a, c, g, or t
cagntntagancgcgnncggcccncttnttnttaagcagctttattacatttccagcaggcaggccagagagtgaggatgctgctggtgtgctggggaggaagtgcaggaatctgtagaggacagttgttttcagaagtccaagatcctatcccctttattctgttagttgtacttcagtttgctttcaggaaccactacttttccaactacaattctcagtgatttagatacactgactgctctcctactccagggctaagctcaagacccaggtttggcaaatgagtacatcacagctgctctagcaagggaataaattcgccaatgaccagatgacccagttggttaagtgagtttcgctccctggactatttctggcagggaactgtcagcctgccctgttcaacattttcttccttagttttatctaggaatgtcctgggatcagctgaaaagagggaggaggtggggtttggggaggagacatcctagcagcagttaatacaggaaggagaacctgaaatttttcatctgtgggtatgagaagacaaggtttccacattcctcggcagctcctgcacctgcctggagcaactttttgggtatagccatttatacataggctaggcaaccattaagaatcagtggatcagccaggtgtgatggctcatgcttgtaatcccagcactttgggaggccaaggcgggcaggttgcctgaggtcagtagttcaagaccagtctggccaacatagttaaaccctgtctctactaaaaatataaaaaaattagctgggcatggtggcatgcacctgtaatcccagctacttgggaggctgaagcaggggaattgcttgaaccagggaggtggaggttgcagtgagccacgaagacgccactgtactccagcctgggtgacagagcaagattcagtctc

SEQ ID NO: 67497 - DNA, 451 bp, Homo sapiens
tgctcgataccccgtgaaagcacaccccttgtactcgttttgttctctgaatgcagtcatcaaagatgactttgacatgggtggttagaacatcaaggtgtgtttcgaagcctgttggaatacttagtttggggttttttctgactgtgtacataaagaatgtttttgtgtatggcatggttttgtttacatcatcatacttctgaaattcattgcctggcactcttccagcttgattttgcatgttttaaaaagattcttgtcattctaactctaaattgggtgtgctgtattctagagctttgattttgtgtctcccaaagttgacgactagtgtaagtctgaatcagacagcttttgtttgaatcgtctgctcacctcacagttaatgagataacagtgaaataaaaataattaaaataacagattgaaaaaagagaagttactgaga

SEQ ID NO: 67498 - DNA, 640 bp, Homo sapiens
gaaagattggagacatgggagggaagtcagcctttagggaaattgtaatgtcatggaaagagacgccttctttctgtcccctcatggagactgtgtcctcatctagaaccaaaggagaggggctccaaaagaatcaccagtgaggattgggtgtgcctgcaggaagatgggactgacaactccctggatatctatctgtttgggcagcactgatctgctctgccctattgcttcctgcacaaaggagaacacagatggagagagacagcactggaggggctttggatggtgtggggagaaccttagatgaagaggggctgaagttgcttccccttatcccttcctcccaccttgactttctagtcccagattggagtacggcaaagaagtgtccatcagagaggagtgtggcataatgacacaagctaaccatctgctggaagatatagcaaatgtgtgaggggtcacctgttcctgggaagatgcctggaatcctccaggtgtgcaggttgtttgtcacctgctctggcttcatttctgcttgtatttttataaattgttttgtaaaaagtagatgttattttatccttcatctcttcccagagcctaaacaattaaagtcattttcagatcaaaatgt

SEQ ID NO: 67499 - DNA, 416 bp, Homo sapiens
ttagaagtagtttattcttatgtaaggaataactaagactttttggagtcaggcatatatatcaacttcagacaaattagtcttggcaataaaatacaatagtaacaaattgagaaatttgcctcaaactggtccatgtattctattaaaagtaattaggtttaatctctgtcctcatagaatgcctcttacattctttaacttatttttctctggcgttaattctggttctgccctcctttaactcaagtgtggaatgttggaaatgcctctttagttggtctttctgcttgcagtttcttctttgaattaatactacatgccaccaaagcacctgtaaaaaattgttacctgttgacagaggaaatttacacatgtctgcacattccaagtcctaagtaatctgactgtacttc

SEQ ID NO: 67500 - DNA, 434 bp, Homo sapiens
gatggtaaaggaaaggaaaggaaaggcttgtaacaaaggctgccacccattgtcctgccctccgcacggcctggtaacgtccctccagcctcagaaaggccgtctctgaactcagtgattcatgcccagaaatgacactgccatgcagttaaagcaggacttgagctggctcaggccagtaaaacaagagcagaaaaacaagttctgtgagcccgaaagtccctactacgcagttgtgtcccttggtgtttgggtttcaggtttgtcttttgttctcagaatctgttttcatgtgaggcaagagcacaaacaaaaataaaaatgagttcttatgggaatacttacaagtctgtttctgtcaggggtttacatcagcagtttatttttttaatgtgagtgactcatcatctttaaacaggaggggagattactgt

SEQ ID NO: 67501 - DNA, 528 bp, Homo sapiens
aatagttcaatggaactgaaatatattcatatatttagggaatttagtttatagttatagtgctatttcagatgagatgagttttccctaaatgatactaggacaattggctctccatttggaggaaaaaatttagatatgtatcttatagacaactataatttctaggtgaattaaatgatctaaatgtaaaaaaatcagaaaaatactaggagaaagtatgggaaacattatgacattaagatggaaaagccaaaggttctcctaccgaaacacagtgtttacaagatgaatgtcacgctgagagatagaacatctataagagaaagggtgaacatccagaatgtatagagttcttacaaattgattacaggaaagacaaaccagtagagaaatgtacaaagactaaacagctgattttcagaagagattcaaatgactagttactatggaaatagaaactaaaaaacgtgactatcaaattgtcaaaaaagaaaagtcgacgcggccgcgaaattagtaatagta

SEQ ID NO: 67502 - DNA, 183 bp, Homo sapiens
agcaccatcctttcttcattcctttttcacttatccatcattaggttgttactttttctttcagctggccccttccatccattcctttcctcaacaatctttgctaaatgtctgacacaagccaaaacaatgaaatgcaatcctgccgtaatgaaaactctaccgtggccaatgaatgcaggt

SEQ ID NO: 67503 - DNA, 378 bp, Homo sapiens
gccttttgctgtcacagtctgtatcagaaatgggcatgacccaaggagaactgagatactgtgggaagtctaaattctcttccaatatgagggacccccacacccaaggtgcctcaggagatggaaacctcctcagtaactctggtacaaggatggcttttgtcatccaagctttattcactgaagatttggtaaacaaggtattgtgtgtgtatatatcttattttctcatctgaccttgaattaagtcagtaacaggctgtactggatccctctgtgctcataaaatggattcaccaaagaactgatcttattcaaatagatcaagacactaaattcccataaactcttatacccagcctctcttcaaccagaaat

SEQ ID NO: 67504 - DNA, 343 bp, Homo sapiens
agtatttgctttacctacttaaaaaagcacaacactatatttattttttcatacagtctgatattttttctcttttaattggtgagtataatgcattcatatcaattatgattattttggacttctccccatcattgttctgggattattttgaattgttctttcccctattctgatgttttttttcccactattttggtaattatattcattaggcttatttttagtaattatatagcttttaacctgcatacttaataacatatgcagaatatcaaaatactcaccctcatcctgaattataaatgtcctaagagtgctttagatctgactgcatcttacg

SEQ ID NO: 67505 - DNA, 124 bp, Homo sapiens
tcacagtttttctgcatcaaatatgtattcattttgtagctgaaaaccccattttaaaagggagtggggatacattgagcctgtcaaagtatttataaaagtgtcaaaagattatttcatctgt

SEQ ID NO: 67506 - DNA, 471 bp, Homo sapiens
tgcccttttccctttgtcaatactacagaattttccaatactatgaatactatggtttcttcaatcctatatgcagatggctcccaaatctgtatttacacacacctccctcctactgagcatctcaacctggggttttcatggacacctgacccctctcttttatttcttcttttagtcaagagtatcatcatccattcaggctccaaagctagaatcgtgtgtctatatataatcagtcagaatgagatcaaccacaaaaagcaaccccacaaagctaaacatcagtcaggataccatgaggcgttgagccttagggagaaaggcagagatggaaggtcagcagccatcccaactcctcctccttaccataatttagcactgggcactgtccactgtaacctcccatcaccacactggacaaagcagttgagctgctgttccacacagttgctgctatccactctgaag

SEQ ID NO: 67507 - DNA, 311 bp, Homo sapiens
tttttttaaatagagacagtgtctcactatgtttcccagcctggtctcgaactccttgtctcaagtgatcctcacaccatggcctcccaaagtgctgggattataggaatgaggcacttcattcagcccatattagatatatttcaaaggcatattaggtttattaacatgtagcaaactacatgttaatgacatgggacaaagaatctagtagacattttaacctttagttatgtcttttttgaaccagaaattagctgtagctaaaaagcagtttattctttaagccaatgcatattctccagctgcat

SEQ ID NO: 67508 - DNA, 364 bp, Homo sapiens
cttcttcagggggtctgacacagaaactgtgtccaggggagattctcagtgtggtaagggactgagtgcgtcagggactccccagcagctgagggcctctctctccctgttgtgctcttgctggggctggtgatccaggggctcttaccccttggaagccgggtggaacatgagttccaccaccctgttgctgtagccaaattcattgtcgtatcagaaaatgagtttgaaaaagtggttgttgaaggcagtgccagccccagcatcaaaggtgaaggaatgagtatcactagtaaagttggaggagacaacctgttgctcagtgtagtccagaatgcctttgaagggaccctccaatgcctgt

SEQ ID NO: 67509 - DNA, 347 bp, Homo sapiens
agatatattttaggactgttttttccagatatgaaattttaatgagaaattttttaaaaattgggttatatttacataatggtgtactatgcaacaatgagaacaatctgtgactacatgcaataatatgaattaattgtgtaacataatgttgagcaaaataagccagcttccacttctggcttaaaagacaaaattaatatatgctgctagaagtcagaagagaaggataatgactgtaaaaaaacatgagggagcttctgagtgaggtaatgtgctgtttccatatctggtgctaattcaaatagctatgtcaaatttgtgggaattcatcaggtgctacaatt

SEQ ID NO: 67510 - DNA, 488 bp, Homo sapiens
tcttgaagtgtaaatacaatgtcccctcttcaagagccctaccatgaccactgtattgaaaataaacacacccctctgttgttacagtttatatcatgaccatctaacattataccacattgtactgtatataattatcttcttttctctgcatcccacaccccatctacctttaggcataacaatgctttcaaggaggccagagacctcacctgtcttgttctctgctgtatctccagcatcttgcccagcacctggcagaatgtaggtgctcaaaaaatatttgtggaatgaataaagggagaaaacgttggaaatcagtatgctgcagtgaaaatggcaaaggcaagctctgggatcagacagactaaggttaaaatcactattggagttgctaagctggtagtgtgtaaacccaatactgttcacggccattgattccactggaacctgcctgtcagtaaagccaacctgtgggatgaaagaga

SEQ ID NO: 67511 - DNA, 522 bp, Homo sapiens
gtcatgatatttgatatggtaaattcctcctgtttgtgattgttttcaagattgtcttgatatttttgtgcattttctcttctaggtaattttataactagcttgttaaatttcataagtaaattcttctgcagttttatgggtgcataattgtgttaggctcaagcagcagctaaagaaaacccaactaccagtgtcaaaacataatgatgatgatgatcatgtttgatgacggcagctttgtactaccagcagttgtttgaaccacatcacttaatcctcacaacaactctgtgagttagattattattcctattttacagatgaggatacgcagcacagagaagtaaaataagttgctcagtgttattcaactaggaagtagcagggttgggttcaacctgaagatttctgtgggctctctagtctgccacattgttggctatttgtgtacagccactatgttgttttcattactgcagctttatcataaataaattagttaatatttatgacttcatt

SEQ ID NO: 67512 - DNA, 208 bp, Homo sapiens
ggaggatcacctgaggcctggaggtcaaggcccagatcataccactacactccagtctgggcgacagagtgagaccctgcctcaaaataaaataaaaaccagattcctgggtgggacctgagattcagaatttctatccagccctcaggcagtgtggatgctggaacagtcagacactaaagatgagatagctctctgcctttgggaa

SEQ ID NO: 67513 - DNA, 429 bp, Homo sapiens
gtaattggctgtcgggggcagagtttgggacagaccatgggaaaattttgcatgtttccctagaccgttgatcatgaaagccaaggcctttggcttccgggccatggggcagaaaacggtcctatgtatctgactgaagacaaagacactttgcttctcagggatgtgtgcacgccaaaagcttcttcccttggaggagagagggaatcctctcatgccctgcatcctgaattgtagtaaagtaggagtctactactctttctctctagaccccttacaggtacaagtgtcatcagaaagaggtttaagaatactgagaaatcactcccttcaaagcctagggctgaagagccttagagcactgggagctcatgtactgctccatagacccagggccacatggaatcaatgcagccctcttaggtttct

SEQ ID NO: 67514 - DNA, 2576 bp, Homo sapiens
aggtgtgtgtgtctgagggtgtgtgtgtgagtgtggctggccccagtacctggccaagcccaccacttccacctgggccctacacccccacaatgtgtacccctcttatctgccctggagcctgtacagccatgccacgctacccctgagagtctagaaagctggtcactaactttgcagacggatgagccttgagcacccagaggagactggggctgtcaacgctgccccttgtcctgccggcttggatcccctgacagggtccttctaggcttcagactggcaccctgaccatggaaccctgaagtggcagtgacttctagagctcagtggcagaccccacgacccttcctcccccttcctccccctcccaccaccagctttcaagctcccagagggaggggtggggaggggatcctgatctcacagggcagggggcttccatcatgatgctcaactcagacaccatggagctggacctgccgcccacccactcagagactgagtcgggcttcagtgactgtgggggcggggcgggccctgatggtgccgggcctgggggtccgggagggggccaggcccgaggcccagagccgggagagcctggccggaaagacctgcagcatctgagccgcgaggagcgccggcgccggcgccgcgccacagccaagtaccgcacggcccacgccacgcgagaacgcatccgcgtggaagccttcaacctggccttcgccgagctgcgcaagctgctgcctacgctgccccccgacaagaagctctccaagattgagattctgcgcctggccatctgctatatctcctacctgaaccacgtgctggacgtctgaactcagcctgtctcccacctcccgggcctctctggggcccctttccaccgctcactgcttagaaaggccgcatcctccccgagcccttataccttggcatggagtcccaaaggccctgggcacaggcagagagcccaccggctggtcatgagggcctcttcctttctctgacccaggcacctcgagggctattctcctgggttccttccggggtttattgctgaggcccagctgtgcagaattgtttgctagtgtggttggtatggaatccttgctggctttactaagccagccacacttggagtctgcccccaagctctctcactgaatgctgcctcttctacccctatgtccaaattttcagccaccacagacctcagctgtgtatcctatctgttctagcttctcctgcccctggtggggatgggctgtcagaattgcaagggaggaaggctggggttagagtggggagtgggcttcttcctccaagatctcagtctctcagtgcttggcagaggggtgaggccctggggaggcaggggttggtgccctgactcctgtgaggggaatctcagtagctgggaattatggaaaaactcttcctgtttctgtccatcttgttcctgtggcttagcacatacagacctcagatcttacttggtagtgagtgccttgccctctttgagctatttggctacttccctgtccctctgactcctactgtcccaattttctccctccctgtgtgtcactagagaaaaaaaaaaacaaaaacctagattccggattaggggatgacatcccaaacagcccggagtatttgcagaaggctcaggcaacgagtgggccacatctcacttctgcttcctcatctcagcccactctgaaaatgtgcagcaccctcactggttcctccccccaacgcaaggaggatgcccaattgttgccctctaaaaatgcacagttctcctggccctaggacttacttattacatttttttctctttccttgagctgcctttggcaagggaagagacccccaactctgcgcccctactccatgctgctgatccccacctgcgcactatagcgcagggtcagcagtggaatgaagggccttagaacctgcatagaagaaatgaactcactgcatttctgtgctccctcctccctcgcaccaaactcctagctctacaagtatatttatttatttatttatttattcatctatttatttacttatttatttatttatttataaatattgctatttattgccgagttgtgcactttggggtagagtgaggggctcccagcagctctagctgggtctctcttgcttcctccctgcttacgcctttccttttcttgctccttcttcaactcctggtgtgtgtgagcatgccctttgcttgccacaccatatcctttccccagatccacctgtcctgacactctagtcctccaggatagtgctcctcccccagctccagggctcctggatgtccttcctcaactccctccacccctagacaatcctacctggtcccatctgcctcttttctctccccagcctgccctgtgacccttgcctcttcctgatactcccaagagcaggccccaggggtctgtgtcacatatctctgtgtgattccttctggttgcatccccaatttcatacaaaaagaaaaataaaagtgacctcgttctagcaccaggtatggttgt

SEQ ID NO: 67515 - DNA, 168 bp, Homo sapiens
ttccaatgtattgagagtggcaaatcctttaattgtagctcacttttaaaaaaacatcagataacccacttagaagagaaacaatgtaaatgtgatgtatatggcaaggtatttaatcagaagcgataccttgcatgccatcgtagatctcacattgatgagaaacct

SEQ ID NO: 67516 - DNA, 494 bp, Homo sapiens
tctttggaatgggtggaggtggttaatttttttaaaaaaataacaaaacgggtaactctcacgtggtaggatattcttaattcagcacagataaaaacatttttgattgtatttttcttatttctctaccttcataaagagagtacacgcccttcctttcccaataattcaagatcatttttatgatgtagctctaagtatatttgaggatttgttttcttttgcaaaagaccaagggaaaaactaaaaaatttatagggcacattttaaaactatatatataacacacacacacgtatattctggctttttaaaaaacaggaatgtatttgcaactgtgctaggtgtttttttttttattactaaggttgttttaggggggaaggtagggggagaacaaggaggaccaacattacagaaacttccctagtatgtactgctgtatttgagtatgatgctacacttttcaacaaattttgttgatcaacaatata

SEQ ID NO: 67517 - DNA, 181 bp, Homo sapiens
  misc_feature (17)..(17): n is a, c, g, or t
  misc_feature (31)..(31): n is a, c, g, or t
ttttttgtttctccttnctcctaaaagtttntgaaaccccttaaaaaaaaaggggttgttttaggggggaaggtagggggagaacaaggaggaccaacattacagaaacttccctagtatgtactgctgtatttgagtatgatgctacacttttcaacaaattttgttgatcaacaatata

SEQ ID NO: 67518 - DNA, 546 bp, Homo sapiens
tattgcagaaaatatcatgaatgtatgagtatctttgcacacatattattacatctgaggaatagatccctagaagtagaattgagaaacaaaggacataagccttaatatcctttatataattcaacaatcctttatataaagcctttatagcctttataattcaaatttggtaaattttttgaaaatgattccaaaaaggctgtaccaatttacagtttctttatttaaaaaaaaaaaaatttggctgggcatggtggctcacacctgtaaatcacagcactttgggaggtcaaagcggcagcattgcttgagctcagcagtgtgagaccagcctgggcaacatggtgaaaccctgtctctatatttttataaaaataaaaataaattattaaagttatgtctctcttaccctttgctttaagctaacaaattttaatattaaaaaatagcagagcgtgacccctatctttgctattccaaatttcaatattaaaaaataatacaggaagaccccatctcaataaataaaggtaaatataaagt

SEQ ID NO: 67519 - DNA, 492 bp, Homo sapiens
ggcgtgagccactgcgcccagccaagcttcattttttatatacaagcttgttagcagatgagctgggacatgagtctagttctccctgctttcagtctaatgcctgcttcctactgcccgaacaaataaagtactaattttacagtgtacggtctagaaaaaacatacattcagaagcaggtaagattttcagcagccccaagtcatgagggtctcctacaggggcagagaagtagtaaaaaaacaatcatatgcagttgggtagcccgtatagaatgtagactaattatattcaaatcctgcctctgccactggccagcactaggatctgggacaagttacactacttttccaagtccctgtttcctcttttgaggaaaagagaaaataaaaatacctctagatagggttattgacacagttaaattaaatgagataaagattgatttttccccagacatgttcattccctagtcatccatctcagtaaat

SEQ ID NO: 67520 - DNA, 344 bp, Homo sapiens
tttaaaatccacttagctattctatcttttgattgcaaagtttaatccatttacatttaaagtaattatatattgataaggaaggacttattatagccattttgttaatagttttctgttttgaatcttttttgtccctgtttttctctcttgttgcttttgatttctttctcattttcttttgcatatcttctatagctatagttttgtggttaccatgaagcttacataagacatcttgcagttataataatctattttaagctgataataacttaacttcaattgcatacaaatactctactcttttactcttccccccacataagaactttatgtttttg

SEQ ID NO: 67521 - DNA, 336 bp, Homo sapiens
ataagagatatgaagtggcacttctctgacattcactgctggagctattatttttgcccatggttattctgatttaacctatatattattgactaggggaaaaagcgtactgtaaaatctgaaagttactacagtatagtaaaatgccaagtttgtgaatttaaatctgcagaaatattaggcattgcatttagaaaaaggcaagttacctccatctgaaatataacaaaattttagattctatggtattaattatcatcctagatgtagatttatgaagcagtatgtcatgccagaggtttggttttattcaatattttaatacctattacgtac

SEQ ID NO: 67522 - DNA, 2130 bp, Homo sapiens
agggattgtcctgacaacttgtggggatagaagggctcacagggcaggggtctcagctgcccccatccttagggcaggggagttagtgtggagccgagagcaggtcccagctccccctgccagccgcactgtcccaggcccagggacctctgccgggtcctcccagcccttgccacacagcctagacgtagtagcctgggcttccagcaggtggcgagctggttcgtgctggaaatttctcctgggtttcttggggtcaaacatgccaacctccaagaccccatcctcacgtctcccacttttctggcgctggagtgtgcagggcgtaggacctgcatgtgtgggtgtgagaatgggggcggtggacaccaaggggcgagtgtgtgactaggtgtgtgtgcacatgtgtagggtgcagacgcatgggtgccatcctttgcgttcagtgactgtgcgtccagacccctcaccagcggcccccccaccacaccctggtcctcccaggcagctgtcccagggcgcccaggcctgccttgcaccacagccctcaggaaatccggcaaggaggcccctgcaggttggttcaggcccccaggtagcaaaacagagacaacagcagccccgcctgaccccctgcccctctctgtggaggcccgggacccccgcaataagcaccacatgggtgaggctgtccctgtcagggtcccctgccagggtccctcctggggttctgggccatttgaggggctctttgatgggccaggccggccagagtgaactccgagcactttctggctggtgccccaacctctccactccccactcattcccaccttgaaaaagggctataggtcccctgccctgcccgggtccagtttacaaacagtgtggggtggccccagggcctggccccactctccctgctgtgcccactcctctccagactccacctccccagtgggtatgggccctccacatgccaggtaagtagcaaacccccactccctccaaggaccaggtctcagagaaggccctggtcactgcccccggcccacctggagcccatcggggctgcctctcccagccgcgacttctccttttgccttaggcctcgcgacatcctgatctctcctgcaataactaggaatcgagattccacagtagacgtcccttgccgtgctcgctctctctctcgcgcgcgctctctctctctctctctctctctctctctctctctctctctctctctctctctctctctcctctctttctctctctccctctctctgttaagatcctgttcgggagtttccccagccgttgtagtatctagtatgttagagttgggaggggaccatagttatgtagcccagccccctcattcccagaggcacccagagggccagcctccagcctgaccccagagcagaaccggaacaccaggttggggccctggtgctgccacctcctctgctggtcgggctgggaccctttgccccttaggagaggtgttggtcacagatgtttacctcagtttatgtcactgtcgaagaaacaaaaaataatagcaaaaaataacactgtagacatgaagacttagaagacaaaaaaaaaaaaatcacacaaaaaatctcccttgttgcgattcttctgtgaaggtacagtgtgtatgtgtgtatgtgtgtatgtgtgtgcgtgtctctgtcccagaccctgtgtcccccacactgccccctgtccttcggtgcttcccagagacccctctgagctggcctgtggggcacgggaagccccctggatgggaggcggggccacaggtcggctagagggtctccaccaggcccactgaacagaaccccacggctgccagaatgttccctgagcccacactgtggccagtgggacagtcctggtggctgacatcagcgtccatgcttggctcagggcctggggcggggtcctgggtagagtcctagccccagagccccagcccctcatgtcttgccgcccttcctccatgtgtttgtaaatactctggcatcctttggccctgagaaggtttttaaatgtgttatttacttctctaaacatgacgattgctataaaaataaacaaaagtttagaaaaatg

SEQ ID NO: 67523 - DNA, 1053 bp, Homo sapiens
aaaaagcctccttagattcaaactggattccgacctcggttccactggtcaccattcaactactgttcatctcttagtctctgtttctgtaacttcaaaaggaagttagcattttccttgcagaggtgctgaggattgaatgagagaatacctggaaagcattaggcatgtagcacacttagcagatggtggttggctccctctgcttttccaccagtctgtggcctacagtttaaatggtgggaagaaggacatgagatctgaggctggggaaggaggtatggggttctaggcaagggaggaagcctcttaggcctggagcaagggagcagggtcctgggcaggtgacagagccccacagtgccctagctaccctattaatgggcccagaacctggaagccagccaccatgtgccctcatgcccagggtcttcctgcaggtggagatgaagagccaagagtctcagagtctgcagcagcagtgagactagtacctgggtcacctgcagcagtacgtggccacctatcagcagctgacctctgagaaggaggcgctgcacaggcagttactgctgcagacccagctcgtggaccagctgcagcagcaggaagcttggggcaaagcggtggctgagattataacattttaaaatatgaatacagtagtttaaaacaaagaaactggaggaaggaaaagtagagaaagagatgccaattcaagtccaaacctttatttgccaagttttcttagaatgacttttaccaattgatgaattcctgtaaacagaatgtataatggaaatacggaaacactgttgcctaaagtgggattattcactgctactgtgatgctactgtaatgtaataaattattaaattgttgcaaagtgctgtttttgccttaaaattttatgtgtcttgaaaactatagtattaagagtattgagactgtgaaaatgctggggacagttggcatgagataatcagtttttatttttatgaaattgtaatgtaactatgcaagtgtgtttattaaaggaacaaactaaaaag

SEQ ID NO: 67524 - DNA, 465 bp, Homo sapiens
caaaaacaaaaagatatgaaatttaatgtgaatggactatgaaagtttttaccacctagagattttcagaattagaatgcattttcttcttttaaaatactttatcacctgttgaaatatgaaagtagttgaacaaaagcttttttatttttcactttagatcttatcatatttgtaactgtgagcattttttgtaaataagattttcatgacctaggtcatattctacttgtttttaaaatatagaatatatttaggtatataaaacttaaagctttttgtatcaccataatgtgtgcatgcacacatacactgaaataaatggaaccaaccataagataatatctgcaatgcttggtaatcaaaagtttttatttttatttttatttatttatttatttattttttttgaggtggagtctcgctctgtcttccaggctggagtgcagtggcgcaatctcggct

SEQ ID NO: 67525 - DNA, 1757 bp, Homo sapiens
ggggactacggagagctctgcagggagccgaggcccccgcccgggccaagggagcttctgtcccgaggaccaggggatgcgaagggattgccccctgtgggtcactttctcagtcattttgagctcagcctaatcaaagactgaggttatgaagtcgatcctagatggccttgcagataccaccttccgcaccatcaccactgacctcctgtacgtgggctcaaatgacattcagtacgaagacatcaaaggtgacatggcatccaaattagggtacttcccacagaaattccctttaacttcctttaggggaagtcccttccaagagaagatgactgcgggagacaacccccagctagtcccagcagaccaggtgaacattacagaattttacaacaagtctctctcgtccttcaaggagaatgaggagaacatccagtgtggggagaacttcatggacatagagtgtttcatggtcctgaaccccagccagcagctggccattgcagtcctgtccctcacgctgggcaccttcacggtcctggagaacctcctggtgctgtgcgtcatcctccactcccgcagcctccgctgcaggccttcctaccacttcatcggcagcctggcggtggcagacctcctggggagtgtcatttttgtctacagcttcattgacttccacgtgttccaccgcaaagatagccgcaacgtgtttctgttcaaactgggtggggtcacggcctccttcactgcctccgtgggcagcctgttcctcacagccatcgacaggtacatatccattcacaggcccctggcctataagaggattgtcaccaggcccaaggccgtggtggcgttttgcctgatgtggaccatagccattgtgatcgccgtgctgcctctcctgggctggaactgcgagaaactgcaatctgtttgctcagacattttcccacacattgatgaaacctacctgatgttctggatcggggtcaccagcgtactgcttctgttcatcgtgtatgcgtacatgtatattctctggaaggctcacagccacgccgtccgcatgattcagcgtggcacccagaagagcatcatcatccacacgtctgaggatgggaaggtacaggtgacccggccagaccaagcccgcatggacattaggttagccaagaccctggtcctgatcctggtggtgttgatcatctgctggggccctctgcttgcaatcatggtgtatgatgtctttgggaagatgaacaagctcattaagacggtgtttgcattctgcagtatgctctgcctgctgaactccaccgtgaaccccatcatctatgctctgaggagtaaggacctgcgacacgctttccggagcatgtttccctcttgtgaaggcactgcgcagcctctggataacagcatgggggactcggactgcctgcacaaacacgcaaacaatgcagccagtgttcacagggccgcagaaagctgcatcaagagcacggtcaagattgccaaggtaaccatgtctgtgtccacagacacgtctgccgaggctctgtgagcctgatgcctccctggcagcacaggaaaagaatttttttttttaagctcaaaatctagaagagtctattgtctccttggttatatttttttaactttaccatgctcaatgaaaaggtgattgtcaccatgatcacttatttgcttagtttccgtttgggctaatcttccggggttcgtaggaaaccttt

SEQ ID NO: 67526 - DNA, 5406 bp, Homo sapiens
ggggactacggagagctctgcagggagccgaggcccccgcccgggccaagggagcttctgtcccgaggaccaggggatgcgaagggattgccccctgtgggtcactttctcagtcattttgagctcagcctaatcaaagactgaggttatgaagtcgatcctagatggccttgcagataccaccttccgcaccatcaccactgacctcctgtacgtgggctcaaatgacattcagtacgaagacatcaaaggagaatgaggagaacatccagtgtggggagaacttcatggacatagagtgtttcatggtcctgaaccccagccagcagctggccattgcagtcctgtccctcacgctgggcaccttcacggtcctggagaacctcctggtgctgtgcgtcatcctccactcccgcagcctccgctgcaggccttcctaccacttcatcggcagcctggcggtggcagacctcctggggagtgtcatttttgtctacagcttcattgacttccacgtgttccaccgcaaagatagccgcaacgtgtttctgttcaaactgggtggggtcacggcctccttcactgcctccgtgggcagcctgttcctcacagccatcgacaggtacatatccattcacaggcccctggcctataagaggattgtcaccaggcccaaggccgtggtggcgttttgcctgatgtggaccatagccattgtgatcgccgtgctgcctctcctgggctggaactgcgagaaactgcaatctgtttgctcagacattttcccacacattgatgaaacctacctgatgttctggatcggggtcaccagcgtactgcttctgttcatcgtgtatgcgtacatgtatattctctggaaggctcacagccacgccgtccgcatgattcagcgtggcacccagaagagcatcatcatccacacgtctgaggatgggaaggtacaggtgacccggccagaccaagcccgcatggacattaggttagccaagaccctggtcctgatcctggtggtgttgatcatctgctggggccctctgcttgcaatcatggtgtatgatgtctttgggaagatgaacaagctcattaagacggtgtttgcattctgcagtatgctctgcctgctgaactccaccgtgaaccccatcatctatgctctgaggagtaaggacctgcgacacgctttccggagcatgtttccctcttgtgaaggcactgcgcagcctctggataacagcatgggggactcggactgcctgcacaaacacgcaaacaatgcagccagtgttcacagggccgcagaaagctgcatcaagagcacggtcaagattgccaaggtaaccatgtctgtgtccacagacacgtctgccgaggctctgtgagcctgatgcctccctggcagcacaggaaaagaatttttttttttaagctcaaaatctagaagagtctattgtctccttggttatatttttttaactttaccatgctcaatgaaaaggtgattgtcaccatgatcacttatcagtttgctaatgtttccatagtttaggtactcaaactccattctccaggggtttacagtgaagaaagcctgttgtttaagtgactgaacgatccttcaaagtctcaatgaaataggagggaaacctttggctacacaattggaagtctaagaacccatggaaaaatgccatcaaatgaataatgcctttgtaaccacaactttcactataatgtgaaatgtaactgtccgtagtatcagagatgtccatttttacaagttatagtactagagatattttgtaaaatgtattatgtcctgtgagatgtgtatcagtgtttatgtgctattaatatttgtttagttcagcaaaactgaaaggtagacttttatgagaacaatggacaagcagtggatacgtgtcaatgtgtgcactttttttctatattattgcccatgatataactttagaaataaaccttaatatttcttcaaatatctctatttaattttgacactgaaataaccgtaaaggtttatttttctgttacctcaacaagaagaatttgaagacttcaaaatattgagcagaattcattcatacttaaaaatttattagccctgcattttcataggaagacacattatcttctggactatagctgttctaatggattataatcagaatggaagagagaaagcatattgactttttttgagcgacatctctgactttctttagtctttagctattactggatctcttaagacagcatgtgttaatcttaatgtatatcgttatcactgtgcagttgctgtttacttgaatagtattgtgttcctatattccaggtttaagtagatttcatgcctgggtggccaaacaacagtcttcattttttttaattgaaaagaagtagtgtctggatcagtaaaattatactgtgtgtgagtgtgaatataaatgtgtgtatgtgtgtttctgtccgtaactgttacagtaatgtcataaagtgagaaaactgtgaccaagtataaacttttaccacttgctgcactcttgcacatggattcagtttctaaaattgagttcttcctgtaatcttgttgataaaaatactgactccaaccattcaaaaatttcaccccatccctccttaagagattggatcaagtattactaaattgacctttaggtattacacaagaccagtgcttagcaaaaaataatgacaggcatccaaggaagggatgtatttgtagtgttattgccaggaaaggagagtactttggtttctgagcaccgaatattgagcaatatgtcagtcactaaaaggaagacagttctacagaaaaacaaatggtaacatttttcaatagcgtgtgtagatagtatgcactatatacatcacgttaaagtaggactatcacacccagcccatgtggctaaaaaagctgaatcagacagtggatgagacacacaacggcagtgaagaaccgatacacttggcattgacgtctagctatgctgtatctgtgctttgcccacatgcccttggtgacagctgagcacccagctctgtcttggtaggtttgggctaaggaacaaatctctcctttgctcgtggttagcaagatacactcaagcatgaagataaacacagctgctttcttcttacaccccggtctcatgctccttaatggcgccatgggtgcttgttgggcctttttccagtaaggaatgatattgctgaagaatctacttaaccctgacaaattttaattataatctcttcttatacagataaaacatgactcctacaaggccccaaggtttacatagtctgaagtgaagtacagagctggcatctatctggtgatttctagctctcgagatacccaagcagcctgatggggcagttccccttcttacggttcacgctctaaggcaggatgtggcttatgagatactttgcattgtctgtctgcacaccttgaatctgcctgctggctcccttactttacctctctgtcatgtgcagatgaaggctcagggtgctagaggattagtaagatctctttctaaagacaggagagattatttacaagaagaactcaccagggtttagtttgcatttaagaattgccagtcttttgtcctgcatcatcttgaacattaatccacatgtttcagagctcaccagggcagtaccaatgctcttttcacagctatgaagagctagagaaattcttgttatggtagaaaaatttcacgattcatttttgaaactgcatttgtgcgtatgcagtgtagattttatagtgtgttgtgctttcaagatctaaatcatatataataaattaagggacaatggggctgacagcactaaacttggtgcttattgatattctaagaaatatctgtgaaatatcatcacgtatgttatacaaccttcatttaaaaaggtttaaaactagttagattcactttgacacttttcatatcatttcttaacccaagtgacgaaaacattgtccccaatgaatatactcattagaattaccatttgttaatatcactcattaattaaccccataattagatccattaatttaaatgatttaaatttaagtaagttttataaggtctgacatcagaggtatcttactttcctctgaggatgatgtacttgccctgaccatgcattttaccatcacacatgttcagaaagggccaaattcccaacctgctcatttttttttttatcagagtcatgatgaatcagtcctagaatgtttcatttgcacaagtagggctgcctccaagaggaacctctgatttattttgtatgaaatatatgtgaaaggatatgaatctgagagatgctgtagacatctgtcctacacttgagatgatttccaagcctctctggcactttgagttaagtctatctggtattaaatgccaaggaccttttgctgcctaaatccactctgcaggaaataggcccaaccaccagatgagaattaggccctggatgagtagcgctatagttactgtcctgttgattaatttctgccatttcatgtccataaaagagaccacccatatcatgcacacaattagatttctcacactctaactgtatatttgtatgatattttaaaatctcctaaatgctgggcaatggctattaacaattaattgtcttgcactggccttctgatgaaatgttaacaatgcctattgtaatatagaaaaaaacattctatctactgatttgggctgaatgtatgtaaataggtttctaaaaagtcagatgtttgagcagtggcctacaaatcagtaattttcggatgggagagtttctttacattgccgtggcatcttaaaagctatcttcatgtaaattgactgtactaggcctactggggatcagagttcccaagaaaggaaaccttttcttgtatctggattcaaatttatttccaatgtttcaagcgggaaacatgactctttattgtctgtaaatctaacattattacttttcctcttagaagaatattgtattgttagatgtttgttgagctggtaacatcgttgcaaccactgcaatatcttcgttagtaatctgtataatactttgtatacaagtactggtaagattgttattaaatgtagcttcagtcattaaattactatagcaaagtagtacttcttctgtaatatttacaatgtattaagcccacagtatattttatttcaatgtaattaaactgttaacttattcaaagagaaaacatctcatcatgtctattgtccaaagttacctggaatcaaataaaaattctagattaccatgaagaacataaaaaaaaattgaact

SEQ ID NO: 67527 - DNA, 5516 bp, Homo sapiens
tcggcttatttgttttccctcctcttaggattgccccctgtgggtcactttctcagtcattttgagctcagcctaatcaaagactgaggttatgaagtcgatcctagatggccttgcagataccaccttccgcaccatcaccactgacctcctgtacgtgggctcaaatgacattcagtacgaagacatcaaaggtgacatggcatccaaattagggtacttcccacagaaattccctttaacttcctttaggggaagtcccttccaagagaagatgactgcgggagacaacccccagctagtcccagcagaccaggtgaacattacagaattttacaacaagtctctctcgtccttcaaggagaatgaggagaacatccagtgtggggagaacttcatggacatagagtgtttcatggtcctgaaccccagccagcagctggccattgcagtcctgtccctcacgctgggcaccttcacggtcctggagaacctcctggtgctgtgcgtcatcctccactcccgcagcctccgctgcaggccttcctaccacttcatcggcagcctggcggtggcagacctcctggggagtgtcatttttgtctacagcttcattgacttccacgtgttccaccgcaaagatagccgcaacgtgtttctgttcaaactgggtggggtcacggcctccttcactgcctccgtgggcagcctgttcctcacagccatcgacaggtacatatccattcacaggcccctggcctataagaggattgtcaccaggcccaaggccgtggtggcgttttgcctgatgtggaccatagccattgtgatcgccgtgctgcctctcctgggctggaactgcgagaaactgcaatctgtttgctcagacattttcccacacattgatgaaacctacctgatgttctggatcggggtcaccagcgtactgcttctgttcatcgtgtatgcgtacatgtatattctctggaaggctcacagccacgccgtccgcatgattcagcgtggcacccagaagagcatcatcatccacacgtctgaggatgggaaggtacaggtgacccggccagaccaagcccgcatggacattaggttagccaagaccctggtcctgatcctggtggtgttgatcatctgctggggccctctgcttgcaatcatggtgtatgatgtctttgggaagatgaacaagctcattaagacggtgtttgcattctgcagtatgctctgcctgctgaactccaccgtgaaccccatcatctatgctctgaggagtaaggacctgcgacacgctttccggagcatgtttccctcttgtgaaggcactgcgcagcctctggataacagcatgggggactcggactgcctgcacaaacacgcaaacaatgcagccagtgttcacagggccgcagaaagctgcatcaagagcacggtcaagattgccaaggtaaccatgtctgtgtccacagacacgtctgccgaggctctgtgagcctgatgcctccctggcagcacaggaaaagaatttttttttttaagctcaaaatctagaagagtctattgtctccttggttatatttttttaactttaccatgctcaatgaaaaggtgattgtcaccatgatcacttatcagtttgctaatgtttccatagtttaggtactcaaactccattctccaggggtttacagtgaagaaagcctgttgtttaagtgactgaacgatccttcaaagtctcaatgaaataggagggaaacctttggctacacaattggaagtctaagaacccatggaaaaatgccatcaaatgaataatgcctttgtaaccacaactttcactataatgtgaaatgtaactgtccgtagtatcagagatgtccatttttacaagttatagtactagagatattttgtaaaatgtattatgtcctgtgagatgtgtatcagtgtttatgtgctattaatatttgtttagttcagcaaaactgaaaggtagacttttatgagaacaatggacaagcagtggatacgtgtcaatgtgtgcactttttttctatattattgcccatgatataactttagaaataaaccttaatatttcttcaaatatctctatttaattttgacactgaaataaccgtaaaggtttatttttctgttacctcaacaagaagaatttgaagacttcaaaatattgagcagaattcattcatacttaaaaatttattagccctgcattttcataggaagacacattatcttctggactatagctgttctaatggattataatcagaatggaagagagaaagcatattgactttttttgagcgacatctctgactttctttagtctttagctattactggatctcttaagacagcatgtgttaatcttaatgtatatcgttatcactgtgcagttgctgtttacttgaatagtattgtgttcctatattccaggtttaagtagatttcatgcctgggtggccaaacaacagtcttcattttttttaattgaaaagaagtagtgtctggatcagtaaaattatactgtgtgtgagtgtgaatataaatgtgtgtatgtgtgtttctgtccgtaactgttacagtaatgtcataaagtgagaaaactgtgaccaagtataaacttttaccacttgctgcactcttgcacatggattcagtttctaaaattgagttcttcctgtaatcttgttgataaaaatactgactccaaccattcaaaaatttcaccccatccctccttaagagattggatcaagtattactaaattgacctttaggtattacacaagaccagtgcttagcaaaaaataatgacaggcatccaaggaagggatgtatttgtagtgttattgccaggaaaggagagtactttggtttctgagcaccgaatattgagcaatatgtcagtcactaaaaggaagacagttctacagaaaaacaaatggtaacatttttcaatagcgtgtgtagatagtatgcactatatacatcacgttaaagtaggactatcacacccagcccatgtggctaaaaaagctgaatcagacagtggatgagacacacaacggcagtgaagaaccgatacacttggcattgacgtctagctatgctgtatctgtgctttgcccacatgcccttggtgacagctgagcacccagctctgtcttggtaggtttgggctaaggaacaaatctctcctttgctcgtggttagcaagatacactcaagcatgaagataaacacagctgctttcttcttacaccccggtctcatgctccttaatggcgccatgggtgcttgttgggcctttttccagtaaggaatgatattgctgaagaatctacttaaccctgacaaattttaattataatctcttcttatacagataaaacatgactcctacaaggccccaaggtttacatagtctgaagtgaagtacagagctggcatctatctggtgatttctagctctcgagatacccaagcagcctgatggggcagttccccttcttacggttcacgctctaaggcaggatgtggcttatgagatactttgcattgtctgtctgcacaccttgaatctgcctgctggctcccttactttacctctctgtcatgtgcagatgaaggctcagggtgctagaggattagtaagatctctttctaaagacaggagagattatttacaagaagaactcaccagggtttagtttgcatttaagaattgccagtcttttgtcctgcatcatcttgaacattaatccacatgtttcagagctcaccagggcagtaccaatgctcttttcacagctatgaagagctagagaaattcttgttatggtagaaaaatttcacgattcatttttgaaactgcatttgtgcgtatgcagtgtagattttatagtgtgttgtgctttcaagatctaaatcatatataataaattaagggacaatggggctgacagcactaaacttggtgcttattgatattctaagaaatatctgtgaaatatcatcacgtatgttatacaaccttcatttaaaaaggtttaaaactagttagattcactttgacacttttcatatcatttcttaacccaagtgacgaaaacattgtccccaatgaatatactcattagaattaccatttgttaatatcactcattaattaaccccataattagatccattaatttaaatgatttaaatttaagtaagttttataaggtctgacatcagaggtatcttactttcctctgaggatgatgtacttgccctgaccatgcattttaccatcacacatgttcagaaagggccaaattcccaacctgctcatttttttttttatcagagtcatgatgaatcagtcctagaatgtttcatttgcacaagtagggctgcctccaagaggaacctctgatttattttgtatgaaatatatgtgaaaggatatgaatctgagagatgctgtagacatctgtcctacacttgagatgatttccaagcctctctggcactttgagttaagtctatctggtattaaatgccaaggaccttttgctgcctaaatccactctgcaggaaataggcccaaccaccagatgagaattaggccctggatgagtagcgctatagttactgtcctgttgattaatttctgccatttcatgtccataaaagagaccacccatatcatgcacacaattagatttctcacactctaactgtatatttgtatgatattttaaaatctcctaaatgctgggcaatggctattaacaattaattgtcttgcactggccttctgatgaaatgttaacaatgcctattgtaatatagaaaaaaacattctatctactgatttgggctgaatgtatgtaaataggtttctaaaaagtcagatgtttgagcagtggcctacaaatcagtaattttcggatgggagagtttctttacattgccgtggcatcttaaaagctatcttcatgtaaattgactgtactaggcctactggggatcagagttcccaagaaaggaaaccttttcttgtatctggattcaaatttatttccaatgtttcaagcgggaaacatgactctttattgtctgtaaatctaacattattacttttcctcttagaagaatattgtattgttagatgtttgttgagctggtaacatcgttgcaaccactgcaatatcttcgttagtaatctgtataatactttgtatacaagtactggtaagattgttattaaatgtagcttcagtcattaaattactatagcaaagtagtacttcttctgtaatatttacaatgtattaagcccacagtatattttatttcaatgtaattaaactgttaacttattcaaagagaaaacatctcatcatgtctattgtccaaagttacctggaatcaaataaaaattctagattaccatgaagaacataaaaaaaaattgaact

SEQ ID NO: 67528 - DNA, 173 bp, Homo sapiens
ttgaacctggtaggtagagattgcagtgagccaagattgtgccactgcactccagcctgggtgacagagcaagactccatctcaaaaaaaaaagaaaagaaatatatgtgaagaaaagttgccaatttgtacttactgatatcttcagagaactcatttttaagaaaaacttt

SEQ ID NO: 67529 - DNA, 506 bp, Homo sapiens
tgactatggtccttacgctggattcatttatcttgaaatggtgaacaatcacagctgcagaccctcaatttatggtacatatcaagcaatttggctttttttcttgtaatgaaaaaaaaaagttttttttgctttttttcatgacactgcttcttgggagcactgccagcattactagtggcacttcgtatgggtcctaaggtgttattgaaggtttacgatattgcactaaacacgaaaaataccagagaaccactggagatactttttactgtgatatgtaatttactggagacaggaactgctcgtttggagatggttagcatcacagggtgttttaagtcgatacttgcaacccttgagctcaccacagtagcaacaggaggtggctaggaaattattcacagcaggacagtacgcactgcaattaattgtatgcagttatgatttaataccacatctttatgctcacgtttctctcaactgtgaatggtgccatgtacagt

SEQ ID NO: 67530 - DNA, 1414 bp, Homo sapiens
  misc_feature (2)..(3): n is a, c, g, or t
  misc_feature (355)..(355): n is a, c, g, or t
  misc_feature (670)..(670): n is a, c, g, or t
  misc_feature (829)..(829): n is a, c, g, or t
  misc_feature (961)..(961): n is a, c, g, or t
  misc_feature (988)..(988): n is a, c, g, or t
tnngaataaggtacttcataaagacatgagatataattatagaaatatgcattaaggaatagcacaaaatgcagcttctcatgtaagaacacacaaaaaaggattttaaagctaagcaataatagtatgataaattttgttgtgagtaccttctgaaaatgattatgctgtataaactgatttgctgtttctgaacatgttatttcaaagtcacttttatggtcttgtgccttattgtgttgtacataatgatatctccatttagcttactttacccacaccttattttctcctaattgctgtggaaaatatctattatatgacacctgtcaattaataagtatgcactcagcangttcattttttaggtaaagggttggaaggggatatagaagtagtgtttaagataaagtctctccctgcaaggagcttacagaagagataataatcccaaacaagtaatgtatggtagaagacattgtgtaaatagggctaaattggtttataggtgttataggtgtttatcaaagaggccaccactgatggctacgaaatcaccattggtgactctctttattctctagttggtagtaaatggcatcatccatttttacttctcatcgatgaaataaagtaacaagcctgcttgttagctaatatattaatgccngtatggcagccaaaatgtatttttgtttatagtcattttcaattacatgacatatttttaaaaatagttacaaaacttttatattcatatgactattaaagggttctaagtcctttggtatatcaaggacactaactaaaaacattttattttccttanaaattaaaatcaacaaatacagtaatttaaaacaccatcttgatatttcgttgtcgtttgcagttaatataaacatttctttggtcatccatataacgtatttggattttgtgtccttgggaatatataatntctacccttctcagtgtcactaatatntattcaggataaataaaaatcccaaaagaggaatattatagcactgatctcttatatactactgctatatatagtagaatgagaaagaattgcttttctctaagaacagtctatgtgtactttttcaggagtattttctttgatgaaagatttgtgtgtgccttgttaataggcctcaacgggctaaatacaacaggacaaccaatgattaacttttaaggcaataaacactttgtagtaaagtaaaaaaaatgtgttgcagataatagaatctatgcaaaatgtgtttgattttagattataaacagtaagtccagaaaaagagtaaaaaagatttctctttttttcttttgttagattttatttggataattccaccatggatatagataatatattatcattactcttacatgttttttaatg

SEQ ID NO: 67531 - DNA, 551 bp, Homo sapiens
agtacatactaagaaaagaaaaatagcccagagctgtctgagctatgtgaggtatgcaaaatttattagacccggacagaagtgaatactggcttccgccacgccttcccatgccttagggcaattgttaaaggcattttgttctttattagctgcctcacccattatctttatgttcctggaatttgtgatacaaggaagaaagcatagccagtcaatagcttaagttttttaaatataaattcttggtaaacaagttaagctctgcctcctctcctttccttaaaaaccggctcacgcctgtaatcccagcactttgggaggccgaggcgggtggatcatgaggtcaggagatcgagaccatcctggctaacaaggtgaaaccccgtctctactaaaaatacaaaaaattagccgggcgcggtggcgggcgcctgtagtcccagctactcgggaggctgaggcaggagaatggcgtgaacccgggaagcggagctttcagtgagccgagattgcgccactgcggtccgcagtccggcctgggcgacaga

SEQ ID NO: 67532 - DNA, 397 bp, Homo sapiens
gttggcaatgacttggagactgtctcatatgcctctgagacacagcactgactcagaatgacagtgccttcaccagaatcagaaaaagtcctgactgagtttgaattctaggaaccacttttcttgagtgtttcttgtacagatatccaaagtagagcctttgggtatttaaaaataatttgtaaatgccaaattaagagtttaaagggcactgtatgaactagttgtgtgtgtgtgagagagagagagagagagagaaggagagagagagagagaatgacagagaaaaagagagagagagaaaaggagagagaaagagacagagaaagagatagaaagagatagagagagatagaagagggggagagagagagagagaggagagagagaggtggag

SEQ ID NO: 67533 - DNA, 1068 bp, Homo sapiens
ggcgcgggagttggcattcggtggtcctggcagttagctgagcacgccctctgagccgctcggtggacaccaggcactctagtaggcctggcctacccagaaacagcaggagagagaagaaacaggccagctgtgagaagccaaggacaccgagtcagtcatggcacctaaggcggcaaagggggccaagccagagccagcaccagctccacctccacccggggccaaacccgaggaagacaagaaggacggtaaggagccatcggacaaacctcaaaaggcggtgcaggaccataaggagccatcggacaaacctcaaaaggcggtgcagcccaagcacgaagtgggcacgaggagggggtgtcgccgctaccggtgggaattaaaagacagcaataaagagttctggctcttggggcacgctgagatcaagattcggagtttgggctgcctaatagctgcaatgatactgttgtcctcactcaccgtgcaccccatcttgaggcttatcatcaccatggagacatccttcttcagcttcttcatcttactgtacagctttgccattcatagatacatacccttcatcctgtggcccatttctgacctcttcaacgacctgattgcttgtgcgttccttgtgggagccgtggtctttgctgtgagaagtcggcgatccatgaatctccactacttacttgctgtgatccttattggtgcggctggagtttttgcttttatcgatgtgtgtcttcaaagaaaccacttcagaggcaagaaggccaaaaagcatatgctggttcctcctccaggaaaggaaaaaggaccccagcagggcaagggaccagaacccgccaagccaccagaacctggcaagccaccagggccagcaaagggaaagaaatgacttggaggaggctcctggtgtctgaaacggcagtgtattttacagcaatatgtttccactctcttccttgtcttctttctggaatggttttcttttccattttcattaccacctttgcttggaaaagaatggattaatggattctaaaagcctaaaaaaaa

SEQ ID NO: 67534 - DNA, 1349 bp, Homo sapiens
gatcacctgaggtcaggagttcgagaccagactggctaacatggtaaaaccctgtttctactaaaaatacaaaaaagtaaccgggtgtggtggcacgtgcctgtaatcccagctactcgggaggctgaggcaggagaatcgcttgaacccgggaggcagaggttgtggtgagctgagattgcactattgcactccagcttgggcaacaagagcgaaactctgtctcaaaaaaaaattgtatttctgaagaattgttaagaacattggaaattcttgagatataatattgattggaaaaagatgaaactatatggtatgatctcaatatgtcctgatgaataaaaacataatacagaggacattattctgagataaaatacatcaaaatctttccattttatttgtatacttttacaatttttgattttttaaaatgtattctgatacacaaaataataaaaatgaaaaataaaaaatttggccgggcgcagtggctcatgcctgtaatcccagcactttgggagactgaggcaggtggatcacttgaggtcagcagtttgagaccagcctgaccatcatggtgaaaccccatctctactaaaaatacaaaaattaagctgtgtgtgatggtgcacacctgcaatcccaggtactcaggaggcttatgcgggagaatcgcttgaacctgggaggcggaggttgcagtgagccgagatcgggtcactgcactccagcctgggcgacagagtgagattccatctcaaaaaaaaaaaattgtagattcacattgcagtacaactgtgcatcttgcccattgatttctaaatgtattaactacttaaattaatcctgaatcttttcccaggcttaagtgggataatgttttattgtagatgcatatttcctggctctacccagtctttctttgaagactttatcatcctattttctgaatccagtggctgactttaatcttctctggaggaactagataatttctagactaatgcttacactcatgatccagattgtaatttctgaactccttcttccaaatagaatcaaaacaagaaaggggaaagcctctcaaagcaactgtgcgttaataatgaaacactctttttttctaatccaaggagggtttcatactttttcttagtttcttgccctcttcccttctgatcaataattgtaataggaaatttgcaattgtgccaatactcagattcaatactgaactactttcttgcattgtaattcaaattccaaggttaacaactaggctgtatgtttccaaaacaatcttattgtatatgtattttcttaggtgaagtttccagaaatgattt

SEQ ID NO: 67535 - DNA, 750 bp, Homo sapiens
tgcagagccaaacacacatggtaatttaaaaaaataatgcacgtatgtggtaaaaacagtaaaagcaaggtatcaagtaaaaagtgaagagtcctccctttctcattcccattcctactctctaattttttatatatccattttgtaagctataatacagagattccatatactcttcacatactttccccagtggtaacctcttgcataactataggacaataacacactataggacaaaaatcaagaaattgacattgatacaatccatcaaccttattcagagttcaccagtttaacacatgcttattgtgtgtctgtatttagttctatataattttatcacatgtatgctgatgaccaccaccacagccaagatacaaaacattttcagtgtaaagatttctcatgctacccttttatagccacagctacctccctccctccctgtacttccctaacccttggcagtcactaatctgatctttatgtcttgtcatttcaaaaatgctacataaatggaatcagatttgattgttttcattcagcacaatccctttgagatctatccaaggttttgacatgtatcgagagtttattcctttttattgctgaatagtattaatattctatagtatggatgtaacatagtgtgtttaaacattcgcctgttgaaggacacttgggttgtttccagtttcaggttcttacaaataaagctactctgtgtgttcatgtaaaaaaaaatat

SEQ ID NO: 67536 - DNA, 970 bp, Homo sapiens
gctacttgggaggctgaagtgggaggattgcttgagctcaggagtgtgaggctgcaatgagctgtgatcatgccactgcactccagcctgggcaacagagtgagaccctgtctcaaaataaataaagtgtatttgtcttgagaatactatgacttggcattatttggtgactgaaggtcatggaagggtctcgctgtgttgccaaggctgatctcaaacttctggcctcaaacaaacctcctgccttaaccttccaaagtgctggggttatagatgagccactgtgccccgccatggagtcatgtgatacacatagtaagctgtcagatatttttgataagttcaaatagacaccaagtaaaaaaagattcccatttattctccccagcttgccaaccccctaaattaagtaatgaaatgaaaccagcaccttttcagtatatctgacttaaaatcattatttattctgacccatttaactgtttgcaggattttttccctagagcagacagctataggcctgtatcattaaggattctcaaataagtgaactattgaaaccacataaaagccatcagttgcaaattctacttctctttgtttaagtagctaaaaatgaaagtggtggaaaaaacaggagataagcatattaagttctctactagtgctgaatctttaaatgactagctaagcagcgaagaagaaatcattctagaatgcagtgctctggatcctgctttgttataaacagttataatagcattaagttaacagtatttcacttaaacagctggacaggtggagaaaacattgtttcaggagttaggctttgtaatcttagacttgagggttttctcaatttctctttgtttatgataaagaaaaaccctattactactccctttgtttttggttaaaaactgaaaataactgattttgaaatcaaataaaccagtgtaatataaagcca

SEQ ID NO: 67537 - DNA, 661 bp, Homo sapiens
atcaccaataattttttaaattaatttcatgtgaaactttaaagctcttctaagaaccctttttcatttgttcgttattaaatcaaaacttcaatccagtcacctttaactctttcatgaccatttccacatgcccttaccgttggctatcttagcttgatgtgctaatcaagttccccctaatttgacatactagaatctaatactagaggcagcatgacattattatgggggaggaggttgagaagcactaacctcgaagttagaatttctggtttgtcatcccagtctgctaattagctttctgatttaagacaaaatactttttctgtgccttctgggggtcaaattcgatttttaagattctctcagttggaagaaatctaactaaaaatatacttaaaataattctttggtagtatattattttgaaatttggtccagaatcctatttgtttattcctgtagtatacatacatctgtagttacccagtagtctttgttgtctttgggccatctaaagtatatttgggctgggcatggtgtctcacacctgtaatttcaacactttggaaggccaaggtgggaaaatcacttgaggccaggactttgagaccagcctgggcaacacagcgagaccccatctctcctaaaaaataaa

SEQ ID NO: 67538 - DNA, 1368 bp, Homo sapiens
atcaccaataattttttaaattaatttcatgtgaaactttaaagctcttctaagaaccctttttcatttgttcgttattaaatcaaaacttcaatccagtcacctttaactctttcatgaccatttccacatgcccttaccgttggctatcttagcttgatgtgctaatcaagttccccctaatttgacatactagaatctaatactagaggcagcatgacattattatgggggaggaggttgagaagcactaacctcgaagttagaatttctggtttgtcatcccagtctgctaattagctttctgatttaagacaaaatactttttctgtgccttctgggggtcaaattcgatttttaagattctctcagttggaagaaatctaactaaaaatatacttaaaataattctttggtagtatattattttgaaatttggtccagaatcctatttgtttattcctgtagtatacatacatctgtagttacccagtagtctttgttgtctttgggccatctaaagtatatttgggctgggcatggtgtctcacacctgtaatttcaacactttggaaggccaagagggtctcgctgtgttgccaaggctgatctcaaacttctggcctcaaacaaacctcctgccttaaccttccaaagtgctggggttatagatgagccactgtgccccgccatggagtcatgtgatacacatagtaagctgtcagatatttttgataagttcaaatagacaccaagtaaaaaaagattcccatttattctccccagcttgccaaccccctaaattaagtaatgaaatgaaaccagcaccttttcagtatatctgacttaaaatcattatttattctgacccatttaactgtttgcaggattttttccctagagcagacagctataggcctgtatcattaaggattctcaaataagtgaactattgaaaccacataaaagccatcagttgcaaattctacttctctttgtttaagtagctaaaaatgaaagtggtggaaaaaacaggagataagcatattaagttctctactagtgctgaatctttaaatgactagctaagcagcgaagaagaaatcattctagaatgcagtgctctggatcctgctttgttataaacagttataatagcattaagttaacagtatttcacttaaacagctggacaggtggagaaaacattgtttcaggagttaggctttgtaatcttagacttgagggttttctcaatttctctttgtttatgataaagaaaaaccctattactactccctttgtttttggttaaaaactgaaaataactgattttgaaatcaaataaaccagtgtaatataaagcca

SEQ ID NO: 67539 - DNA, 1747 bp, Homo sapiens
atcaccaataattttttaaattaatttcatgtgaaactttaaagctcttctaagaaccctttttcatttgttcgttattaaatcaaaacttcaatccagtcacctttaactctttcatgaccatttccacatgcccttaccgttggctatcttagcttgatgtgctaatcaagttccccctaatttgacatactagaatctaatactagaggcagcatgacattattatgggggaggaggttgagaagcactaacctcgaagttagaatttctggtttgtcatcccagtctgctaattagctttctgatttaagacaaaatactttttctgtgccttctgggggtcaaattcgatttttaagattctctcagttggaagaaatctaactaaaaatatacttaaaataattctttggtagtatattattttgaaatttggtccagaatcctatttgtttattcctgtagtatacatacatctgtagttacccagtagtctttgttgtctttgggccatctaaagtatatttgggctgggcatggtgtctcacacctgtaatttcaacactttggaaggccaagagggtctcgctgtgttgccaaggctgatctcaaacttctggcctcaaacaaacctcctgccttaaccttccaaagtgctggggttatagatgagccactgtgccccgccatggagtcatgtgatacacatagtaagctgtcagatatttttgataagttcaaatagacaccaagtaaaaaaagattcccatttattctccccagcttgccaaccccctaaattaagtaatgaaatgaaaccagcaccttttcagtatatctgacttaaaatcattatttattctgacccatttaactgtttgcaggattttttccctagagcagacagctataggcctgtatcattaaggattctcaaataagtgaactattgaaaccacataaaagccatcagttgcaaattctacttctctttgtttaagtagctaaaaatgaaagtggtggaaaaaacaggagataagcatattaagttctctactagtgctgaatctttaaatgactagctaagcagcgaagaagaaatcattctagaatgcagtgctctggatcctgctttgttataaacagttataatagcattaagttaacagtatttcacttaaacagctggacaggtggagaaaacattgtttcaggagttaggctttgtaatcttagacttgagggttttctcaatttctctttgtttatgataaagaaaaaccctattactactccctttgtttttggttaaaaactgaaaataactgattttgaaatcaaataaaccagtgtaatataaagccatccatgtgttctgctaatcccttacttaaaacctatcagttgcttttgtgtattaaaggtctcctccacatgcttttgtcttcacttttgcctaactaacagatgtgcgagtgccagaggatcacccagagcctccaacttgctacccactgttttgccaccagagtgaatacctatttccttgtttccctcagggcctgggcagaaaagaactgccttggactggcagtcatatggtcatcccaacatatttccacttcaaagcagtacaaagtttccattgtttaagtttttcaaaagggcagagtttgactaggaatttttttttatcagttataatactatactattctttttttactcttacggttttttccca

SEQ ID NO: 67540 - DNA, 1082 bp, Homo sapiens
  misc_feature (1007)..(1008): n is a, c, g, or t
  misc_feature (1011)..(1011): n is a, c, g, or t
  misc_feature (1013)..(1013): n is a, c, g, or t
  misc_feature (1015)..(1015): n is a, c, g, or t
  misc_feature (1023)..(1024): n is a, c, g, or t
  misc_feature (1027)..(1027): n is a, c, g, or t
  misc_feature (1035)..(1036): n is a, c, g, or t
  misc_feature (1042)..(1042): n is a, c, g, or t
  misc_feature (1054)..(1054): n is a, c, g, or t
aggcgcagagcatgtcgggaccgggagggccggccggcccggggcgggggggactgggcaggaggggtcgggctcagggaactgcaactcccagcagcccccaggtacggggcgtggctagggacgaggctgggtcgagccagaggcgaccggaaggatctttctagtccagcccctcgctttacccggacgaaagacacgggcctgattcgtcgagtctcactgagccttagtcgtcggcaggtcccaggcgcgaagtttctcggcctggaggagggggtcgcgcgaagtgccagatgcaggcggggaagcccatcctctattcctatttccgaagctcctgctcatggagagttcgaattgctctggccttgaaaggcatcgactacgagacggtgcccatcaatctcataaaggatgggggccaacagttttctaaggacttccaggcactgaatcctatgaagcaggtgccaaccctgaagattgatggaatcaccattcaccagtcactggccatcattgagtatctagaggagacgcgtcccactccgcgacttctgcctcaggacccaaagaagagggccagcgtgcgtatgatttctgacctcatcgctggtggcatccagcccctgcagaacctgtctgtcctgaagcaagtgggagaggagatgcagctgacctgggcccagaacgccatcacttgtggctttaacgccctggagcagatcctacagagcacagcgggcatatactgtgtaggagacgaggtgaccatggctgatctgtgcttggtgcctcaggtggcaaatgctgaaagattcaaggtggatctcaccccctaccctaccatcagctccatcaacaagaggctgctggtcttggaggccttccaggtgtctcacccctgccggcagccagatacacccactgagctgagggcctagctcccaaatcctgccccgttggcacagggccacaggagcagaagctgggtgggctgaagnnggnangnagtctttnnggntggggtcnncttacnggttgctcgtgnatgtccctgtcctcattgacgcgtgggg

SEQ ID NO: 67541 - DNA, 1017 bp, Homo sapiens
aggcgcagagcatgtcgggaccgggagggccggccggcccggggcgggggggactgggcaggaggggtcgggctcagggaactgcaactcccagcagcccccaggtacggggcgtggctagggacgaggctgggtcgagccagaggcgaccggaaggatctttctagtccagcccctcgctttacccggacgaaagacacgggcctgattcgtcgagtctcactgagccttagtcgtcggcaggtcccaggcgcgaagtttctcggcctggaggagggggtcgcgcgaagtgccagatgcaggcggggaagcccatcctctattcctatttccgaagctcctgctcatggagagttcgaattgctctggccttgaaaggcatcgactacgagacggtgcccatcaatctcataaaggatgggggccaacagttttctaaggacttccaggcactgaatcctatgaagcaggtgccaaccctgaagattgatggaatcaccattcaccagtcactggccatcattgagtatctagaggagacgcgtcccactccgcgacttctgcctcaggacccaaagaagagggccagcgtgcgtatgatttctgacctcatcgctggtggcatccagcccctgcagaacctgtctgtcctgaagcaagtgggagaggagatgcagctgacctgggcccagaacgccatcacttgtggctttaacggtgagtcctcacctctgtgagctgccccacagtggcctcttagaggtatggccctcgcacacaggggcctgggtatctgaaccagcctcccaggctgctttgggcctgacagttgcatggatgagggcaggactggggaggcaatgggctgggtgggcatccagaccttagctccagcacttctgggaacctcggtccctgagcccacagcccttcatagctggatggcccaacttcagcttcactgcctactccagctgggaaaccaaggccagcacagcgccagccatcagagtgaga

SEQ ID NO: 67542 - DNA, 642 bp, Homo sapiens
aggcgcagagcatgtcgggaccgggagggccggccggcccggggcgggggggactgggcaggaggggtcgggctcagggaactgcaactcccagcagcccccaggtacggggcgtggctagggacgaggctgggtcgagccagaggcgaccggaaggatctttctagtccagcccctcgctttacccggacgaaagacacgggcctgattcgtcgagtctcactgagccttagtcgtcggcaggtcccaggcgcgaagtttctcggcctggaggagggggtcgcgcgaagtgccagatgcaggcggggaagcccatcctctattcctatttccggaactccttgtgggaagaagtttgcacctcggccctggctgcccaccatcagtgccccgcagtcagcagccattcctggcagtgaactctgccaggactgaagctgtggctttatccatcagctccctgggccttccccgcaacccacctcggggatctgaggatctggtgcatagatgaacatcatcccctcctcccccatacacacctaggcttgaaatgccctacaggcccagaactttctcacatctgaaatggaggcattgcaatgaaaaggcacccacagcatcatgcaagtggcatcttgt

SEQ ID NO: 67543 - DNA, 1324 bp, Homo sapiens
agttccgggagggttgggccagaggaggcggtcctggtagggagtgcgtagcagggtggagtcgctgtccggtcgcgcttcacttctgctccgccctccctgctccccataacagacccctccctccactaaggcttccaaacgtcgccccaagcctcccaatttctcgcagcccttcatgctcttctcttggccctagcaggagtggtcaccagcagtccctgtcccttggcaccaggagtccctgtagcctggctaggtaaggaaagggagttgcatctccaaataaggaagatccagttgtggccacccaattcctcctcttcgaaagacactttctgcccatcacctgctttctgtgccaggaccatctttactttctccacaaaagcccatcctctattcctatttccgaagctcctgctcatggagagttcgaattgctctggccttgaaaggcatcgactacgagacggtgcccatcaatctcataaaggatgggggccaacagttttctaaggacttccaggcactgaatcctatgaagcaggtgccaaccctgaagattgatggaatcaccattcaccagtcactggccatcattgagtatctagaggagacgcgtcccactccgcgacttctgcctcaggacccaaagaagagggccagcgtgcgtatgatttctgacctcatcgctggtggcatccagcccctgcagaacctgtctgtcctgaagcaagtgggagaggagatgcagctgacctgggcccagaacgccatcacttgtggctttaacgccctggagcagatcctacagagcacagcgggcatatactgtgtaggagacgaggtgaccatggctgatctgtgcttggtgcctcaggtggcaaatgctgaaagattcaaggtggatctcaccccctaccctaccatcagctccatcaacaagaggctgctggtcttggaggccttccaggtgtctcacccctgccggcagccagatacacccactgagctgagggcctagctcccaaatcctgccccgttggcacagggccacaggagcagaagctgggtgggctgaagaggcctggaaacgagagtcttaattgaggagatgggagactcgaactctagccctggatctgccttcctgctgaaacttgttccacctcagtcccctcatctgtcacacgcatgtggggtggagtagggagatgcggggagcagggtgggcaggaatactgttatctatgtgacggggcagtcgtgaggctgagatgagaatgcggattaaaatgcctggcgtgctcaccgtaacacc

SEQ ID NO: 67544 - DNA, 1603 bp, Homo sapiens
aggcgcagagcatgtcgggaccgggagggccggccggcccggggcgggggggactgggcaggaggggtcgggctcagggaactgcaactcccagcagcccccaggtacggggcgtggctagggacgaggctgggtcgagccagaggcgaccggaaggatctttctagtccagcccctcgctttacccggacgaaagacacgggcctgattcgtcgagtctcactgagccttagtcgtcggcaggtcccaggcgcgaagtttctcggcctggaggagggggtcgcgcgaagtgccagatgcaggcggggaagcccatcctctattcctatttccgaagctcctgctcatggagagttcgaattgctctggccttgaaaggcatcgactacgagacggtgcccatcaatctcataaaggatgggggccaacagttttctaaggacttccaggcactgaatcctatgaagcaggtgccaaccctgaagattgatggaatcaccattcaccagtcagtgagtgcagggcctgggggagggccctcatgagagcagtgccctgaatgagagcgcctgacatctcttcctcgcctgtgtacagtcaaggtgcctagcacataggagaggctcaatacaagactcgtggggagggtgcgaggttatttaggaaaataagggaagattcaagcacatggagaaccaagttctgcatgataaggtccaaaaaggcttatagggcttgagctgagcagaagcaggggggaagaggtgtagtgatggtgctggaagaggagaaggaggagtttgctggccctgtcccctctggtccaggggtcctgggccctctccctgcctcactgctcccctctggacagctggccatcattgagtatctagaggagacgcgtcccactccgcgacttctgcctcaggacccaaagaagagggccagcgtgcgtatgatttctgacctcatcgctggtggcatccagcccctgcagaacctgtctgtcctgaagcaagtgggagaggagatgcagctgacctgggcccagaacgccatcacttgtggctttaacgccctggagcagatcctacagagcacagcgggcatatactgtgtaggagacgaggtgaccatggctgatctgtgcttggtgcctcaggtggcaaatgctgaaagattcaaggtggatctcaccccctaccctaccatcagctccatcaacaagaggctgctggtcttggaggccttccaggtgtctcacccctgccggcagccagatacacccactgagctgagggcctagctcccaaatcctgccccgttggcacagggccacaggagcagaagctgggtgggctgaagaggcctggaaacgagagtcttaattgaggagatgggagactcgaactctagccctggatctgccttcctgctgaaacttgttccacctcagtcccctcatctgtcacacgcatgtggggtggagtagggagatgcggggagcagggtgggcaggaatactgttatctatgtgacggggcagtcgtgaggctgagatgagaatgcggattaaaatgcctggcgtgctcaccgtaacacc

SEQ ID NO: 67545 - DNA, 1066 bp, Homo sapiens
aggcgcagagcatgtcgggaccgggagggccggccggcccggggcgggggggactgggcaggaggggtcgggctcagggaactgcaactcccagcagcccccaggtacggggcgtggctagggacgaggctgggtcgagccagaggcgaccggaaggatctttctagtccagcccctcgctttacccggacgaaagacacgggcctgattcgtcgagtctcactgagccttagtcgtcggcaggtcccaggcgcgaagtttctcggcctggaggagggggtcgcgcgaagtgccagatgcaggcggggaagctctggccttgaaaggcatcgactacgagacggtgcccatcaatctcataaaggatgggggccaacagttttctaaggacttccaggcactgaatcctatgaagcaggtgccaaccctgaagattgatggaatcaccattcaccagtcaaacctgtctgtcctgaagcaagtgggagaggagatgcagctgacctgggcccagaacgccatcacttgtggctttaacgccctggagcagatcctacagagcacagcgggcatatactgtgtaggagacgaggtgaccatggctgatctgtgcttggtgcctcaggtggcaaatgctgaaagattcaaggtggatctcaccccctaccctaccatcagctccatcaacaagaggctgctggtcttggaggccttccaggtgtctcacccctgccggcagccagatacacccactgagctgagggcctagctcccaaatcctgccccgttggcacagggccacaggagcagaagctgggtgggctgaagaggcctggaaacgagagtcttaattgaggagatgggagactcgaactctagccctggatctgccttcctgctgaaacttgttccacctcagtcccctcatctgtcacacgcatgtggggtggagtagggagatgcggggagcagggtgggcaggaatactgttatctatgtgacggggcagtcgtgaggctgagatgagaatgcggattaaaatgcctggcgtgctcaccgtaacacc

SEQ ID NO: 67546 - DNA, 535 bp, Homo sapiens
cagtccagccactgactctggggtatgcaccctgatgggaacccaccgggacctctttcaggtgaccatggctgatctgtgcttggtgcctcaggtggcaaatgctgaaagattcaaggtggatctcaccccctaccctaccatcagctccatcaacaagaggctgctggtcttggaggccttccaggtgtctcacccctgccggcagccagatacacccactgagctgagggcctagctcccaaatcctgccccgttggcacagggccacaggagcagaagctgggtgggctgaagaggcctggaaacgagagtcttaattgaggagatgggagactcgaactctagccctggatctgccttcctgctgaaacttgttccacctcagtcccctcatctgtcacacgcatgtggggtggagtagggagatgcggggagcagggtgggcaggaatactgttatctatgtgacggggcagtcgtgaggctgagatgagaatgcggattaaaatgcctggcgtgctcaccgtaacacc

SEQ ID NO: 67547 - DNA, 450 bp, Homo sapiens
tggtcaccagcagtccctgtcccttggcaccaggagtccctgtagcctggctaggtaaggaaagggagttgcatctccaaataaggaagatccagttgtggccacccaattcctcctcttcgaaagacactttctgcccatcacctgctttctgtgccaggaccatctttactttctccacaaaaggtaccttcaggacaggctgggactgctgggcttgggaaccatcttggaagggcctaggttcccacttacacccttgccatctagcagactgagttggtagtacagggatggcaatagcaagttcagagagcagcttaatatgctaggggtggcagaggggagagggagctttggtgaaatgtctatagtcagaggggtagtaaacagggcatctgagaagttctttcaagttctcccctatccatagggatacacatgttttgg

SEQ ID NO: 67548 - DNA, 1244 bp, Homo sapiens
aggcgcagagcatgtcgggaccgggagggccggccggcccggggcgggggggactgggcaggaggggtcgggctcagggaactgcaactcccagcagcccccaggtacggggcgtggctagggacgaggctgggtcgagccagaggcgaccggaaggatctttctagtccagcccctcgctttacccggacgaaagacacgggcctgattcgtcgagtctcactgagccttagtcgtcggcaggtcccaggcgcgaagtttctcggcctggaggagggggtcgcgcgaagtgccagatgcaggcggggaagcccatcctctattcctatttccgaagctcctgctcatggagagttcgaattgctctggccttgaaaggcatcgactacgagacggtgcccatcaatctcataaaggatgggggccaacagttttctaaggacttccaggcactgaatcctatgaagcaggtgccaaccctgaagattgatggaatcaccattcaccagtcactggccatcattgagtatctagaggagacgcgtcccactccgcgacttctgcctcaggacccaaagaagagggccagcgtgcgtatgatttctgacctcatcgctggtggcatccagcccctgcagaacctgtctgtcctgaagcaagtgggagaggagatgcagctgacctgggcccagaacgccatcacttgtggctttaacgccctggagcagatcctacagagcacagcgggcatatactgtgtaggagacgaggtgaccatggctgatctgtgcttggtgcctcaggtggcaaatgctgaaagattcaaggtggatctcaccccctaccctaccatcagctccatcaacaagaggctgctggtcttggaggccttccaggtgtctcacccctgccggcagccagatacacccactgagctgagggcctagctcccaaatcctgccccgttggcacagggccacaggagcagaagctgggtgggctgaagaggcctggaaacgagagtcttaattgaggagatgggagactcgaactctagccctggatctgccttcctgctgaaacttgttccacctcagtcccctcatctgtcacacgcatgtggggtggagtagggagatgcggggagcagggtgggcaggaatactgttatctatgtgacggggcagtcgtgaggctgagatgagaatgcggattaaaatgcctggcgtgctcaccgtaacacc

SEQ ID NO: 67549 - DNA, 1349 bp, Homo sapiens
aggcgcagagcatgtcgggaccgggagggccggccggcccggggcgggggggactgggcaggaggggtcgggctcagggaactgcaactcccagcagcccccaggtacggggcgtggctagggacgaggctgggtcgagccagaggcgaccggaaggatctttctagtccagcccctcgctttacccggacgaaagacacgggcctgattcgtcgagtctcactgagccttagtcgtcggcaggtcccaggcgcgaagtttctcggcctggaggagggggtcgcgcgaagtgccagatgcaggcggggaagcccatcctctattcctatttccgaagctcctgctcatggagagttcgaattgctctggccttgaaaggcatcgactacgagacggtgcccatcaatctcataaaggatgggggccaacagttttctaaggacttccaggcactgaatcctatgaagcaggtgccaaccctgaagattgatggaatcaccattcaccagtcactggccatcattgagtatctagaggagacgcgtcccactccgcgacttctgcctcaggacccaaagaagagggccagcgtgcgtatgatttctgacctcatcgctggtggcatccagcccctgcagaacctgtctgtcctgaagcaagtgggagaggagatgcagctgacctgggcccagaacgccatcacttgtggctttaacgccctggagcagatcctacagagcacagcgggcatatactgtgtaggagacgaggtgaccatggctgatctgtgcttggtgcctcaggtggcaaatgctgaaagattcaaggtggatctcaccccctaccctaccatcagctccatcaacaagaggctgctggtcttggaggccttccaggtgtctcacccctgccggcagccagatacacccactgagctgagggcctagctcccaaatcctgccccgttggcacagggccacaggagcagaagctgggtgggctgaagaggcctggaaacgagagtcttaattgaggagatgggagactcgaactctagccctggatctgccttcctgctgaaacttgttccacctcagtcccctcatctgtcacacgcatgtggggtggagtagggagatgcggggagcagggtgggcaggaatactgttatctatgtgacggggcagtcgtgaggctgagatgagaatgcggattaaaatgcctggcgtgctcaccgtaacaccacggggaaggctgtgtgccttttctcatccgcttttgttgtgtgtgactccaaagaatgcccgcgctgaaatttggcgtgaattaaactgaagcccaggcctcta

SEQ ID NO: 67550 - DNA, 1031 bp, Homo sapiens
  misc_feature (952)..(952): n is a, c, g, or t
aggcgcagagcatgtcgggaccgggagggccggccggcccggggcgggggggactgggcaggaggggtcgggctcagggaactgcaactcccagcagcccccaggtacggggcgtggctagggacgaggctgggtcgagccagaggcgaccggaaggatctttctagtccagcccctcgctttacccggacgaaagacacgggcctgattcgtcgagtctcactgagccttagtcgtcggcaggtcccaggcgcgaagtttctcggcctggaggagggggtcgcgcgaagtgccagatgcaggcggggaagcccatcctctattcctatttccgaagctcctgctcatggagagttcgaattgctctggccttgaaaggcatcgactacgagacggtgcccatcaatctcataaaggatgggggccaacagttttctaaggacttccaggcactgaatcctatgaagcaggtgccaaccctgaagattgatggaatcaccattcaccagtcaaacctgtctgtcctgaagcaagtgggagaggagatgcagctgacctgggcccagaacgccatcacttgtggctttaacgccctggagcagatcctacagagcacagcgggcatatactgtgtaggagacgaggtgaccatggctgatctgtgcttggtgcctcaggtggcaaatgctgaaagattcaaggtggatctcaccccctaccctaccatcagctccatcaacaagaggctgctggtcttggaggccttccaggtgtctcacccctgccggcagccagatacacccactgagctgagggcctagctcccaaatcctgccccgttggcacagggccacaggagcagaagctgggtgggctgaagaggcctggaaacgagagtcttaattgaggagatgggagactcgaactctagccctggatcgctctgggaatngtccacccaagcccccatggcaagccgtgggggagggaggggcacggggggcaaatgattggggcacccggaaacccgc

SEQ ID NO: 67551 - DNA, 398 bp, Homo sapiens
agctctctcgagacctggctgccacattctcaccagcagccatgcccagtctgtcactcagttgggcgcccatttcataactatggaggccaaggcccagaaagctttgtgtcccctccctgcgcccagaataagatgtttatgtggcctccccacagccctggagcagatcctacagagcacagcgggcatatactgtgtaggagacgaggtaagctgtccccagacctccccaggcccagccacagtggctgcctccctcatgctgacctccctcaagctcagagcttcctgagaaggcgtctgcagggggatctctgtgccatggggcactcctcagctcactcccactaaaccgtcttaagagggagttactcaaggtagaagactggctgtga

SEQ ID NO: 67552 - DNA, 1192 bp, Homo sapiens
aggcgcagagcatgtcgggaccgggagggccggccggcccggggcgggggggactgggcaggaggggtcgggctcagggaactgcaactcccagcagcccccaggtacggggcgtggctagggacgaggctgggtcgagccagaggcgaccggaaggatctttctagtccagcccctcgctttacccggacgaaagacacgggcctgattcgtcgagtctcactgagccttagtcgtcggcaggtcccaggcgcgaagtttctcggcctggaggagggggtcgcgcgaagtgccagatgcaggcggggaagctctggccttgaaaggcatcgactacgagacggtgcccatcaatctcataaaggatgggggccaacagttttctaaggacttccaggcactgaatcctatgaagcaggtgccaaccctgaagattgatggaatcaccattcaccagtcactggccatcattgagtatctagaggagacgcgtcccactccgcgacttctgcctcaggacccaaagaagagggccagcgtgcgtatgatttctgacctcatcgctggtggcatccagcccctgcagaacctgtctgtcctgaagcaagtgggagaggagatgcagctgacctgggcccagaacgccatcacttgtggctttaacgccctggagcagatcctacagagcacagcgggcatatactgtgtaggagacgaggtgaccatggctgatctgtgcttggtgcctcaggtggcaaatgctgaaagattcaaggtggatctcaccccctaccctaccatcagctccatcaacaagaggctgctggtcttggaggccttccaggtgtctcacccctgccggcagccagatacacccactgagctgagggcctagctcccaaatcctgccccgttggcacagggccacaggagcagaagctgggtgggctgaagaggcctggaaacgagagtcttaattgaggagatgggagactcgaactctagccctggatctgccttcctgctgaaacttgttccacctcagtcccctcatctgtcacacgcatgtggggtggagtagggagatgcggggagcagggtgggcaggaatactgttatctatgtgacggggcagtcgtgaggctgagatgagaatgcggattaaaatgcctggcgtgctcaccgtaacacc

SEQ ID NO: 67553 - DNA, 1005 bp, Homo sapiens
aggcgcagagcatgtcgggaccgggagggccggccggcccggggcgggggggactgggcaggaggggtcgggctcagggaactgcaactcccagcagcccccaggtacggggcgtggctagggacgaggctgggtcgagccagaggcgaccggaaggatctttctagtccagcccctcgctttacccggacgaaagacacgggcctgattcgtcgagtctcactgagccttagtcgtcggcaggtcccaggcgcgaagtttctcggcctggaggagggggtcgcgcgaagtgccagatgcaggcggggaagcccatcctctattcctatttccgaagctcctgctcatggagagttcgaattgctctggccttgaaaggcatcgactacgagacggtgcccatcaatctcataaaggatgggggccaacagttttctaaggacttccaggcactgaatcctatgaagcaggtgccaaccctgaagattgatggaatcaccattcaccagtcactggccatcattgagtatctagaggagacgcgtcccactccgcgacttctgcctcaggacccaaagaagagggccagcgtgcgtatgatttctgacctcatcgctggtggcatccagcccctgcagaacctgtctgtcctgaagcaagtgggagaggagatgcagctgacctgggcccagaacgccatcacttgtggctttaacgccctggagcagatcctacagagcacagcgggcatatactgtgtaggagacgaggtgaccatggctgatctgtgcttggtgcctcaggtggcaaatgctgaaagagtgtgcagtggaattttccagagactatatgacatgtgataccgcaatagaatgaactcagaagcagagctgagaatccaactgccttttattaagccaaacattaaagagatttatgtctctctttgtactacattctttgctttgaaaattagttgtttttaagtaaaaacatgttttatat

SEQ ID NO: 67554 - DNA, 1047 bp, Homo sapiens
gacattactgctagtttataggaaacataagcaacaaaaaacaaggcaattagcaccacaaaaaaacaaccaggtacatctagatctaacagaacattccattttacagatgactcagtctccccacagattaacagtattaagaaaggagaataaaggagatataagtgacttaataaccagatatgctatatagaccttatttgtatcctgtttccaacaaccaactgtaacaagatatctttgagatatttaggaaaatatgaatgaatattagatgatttttagagaattattaattttgctatgtgtggtaatggtgtgccgatttatgttttttaaaaagttcttcagttagagatgtatatttaaatatttatgtgtgaactgccatgatgtctagaagtttctttaaaatactctagaaaaaagagtttagggagaaagctgaaagatgaaataagattggcaaaatatggaaactattgaagctggatggtaggtacacggaattcattacattattctctttacatttgtatatgtttgaaaaatttcataaggtacacaacaaaataaatgacatggtcacctcagttattttgctgaagttttgtcaatcaccccctgcttagctggagtttaccttctagtatcattctcagcaaaggctcacaggaatgctattctctgaattcttacatattcagcctgttggcctgttctcgaattgaaggacagcttgtctggttcatactttctctacatgagtgtattgtaagcattacttcattgtcttttgtcattgaatattgctgaggtggccacagcctgatttctgatgccatctctatttctttctttattactaacaagatgttttatcctatattctcattggtttctttatctttcatgtccaaaaatgttaaataggccttcaggtaggtctttttggaacgatttttcctgctacaagtttactctttcattgtggagaatcattttcttatatttcaataaaaaagttggaaaattttcaactta

SEQ ID NO: 67555 - DNA, 225 bp, Homo sapiens
ggatttatggaagtgtcggcctgaccaatgttaatttccctttcctgacattaataacagcagcagcagctaccatctgtgcaccttaccacgtgccaagcaccgtcctgagtgccttctatggcatgcctctttcagtcctctccacaatgccatgctctgtgcactattattatccctgttttacagatgagaaaactgaggataagaggttaaataactggc

SEQ ID NO: 67556 - DNA, 471 bp, Homo sapiens
gaattgcggaagtgaaatcaaatacggtcgttttagaactcaaatattctttgcagggtaaaaaggtcccaacttaagcatatgataaatatatagccaattaagcatgttttcagacagtgctgtgctgactagcacctaagtattcccatcaccactgaatttcacagacaccactaaaacaagagaaactacctaaactgctcaataatcctaattactgctgcatatttatgcaagttggtactacagaaataggctctaggagaatcaaataatgcaaatactaaccacgtaattacttttatggttgatatatattcttctaaagcaattcttttacaaataaatacttcatttgaagctggaataagccgtttaaaaactgtaaccttttaactgtccaaagaatttcattgagattttcgcaaattattcaattaaatcaatgaatttgagagcttgaagaga

SEQ ID NO: 67557 - DNA, 2450 bp, Homo sapiens
  misc_feature (269)..(269): n is a, c, g, or t
  misc_feature (695)..(695): n is a, c, g, or t
attagtgggcctgtagactgacttacccaatctgctggtatttgtctgcccatgagcaggacggtatggaactacgtaagtttgagggggaagagggaggcaggaaacctttgccatgcagtggactagccacggaagacagaccctcaggtgctcctgaggaatggaggttggaacagcaggagcaggaaggaagaaggccttgctggggaaggcctcgggtctcacacagtcccgtctaccactctgtggaagtgagcctgaggccnggacaggaagagccacactggagagctgaatatataagaaacgcatcttggccagaatagaaggcacaacctggagtgtaactaaagatgaaactttccctggagagtttgctgatggacacccataaatgtccagatactactcactggttaaggaatctgacctctggaggcctggaaatccactcctttttgtcagcatgccttctcctgtgctggggagggagaggcctccttagaccctcgggtcccactccctgcttagagttgtgctgtatcacccattggtccttccagcatcatgcccctgtcctgttctggagacgtgggagactcccatcgcctgtcctccttgcctgccaggggaaggcttcctgcggggcccctctccccggtgcagcctcacgtcttaccgctgagcaatgncgtctccactccagcctctttgaaacaccagcaccccctgctctcctgccttgctgcctttgttcatgacatttctcaccagcggccaaccagctccaacctctccactttcgcaagagctgggagatcccacttctggaagctctctgtgaccatcccaaccagaagcaccgtgtccctcccctgagctccagcactggccccgtgccggcaccactctttagtattttatattactttgctttctgtgcacatttcttacttccacatgtagctgactagcaccttggaggcagcagccgtatttttcagtccccacacctctagcactgtgcttaagtgagtgtttgagtggttcttaggattctcaataaagtggctgagttgccatgacccaggagagctcctggcgctgtcaccagagtgactctcagcgtggatccacaaatgaggaaacaccagtgagttctgtgctgtgctgcagaggtgtgggaaagagtggtgtcattgcgagcagaatggtggtatactcggtagataaacgtggaaatttgtaaccagatggcttcagtcatcggcaggttcactgtaaacataaaagctttagtccttgagccaaggggatggaatctatcagacctcaaggaaagggaaacctgctctgtgttctgaaaatgacctagaggtatccctcttgataaactggcaggtgggagggcagaggtaatgtggtggaagttttcttttcttttagttttatttccttattttgggaataggtaattatagtcacatggtttaaaattcaaaagttacaaggggatataaatgtctccctcccaccttgtccccagaggtggctgtttcgatcagagccttgtttctagacgtgtgtgtgtgtatgtgtacgcatgtgtgtgtatgcacaagtagttttgggttctcttttcttggtggtgtacagaagggtagtcaaagcccgactcatgatccctaactcgagtcttttaatgggattgtgtcctaactgcaaaacccgcctcaccaactttgttataaactccccgggtttatagggacagtcatctactgtcccttcctaacagcatggtgcagaaacactccataaatgagtcttgtgttgaatcagattgaattaagtgagaaaggaatggcggtgaaaaatgtggctttagtcatcacatgggcctacgggtttgtgaaagtaacattgagtctccttgtgttctgtgtgtactgcatgtatgtcatcttgcatctaaggatgtatattacccataaaggagcatgcagacacatgagtgcatcttggcttgccactaactgcctgtggccttggggctgtcactcaacttttcatctggaaattgagaataataatactattatccttctggaattgtgtgcataaatgcacagggcctggctcataaaaagtactcagtgagggccgggcgcggtggcgcacgcctgtaatcccagcactttgggaggccgaggggtgcagattacgaggtcaagagatcgagaccatcctggctaacacggtgaaaccctgtctctactaaaaatacaaaaacaaaattagccgggcatggttgcggtgtgcctgtagtcccagctactcaggaggctgaggcaggagaatggcctgaacctgggaggtggagcttgcagtgagccgagatcgtgccactgcactccagccggggtgacagagcgagactccgtctc

SEQ ID NO: 67558 - DNA, 681 bp, Homo sapiens
cacctgactttgccacaaaacattctccacagtcaatgcccatcacgtcagggaacatttttttaagtggttctattttgaggcctgctaaaaagattccagtcttttagaatggatctgcttggccccctttcattcagtccctgaccgtacgatcgcccacatgcctgagctgacgcggggcctgcgtcccacatgctctgggctcacttcccctgctccactgtcaggctaagaatttgcaagtccacagaacaacttgctgagaaaatacccaaaggcctatgtcttgtttattaaatcatttttgatgaacgtgcgctgattgcacacagaccctatcacgagacaaacacttctgaaactgtgctcttacttcatgtcttttgaataaagaaattcagcaaatgtacccataggaaggcatgggccctaccaaatacttgcctggatgactgaattcacctacagcccatcaacgtatccatttcattgagtgcttattttcaaatacattattgcttcccaagagaaagcatacccaccttacactggaaagcactttatagtttgcaagaaatccttttaatgatcatgaattaaagtggggaagatatgttgcttacattgctttacaaatacagaaaatgagatttgttcaagtttacgcagagactcaat

SEQ ID NO: 67559 - DNA, 397 bp, Homo sapiens
ccagctgctgggcaggttgaggtaaggagtttcaaactagcagactgcaaagtggaggacagggaagggtattccaggcagaggaagcaaaggcctgaagtcaaagaaagcacagtcaattgagaagttgtagtcatttcagaaagatatgaatgaaggatgtttacattatccagtttttggtgactattgttttgctacttcactagtgtatattattgagatttgactatacttgctagagcacagaaagttaaaggctttattttatagcaataattctcttttaaggtgaagacatcagaaattatacttcctgtccagagattctaaggagaaaatgtaaattaaacctgacctttgagttagcaaatgattgataactctctgtcctata

SEQ ID NO: 67560 - DNA, 997 bp, Homo sapiens
  misc_feature (27)..(27): n is a, c, g, or t
  misc_feature (872)..(873): n is a, c, g, or t
  misc_feature (889)..(891): n is a, c, g, or t
  misc_feature (896)..(896): n is a, c, g, or t
  misc_feature (907)..(908): n is a, c, g, or t
  misc_feature (915)..(915): n is a, c, g, or t
  misc_feature (924)..(924): n is a, c, g, or t
caagaaaggctaggtcgagcctggttnaatcggccgaggtgctctggaaggagaggacggggcacaaaccctgaccatgaccccccacaggctgctgccaccgctgctgctgctgctagctctgctgctcgctgccagcccaggaggcgccttggcgcggtgcccaggctgcgggcaaggggtgcaggcgggttgtccagggggctgcgtggaggaggaggatggggggtcgccagccgagggctgcgcggaagctgagggctgtctcaggagggaggggcaggagtgcggggtctacacccctaactgcgccccaggactgcagtgccatccgcccaaggacgacgaggcgcctttgcgggcgctgctgctcggccgaggccgctgccttccggcccgcgcgcctgctgttgcagaggagaatcctaaggagagtaaaccccaagcaggcactgcccgcccacaggatgtgaaccgcagagaccaacagaggaatccaggcacctctaccacgccctcccagcccaattctgcgggtgtccaagacactgagatgggcccatgccgtagacatctggactcagtgctgcagcaactccagactgaggtctaccgaggggctcaaacactctacgtgcccaattgtgaccatcgaggcttctaccggaagcggcagtgccgctcctcccaggggcagcgccgaggtccctgctggtgtgtggatcggatgggcaagtccctgccagggtctccagatggcaatggaagctcctcctgccccactgggagtagcggctaaagctgggggatagaggggctgcagggccactggaaggaacatggagctgtcatcactcaacaaaacgaggctnnatcacttaggccgccnnnggccntacgtgttgannatttgtntgggggtgnaaaaggctgctgggtcaaaacaaaataaataaaagaaaaacaacttttgggaaaaagtggggaactaaggacg

SEQ ID NO: 67561 - DNA, 244 bp, Homo sapiens
  misc_feature (79)..(79): n is a, c, g, or t
ctatgatctgagcaagcaggagataacattttcttctgcatcaagtgaggaaaaatgtgcttttggccatgtctcaaanacagagctctgccgaattcggcacgagggaacatggagctgtcatcactcaacaaaaaaccgaggccctcaatccaccttcaggccccgccccatgggcccctcaccgctggttggaaagagtgttggtgttggctggggtgtcaataaagctgtgcttggggtc

SEQ ID NO: 67562 - DNA, 1507 bp, Homo sapiens
acttaagacagaggggcggcggcgggcagcagctgcgctgcgactgctctggaaggagaggacggggcacaaaccctgaccatgaccccccacaggctgctgccaccgctgctgctgctgctagctctgctgctcgctgccagcccaggaggcgccttggcgcggtgcccaggctgcgggcaaggggtgcaggcgggttgtccagggggctgcgtggaggaggaggatggggggtcgccagccgagggctgcgcggaagctgagggctgtctcaggagggaggggcaggagtgcggggtctacacccctaactgcgccccaggactgcagtgccatccgcccaaggacgacgaggcgcctttgcgggcgctgctgctcggccgaggccgctgccttccggcccgcgcgcctgctgttgcagaggagaatcctaaggagagtaaaccccaagcaggcactgcccgcccacaggatgtgaaccgcagagaccaacagaggaatccaggcacctctaccacgccctcccagcccaattctgcgggtgtccaagacactgagatgggcccatgccgtagacatctggactcagtgctgcagcaactccagactgaggtctaccgaggggctcaaacactctacgtgcccaattgtgaccatcgaggcttctaccggaagcggcagtgccgctcctcccaggggcagcgccgaggtccctgctggtgtgtggatcggatgggcaagtccctgccagggtctccagatggcaatggaagctcctcctgccccactgggagtagcggctaaagctgggggatagaggggctgcagggccactggaaggaacatggagctgtcatcactcaacaaaaaaccgaggccctcaatccaccttcaggccccgccccatgggcccctcaccgctggttggaaagagtgttggtgttggctggggtgtcaataaagctgtgcttggggtcaaaaaacaaaaaaaaaaaaaaaaaaaaaaaaaaaaaaaacacaaaaaaaaaaaaaaaaaaaaaaaaaaaaaaaaaaaaaaaaaaaaaaaaaaaaaaaaagcaaagggggggggggcgcgcgaaaaaaatctccccggcggggggcccgcaattgtgaccgccccaccctgctgtttgttggtgcaacagcaggcggcccccctatgagggggccatccaataatatagacgcccgagcgggaggggggggtgatttaaaacaccggtggggtgaggggagaacatcgtcattgagtgagggatcttgttgtggggcgagcaccccaccatctgtgggggggggggaggcaacacagagtggtggggagccaatcaaaccgcgaacagacaaataataagcggctggtgggggagattaatataacatgtgtgagcaggtgtaggtgtgcggagacaccaccaggctgtataatgtcggtgtgaaaaaatgtgatgtggaggggagttttgaatttgaaaatattgagagg

SEQ ID NO: 67563 - DNA, 1028 bp, Homo sapiens
acttaagacagaggggcggcggcgggcagcagctgcgctgcgactgctctggaaggagaggacggggcacaaaccctgaccatgaccccccacaggctgctgccaccgctgctgctgctgctagctctgctgctcgctgccagcccaggaggcgccttggcgcggtgcccaggctgcgggcaaggggtgcaggcgggttgtccagggggctgcgtggaggaggaggatggggggtcgccagccgagggctgcgcggaagctgagggctgtctcaggagggaggggcaggagtgcggggtctacacccctaactgcgccccaggactgcagtgccatccgcccaaggacgacgaggcgcctttgcgggcgctgctgctcggccgaggccgctgccttccggcccgcgcgcctgctgttgcagaggagaatcctaaggagagtaaaccccaagcaggcactgcccgcccacaggatgtgaaccgcagagaccaacagaggaatccaggcacctctaccacgccctcccagcccaattctgcgggtgtccaagacactgagatgggcccatgccgtagacatctggactcagtgctgcagcaactccagactgaggtctaccgaggggctcaaacactctacgtgcccaattgtgaccatcgaggcttctaccggaagcggcagtgccgctcctcccaggggcagcgccgaggtccctgctggtgtgtggatcggatgggcaagtccctgccagggtctccagatggcaatggaagctcctcctgccccactgggagtagcggctaaagctgggggatagaggggctgcagggccactggaaggaacatggagctgtcatcactcaacaaaaaaccgaggccctcaatccaccttcaggccccgccccatgggcccctcaccgctggttggaaagagtgttggtgttggctggggtgtcaataaagctgtgcttggggtctccgataatctgaaccaataaccgaatcccctcgtggggggggcccgggcc

SEQ ID NO: 67564 - DNA, 937 bp, Homo sapiens
  misc_feature (875)..(875): n is a, c, g, or t
acttaagacagaggggcggcggcgggcagcagctgcgctgcgactgctctggaaggagaggacggggcacaaaccctgaccatgaccccccacaggctgctgccaccgctgctgctgctgctagctctgctgctcgctgccagcccaggaggcgccttggcgcggtgcccaggctgcgggcaaggggtgcaggcgggttgtccagggggctgcgtggaggaggaggatggggggtcgccagccgagggctgcgcggaagctgagggctgtctcaggagggaggggcaggagtgcggggtctacacccctaactgcgccccaggactgcagtgccatccgcccaaggacgacgaggcgcctttgcgggcgctgctgctcggccgaggccgctgccttccggcccgcgcgcctgctgttgcagaggagaatcctaaggagagtaaaccccaagcaggcactgcccgcccacaggatgtgaaccgcagagaccaacagaggaatccaggcacctctaccacgccctcccagcccaattctgcgggtgtccaagacactgagatgggcccatgccgtagacatctggactcagtgctgcagcaactccagactgaggtctaccgaggggctcaaacactctacgtgcccaattgtgaccatcgaggcttctaccggaagcggcagtgccgctcctcccaggggcagcgccgaggtccctgctggtgtgtggatcggatgggcaagtccctgccagggtctccagatggcaatggaagctcctcctgccccactgggagtagcggctaaagctgggggatagaggggctgcagggccactggaaggaacatggagctgtcatcactcaacaaaacgggcntcatacttaggccgcccatgcctaacgtttgaaagttcggtgggggtcaaagcgtctggcca

SEQ ID NO: 67565 - DNA, 977 bp, Homo sapiens
acttaagacagaggggcggcggcgggcagcagctgcgctgcgactgctctggaaggagaggacggggcacaaaccctgaccatgaccccccacaggctgctgccaccgctgctgctgctgctagctctgctgctcgctgccagcccaggaggcgccttggcgcggtgcccaggctgcgggcaaggggtgcaggcgggttgtccagggggctgcgtggaggaggaggatggggggtcgccagccgagggctgcgcggaagctgagggctgtctcaggagggaggggcaggagtgcggggtctacacccctaactgcgccccaggactgcagtgccatccgcccaaggacgacgaggcgcctttgcgggcgctgctgctcggccgaggccgctgccttccggcccgcgcgcctgctgttgcagaggagaatcctaaggagagtaaaccccaagcaggcactgcccgcccacaggatgtgaaccgcagagaccaacagaggaatccaggcacctctaccacgccctcccagcccaattctgcgggtgtccaagacactgagatgggcccatgccgtagacatctggactcagtgctgcagcaactccagactgaggtctaccgaggggctcaaacactctacgtgcccaattgtgaccatcgaggcttctaccggaagcggcagtgccgctcctcccaggggcagcgccgaggtccctgctggtgtgtggatcggatgggcaagtccctgccagggtctccagatggcaatggaagctcctcctgccccactgggagtagcggctaaagctgggggatagaggggctgcagggccactggaaggaacatggagctgtcatcactcaacaaaaaaccgaggccctcaatccaccttcaggccccgccccatgggcccctcaccgctggttggaaagagtgttggtgttggctggggtgtcaataaagctgtgcttggggtc

SEQ ID NO: 67566 - DNA, 953 bp, Homo sapiens
  misc_feature (27)..(27): n is a, c, g, or t
caagaaaggctaggtcgagcctggttnaatcggccgaggggggcacaaaccctgaccatgaccccccacaggctgctgccaccgctgctgctgctgctagctctgctgctcgctgccagcccaggaggcgccttggcgcggtgcccaggctgcgggcaaggggtgcaggcgggttgtccagggggctgcgtggaggaggaggatggggggtcgccagccgagggctgcgcggaagctgagggctgtctcaggagggaggggcaggagtgcggggtctacacccctaactgcgccccaggactgcagtgccatccgcccaaggacgacgaggcgcctttgcgggcgctgctgctcggccgaggccgctgccttccggcccgcgcgcctgctgttgcagaggagaatcctaaggagagtaaaccccaagcaggcactgcccgcccacaggatgtgaaccgcagagaccaacagaggaatccaggcacctctaccacgccctcccagcccaattctgcgggtgtccaagacactgagatgggcccatgccgtagacatctggactcagtgctgcagcaactccagactgaggtctaccgaggggctcaaacactctacgtgcccaattgtgaccatcgaggcttctaccggaagcggcagtgccgctcctcccaggggcagcgccgaggtccctgctggtgtgtggatcggatgggcaagtccctgccagggtctccagatggcaatggaagctcctcctgccccactgggagtagcggctaaagctgggggatagaggggctgcagggccactggaaggaacatggagctgtcatcactcaacaaaaaaccgaggccctcaatccaccttcaggccccgccccatgggcccctcaccgctggttggaaagagtgttggtgttggctggggtgtcaataaagctgtgcttggggtc

SEQ ID NO: 67567 - DNA, 751 bp, Homo sapiens
  misc_feature (1)..(1): n is a, c, g, or t
ngtcactctagaggattcccattggatatgcggatatgggctgtctcaggagggaggggcaggagtgcggggtctacacccctaactgcgccccaggactgcagtgccatccgcccaaggacgacgaggcgcctttgcgggcgctgctgctcggccgaggccgctgccttccggcccgcgcgcctgctgttgcagaggagaatcctaaggagagtaaaccccaagcaggcactgcccgcccacaggatgtgaaccgcagagaccaacagaggaatccaggcacctctaccacgccctcccagcccaattctgcgggtgtccaagacactgagatgggcccatgccgtagacatctggactcagtgctgcagcaactccagactgaggtctaccgaggggctcaaacactctacgtgcccaattgtgaccatcgaggcttctaccggaagcggcagtgccgctcctcccaggggcagcgccgaggtccctgctggtgtgtggatcggatgggcaagtccctgccagggtctccagatggcaatggaagctcctcctgccccactgggagtagcggctaaagctgggggatagaggggctgcagggccactggaaggaacatggagctgtcatcactcaacaaaaaaccgaggccctcaatccaccttcaggccccgccccatgggcccctcaccgctggttggaaagagtgttggtgttggctggggtgtcaataaagctgtgcttggggtc

SEQ ID NO: 67568 - DNA, 1002 bp, Homo sapiens
  misc_feature (877)..(878): n is a, c, g, or t
  misc_feature (894)..(896): n is a, c, g, or t
  misc_feature (901)..(901): n is a, c, g, or t
  misc_feature (912)..(913): n is a, c, g, or t
  misc_feature (920)..(920): n is a, c, g, or t
  misc_feature (929)..(929): n is a, c, g, or t
acttaagacagaggggcggcggcgggcagcagctgcgctgcgactgctctggaaggagaggacggggcacaaaccctgaccatgaccccccacaggctgctgccaccgctgctgctgctgctagctctgctgctcgctgccagcccaggaggcgccttggcgcggtgcccaggctgcgggcaaggggtgcaggcgggttgtccagggggctgcgtggaggaggaggatggggggtcgccagccgagggctgcgcggaagctgagggctgtctcaggagggaggggcaggagtgcggggtctacacccctaactgcgccccaggactgcagtgccatccgcccaaggacgacgaggcgcctttgcgggcgctgctgctcggccgaggccgctgccttccggcccgcgcgcctgctgttgcagaggagaatcctaaggagagtaaaccccaagcaggcactgcccgcccacaggatgtgaaccgcagagaccaacagaggaatccaggcacctctaccacgccctcccagcccaattctgcgggtgtccaagacactgagatgggcccatgccgtagacatctggactcagtgctgcagcaactccagactgaggtctaccgaggggctcaaacactctacgtgcccaattgtgaccatcgaggcttctaccggaagcggcagtgccgctcctcccaggggcagcgccgaggtccctgctggtgtgtggatcggatgggcaagtccctgccagggtctccagatggcaatggaagctcctcctgccccactgggagtagcggctaaagctgggggatagaggggctgcagggccactggaaggaacatggagctgtcatcactcaacaaaacgaggctnnatcacttaggccgccnnnggccntacgtgttgannatttgtntgggggtgnaaaaggctgctgggtcaaaacaaaataaataaaagaaaaacaacttttgggaaaaagtggggaactaaggacg

SEQ ID NO: 67569 - DNA, 489 bp, Homo sapiens
caaaatgctaattattattattagtgctcatagttagagcaaaccaatatggcttagtgctcctttgtccttctgatgattgactattttgactgtcttccccaggctcctggtccccaccccacccccagggcaagcaagtgccttcacagacctcttcagcaccttccgcgcccgcccatcccacacttgcactcgataccagtcggttcagggaagaagggagcaagcttggaaagatggtgcaggttgccatggcaatgatgggggaggaggggtggatgcccagcagagcctggccaaggattcagggcagagaaagctcacttcattaccatattttactacactggcccagtctgccgacggttgcaccccagaagtgccttggtatcagaggcgagtagatggagggcaggagttggggaaaaggagacattgagaaggctgttggcgagaagaaggccaaggtctgtggaaagtagaagg

SEQ ID NO: 67570 - DNA, 458 bp, Homo sapiens
ataatagtgaaaaactggaattaaatatccattaataggaggatacaaatcaatgtgtttgatttattgataaaagaagatgaccacgctagattaagcgacaagagttggttgctgaagagtatgaatggacattattgtcccatagaactgtctgcaatgatgaaaatagtctatacctgtgtggtcctatacagtagccgctagctacttatggccactgagcacttgaaatgtggccagtgtgacaggggatctcaattttaaattgtatttaactttactaaatctaaatagccacatgtggctagtggttactgtgttgcattgcacagcagtagaatgtaagcccagcgggaacaaagatctttaattacaatgaattggaacttcccaaaacagtgcttgtgcttggcatatggaaggagctcaataaatagttgctgaatgaaacaatt

SEQ ID NO: 67571 - DNA, 353 bp, Homo sapiens
tgtatcactgccacattgcttgtctgaagcgaagctgactcactttgttatcataagtgatcttaccaaagaccaagttgtccagttgccttggagtgtaggtcatgcgttgccggtaccctggggctgtgtacaatggccaggctgaggggaccttgtggttacccccatgggacttgtaacttgtcaagtgggaaggtggtaccaagtgaagaagggtagggtccttggttttggcctcacgtggttcttcccagaatgaatggtgaaaaaattataattctgcagaaaaatttaaattctattttgtttactttttggatgggagataggtgtacacatggcactaaaat

SEQ ID NO: 67572 - DNA, 345 bp, Homo sapiens
tagagcatctgtgtgaattactttttaacttaaattccagttagcctcttagggatttttaggaaaaaaaaatctgctgtcgtgatttatacctaacgaaggagtagtgtcatgagtgtgtaaaaaacgacatacaaaggggaatagaacagagtagagaaggtgaataactactaaatctgcaaggaacacaaggtagtgtggtgttgatattttctgttaggagatatacccatttgttcctttagatcatatgccttatatgagaaggtgacgttacataaatatggtagctgagtctgggtctcagctaggaaatgctgattggataaaaaatttgacttt

SEQ ID NO: 67573 - DNA, 869 bp, Homo sapiens
gaacatgaggtggtagtaaatggatgcatgtgagtgtgagtgctggcctaccgtgtgcatcgggacccaaaggaaaggaatcaggaccagaattcacctgcagaacatttaagttggaaatgtcttgttgcctgtggtttggtctaatactgaaatcagccttaagtcaaaatctttcaggtagttgccataatacgcacgcattgaattataatccccataacataaaaacctcaaagttctagtacagacaaccagagagagacctcggtctcgattcgattttcttcctgactcaaccttgtgcttttaagcggatctctcctattctcttcttctttgaagtggctgacagtgctgacctgacaatcacagacactagaagatattaatgagacaatgcacataaagtaataaagtaaggcttttttttggcacaacggtgttataaaagttactgatttatcaagataccttgttttcatatgtgtgtgtttcattcagttcacacaacaatcctgtgaattaattggctgtgctggaacctgaacctggaattcctacctactcatccattatttattctactgtacaatacttctctgcttccagtactggcagactaatttgacgtttagtcaagctgccacatgcagttgcatgggttgtgcactgcaccatatctgaggggtaacattcatatcagagacacgcatttattatggcagttttctggaaggtggcaacactatatcttgttttgtcttcttaaaatttgtttattctgatgattttctgtggggtggatagaagtaaagtatcttaaaggatttgcacttgttactaattcacagaaagttattgcatgg

SEQ ID NO: 67574 - DNA, 275 bp, Homo sapiens
aagtttagggacaaagtagcttcctcggtttgctgtatatggtgtaaaatataaggtaaaaccctcatgtttgtacattgaactgatttgtttctgtgccatttcccattagtttttgtcttaggcaattaggggaaggcaaattatttttactcattttaaatgtcaatattacatatgttacaggatatgtaatggattttccattctatagtctgtgattttttttttctaatgggattgcctgaataagacaaaatgtttttaagttaatt

SEQ ID NO: 67575 - DNA, 257 bp, Homo sapiens
ggcacgacacccatgttgtcatggcttaatatcagagttagcatcaaggagccctccaaagaggaccacaacgaacaccaccgacagtacttcagagttggtgttgaccctgatcaagatccaccacccaacaatgacagctttcaagtcttacaaggggacagcccagattctgccagaggaaactggacaaaacaggagagcacatggatattcaggcggtggtacagctttgatcacaattacctgaagcccat

SEQ ID NO: 67576 - DNA, 2361 bp, Homo sapiens
  misc_feature (1244)..(1244): n is a, c, g, or t
  misc_feature (1647)..(1647): n is a, c, g, or t
gggagtaataacattttgggggagctttttaaatttcacagaagaggaaagttgcctgctctggcaggtatgtgcaagatagagtgtgtttcatttgttctgttgccaagaattagtgctgtactattgtagttcctttaggatttgtatgtgctctgggctcatgaagatattgcatcatgagcttcagcagttgtactcttttttgatgacctaaaaagggcttatttctgaggaatgaaaggttcccatcattgactacggatgtggaaaacctttcctagcttagagcatttgtatctatattttaaagtcagagttcatgttacctgttttaatcacatgactgcatgtcccagtacacaaaagggcactggttggcattcttcttaatgtatttagtaaagatcataagaaatcctttaagagttcaaatgtccctggaacaggcatacaggctctagtcaagaatgaattagagtgaaggaaagctgtgtgacacctggcattcctctgttcatggagcttctttgaggcttgaagattgattttaccatctagaccactctgcctattcttcaaccaccttggttactttgacataggaattgacttcttttccttgaatggaaaacactttgaaataataataaacattgttataaactaatatatgtgagagtgcttagttgaaacaaaaaggagttttagtagacagtattatactatctttgaaaatcaaggagaagtttatgcaacttaaaatgtgtacaaactgcagtgcaatctactgttggtgaatgtcagtgtattatcaggaaacatgtctatacaatcacagagttatatttcctcacaaacttctttgtgaagagtgaaatgtgtttctgtacctctgggtttcacttacgggcatattttgtgcagtatttatgtgattgtgcctatgcatgatgaatgaatgaatttcagttgtacattgcctaaatcataacttgatgatgcttgggaaagactcaacagttaaaacttcatgaagttctaatgtctgtgttccaaaacacatcacattattaggatgtagggagatatgtatgtgtgctccctggggtggggatttctagttactagaccatctccatttttagcatttggcatcctcatgatacttttataaatacgacattaacaggagagcagcagtacgattttgccgatggaataacagatttgccggcaatcantgaaagagtgcaaacatcgggtccttgtgacttcaacggactcttccaaattgtatgaatgtatcaatgtattagataaacccagtttcagaatgataaagaaaaaatgttagaccaaataatgcggctagttaacagtggtacgatttctcgcccgtggctttaaaatgcacttaaagtcctgtccttgccttttattttctgaacttgatgtttttgcattctttgagttcagtttaaagacaactacgagcatctgtaaccaatctgacaataatgtgttcatcaggtgcctgtggattaaatcacatactggcatatttaagctgaatgtcaatctggaaaataaattgactgtattaacggaaataccactctttgtgtagatatttgtcgtatattnaagaaaaagctaaaaagaatggaaatcgcatgactataacttaagtctttcttcaaagtgcatgcagtcttttgcgatacctcattcagccaagtattggtattcttcctcattcggtataaggcagctttcaatttgcttagagggcaacattggaaggttagagttcatcagaaacagaattctaaaatgtgagttcaattcaataaatttgaatttctgtaggaagaatcaaatcaccgatttaaagattgcaatatataataatcatttttaaagtattggattaaatctgataggttttccagaaatgaacaaaaatcagctctaaaaccaaagctgatttttagaaaatttgaaaatgtaaatcagccctatccatactatagtttctctaaaactttatctgaaagagtcattttaaaataactattaaacaatgtaactgctatcttaatgttctgaaataagttaaaacattttaaaatatgaatactgtaaaggaaataaacggtgggaaggaaaagtagagaaagaaatgccaattccagtccaaagctttatttgccaagttttcttagaatgaattttaccaatttatgaattcttgtaagcggaatgtaaaacggaaatactgaaagacttttgcctaaagtggcattattgactgctggtgtgatgctactgtaatgtaataaattattaagttgttgc

SEQ ID NO: 67577 - DNA, 355 bp, Homo sapiens
gattttaaaatatgaatactgtaaaggaaataaacggtgggaaggaaaagtagagaaagaaatgttttaacttatttcagaacattaagatagcagttacattgtttaatagttaaaacattttaaaatatgaatactgtaaaggaaataaacggtgggaaggaaaagtagagaaagaaatgccaattccagtccaaagctttatttgccaagttttcttagaatgaattttaccaatttatgaattcttgtaagcggaatgtaaaacggaaatactgaaagacttttgcctaaagtggcattattgactgctggtgtgatgctactgtaatgtaataaattattaagttgttgc

SEQ ID NO: 67578 - DNA, 1422 bp, Homo sapiens
tcactaatattttttcagaagatgacgcctcatttagaggataaaatattttaagttattttgatattcaagaggagcattattgggactgtttcagattttatcaccgtgatgtgttaaccctattgccaaatattctctaacatgtacccagtgaattcacacatcttgctgagcttctgaaaacaataggttctttccaaaggggatcaagtggccctgggagacccggcaacaaaccaaaaagaagggctgttgctgtgtctgtttacaacttttccagatgctggcagtacctgtggacttaaaagtgttttttagaggatcgccatggttattgatcactactttatgaactaaacagcattttccagaaaaagggggtttaacttgttacagaattggagaagtctttgcaaaggactgatttaagcccttctacccaacaccttcccctgtgtagatttgcatacagctaaatctaaaatattctgctaaagactattggatgtatggttgatgggatgaaacctttgattaaatttccttttggtggagacatcctgtggtaggtacagataatccaacaagagtccccatttctttgagcttaaaaaggacactgtcgagtaggtaggaggaaacctggcagagccccttatttttggcctaaaaggactgagcaccaagatgtcttttgaagttttaagctaagaggtttccagtgcaatacaatatatacaagtgaagtttttacctcagttttgcaatggactgcaaactatacttattacaccactacaccttctctcaagcctgccagggcctccatttatgtatgtggcttacagcttaaagtcagtagttggactactatatgaactgttactatcatgttttataccggtcgtaaatgcactccccaaactacaggaaagcggtatgtttattttttaaaccagcttttaattttcttagtattatttattgtagatgcaactgtttttattctgttggggggcttgggattattgcacttaactttgcagtttgagtgaactgtgttgaaaaagttaatgaaagcagttggtactcagacaaatagctgaaaactagtgaatgctaggttgttatcaagtttttatttgacattaaggttaaaaagatatatttattttctaaatattttggactttttttttgtttaactctttattagctgctaagtaaattgaagtgtatttaatgatgtgttaagttaacccgatttatggaagacagtaaagaacagccctctgtagtcagtaaagtttcaccttctaaagaatatattttgaattagttttatgaactctgttaaaattctgacccattacttgccaatttataaaagcctattttattacaaggcattgtctctgg

SEQ ID NO: 67579 - DNA, 848 bp, Homo sapiens
agggcatttcgggagcgggattgtttcgcgcaggaagcaggctccattttagcgccgcccgccgtcgccatctgtttcccttccctcccccatacctagcccgagtctgagccctaacgagaaggctgggcctaggccgctggatgctggagtgaaaggaagggagaaagggaaaaagcgggaagagtcgagaaggctgagtgttaagaggccaagtgcgacgcgcgtatccgggcagacggactgacggacgggcccgtgcttctgccgcggctgcggcgcccgcgcgagtcgcgtctaagcggcggcggcggtggcagcggcggaaaccgaaggggagccatggcggctgacagtcgggaggagaaagatggagaacttaatgttctggatgatattttaactgaagtaccagaacaagatgatgaactgtataatccagagagtgaacaagataaaaatgagaaaaagggatcaaaaagaaaaagtgatcgaatggaatctactgataccaaacgacaaaagccttctgtccattcaagacaactggtttctaagccactgagctcatctgttagcaataacaaaagaatagttagtacaaaaggaaagtcagccacagagtataaaaatgaggaatatcaaagatctgaaagaaacaagcgtctagatgctgatcggaaaattcgtctatcaagtagtgcctccagagaaccttataagaatcaacctgaaccacgcccccgtttgaagactaatgcgctaagcggtttaggcccagggggttggcacgggagggccgcttacactacctcccaaccgacaccgcccgagccggcactccactc

SEQ ID NO: 67580 - DNA, 847 bp, Homo sapiens
agggcatttcgggagcgggattgtttcgcgcaggaagcaggctccattttagcgccgcccgccgtcgccatctgtttcccttccctcccccatacctagcccgagtctgagccctaacgagaaggctgggcctaggccgctggatgctggagtgaaaggaagggagaaagggaaaaagcgggaagagtcgagaaggctgagtgttaagaggccaagtgcgacgcgcgtatccgggcagacggactgacggacgggcccgtgcttctgccgcggctgcggcgcccgcgcgagtcgcgtctaagcggcggcggcggtggcagcggcggaaaccgaaggggagccatggcggctgacagtcgggaggagaaagatggagaacttaatgttctggatgatattttaactgaagtaccagaacaagatgatgaactgtataatccagagagtgaacaagataaaaatgagaaaaagggatcaaaaagaaaaagtgatcgaatggaatctactgataccaaacgacaaaagccttctgtccattcaagacaactggtttctaagccactgagctcatctgttagcaataacaaaagaatagttagtacaaaaggaaagtcagccacagagtataaaaatgaggaatatcaaagatctgaaagaaacaagcgtctagatgctgatcggatcgtctataagtacgactcagagaacttttagagtaactgtctgtgtcgggaaggatccgtaaggaggcaactctatgcaaggtttgagatgggtgagtgtaagtcaccatccccgtttaggaggatcgtggtgctgaggcggttttagcatattgggggttgtg

SEQ ID NO: 67581 - DNA, 768 bp, Homo sapiens
  misc_feature (24)..(24): n is a, c, g, or t
  misc_feature (31)..(31): n is a, c, g, or t
gcggccgctactactactaaattngcggccngcgactgctgctatcgagtatgcaaatattgaagtatgatggtttgactgtatggcagtgttgtagcagcctcttgtttttttccccattgcctctttttttaaaaaacttataaagtcactttttatttttcctcagtcttcaatgacgagagcaatattaagaagacattgctatctaatttttaatctttttaaatgaaaaattcctatgttcagtagcgtggttgatgctattgtttagccttcccctccaaattgtatacattggcttggaatgttcacaacttgcgtgcgtggcagcggaagacgattcccatattctacattgctactgttttgtataaaataaattggtaaagattgacggttaggttatcttttgtatctttttcttatccaattgcaggtttgttttattatgcaataatggacataaaagcatgctttttgttcaggaattttaggaaccccatttgctttttttgaggcacactttagcagaaatgattgacctaggcctgttgcattaaaagcttacttctatttctaacataagatacacagagttatgttaataatttggttaagtatttatacacctgataacattttgagtctactctgatcacagaatcgtttatttaggttttctatttgttgttttagtcttctgtaagtgaacgactttgtacatgctttctactttacttcataaatggacttttaaccctcatg

SEQ ID NO: 67582 - DNA, 3469 bp, Homo sapiens
tcactaatattttttcagaagatgacgcctcatttagaggataaaatattttaagttattttgatattcaagaggagcattattgggactgtttcagattttatcaccgtgatgtgttaaccctattgccaaatattctctaacatgtacccagtgaattcacacatcttgctgagcttctgaaaacaataggttctttccaaaggggatcaagtggccctgggagacccggcaacaaaccaaaaagaagggctgttgctgtgtctgtttacaacttttccagatgctggcagtacctgtggacttaaaagtgttttttagaggatcgccatggttattgatcactactttatgaactaaacagcattttccagaaaaagggggtttaacttgttacagaattggagaagtctttgcaaaggactgatttaagcccttctacccaacaccttcccctgtgtagatttgcatacagctaaatctaaaatattctgctaaagactattggatgtatggttgatgggatgaaacctttgattaaatttccttttggtggagacatcctgtggtaggtacagataatccaacaagagtccccatttctttgagcttaaaaaggacactgtcgagtaggtaggaggaaacctggcagagccccttatttttggcctaaaaggactgagcaccaagatgtcttttgaagttttaagctaagaggtttccagtgcaatacaatatatacaagtgaagtttttacctcagttttgcaatggactgcaaactatacttattacaccactacaccttctctcaagcctgccagggcctccatttatgtatgtggcttacagcttaaagtcagtagttggactactatatgaactgttactatcatgttttataccggtcgtaaatgcactccccaaactacaggaaagcggtatgtttattttttaaaccagcttttaattttcttagtattatttattgtagatgcaactgtttttattctgttggggggcttgggattattgcacttaactttgcagtttgagtgaactgtgttgaaaaagttaatgaaagcagttggtactcagacaaatagctgaaaactagtgaatgctaggttgttatcaagtttttatttgacattaaggttaaaaagatatatttattttctaaatattttggactttttttttgtttaactctttattagctgctaagtaaattgaagtgtatttaatgatgtgttaagttaacccgatttatggaagacagtaaagaacagccctctgtagtcagtaaagtttcaccttctaaagaatatattttgaattagttttatgaactctgttaaaattctgacccattacttgccaatttataaaagcctattttattacaaggcattgtctctggaaaaaaaaaattcccttaattcttaaatgtcattagatgtagaaagaaaaactaaatgttactaaggattattaagaaatagttttttaactattaagattttaaaaactttcctgtaaagttgcttttaataagtatcaaattttctgtatgatcatgtaaaattcataatttgtgcaaagcagaggaaaaataaattcttaattttgtttagacttaacctaaaatgacatttataagttttaaatatgcagattttagagttacatattgtacaatgatgataggtttttctagtttttatttttcatctgaatggagactttatttgggaaagtgttttaattgttaaaactgatatttagtttgagaatgactttgtttacttttgtttagactactaaaatgtgacttacatgttttgattggactagtctgcaattttctcatcatagcatgagttggcagagaatatctacttccagcagtacatttaaagtttggtttataggaattaatttgagaatcaaaatgtaggaattttaaaataatttgctcactaaaaaaattaagatgttaaataatgggttattctttgtacttatctctgtcagaaactcttgctttactctttgttctcccagcagtttttggtttaatttctaatgtgtctaatttgtgtaggcgtcgaccagaagattatgatattcataacagcagaaagaaaccaaggattgactatccccctgagtttcaccagagaccagggtatttaaaggatccacgataccaggaagtggacagacgattttcaggagttcgccgagatgtgtttttaaatgggtcctacaatgattatgtgagggaatttcataacatgggaccaccaccaccttggcaaggaatgcccccttacccaggaatggaacaacctccacaccatccttactatcagcaccatgctccacctcctcaagctcatcccccttactcaggacatcatccagtaccacatgaagcaagatacagagataaacgagtacatgattatgatatgagggtggatgatttccttcgtcgcacacaagctgttgtcagtggccggagaagtagaccccgtgaaagagaccgggaacgagagcgagaccgccctagagataacagacgagacagagagcgagatagaggacgtgatagagaaagagaaagagagcgattatgtgatcgagacagagaccgaggggagagaggtcgatatagaagataatgggcttttggaagcactgattgtttaaagatacaaaaaatcttgtattttttttttgtgtgtgtttacaagtagtaaatttattttcagctgtctgcctatgaagttcattgtgtagaaggatttattatgaccccctttgttccaagcatgcagtatcataagaactggaaaaactcaaatccgccaaaaatccacagctgacagttgaattgacacttttattggggcagaatggaacagtccaagaatgtagatactgattctttctccataaatgttcttatagtgtgttcatcctagagttatttttttgtttgtttttttcctttttggatcttgattgataactgccatgatattttgctttgatgtgtttctacatgtagttgcacacggttcagtaaaaataatgctgctatcgagtatgcaaatattgaagtatgatggtttgactgtatggcagtgttgtagcagcctcttgtttttttccccattgcctctttttttaaaaaacttataaagtcactttttatttttcctcagtcttcaatgacgagagcaatattaagaagacattgctatctaatttttaatctttttaaatgaaaaattcctatgttcagtagcgtggttgatgctattgtttagccttcccctccaaattgtatacattggcttggaatgttcacaacttgcgtgcgtggcagcggaagacgattcccatattctacattgctactgttttgtataaaataaattggtaaagattgacggtta

SEQ ID NO: 67583 - DNA, 3492 bp, Homo sapiens
tcactaatattttttcagaagatgacgcctcatttagaggataaaatattttaagttattttgatattcaagaggagcattattgggactgtttcagattttatcaccgtgatgtgttaaccctattgccaaatattctctaacatgtacccagtgaattcacacatcttgctgagcttctgaaaacaataggttctttccaaaggggatcaagtggccctgggagacccggcaacaaaccaaaaagaagggctgttgctgtgtctgtttacaacttttccagatgctggcagtacctgtggacttaaaagtgttttttagaggatcgccatggttattgatcactactttatgaactaaacagcattttccagaaaaagggggtttaacttgttacagaattggagaagtctttgcaaaggactgatttaagcccttctacccaacaccttcccctgtgtagatttgcatacagctaaatctaaaatattctgctaaagactattggatgtatggttgatgggatgaaacctttgattaaatttccttttggtggagacatcctgtggtaggtacagataatccaacaagagtccccatttctttgagcttaaaaaggacactgtcgagtaggtaggaggaaacctggcagagccccttatttttggcctaaaaggactgagcaccaagatgtcttttgaagttttaagctaagaggtttccagtgcaatacaatatatacaagtgaagtttttacctcagttttgcaatggactgcaaactatacttattacaccactacaccttctctcaagcctgccagggcctccatttatgtatgtggcttacagcttaaagtcagtagttggactactatatgaactgttactatcatgttttataccggtcgtaaatgcactccccaaactacaggaaagcggtatgtttattttttaaaccagcttttaattttcttagtattatttattgtagatgcaactgtttttattctgttggggggcttgggattattgcacttaactttgcagtttgagtgaactgtgttgaaaaagttaatgaaagcagttggtactcagacaaatagctgaaaactagtgaatgctaggttgttatcaagtttttatttgacattaaggttaaaaagatatatttattttctaaatattttggactttttttttgtttaactctttattagctgctaagtaaattgaagtgtatttaatgatgtgttaagttaacccgatttatggaagacagtaaagaacagccctctgtagtcagtaaagtttcaccttctaaagaatatattttgaattagttttatgaactctgttaaaattctgacccattacttgccaatttataaaagcctattttattacaaggcattgtctctggaaaaaaaaaattcccttaattcttaaatgtcattagatgtagaaagaaaaactaaatgttactaaggattattaagaaatagttttttaactattaagattttaaaaactttcctgtaaagttgcttttaataagtatcaaattttctgtatgatcatgtaaaattcataatttgtgcaaagcagaggaaaaataaattcttaattttgtttagacttaacctaaaatgacatttataagttttaaatatgcagattttagagttacatattgtacaatgatgataggtttttctagtttttatttttcatctgaatggagactttatttgggaaagtgttttaattgttaaaactgatatttagtttgagaatgactttgtttacttttgtttagactactaaaatgtgacttacatgttttgattggactagtctgcaattttctcatcatagcatgagttggcagagaatatctacttccagcagtacatttaaagtttggtttataggaattaatttgagaatcaaaatgtaggaattttaaaataatttgctcactaaaaaaattaagatgttaaataatgggttattctttgtacttatctctgtcagaaactcttgctttactctttgttctcccagcagtttttggtttaatttctaatgtgtctaatttgtgtaggcgtcgaccagaagattatgatattcataacagcagaaagaaaccaaggattgactatccccctgagtttcaccagagaccagggtatttaaaggatccacgataccaggaagtggacagtttcacaaatcttattcccaacaacgattttcaggagttcgccgagatgtgtttttaaatgggtcctacaatgattatgtgagggaatttcataacatgggaccaccaccaccttggcaaggaatgcccccttacccaggaatggaacaacctccacaccatccttactatcagcaccatgctccacctcctcaagctcatcccccttactcaggacatcatccagtaccacatgaagcaagatacagagataaacgagtacatgattatgatatgagggtggatgatttccttcgtcgcacacaagctgttgtcagtggccggagaagtagaccccgtgaaagagaccgggaacgagagcgagaccgccctagagataacagacgagacagagagcgagatagaggacgtgatagagaaagagaaagagagcgattatgtgatcgagacagagaccgaggggagagaggtcgatatagaagataatgggcttttggaagcactgattgtttaaagatacaaaaaatcttgtattttttttttgtgtgtgtttacaagtagtaaatttattttcagctgtctgcctatgaagttcattgtgtagaaggatttattatgaccccctttgttccaagcatgcagtatcataagaactggaaaaactcaaatccgccaaaaatccacagctgacagttgaattgacacttttattggggcagaatggaacagtccaagaatgtagatactgattctttctccataaatgttcttatagtgtgttcatcctagagttatttttttgtttgtttttttcctttttggatcttgattgataactgccatgatattttgctttgatgtgtttctacatgtagttgcacacggttcagtaaaaataatgctgctatcgagtatgcaaatattgaagtatgatggtttgactgtatggcagtgttgtagcagcctcttgtttttttccccattgcctctttttttaaaaaacttataaagtcactttttatttttcctcagtcttcaatgacgagagcaatattaagaagacattgctatctaatttttaatctttttaaatgaaaaattcctatgttcagtagcgtggttgatgctattgtttagccttcccctccaaattgtatacattggcttggaatgttcacaacttgcgtgcgtggcagcggaagacgattcccatattctacattgctactgttttgtataaaataaattggtaaagattgacggtta

SEQ ID NO: 67584 - DNA, 2348 bp, Homo sapiens
ctattccagtgtaactcatcataccctatgaattacctgaaattgctaattttgcaaaaatggaaacttatctgcacatgtgtttaaggttaaaagtagttatgaaaagcaataaccttatattctatcaggctttttgttccctatggtagttagtgtttcatgtgatacatatacatacaatgctactttttttaaataaaaatctttatgtctttggagaggaatgggaaatactcggtatgtaatctaaatgtagcttttcaattaatctatcccttactgaaatttaagagagcaaactatattcaagaagggatatcatgtatttgaagagagtcagtgatacacttgtgaaacttaggcagttaggagattgatgttagtgatcattatagcactattatgtaacaagtggcttgattagcctcattcttccaaaataggttgtcctgttgtagaaagtgaaaatagtttttccccagtaacatgaccactcaaatgtttttacattttaatttgttgggttcttattaaaagaagcaggggaaagaatatttttctaaccaccatcgatttttcattttcagtgtatacatcttcatttttgcaacttttgcaattttttccccctcccccttaagtttacattttaaaaagcttatctgtggttttcttggtaagacctacatatacccaaggtggaaagtaaacatttgttttaaggaagtcctgtcatagtgtgctcaagatagttcctctgcccttaccttccctgtgaagcagaaggaagaaattttctgattagcaagatttggagtgtgaacatagaagatacctatctgaaagcttctctagcagtttacaattctatgatatcattagttatttcctagattatcatgtaatctgagaagaaaatttgaaaatgggataatacagtagtagcatcacttaaagtacatatttcatggaaagaattgaaacgagtggtaaggaaggtttaattataatgccataaaagaaaaatataaatttgatttactaaaatgcttgatgtttgaacagggtatttaaaggatccacgataccaggaagtggacagacgattttcaggagttcgccgagatgtgtttttaaatgggtcctacaatgattatgtgagggaatttcataacatgggaccaccaccaccttggcaaggaatgcccccttacccaggaatggaacaacctccacaccatccttactatcagcaccatgctccacctcctcaagctcatcccccttactcaggacatcatccagtaccacatgaagcaagatacagagataaacgagtacatgattatgatatgagggtggatgatttccttcgtcgcacacaagctgttgtcagtggccggagaagtagaccccgtgaaagagaccgggaacgagagcgagaccgccctagagataacagacgagacagagagcgagatagaggacgtgatagagaaagagaaagagagcgattatgtgatcgagacagagaccgaggggagagaggtcgatatagaagataatgggcttttggaagcactgattgtttaaagatacaaaaaatcttgtattttttttttgtgtgtgtttacaagtagtaaatttattttcagctgtctgcctatgaagttcattgtgtagaaggatttattatgaccccctttgttccaagcatgcagtatcataagaactggaaaaactcaaatccgccaaaaatccacagctgacagttgaattgacacttttattggggcagaatggaacagtccaagaatgtagatactgattctttctccataaatgttcttatagtgtgttcatcctagagttatttttttgtttgtttttttcctttttggatcttgattgataactgccatgatattttgctttgatgtgtttctacatgtagttgcacacggttcagtaaaaataatgctgctatcgagtatgcaaatattgaagtatgatggtttgactgtatggcagtgttgtagcagcctcttgtttttttccccattgcctctttttttaaaaaacttataaagtcactttttatttttcctcagtcttcaatgacgagagcaatattaagaagacattgctatctaatttttaatctttttaaatgaaaaattcctatgttcagtagcgtggttgatgctattgtttagccttcccctccaaattgtatacattggcttggaatgttcacaacttgcgtgcgtggcagcggaagacgattcccatattctacattgctactgttttgtataaaataaattggtaaagattgacggtta

SEQ ID NO: 67585 - DNA, 2238 bp, Homo sapiens
aagaggtggatgaagatggagaggaggaggaggaagaggaggaggaggaagaggaggaggaggaggaggaagaagaagaatatgaacaggatgagagagaccagaaagaggagggaaatgattatgacactcgaagtgaggccagtgactctggttctgaatctgtttccttcacagatgggtctgtcagatctggttcaggcacagatggatcagatgagaaaaagaaggaaaggaagagagctagaggcatatctccaattgtttttgatagaagtggaagctctgcatcagagtcatatgcaggttcagaaaagaagcatgagaaattatcatcttccgttcgtgctgtccgaaaagatcaaaccagtaaactcaaatatgtgcttcaagatgcaagatttttcctcataaagagtaacaaccatgagaatgtgtctcttgccaaagcgaagggtgtatggtccacgctccctgtaaatgagaagaaattaaatcttgcatttagatctgcaaggagtgttatcttaatattttctgtcagagagagtggaaaatttcaagggtttgcaagactttcttcagaatcacatcacggaggatctcctatacactgggtgcttccagcaggaatgagtgctaaaatgctgggaggtgtctttaaaattgactggatttgcaggcgtgaattacccttcactaagtcggctcatctcaccaatccttggaatgaacataaaccagtaaagatcggacgtgatggacaggaaattgaacttgaatgtggaacccagctttgtcttctgtttccccccgatgaaagtattgacttgtatcaggtcattcattcccgtcgagaaccagtccgggatgtgggaaggcgtcgaccagaagattatgatattcataacagcagaaagaaaccaaggattgactatccccctgagtttcaccagagaccagagggtatttaaagattcacgatccaggaagtgacagacgattttaggaggtcgcgagaagtgttttaaatggtcctacaatgattatgtgagggaatttcataacatgggaccaccaccaccttggcaaggaatgcccccttacccaggaatggaacaacctccacaccatccttactatcagcaccatgctccacctcctcaagctcatcccccttactcaggacatcatccagtaccacatgaagcaagatacagagataaacgagtacatgattatgatatgagggtggatgatttccttcgtcgcacacaagctgttgtcagtggccggagaagtagaccccgtgaaagagaccgggaacgagagcgagaccgccctagagataacagacgagacagagagcgagatagaggacgtgatagagaaagagaaagagagcgattatgtgatcgagacagagaccgaggggagagaggtcgatatagaagataatgggcttttggaagcactgattgtttaaagatacaaaaaatcttgtattttttttttgtgtgtgtttacaagtagtaaatttattttcagctgtctgcctatgaagttcattgtgtagaaggatttattatgaccccctttgttccaagcatgcagtatcataagaactggaaaaactcaaatccgccaaaaatccacagctgacagttgaattgacacttttattggggcagaatggaacagtccaagaatgtagatactgattctttctccataaatgttcttatagtgtgttcatcctagagttatttttttgtttgtttttttcctttttggatcttgattgataactgccatgatattttgctttgatgtgtttctacatgtagttgcacacggttcagtaaaaataatgctgctatcgagtatgcaaatattgaagtatgatggtttgactgtatggcagtgttgtagcagcctcttgtttttttccccattgcctctttttttaaaaaacttataaagtcactttttatttttcctcagtcttcaatgacgagagcaatattaagaagacattgctatctaatttttaatctttttaaatgaaaaattcctatgttcagtagcgtggttgatgctattgtttagccttcccctccaaattgtatacattggcttggaatgttcacaacttgcgtgcgtggcagcggaagacgattcccatattctacattgctactgttttgtataaaataaattggtaaagattgacggtta

SEQ ID NO: 67586 - DNA, 1294 bp, Homo sapiens
ccacgcgtcgcggacgcgtgggtcgacccacgcgtccgccaggaagtggacacgattttcaggagttcgccgagatgtgtttttaaatgggtcctacaatgattatgtgagggaatttcataacatgggaccaccaccaccttggcaaggaatgcccccttacccaggaatggaacaacctccacaccatccttactatcagcaccatgctccacctcctcaagctcatcccccttactcaggacatcatccagtaccacatgaagcaagatacagagataaacgagtacatgattatgatatgagggtggatgatttccttcgtcgcacacaagctgttgtcagtggccggagaagtagaccccgtgaaagagaccgggaacgagagcgagaccgccctagagataacagacgagacagagagcgagatagaggacgtgatagagaaagagaaagagagcgattatgtgatcgagacagagaccgaggggagagaggtcgatatagaagataatgggcttttggaagcactgattgtttaaagatacaaaaaatcttgtattttttttttgtgtgtgtttacaagtagtaaatttattttcagctgtctgcctatgaagttcattgtgtagaaggatttattatgaccccctttgttccaagcatgcagtatcataagaactggaaaaactcaaatccgccaaaaatccacagctgacagttgaattgacacttttattggggcagaatggaacagtccaagaatgtagatactgattctttctccataaatgttcttatagtgtgttcatcctagagttatttttttgtttgtttttttcctttttggatcttgattgataactgccatgatattttgctttgatgtgtttctacatgtagttgcacacggttcagtaaaaataatgctgctatcgagtatgcaaatattgaagtatgatggtttgactgtatggcagtgttgtagcagcctcttgtttttttccccattgcctctttttttaaaaaacttataaagtcactttttatttttcctcagtcttcaatgacgagagcaatattaagaagacattgctatctaatttttaatctttttaaatgaaaaattcctatgttcagtagcgtggttgatgctattgtttagccttcccctccaaattgtatacattggcttggaatgttcacaacttgcgtgcgtggcagcggaagacgattcccatattctacattgctactgttttgtataaaataaattggtaaagattgacggtta

SEQ ID NO: 67587 - DNA, 2445 bp, Homo sapiens
aagaggtggatgaagatggagaggaggaggaggaagaggaggaggaggaagaggaggaggaggaggaggaagaagaagaatatgaacaggatgagagagaccagaaagaggagggaaatgattatgacactcgaagtgaggccagtgactctggttctgaatctgtttccttcacagatgggtctgtcagatctggttcaggcacagatggatcagatgagaaaaagaaggaaaggaagagagctagaggcatatctccaattgtttttgatagaagtggaagctctgcatcagagtcatatgcaggttcagaaaagaagcatgagaaattatcatcttccgttcgtgctgtccgaaaagatcaaaccagtaaactcaaatatgtgcttcaagatgcaagatttttcctcataaagagtaacaaccatgagaatgtgtctcttgccaaagcgaagggtgtatggtccacgctccctgtaaatgagaagaaattaaatcttgcatttagatctgcaaggagtgttatcttaatattttctgtcagagagagtggaaaatttcaagggtttgcaagactttcttcagaatcacatcacggaggatctcctatacactgggtgcttccagcaggaatgagtgctaaaatgctgggaggtgtctttaaaattgactggatttgcaggcgtgaattacccttcactaagtcggctcatctcaccaatccttggaatgaacataaaccagtaaagatcggacgtgatggacaggaaattgaacttgaatgtggaacccagctttgtcttctgtttccccccgatgaaagtattgacttgtatcaggtcattcataaaatgcgtcacaagagaagaatgcattctcagccccgatcacgaggacgtccatcccgtcgagaaccagtccgggatgtgggaaggcgtcgaccagaagattatgatattcataacagcagaaagaaaccaaggattgactatccccctgagtttcaccagagaccagggtatttaaaggatccacgataccaggaagtggacagacgattttcaggagttcgccgagatgtgtttttaaatgggtcctacaatgattatgtgagggaatttcataacatgggaccaccaccaccttggcaaggaatgcccccttacccaggaatggaacaacctccacaccatccttactatcagcaccatgctccacctcctcaagctcatcccccttactcaggacatcatccagtaccacatgaagcaagatacagagataaacgagtacatgattatgatatgagggtggatgatttccttcgtcgcacacaagctgttgtcagtggccggagaagtagaccccgtgaaagagaccgggaacgagagcgagaccgccctagagataacagacgagacagagagcgagatagaggacgtgatagagaaagagaaagagagcgattatgtgatcgagacagagaccgaggggagagaggtcgatatagaagataatgggcttttggaagcactgattgtttaaagatacaaaaaatcttgtattttttttttgtgtgtgtttacaagtagtaaatttattttcagctgtctgcctatgaagttcattgtgtagaaggatttattatgaccccctttgttccaagcatgcagtatcataagaactggaaaaactcaaatccgccaaaaatccacagctgacagttgaattgacacttttattggggcagaatggaacagtccaagaatgtagatactgattctttctccataaatgttcttatagtgtgttcatcctagagttatttttttgtttgtttttttcctttttggatcttgattgataactgccatgatattttgctttgatgtgtttctacatgtagttgcacacggttcagtaaaaataatgctgctatcgagtatgcaaatattgaagtatgatggtttgactgtatggcagtgttgtagcagcctcttgtttttttccccattgcctctttttttaaaaaacttataaagtcactttttatttttcctcagtcttcaatgacgagagcaatattaagaagacattgctatctaatttttaatctttttaaatgaaaaattcctatgttcagtagcgtggttgatgctattgtttagccttcccctccaaattgtatacattggcttggaatgttcacaacttgcgtgcgtggcagcggaagacgattcccatattctacattgctactgttttgtataaaataaattggtaaagattgacggttaaaaaaaaaaaaaaaaggcttttttaaggttctaaaagaaaatttaaaaaaaaaaggggggaaaaaggcttccttaaggttttgtggccaaaaacctttttaaacggggttttagggcaatttttttattataaaaccaaccctttatg

SEQ ID NO: 67588 - DNA, 2243 bp, Homo sapiens
aagaggtggatgaagatggagaggaggaggaggaagaggaggaggaggaagaggaggaggaggaggaggaagaagaagaatatgaacaggatgagagagaccagaaagaggagggaaatgattatgacactcgaagtgaggccagtgactctggttctgaatctgtttccttcacagatgggtctgtcagatctggttcaggcacagatggatcagatgagaaaaagaaggaaaggaagagagctagaggcatatctccaattgtttttgatagaagtggaagctctgcatcagagtcatatgcaggttcagaaaagaagcatgagaaattatcatcttccgttcgtgctgtccgaaaagatcaaaccagtaaactcaaatatgtgcttcaagatgcaagatttttcctcataaagagtaacaaccatgagaatgtgtctcttgccaaagcgaagggtgtatggtccacgctccctgtaaatgagaagaaattaaatcttgcatttagatctgcaaggagtgttatcttaatattttctgtcagagagagtggaaaatttcaagggtttgcaagactttcttcagaatcacatcacggaggatctcctatacactgggtgcttccagcaggaatgagtgctaaaatgctgggaggtgtctttaaaattgactggatttgcaggcgtgaattacccttcactaagtcggctcatctcaccaatccttggaatgaacataaaccagtaaagatcggacgtgatggacaggaaattgaacttgaatgtggaacccagctttgtcttctgtttccccccgatgaaagtattgacttgtatcaggtcattcataaaatgcgtcacaagagaagaatgcattctcagccccgatcacgaggacgtccatcccgtcgagaaccagtccgggatgtgggaaggcgtcgaccagaagattatgatattcataacagcagaaagaaaccaaggattgactatccccctgagtttcaccagagaccagggtatttaaaggatccacgataccaggaagtggacagacgattttcaggagttcgccgagatgtgtttttaaatgggtcctacaatgattatgtgagggaatttcataacatgggaccaccaccaccttggcaaggaatgcccccttacccaggaatggaacaacctccacaccatccttactatcagcaccatgctccacctcctcaagctcatcccccttactcaggacatcatccagtaccacatgaagcaagatacagagataaacgagtacatgattatgatatgagggtggatgatttccttcgtcgcacacaagctgttgtcagtggccggagaagtagaccccgtgaaagagaccgggaacgagagcgagaccgccctagagataacagacgagacagagagcgagatagaggacgtgatagagaaagagaaagagagcgattatgtgatcgagacagagaccgaggggagagaggtcgatatagaagataatgggcttttggaagcactgattgtttaaagatacaaaaaatcttgtattttttttttgtgtgtgtttacaagtagtaaatttattttcagctgtctgcctatgaagttcattgtgtagaaggatttattatgaccccctttgttccaagcatgcagtatcataagaactggaaaaactcaaatccgccatccaagaatgtagatactgattctttctccataaatgttcttatagtgtgttcatcctagagttatttttttgtttgtttttttcctttttggatcttgattgataactgccatgatattttgctttgatgtgtttctacatgtagttgcacacggttcagtaaaaataatgctgctatcgagtatgcaaatattgaagtatgatggtttgactgtatggcagtgttgtagcagcctcttgtttttttccccattgcctctttttttaaaaaacttataaagtcactttttatttttcctcagtcttcaatgacgagagcaatattaagaagacattgctatctaatttttaatctttttaaatgaaaaattcctatgttcagtagcgtggttgatgctattgtttagccttcccctccaaattgtatacattggcttggaatgttcacaacttgcgtgcgtggcagcggaagacgattcccatattctacattgctactgttttgtataaaataaattggtaaagattgacggtta

SEQ ID NO: 67589 - DNA, 1433 bp, Homo sapiens
aattggaggaaaaatgtagagctagcctgtgccagaaaaacattgatgacatttagcataattggcagtatatatggataatagttgaaggtcatcactagttaatatctttggcctaaatcttactgaagggatcagatggaaaagtcattaaagttaagtggaaaactgcataaagagatttgaataatctgttgtagatgtctaatgaggcatcatcctttttctaaaccatgtcagcatattaccttctgtgaattaatttattattgcatttctttggattgttctctccgccgattataatacagagacttttctttttttatattttaaaattgtttatataaatttttttttcaaatcagggatccacttaacactatttgcctttttgacatacctaacacatttctttccttttctagcatgattatgatatgagggtggatgatttccttcgtcgcacacaagctgttgtcagtggccggagaagtagaccccgtgaaagagaccgggaacgagagcgagaccgccctagagataacagacgagacagagagcgagatagaggacgtgatagagaaagagaaagagagcgattatgtgatcgagacagagaccgaggggagagaggtcgatatagaagataatgggcttttggaagcactgattgtttaaagatacaaaaaatcttgtattttttttttgtgtgtgtttacaagtagtaaatttattttcagctgtctgcctatgaagttcattgtgtagaaggatttattatgaccccctttgttccaagcatgcagtatcataagaactggaaaaactcaaatccgccaaaaatccacagctgacagttgaattgacacttttattggggcagaatggaacagtccaagaatgtagatactgattctttctccataaatgttcttatagtgtgttcatcctagagttatttttttgtttgtttttttcctttttggatcttgattgataactgccatgatattttgctttgatgtgtttctacatgtagttgcacacggttcagtaaaaataatgctgctatcgagtatgcaaatattgaagtatgatggtttgactgtatggcagtgttgtagcagcctcttgtttttttccccattgcctctttttttaaaaaacttataaagtcactttttatttttcctcagtcttcaatgacgagagcaatattaagaagacattgctatctaatttttaatctttttaaatgaaaaattcctatgttcagtagcgtggttgatgctattgtttagccttcccctccaaattgtatacattggcttggaatgttcacaacttgcgtgcgtggcagcggaagacgattcccatattctacattgctactgttttgtataaaataaattggtaaagattgacggtta

SEQ ID NO: 67590 - DNA, 2243 bp, Homo sapiens
aagaggtggatgaagatggagaggaggaggaggaagaggaggaggaggaagaggaggaggaggaggaggaagaagaagaatatgaacaggatgagagagaccagaaagaggagggaaatgattatgacactcgaagtgaggccagtgactctggttctgaatctgtttccttcacagatgggtctgtcagatctggttcaggcacagatggatcagatgagaaaaagaaggaaaggaagagagctagaggcatatctccaattgtttttgatagaagtggaagctctgcatcagagtcatatgcaggttcagaaaagaagcatgagaaattatcatcttccgttcgtgctgtccgaaaagatcaaaccagtaaactcaaatatgtgcttcaagatgcaagatttttcctcataaagagtaacaaccatgagaatgtgtctcttgccaaagcgaagggtgtatggtccacgctccctgtaaatgagaagaaattaaatcttgcatttagatctgcaaggagtgttatcttaatattttctgtcagagagagtggaaaatttcaagggtttgcaagactttcttcagaatcacatcacggaggatctcctatacactgggtgcttccagcaggaatgagtgctaaaatgctgggaggtgtctttaaaattgactggatttgcaggcgtgaattacccttcactaagtcggctcatctcaccaatccttggaatgaacataaaccagtaaagatcggacgtgatggacaggaaattgaacttgaatgtggaacccagctttgtcttctgtttccccccgatgaaagtattgacttgtatcaggtcattcataaaatgcgtcacaagagaagaatgcattctcagccccgatcacgaggacgtccatcccgtcgagaaccagtccgggatgtgggaaggcgtcgaccagaagattatgatattcataacagcagaaagaaaccaaggattgactatccccctgagtttcaccagagaccagggtatttaaaggatccacgataccaggaagtggacagacgattttcaggagttcgccgagatgtgtttttaaatgggtcctacaatgattatgtgagggaatttcataacatgggaccaccaccaccttggcaaggaatgcccccttacccaggaatggaacaacctccacaccatccttactatcagcaccatgctccacctcctcaagctcatcccccttactcaggacatcatccagtaccacatgaagcaagatacagagataaacgagtacatgattatgatatgagggtggatgatttccttcgtcgcacacaagctgttgtcagtggccggagaagtagaccccgtgaaagagaccgggaacgagagcgagaccgccctagagataacagacgagacagagagcgagatagaggacgtgatagagaaagagaaagagagcgattatgtgatcgagacagagaccgaggggagagaggtcgatatagaagataatgggcttttggaagcactgattgtttaaagatacaactgtctgcctatgaagttcattgtgtagaaggatttattatgaccccctttgttccaagcatgcagtatcataagaactggaaaaactcaaatccgccaaaaatccacagctgacagttgaattgacacttttattggggcagaatggaacagtccaagaatgtagatactgattctttctccataaatgttcttatagtgtgttcatcctagagttatttttttgtttgtttttttcctttttggatcttgattgataactgccatgatattttgctttgatgtgtttctacatgtagttgcacacggttcagtaaaaataatgctgctatcgagtatgcaaatattgaagtatgatggtttgactgtatggcagtgttgtagcagcctcttgtttttttccccattgcctctttttttaaaaaacttataaagtcactttttatttttcctcagtcttcaatgacgagagcaatattaagaagacattgctatctaatttttaatctttttaaatgaaaaattcctatgttcagtagcgtggttgatgctattgtttagccttcccctccaaattgtatacattggcttggaatgttcacaacttgcgtgcgtggcagcggaagacgattcccatattctacattgctactgttttgtataaaataaattggtaaagattgacggtta

SEQ ID NO: 67591 - DNA, 1063 bp, Homo sapiens
gcgacgaaggaaatcatccaccctcatatcataatcatgtactcgtttatctctgtatcatgattatgatatgagggtggatgatttccttcgtcgcacacaagctgttgtcagtggccggagaagtagaccccgtgaaagagaccgggaacgagagcgagaccgccctagagataacagacgagacagagagcgagatagaggacgtgatagagaaagagaaagagagcgattatgtgatcgagacagagaccgaggggagagaggtcgatatagaagataatgggcttttggaagcactgattgtttaaagatacaaaaaatcttgtattttttttttgtgtgtgtttacaagtagtaaatttattttcagctgtctgcctatgaagttcattgtgtagaaggatttattatgaccccctttgttccaagcatgcagtatcataagaactggaaaaactcaaatccgccaaaaatccacagctgacagttgaattgacacttttattggggcagaatggaacagtccaagaatgtagatactgattctttctccataaatgttcttatagtgtgttcatcctagagttatttttttgtttgtttttttcctttttggatcttgattgataactgccatgatattttgctttgatgtgtttctacatgtagttgcacacggttcagtaaaaataatgctgctatcgagtatgcaaatattgaagtatgatggtttgactgtatggcagtgttgtagcagcctcttgtttttttccccattgcctctttttttaaaaaacttataaagtcactttttatttttcctcagtcttcaatgacgagagcaatattaagaagacattgctatctaatttttaatctttttaaatgaaaaattcctatgttcagtagcgtggttgatgctattgtttagccttcccctccaaattgtatacattggcttggaatgttcacaacttgcgtgcgtggcagcggaagacgattcccatattctacattgctactgttttgtataaaataaattggtaaagattgacggtta

SEQ ID NO: 67592 - DNA, 1005 bp, Homo sapiens
agggcatttcgggagcgggattgtttcgcgcaggaagcaggctccattttagcgccgcccgccgtcgccatctgtttcccttccctcccccatacctagcccgagtctgagccctaacgagaaggctgggcctaggccgctggatgctggagtgaaaggaagggagaaagggaaaaagcgggaagagtcgagaaggctgagtgttaagaggccaagtgcgacgcgcgtatccgggcagacggactgacggacgggcccgtgcttctgccgcggctgcggcgcccgcgcgagtcgcgtctaagcggcggcggcggtggcagcggcggaaaccgaaggggagccatggcggctgacagtcgggaggagaaagatggagaacttaatgttctggatgatattttaactgaagtaccagaacaagatgatgaactgtataatccagagagtgaacaagataaaaatgagaaaaagggatcaaaaagaaaaagtgatcgaatggaatctactgataccaaacgacaaaagccttctgtccattcaagacaactggtttctaagccactgagctcatctgttagcaataacaaaagaatagttagtacaaaaggaaagtcagccacagagtataaaaatgaggaatatcaaagatctgaaagaaacaagcgtctagatgctgatcggaaaattcgtctatcaagtagtgcctccagagaaccttataagaatcaacctgaaaaaacctgtgtccggaaaagggatcctgaaaggagggccaaatctcctacgccagatggttctgagagaattgggcttgaagtggatagacgtgcaagcagatccagccagtcttctaaggaagaagtgaactctgaagaatatggctctgaccatgagactggcagcagtggttcttctgatgagcaagggaacaacactgagaatgaggaggaaggagtggaagaagatgtggaggaagatgaagaagtagaagaagatgcagaagaa

SEQ ID NO: 67593 - DNA, 2236 bp, Homo sapiens
tcactaatattttttcagaagatgacgcctcatttagaggataaaatattttaagttattttgatattcaagaggagcattattgggactgtttcagattttatcaccgtgatgtgttaaccctattgccaaatattctctaacatgtacccagtgaattcacacatcttgctgagcttctgaaaacaataggttctttccaaaggggatcaagtggccctgggagacccggcaacaaaccaaaaagaagggctgttgctgtgtctgtttacaacttttccagatgctggcagtacctgtggacttaaaagtgttttttagaggatcgccatggttattgatcactactttatgaactaaacagcattttccagaaaaagggggtttaacttgttacagaattggagaagtctttgcaaaggactgatttaagcccttctacccaacaccttcccctgtgtagatttgcatacagctaaatctaaaatattctgctaaagactattggatgtatggttgatgggatgaaacctttgattaaatttccttttggtggagacatcctgtggtaggtacagataatccaacaagagtccccatttctttgagcttaaaaaggacactgtcgagtaggtaggaggaaacctggcagagccccttatttttggcctaaaaggactgagcaccaagatgtcttttgaagttttaagctaagaggtttccagtgcaatacaatatatacaagtgaagtttttacctcagttttgcaatggactgcaaactatacttattacaccactacaccttctctcaagcctgccagggcctccatttatgtatgtggcttacagcttaaagtcagtagttggactactatatgaactgttactatcatgttttataccggtcgtaaatgcactccccaaactacaggaaagcggtatgtttattttttaaaccagcttttaattttcttagtattatttattgtagatgcaactgtttttattctgttggggggcttgggattattgcacttaactttgcagtttgagtgaactgtgttgaaaaagttaatgaaagcagttggtactcagacaaatagctgaaaactagtgaatgctaggttgttatcaagtttttatttgacattaaggttaaaaagatatatttattttctaaatattttggactttttttttgtttaactctttattagctgctaagtaaattgaagtgtatttaatgatgtgttaagttaacccgatttatggaagacagtaaagaacagccctctgtagtcagtaaagtttcaccttctaaagaatatattttgaattagttttatgaactctgttaaaattctgacccattacttgccaatttataaaagcctattttattacaaggcattgtctctggaaaaaaaaaattcccttaattcttaaatgtcattagatgtagaaagaaaaactaaatgttactaaggattattaagaaatagttttttaactattaagattttaaaaactttcctgtaaagttgcttttaataagtatcaaattttctgtatgatcatgtaaaattcataatttgtgcaaagcagaggaaaaataaattcttaattttgtttagacttaacctaaaatgacatttataagttttaaatatgcagattttagagttacatattgtacaatgatgataggtttttctagtttttatttttcatctgaatggagactttatttgggaaagtgttttaattgttaaaactgatatttagtttgagaatgactttgtttacttttgtttagactactaaaatgtgacttacatgttttgattggactagtctgcaattttctcatcatagcatgagttggcagagaatatctacttccagcagtacatttaaagtttggtttataggaattaatttgagaatcaaaatgtaggaattttaaaataatttgctcactaaaaaaattaagatgttaaataatgggttattctttgtacttatctctgtcagaaactcttgctttactctttgttctcccagcagtttttggtttaatttctaatgtgtctaatttgtgtaggcgtcgaccagaagattatgatattcataacagcagaaagaaaccaaggattgactatccccctgagtttcaccagagaccagggttaatattttataatcctgcagatatttgatttcaaattattgga

SEQ ID NO: 67594 - DNA, 977 bp, Homo sapiens
gcaggcagtcgcgctcgcagccgccggcgttgtcaccccccccgcgtttcccttccctcccccatacctagcccgagtctgagccctaacgagaaggctgggcctaggccgctggatgctggagtgaaaggaagggagaaagggaaaaagcgggaagagtcgagaaggctgagtgttaagaggccaagtgcgacgcgcgtatccgggcagacggactgacggacgggcccgtgcttctgccgcggctgcggcgcccgcgcgagtcgcgtctaagcggcggcggcggtggcagcggcggaaaccgaaggggagccatggcggctgacagtcgggaggagaaagatggagaacttaatgttctggatgatattttaactgaagtaccagaacaagatgatgaactgtataatccagagagtgaacaagataaaaatgagaaaaagggatcaaaaagaaaaagtgatcgaatggaatctactgataccaaacgacaaaagccttctgtccattcaagacaactggtttctaagccactgagctcatctgttagcaataacaaaagaatagttagtacaaaaggaaagtcagccacagagtataaaaatgaggaatatcaaagatctgaaagaaacaagcgtctagatgctgatcggaaaattcgtctatcaagtagtgcctccagagaaccttataagaatcaacctgaaaaaacctgtgtccggaaaagggatcctgaaaggagggccaaatctcctacgccagatggttctgagagaattgggcttgaagtggatagacgtgcaagcagatccagccagtcttctaaggaagaagtgaactctgaagaatatggctctgaccatgagactggcagcagtggttcttctgatgagcaagggaacaacactgagaatgaggaggaaggagtggaagaagatgtggaggaagatgaagaagtagaagaagatgcagaagaa

SEQ ID NO: 67595 - DNA, 847 bp, Homo sapiens
agggcatttcgggagcgggattgtttcgcgcaggaagcaggctccattttagcgccgcccgccgtcgccatctgtttcccttccctcccccatacctagcccgagtctgagccctaacgagaaggctgggcctaggccgctggatgctggagtgaaaggaagggagaaagggaaaaagcgggaagagtcgagaaggctgagtgttaagaggccaagtgcgacgcgcgtatccgggcagacggactgacggacgggcccgtgcttctgccgcggctgcggcgcccgcgcgagtcgcgtctaagcggcggcggcggtggcagcggcggaaaccgaaggggagccatggcggctgacagtcgggaggagaaagatggagaacttaatgttctggatgatattttaactgaagtaccagaacaagatgatgaactgtataatccagagagtgaacaagataaaaatgagaaaaagggatcaaaaagaaaaagtgatcgaatggaatctactgataccaaacgacaaaagccttctgtccattcaagacaactggtttctaagccactgagctcatctgttagcaataacaaaagaatagttagtacaaaaggaaagtcagccacagagtattgggatatcaagattgaagaaacagcgctgatgctgtcgaaatcgctataagagtgctcagagacctatagatcactgataaccgtgtcgaagggtctgatgagccattctcgccatgttgtggtgcgggactgagcaccaccctcttggaggctgaattgtcctatggtgtttccgcccagggggggtgcactagcacaagcgccgacaggcaaccacc

SEQ ID NO: 67596 - DNA, 710 bp, Homo sapiens
  misc_feature (24)..(24): n is a, c, g, or t
  misc_feature (31)..(31): n is a, c, g, or t
gcggccgctactactactaaattngcggccngcgacccgaagagacgcatggcgctgacagtcgggaggagaaagatggagaacttaatgttctggatgatattttaactgaagtaccagaacaagatgatgaactgtataatccagagagtgaacaagataaaaatgagaaaaagggatcaaaaagaaaaagtgatcgaatggaatctactgataccaaacgacaaaagccttctgtccattcaagacaactggtttctaagccactgagctcatctgttagcaataacaaaagaatagttagtacaaaaggaaagtcagccacagagtataaaaatgaggaatatcaaagatctgaaagaaacaagcgtctagatgctgatcggaaaattcgtctatcaagtagtgcctccagagaaccttataagaatcaacctgaaaaaacctgtgtccggaaaagggatcctgaaaggagggccaaatctcctacgccagatggttctgagagaattgggcttgaagtggatagacgtgcaagcagatccagccagtcttctaaggaagaagtgaactctgaagaatatggctctgaccatgagactggcagcagtggttcttctgatgagcaagggaacaacactgagaatgaggaggaaggagtggaagaagatgtggaggaagatgaagaagtagaagaagatgcagaagaa

SEQ ID NO: 67597 - DNA, 856 bp, Homo sapiens
agggcatttcgggagcgggattgtttcgcgcaggaagcaggctccattttagcgccgcccgccgtcgccatctgtttcccttccctcccccatacctagcccgagtctgagccctaacgagaaggctgggcctaggccgctggatgctggagtgaaaggaagggagaaagggaaaaagcgggaagagtcgagaaggctgagtgttaagaggccaagtgcgacgcgcgtatccgggcagacggactgacggacgggcccgtgcttctgccgcggctgcggcgcccgcgcgagtcgcgtctaagcggcggcggcggtggcagcggcggaaaccgaaggggagccatggcggctgacagtcgggaggagaaagatggagaacttaatgttctggatgatattttaactgaagtaccagaacaagatgatgaactgtataatccagagagtgaacaagataaaaatgagaaaaagggatcaaaaagaaaaagtgatcgaatggaatctactgataccaaacgacaaaagccttctgtccattcaagacaactggtttctaagccactgagctcatctgttagcaataacaaaagaatagttagtacaaaaggaaagtcagccacagagtataaaaatgaggaatatcaaagatctgaaagaaacaagcgtctagatgctgatcggacatcgcatcagtatgctcaagaactatagatacctgaacacgtgcggccggtctgaagggcactctgccaatgttgcctggtacgctcagccccccaccccctggaagactaatgtcctaagcggtttacgcacagcgggctgcaccaccagagagggcccgccacacacaccc

SEQ ID NO: 67598 - DNA, 2297 bp, Homo sapiens
aagaggtggatgaagatggagaggaggaggaggaagaggaggaggaggaagaggaggaggaggaggaggaagaagaagaatatgaacaggatgagagagaccagaaagaggagggaaatgattatgacactcgaagtgaggccagtgactctggttctgaatctgtttccttcacagatgggtctgtcagatctggttcaggcacagatggatcagatgagaaaaagaaggaaaggaagagagctagaggcatatctccaattgtttttgatagaagtggaagctctgcatcagagtcatatgcaggttcagaaaagaagcatgagaaattatcatcttccgttcgtgctgtccgaaaagatcaaaccagtaaactcaaatatgtgcttcaagatgcaagatttttcctcataaagagtaacaaccatgagaatgtgtctcttgccaaagcgaagggtgtatggtccacgctccctgtaaatgagaagaaattaaatcttgcatttagatctgcaaggagtgttatcttaatattttctgtcagagagagtggaaaatttcaagggtttgcaagactttcttcagaatcacatcacggaggatctcctatacactgggtgcttccagcaggaatgagtgctaaaatgctgggaggtgtctttaaaattgactggatttgcaggcgtgaattacccttcactaagtcggctcatctcaccaatccttggaatgaacataaaccagtaaagatcggacgtgatggacaggaaattgaacttgaatgtggaacccagctttgtcttctgtttccccccgatgaaagtattgacttgtatcaggtcattcataaaatgcgtcacaagagaagaatgcattctcagccccgatcacgaggacgtccatcccgtcgagaaccagtccgggatgtgggaaggcgtcgaccagaagattatgatattcataacagcagaaagaaaccaaggattgactatccccctgagtttcaccagagaccagggtatttaaaggatccacgataccaggaagtggacagacgattttcaggagttcgccgagatgtgtttttaaatgggtcctacaatgattatgtgagggaatttcataacatgggaccaccaccaccttggcaaggaatgcccccttacccaggaatggaacaacctccacaccatccttactatcagcaccatgctccacctcctcaagctcatcccccttactcaggacatcatccagtaccacatgaagcaagatacagagataaacgagtacatgattatgatatgagggtggatgatttccttcgtcgcacacaagctgttgtcagtggccggagaagtagaccccgtgaaagagaccgggaacgagagcgagaccgccctagagataacagacgagacagagagcgagatagaggacgtgatagagaaagagaaagagagcgattatgtgatcgagacagagaccgaggggagagaggtcgatatagaagataatgggcttttggaagcactgattgtttaaagatacaaaaaatcttgtattttttttttgtgtgtgtttacaagtagtaaatttattttcagctgtctgcctatgaagttcattgtgtagaaggatttattatgaccccctttgttccaagcatgcagtatcataagaactggaaaaactcaaatccgccaaaaatccacagctgacagttgaattgacacttttattggggcagaatggaacagtccaagaatgtagatactgattctttctccataaatgttcttatagtgtgttcatcctagagttatttttttgtttgtttttttcctttttggatcttgattgataactgccatgatattttgctttgatgtgtttctacatgtagttgcacacggttcagtaaaaataatgctgctatcgagtatgcaaatattgaagtatgatggtttgactgtatggcagtgttgtagcagcctcttgtttttttccccattgcctctttttttaaaaaacttataaagtcactttttatttttcctcagtcttcaatgacgagagcaatattaagaagacattgctatctaatttttaatctttttaaatgaaaaattcctatgttcagtagcgtggttgatgctattgtttagccttcccctccaaattgtatacattggcttggaatgttcacaacttgcgtgcgtggcagcggaagacgattcccatattctacattgctactgttttgtataaaataaattggtaaagattgacggtta

SEQ ID NO: 67599 - DNA, 1334 bp, Homo sapiens
gtcgggttcactcttgcctagttttgaattacattcttggaactagtttatgaattacctgaatttagtttcacaaatcttattcccaacaacgattttcaggagttcgccgagatgtgtttttaaatgggtcctacaatgattatgtgagggaatttcataacatgggaccaccaccaccttggcaaggaatgcccccttacccaggaatggaacaacctccacaccatccttactatcagcaccatgctccacctcctcaagctcatcccccttactcaggacatcatccagtaccacatgaagcaagatacagagataaacgagtacatgattatgatatgagggtggatgatttccttcgtcgcacacaagctgttgtcagtggccggagaagtagaccccgtgaaagagaccgggaacgagagcgagaccgccctagagataacagacgagacagagagcgagatagaggacgtgatagagaaagagaaagagagcgattatgtgatcgagacagagaccgaggggagagaggtcgatatagaagataatgggcttttggaagcactgattgtttaaagatacaaaaaatcttgtattttttttttgtgtgtgtttacaagtagtaaatttattttcagctgtctgcctatgaagttcattgtgtagaaggatttattatgaccccctttgttccaagcatgcagtatcataagaactggaaaaactcaaatccgccaaaaatccacagctgacagttgaattgacacttttattggggcagaatggaacagtccaagaatgtagatactgattctttctccataaatgttcttatagtgtgttcatcctagagttatttttttgtttgtttttttcctttttggatcttgattgataactgccatgatattttgctttgatgtgtttctacatgtagttgcacacggttcagtaaaaataatgctgctatcgagtatgcaaatattgaagtatgatggtttgactgtatggcagtgttgtagcagcctcttgtttttttccccattgcctctttttttaaaaaacttataaagtcactttttatttttcctcagtcttcaatgacgagagcaatattaagaagacattgctatctaatttttaatctttttaaatgaaaaattcctatgttcagtagcgtggttgatgctattgtttagccttcccctccaaattgtatacattggcttggaatgttcacaacttgcgtgcgtggcagcggaagacgattcccatattctacattgctactgttttgtataaaataaattggtaaagattgacggtta

SEQ ID NO: 67600 - DNA, 1352 bp, Homo sapiens
tgataggagtagaaaagcataaacatgttaaatcttagaagatgtgtaattttcgacaaaaagcatattttgaaacaccttaatgccatcaaagtaaatgtctagtacagattcacttgtttgggattggtgttttggatgaagggttctaagaatcgcttgtttacaagggtgttggtagattcttaatgtaaatggttttccttttttagcccccttacccaggaatggaacaacctccacaccatccttactatcagcaccatgctccacctcctcaagctcatcccccttactcaggacatcatccagtaccacatgaagcaagatacagagataaacgagtacatgattatgatatgagggtggatgatttccttcgtcgcacacaagctgttgtcagtggccggagaagtagaccccgtgaaagagaccgggaacgagagcgagaccgccctagagataacagacgagacagagagcgagatagaggacgtgatagagaaagagaaagagagcgattatgtgatcgagacagagaccgaggggagagaggtcgatatagaagataatgggcttttggaagcactgattgtttaaagatacaaaaaatcttgtattttttttttgtgtgtgtttacaagtagtaaatttattttcagctgtctgcctatgaagttcattgtgtagaaggatttattatgaccccctttgttccaagcatgcagtatcataagaactggaaaaactcaaatccgccaaaaatccacagctgacagttgaattgacacttttattggggcagaatggaacagtccaagaatgtagatactgattctttctccataaatgttcttatagtgtgttcatcctagagttatttttttgtttgtttttttcctttttggatcttgattgataactgccatgatattttgctttgatgtgtttctacatgtagttgcacacggttcagtaaaaataatgctgctatcgagtatgcaaatattgaagtatgatggtttgactgtatggcagtgttgtagcagcctcttgtttttttccccattgcctctttttttaaaaaacttataaagtcactttttatttttcctcagtcttcaatgacgagagcaatattaagaagacattgctatctaatttttaatctttttaaatgaaaaattcctatgttcagtagcgtggttgatgctattgtttagccttcccctccaaattgtatacattggcttggaatgttcacaacttgcgtgcgtggcagcggaagacgattcccatattctacattgctactgttttgtataaaataaattggtaaagattgacggtta

SEQ ID NO: 67601 - DNA, 2662 bp, Homo sapiens
aagaggtggatgaagatggagaggaggaggaggaagaggaggaggaggaagaggaggaggaggaggaggaagaagaagaatatgaacaggatgagagagaccagaaagaggagggaaatgattatgacactcgaagtgaggccagtgactctggttctgaatctgtttccttcacagatgggtctgtcagatctggttcaggcacagatggatcagatgagaaaaagaaggaaaggaagagagctagaggcatatctccaattgtttttgatagaagtggaagctctgcatcagagtcatatgcaggttcagaaaagaagcatgagaaattatcatcttccgttcgtgctgtccgaaaagatcaaaccagtaaactcaaatatgtgcttcaagatgcaagatttttcctcataaagagtaacaaccatgagaatgtgtctcttgccaaagcgaagggtgtatggtccacgctccctgtaaatgagaagaaattaaatcttgcatttagatctgcaaggagtgttatcttaatattttctgtcagagagagtggaaaatttcaagggtttgcaagactttcttcagaatcacatcacggaggatctcctatacactgggtgcttccagcaggaatgagtgctaaaatgctgggaggtgtctttaaaattgactggatttgcaggcgtgaattacccttcactaagtcggctcatctcaccaatccttggaatgaacataaaccagtaaagatcggacgtgatggacaggaaattgaacttgaatgtggaacccagctttgtcttctgtttccccccgatgaaagtattgacttgtatcaggtcattcataaaatgcgtcacaagagaagaatgcattctcagccccgatcacgaggacgtccatcccgtcgagaaccagtccgggatgtgggaaggcgtcgaccagaagattatgatattcataacagcagaaagaaaccaaggattgactatccccctgagtttcaccagagaccagggtatttaaaggatccacgataccaggaagtggacagacgattttcaggagttcgccgagatgtgtttttaaatgggtcctacaatgattatgtgagggaatttcataacatgggaccaccaccaccttggcaaggaatgcccccttacccaggaatggaacaacctccacaccatccttactatcagcaccatgctccacctcctcaagctcatcccccttactcaggacatcatccagtaccacatgaagcaagatacagagataaacgagtacatgattatgatatgagggtggatgatttccttcgtcgcacacaagctgttgtcagtggccggagaagtagaccccgtgaaagagaccgggaacgagagcgagaccgccctagagataacagacgagacagagagcgagatagaggacgtgatagagaaagagaaagagagcgattatgtgatcgagacagagaccgaggggagagaggtcgatatagaagataatgggcttttggaagcactgattgtttaaagatacaaaaaatcttgtattttttttttgtgtgtgtttacaagtagtaaatttattttcagctgtctgcctatgaagttcattgtgtagaaggatttattatgaccccctttgttccaagcatgcagtatcataagaactggaaaaactcaaatccgccaaaaatccacagctgacagttgaattgacacttttattggggcagaatggaacagtccaagaatgtagatactgattctttctccataaatgttcttatagtgtgttcatcctagagttatttttttgtttgtttttttcctttttggatcttgattgataactgccatgatattttgctttgatgtgtttctacatgtagttgcacacggttcagtaaaaataatgctgctatcgagtatgcaaatattgaagtatgatggtttgactgtatggcagtgttgtagcagcctcttgtttttttccccattgcctctttttttaaaaaacttataaagtcactttttatttttcctcagtcttcaatgacgagagcaatattaagaagacattgctatctaatttttaatctttttaaatgaaaaattcctatgttcagtagcgtggttgatgctattgtttagccttcccctccaaattgtatacattggcttggaatgttcacaacttgcgtgcgtggcagcggaagacgattcccatattctacattgctactgttttgtataaaataaattggtaaagattgacggttaggttatcttttgtatctttttcttatccaattgcaggtttgttttattatgcaataatggacataaaagcatgctttttgttcaggaattttaggaaccccatttgctttttttgaggcacactttagcagaaatgattgacctaggcctgttgcattaaaagcttacttctatttctaacataagatacacagagttatgttaataatttggttaagtatttatacacctgataacattttgagtctactctgatcacagaatcgtttatttaggttttctatttgttgttttagtcttctgtaagtgaacgactttgtacatgctttctactttacttcataaatggacttttaaccctcatg

SEQ ID NO: 67602 - DNA, 2254 bp, Homo sapiens
  misc_feature (2238)..(2238): n is a, c, g, or t
aagaggtggatgaagatggagaggaggaggaggaagaggaggaggaggaagaggaggaggaggaggaggaagaagaagaatatgaacaggatgagagagaccagaaagaggagggaaatgattatgacactcgaagtgaggccagtgactctggttctgaatctgtttccttcacagatgggtctgtcagatctggttcaggcacagatggatcagatgagaaaaagaaggaaaggaagagagctagaggcatatctccaattgtttttgatagaagtggaagctctgcatcagagtcatatgcaggttcagaaaagaagcatgagaaattatcatcttccgttcgtgctgtccgaaaagatcaaaccagtaaactcaaatatgtgcttcaagatgcaagatttttcctcataaagagtaacaaccatgagaatgtgtctcttgccaaagcgaagggtgtatggtccacgctccctgtaaatgagaagaaattaaatcttgcatttagatctgcaaggagtgttatcttaatattttctgtcagagagagtggaaaatttcaagggtttgcaagactttcttcagaatcacatcacggaggatctcctatacactgggtgcttccagcaggaatgagtgctaaaatgctgggaggtgtctttaaaattgactggatttgcaggcgtgaattacccttcactaagtcggctcatctcaccaatccttggaatgaacataaaccagtaaagatcggacgtgatggacaggaaattgaacttgaatgtggaacccagctttgtcttctgtttccccccgatgaaagtattgacttgtatcaggtcattcataaaatgcgtcacaagagaagaatgcattctcagccccgatcacgaggacgtccatcccgtcgagaaccagtccgggatgtgggaaggcgtcgaccagaagattatgatattcataacagcagaaagaaaccaaggattgactatccccctgagtttcaccagagaccagggtatttaaaggatccacgataccaggaagtggacagacgattttcaggagttcgccgagatgtgtttttaaatgggtcctacaatgattatgtgagggaatttcataacatgggaccaccaccaccttggcaaggaatgcccccttacccaggaatggaacaacctccacaccatccttactatcagcaccatgctccacctcctcaagctcatcccccttactcaggacatcatccagtaccacatgaagcaagatacagagataaacgagtacatgattatgatatgagggtggatgatttccttcgtcgcacacaagctgttgtcagtggccggagaagtagaccccgtgaaagagaccgggaacgagagcgagaccgccctagagataacagacgagacagagagcgagatagaggacgtgatagagaaagagaaagagagcgattatgtgatcgagacagagaccgaggggagagaggtcgatatagaagataatgggcttttggaagcactgattgtttaaagatacaaaaaatcttgtattttttttttgtgtgtgtttacaagtagtaaatttattttcagctgtctgcctatgaagttcattgtgtagaaggatttattatgaccccctttgttccaagcatgcagtatcataagaactggaaaaactcaaatccgccaaaaatccacagctgacagttgaattgacacttttattggggcagaatggaacagtccaagaatgtagatactgattctttctccataaatgttcttatagtgtgttcatcctagagttatttttttgtttgtttttttcctttttggatcttgattgataactgccatgatattttgctttgatgtgtttctacatgtagttgcacacggttcagtaaaaataatgctgctatcgagtatgcaaatattgaagtatgatggtttgactgtatggcagtgttgtagcagcctcttgtttttttccccattgcctctttttttaaaaaacttataaagtcactttttatttttcctcagtcttcaatgacgagagcaatattaagaagacattgctatctaatttttaatctttttaaatgaaaaattcctatgttcagtagcgtggttgatgctattgtttagccttcccctccaaattgtatacattggcttggaatgttcacaacttgcgtgcgtgggataaaccggccanggggcgaatttcccca

SEQ ID NO: 67603 - DNA, 1192 bp, Homo sapiens
aagaggtggatgaagatggagaggaggaggaggaagaggaggaggaggaagaggaggaggaggaggaggaagaagaagaatatgaacaggatgagagagaccagaaagaggagggaaatgattatgacactcgaagtgaggccagtgactctggttctgaatctgtttccttcacagatgggtctgtcagatctggttcaggcacagatggatcagatgagaaaaagaaggaaaggaagagagctagaggcatatctccaattgtttttgatagaagtggaagctctgcatcagagtcatatgcaggttcagaaaagaagcatgagaaattatcatcttccgttcgtgctgtccgaaaagatcaaaccagtaaactcaaatatgtgcttcaagatgcaagatttttcctcataaagagtaacaaccatgagaatgtgtctcttgccaaagcgaagggtgtatggtccacgctccctgtaaatgagaagaaattaaatcttgcatttagatctgcaaggagtgttatcttaatattttctgtcagagagagtggaaaatttcaagggtttgcaagactttcttcagaatcacatcacggaggatctcctatacactgggtgcttccagcaggaatgagtgctaaaatgctgggaggtgtctttaaaattgactggatttgcaggcgtgaattacccttcactaagtcggctcatctcaccaatccttggaatgaacataaaccagtaaagatcggacgtgatggacaggaaattgaacttgaatgtggaacccagctttgtcttctgtttccccccgatgaaagtattgacttgtatcaggtcattcataaaatgcgtcacaagagaagaatgcattctcagccccgatcacgaggacgtccatcccgtcgagaaccagtccgggatgtgggaaggcgtcgaccagaagattatgatattcataacagcagaaagaaaccaaggattgactatccccctgagtttcaccagagaccagggtatttaaaggatccacgataccaggaagtggacagacgattttcaggagttcgccgagatgtgtttttaaatgggtcctacaatgattatgtgagggaatttcataacatgggaccaccaccaccttggcaaggaatgcccccttacccaggatggtgtggaggttgttccat

SEQ ID NO: 67604 - DNA, 563 bp, Homo sapiens
agggcatttcgggagcgggattgtttcgcgcaggaagcaggctccattttagcgccgcccgccgtcgccatctgtttcccttccctcccccatacctagcccgagtctgagccctaacgagaaggctgggcctaggccgctggatgctggagtgaaaggaagggagaaagggaaaaagcgggaagagtcgagaaggctgagtgttaagaggccaagtgcgacgcgcgtatccgggcagacggactgacggacgggcccgtgcttctgccgcggctgcggcgcccgcgcgagtcgcgtctaagcggcggcggcggtggcagcggcggaaaccgaaggggagccatggcggctgacagtcgggaggagaaagatggagaacttaatgttctggatgatattttaactgaagtaccagaacaagatgatgaactgtataatccagagagtgaacaagataaaaatgagaaaaaggatcaaagctacagctcatagcaactatcatgttttaggtacttaccatatacttcacttactaagtactttatttatttatttatttattt

SEQ ID NO: 67605 - DNA, 694 bp, Homo sapiens
atggaatctactgataccaaacgacaaaagccttctgtccattcaagacaactggtttctaagccactgagctcatctgttagcaataacaaaagaatagttagtacaaaaggaaagtcagccacagagtataaaaatgaggaatatcaaagatctgaaagaaacaagcgtctagatgctgatcggaaaattcgtctatcaagtagtgcctccagagaaccttataagaatcaacctgaaaaaacctgtgtccggaaaagggatcctgaaaggagggccaaatctcctacgccagatggttctgaggtagtaaatattattgcagatataaaacagaaagccattctttttgaggctttagaactgtttattcaccctgaccttgtcttttatatgactgctgattccctttttctttaaacatcagagaattgggcttgaagtggatagacgtgcaagcagatccagccagtcttctaaggaagaagtgaactctgaagaatatggctctgaccatgagactggcagcagtggttcttctgatgagcaagggaacaacactgagaatgaggaggaaggagtggaagaagatgtggaggaagatgaagaagtagaagaagatgcagaagaagatgaagaggtggatgaagatggagaggaggaggaggaagaggaggaggaggaagaggaggag

SEQ ID NO: 67606 - DNA, 1865 bp, Homo sapiens
aaaagcgccagctgaggggccgctgcgggtggagtgcggcggagtcggcctcgcgaccccagcttgatccgccgcctgctgcaccgcgcctccgccgcgttcctgcgcgtcccgagccccgacggccgcgtgagtcccgtccgtgcggggaaggcagggccgggtcggcgccgcctgtggagaggacccggcggccgggcctgcttggagccgggcgcggtggcagcggcggcagcggcggcgacttccgaggcccgggctagacagcgcagggccatggctgaggcggccccggccccgacatctgaatgggactccgagtgccttacatccctgcagccccttcctcttcctacacccccagcagcaaatgaggcacacctgcagacagcagctatctctctgtggacagtggtggccgccgtgcaggctatagagaggaaggtggagatccacagccggcgactcctacacctagaaggtcggacagggacagcagagaagaaactagccagctgtgaaaagacagttaccgagcttgggaaccagctggagggcaagtgggccgtgctgggaaccctgctgcaggagtacgggctgctgcagaggcggctggagaacttggagaacctgctgcgcaacaggaacttctggatcctgcggctccctccaggtattaagggagatatcccaaaggtgcctgtggcatttgatgatgtctccatctacttttccactccagagtgggaaaaattagaagaatggcaaaaggaatgtgtagccagcagggacctaaactttggcaaaaagtgaacacaattcaaatacgaatgaaggaagagccctcagatggaacgaaaggcgatgtgcaaggccatcccagagagacggaagcaggtgcgatactaagcctcagcccaagaataaaagagagttcaactgttactcttttctttcatcaatcccctatcagttagaactgcaggccagttccaaagagtgtttgcttaagattcaaaagtgggtaagtaaaatggatcagtgggaaggataaggtgtccaacagaaagtgtggaggagaaactcttggcctatcaagtgctcctgagagaaaccatgcaatttaacacttcagttaaagaaatacatgagaactgcttgtcatgaccagacaagataggaaaggggaaaccccagaaacgtgctcttcatctgtcagccttttggaccaagaagctgtcactatcacacataagcaccattcccttagagtggatccaggtgttgactataaccagatttactctttgcttactaggttttccattgtcaccattggatgaacctctggtttagccacagttgtgaaaataaatggaagttggttgattgtctagaaagtgcaagaagatggccctgctccttttctgctgaacatttagtattggaaactcctacttcccttttcattaataatgtgtgcaagtttcctattagcggggaaggtgtggggctctgctgggcttctcttgagcatatctgagaaatgatgttcatgtctatctcaaccaggaccagaccctgtgacttactcggtaataacagtccacacaagcctcgttgatattaaaaaaaaaaaaaaaaaaggacctcattccaaatggaatgggaatccctaatttctgctcagattttctctgaggaggggcaggactcctgcccttcctctcatgtcttagcttcttaaactacaaaaagcatcctcagtgactgcctgagggcagctcagtagccatgaacaaaagcatctttctttctcaaaaatattttcttacggacaaggacctctgatgtcaccaaatatg

SEQ ID NO: 67607 - DNA, 5660 bp, Homo sapiens
aaaagcgccagctgaggggccgctgcgggtggagtgcggcggagtcggcctcgcgaccccagcttgatccgccgcctgctgcaccgcgcctccgccgcgttcctgcgcgtcccgagccccgacggccgcgtgagtcccgtccgtgcggggaaggcagggccgggtcggcgccgcctgtggagaggacccggcggccgggcctgcttggagccgggcgcggtggcagcggcggcagcggcggcgacttccgaggcccgggctagacagcgcagggccatggctgaggcggccccggccccgacatctgaatgggactccgagtgccttacatccctgcagccccttcctcttcctacacccccagcagcaaatgaggcacacctgcagacagcagctatctctctgtggacagtggtggccgccgtgcaggctatagagaggaaggtggagatccacagccggcgactcctacacctagaaggtcggacagggacagcagagaagaaactagccagctgtgaaaagacagttaccgagcttgggaaccagctggagggcaagtgggccgtgctgggaaccctgctgcaggagtacgggctgctgcagaggcggctggagaacttggagaacctgctgcgcaacaggaacttctggatcctgcggctccctccaggtattaagggagatatcccaaaggtgcctgtggcatttgatgatgtctccatctacttttccactccagagtgggaaaaattagaagaatggcaaaaggaactttacaagaatatcatgaagggcaactacgagtctctcatctccatggattatgctataaatcaacctgatgtcttatctcagattcaaccagaaggggaacataatacagaggaccaggcagggccagaggaaagtgagattcccacagaccccagtgaagagcctggtatttcaacatcagatattctgtcttggattaaacaagaagaagagcctcaggttggggccccaccggagtccaaggagagtgacgtgtacaaaagcacttatgctgatgaagagcttgtcatcaaagctgaaggccttgctagatcctcgttgtgccctgaggttccagtccctttctcttctccaccagcagcagcaaaggatgctttttcagatgtggctttcaaaagccagcagtctacatccatgacaccttttggacgtccagccactgacctgcctgaagcctctgagggacaagtgacttttactcagttgggtagctatcccctcccacctccagttggcgagcaggtgttctcatgccaccactgtggcaagaatctcagccaagacatgttgctgacccaccaatgtagccatgctactgagcaccccttaccctgtgcccagtgccctaagcactttactccacaggcggacctcagcagcacctcccaggaccatgccagcgagacaccccccacctgcccacactgtgccaggacttttactcacccatcaagacttacctaccatcttcgggtccataacagcactgagcgtcctttcccctgtcctgattgccccaagcgctttgctgaccaggctcgactcaccagccaccggagagctcatgcaagcgaaaggcccttccgctgtgcccagtgcggcaggagcttcagcttgaaaatcagcctcctgctccaccagcggggtcatgcacaagagcgccctttctcctgccctcagtgtggcattgacttcaacggccactcggccctgatccgccaccagatgatccacacaggcgagcgtccttacccctgcactgactgcagtaagagcttcatgcgcaaggagcacctgctgaaccaccggcggctgcacacaggcgagcggcccttcagttgtcctcactgtggcaagagcttcatccgcaagcaccacctaatgaaacaccagcgcatccacaccggggagcggccctacccctgctcctactgtggcaggagcttccgctacaaacagacactcaaggaccacctccgttcaggccacaatggaggctgtgggggtgatagtgacccatcaggtcagccacccaacccaccaggtcccctcataactgggcttgaaacttctggcctgggtgtcaacactgaaggtctagagaccaaccagtggtatggggaagggagtggagggggagttttgtaaatccaaatctctgtggcttcatgcttgtatatgctcacagcagggcacaaaatccaagagaaggtctgtgagccccatccaacacccacagtaattattatctggcacatcaatgaatttggggtcctatacacttgagacatgcttgtgttttggaatttcacacccttacaagaataccacattttgaaacccagaaagacctggaaaggagcccagcatgtccatcttttcaaagatacaacaaaagcagaagttacaagaatattgcggagaggttggaaagcaggatttaacctctagttctcttgttctcagagaacagcaggttgatagtagattatgtctctaggtagagacagatacatgagaagagcctccaaaactggaagcccatcataaggcatgagaatgtttaactataaagccttttattagttctttgatagctaagatggttgttggagaaagtgcttaagccactgtttatgttgctgcctcctctctcaaaaccagccaagatctgttcacacacctctgtggctgtctttccctgaaacatggtaactcaagactgcctgcctaggtttcttagattaattattcacataaattttgtttaatattggttgaacaagaaatctgactttaaaagattattaaggagaatattccttaactatactggcttgatttgaaacaggctcttattgccatttaaactgccagaaatctttgccaaggtcctggttaaaaaaattggaaacggttttcttagccccagctttaaaagctagagatctcagagaaatagctggcttaacaatgacagaacagcctaaaatttgtgcctacaccatgttctgagagtcgttcacatcaaattcttatcttttccaagccagtaagttggcttctccattcctggtgtctgatattcttgacaatcatcagcaacaaagatcacagcactttccagaagcatggagcttcagaaagtgccagtgaactcttggtcctcagtagtgagatgataacagtgttataatgcagcttccttgagccatcagagagagtgtatgttcaccctatctggctgtatcccattggcagtggacagattgaggaaattcctagatcactgagagctaagcaccatgcatagacaacagtttgttcttgcctgtgttgcttttagggactttgactaccacatgttcttttcttggggtgatttaatcacctgggagcatctgagtctgctcctaagtggctttgcaactgggcctaagttctgtttcctttatggatctcaaattttcatctgcacaatgaggctgttgaaaggaaaaaaagtgagcctctaggaattattcaaaaaaagtctgtgatacattccttttcctgccaaagttctgtctctgtctttggcttctgtccaggcaaagctaaataagacagcaaagtcaaagcagataaattcttgttgaaacttgactaaaatttatttgatttgttgttttactcccacttggaatcctgaggtagaagacagaatgcagaagtcttacatcttgggcaggaaactggtttattcctatactcttgtttcctctgcttcttcctgaggtctagaacaaggtctggaaatgtttagacaggatattttcttgatgaagtgataaggaaaggacccatttttttgctcatcacctagcccaaccttcactctctctagttatgcataacaacactagaagaaggtgttagcccagctaactttgcttctgggaaggctatgtctgaacatgttgctctgtaggataatcacacttagaaaacatctgctccatgacattcacaataccagggaccatgggagacacaagaaatgtgtgtctgctgtcataacttacagtgaaaaagcccaataatacagaacaagacatgatgggcaataccctagcatattgggattaagagctttctagccagaatctggacctataccatgggaaaatttaggggtgctgggaatcccaaagccaaggttctggcttcattggcaacccactaggaacttgaatgtgagattcagctctagtttgcaccttgatttccccagtgaaaagggagaagagccaaagtattgtctaggtgctgagttcccttttctgagtggatttcaagcatttgccagggtatgctggaggagggactcctaaagtaggtgagatgtgggactaggtaacactttaaatacttttttactcaaagatttgccaagaacacagcttattagtgaaagagacctgtggattgaaatggctgcagatagatcccgcagtcccttctgaaaggaactgtgtagccagcagggacctaaactttggcaaaaagtgaacacaattcaaatacgaatgaaggaagagccctcagatggaacgaaaggcgatgtgcaaggccatcccagagagacggaagcaggtgcgatactaagcctcagcccaagaataaaagagagttcaactgttactcttttctttcatcaatcccctatcagttagaactgcaggccagttccaaagagtgtttgcttaagattcaaaagtgggtaagtaaaatggatcagtgggaaggataaggtgtccaacagaaagtgtggaggagaaactcttggcctatcaagtgctcctgagagaaaccatgcaatttaacacttcagttaaagaaatacatgagaactgcttgtcatgaccagacaagataggaaaggggaaaccccagaaacgtgctcttcatctgtcagccttttggaccaagaagctgtcactatcacacataagcaccattcccttagagtggatccaggtgttgactataaccagatttactctttgcttactaggttttccattgtcaccattggatgaacctctggtttagccacagttgtgaaaataaatggaagttggttgattgtctagaaagtgcaagaagatggccctgctccttttctgctgaacatttagtattggaaactcctacttcccttttcattaataatgtgtgcaagtttcctattagcggggaaggtgtggggctctgctgggcttctcttgagcatatctgagaaatgatgttcatgtctatctcaaccaggaccagaccctgtgacttactcggtaataacagtccacacaagcctcgttgatattaaaaaaaaaaaaaaaaaaggacctcattccaaatggaatgggaatccctaatttctgctcagattttctctgaggaggggcaggactcctgcccttcctctcatgtcttagcttcttaaactacaaaaagcatcctcagtgactgcctgagggcagctcagtagccatgaacaaaagcatctttctttctcaaaaatattttcttacggacaaggacctctgatgtcaccaaatatg

SEQ ID NO: 67608 - DNA, 5197 bp, Homo sapiens
aaaagcgccagctgaggggccgctgcgggtggagtgcggcggagtcggcctcgcgaccccagcttgatccgccgcctgctgcaccgcgcctccgccgcgttcctgcgcgtcccgagccccgacggccgcgtgagtcccgtccgtgcggggaaggcagggccgggtcggcgccgcctgtggagaggacccggcggccgggcctgcttggagccgggcgcggtggcagcggcggcagcggcggcgacttccgaggcccgggctagacagcgcagggccatggctgaggcggccccggccccgacatctgaatgggactccgagtgccttacatccctgcagccccttcctcttcctacacccccagcagcaaatgaggcacacctgcagacagcagctatctctctgtggacagtggtggccgccgtgcaggctatagagaggaaggtggagatccacagccggcgactcctacacctagaaggtcggacagggacagcagagaagaaactagccagctgtgaaaagacagttaccgagcttgggaaccagctggagggcaagtgggccgtgctgggaaccctgctgcaggagtacgggctgctgcagaggcggctggagaacttggagaacctgctgcgcaacaggaacttctggatcctgcggctccctccaggtattaagggagatatcccaaaggtgcctgtggcatttgatgatgtctccatctacttttccactccagagtgggaaaaattagaagaatggcaaaaggaactttacaagaatatcatgaagggcaactacgagtctctcatctccatggattatgctataaatcaacctgatgtcttatctcagattcaaccagaaggggaacataatacagaggaccaggcagggccagaggaaagtgagattcccacagaccccagtgaagagcctggtatttcaacatcagatattctgtcttggattaaacaagaagaagagcctcaggttggggccccaccggagtccaaggagagtgacgtgtacaaaagcacttatgctgatgaagagcttgtcatcaaagctgaaggccttgctagatcctcgttgtgccctgaggttccagtccctttctcttctccaccagcagcagcaaaggatgctttttcagatgtggctttcaaaagccagcagtctacatccatgacaccttttggacgtccagccactgacctgcctgaagcctctgagggacaagtgacttttactcagttgggtagctatcccctcccacctccagttggcgagcaggtgttctcatgccaccactgtggcaagaatctcagccaagacatgttgctgacccaccaatgtagccatgctactgagcaccccttaccctgtgcccagtgccctaagcactttactccacaggcggacctcagcagcacctcccaggaccatgccagcgagacaccccccacctgcccacactgtgccaggacttttactcacccatcaagacttacctaccatcttcgggtccataacagcactgagcgtcctttcccctgtcctgattgccccaagcgctttgctgaccaggctcgactcaccagccaccggagagctcatgcaagcgaaaggcccttccgctgtgcccagtgcggcaggagcttcagcttgaaaatcagcctcctgctccaccagcggggtcatgcacaagagcgccctttctcctgccctcagtgtggcattgacttcaacggccactcggccctgatccgccaccagatgatccacacaggcgagcgtccttacccctgcactgactgcagtaagagcttcatgcgcaaggagcacctgctgaaccaccggcggctgcacacaggcgagcggcccttcagttgtcctcactgtggcaagagcttcatccgcaagcaccacctaatgaaacaccagcgcatccacaccggggagcggccctacccctgctcctactgtggcaggagcttccgctacaaacagacactcaaggaccacctccgttcaggccacaatggaggctgtgggggtgatagtgacccatcaggtcagccacccaacccaccaggtcccctcataactgggcttgaaacttctggcctgggtgtcaacactgaaggtctagagaccaaccagtggtatggggaagggagtggagggggagttttgtaaatccaaatctctgtggcttcatgcttgtatatgctcacagcagggcacaaaatccaagagaaggtctgtgagccccatccaacacccacagtaattattatctggcacatcaatgaatttggggtcctatacacttgagacatgcttgtgttttggaatttcacacccttacaagaataccacattttgaaacccagaaagacctggaaaggagcccagcatgtccatcttttcaaagatacaacaaaagcagaagttacaagaatattgcggagaggttggaaagcaggatttaacctctagttctcttgttctcagagaacagcaggttgatagtagattatgtctctaggtagagacagatacatgagaagagcctccaaaactggaagcccatcataaggcatgagaatgtttaactataaagccttttattagttctttgatagctaagatggttgttggagaaagtgcttaagccactgtttatgttgctgcctcctctctcaaaaccagccaagatctgttcacacacctctgtggctgtctttccctgaaacatggtaactcaagactgcctgcctaggtttcttagattaattattcacataaattttgtttaatattggttgaacaagaaatctgactttaaaagattattaaggagaatattccttaactatactggcttgatttgaaacaggctcttattgccatttaaactgccagaaatctttgccaaggtcctggttaaaaaaattggaaacggttttcttagccccagctttaaaagctagagatctcagagaaatagctggcttaacaatgacagaacagcctaaaatttgtgcctacaccatgttctgagagtcgttcacatcaaattcttatcttttccaagccagtaagttggcttctccattcctggtgtctgatattcttgacaatcatcagcaacaaagatcacagcactttccagaagcatggagcttcagaaagtgccagtgaactcttggtcctcagtagtgagatgataacagtgttataatgcagcttccttgagccatcagagagagtgtatgttcaccctatctggctgtatcccattggcagtggacagattgaggaaattcctagatcactgagagctaagcaccatgcatagacaacagtttgttcttgcctgtgttgcttttagggactttgactaccacatgttcttttcttggggtgatttaatcacctgggagcatctgagtctgctcctaagtggctttgcaactgggcctaagttctgtttcctttatggatctcaaattttcatctgcacaatgaggctgttgaaaggaaaaaaagtgagcctctaggaattattcaaaaaaagtctgtgatacattccttttcctgccaaagttctgtctctgtctttggcttctgtccaggcaaagctaaataagacagcaaagtcaaagcagataaattcttgttgaaacttgactaaaatttatttgatttgttgttttactcccacttggaatcctgaggtagaagacagaatgcagaagtcttacatcttgggcaggaaactggtttattcctatactcttgtttcctctgcttcttcctgaggtctagaacaaggtctggaaatgtttagacaggatattttcttgatgaagtgataaggaaaggacccatttttttgctcatcacctagcccaaccttcactctctctagttatgcataacaacactagaagaaggtgttagcccagctaactttgcttctgggaaggctatgtctgaacatgttgctctgtaggataatcacacttagaaaacatctgctccatgacattcacaataccagggaccatgggagacacaagaaatgtgtgtctgctgtcataacttacagtgaaaaagcccaataatacagaacaagacatgatgggcaataccctagcatattgggattaagagctttctagccagaatctggacctataccatgggaaaatttaggggtgctgggaatcccaaagccaaggttctggcttcattggcaacccactaggaacttgaatgtgagattcagctctagtttgcaccttgatttccccagtgaaaagggagaagagccaaagtattgtctaggtgctgagttcccttttctgagtggatttcaagcatttgccagggtatgctggaggagggactcctaaagtaggtgagatgtgggactaggtaacactttaaatacttttttactcaaagatttgccaagaacacagcttattagtgaaagagacctgtggattgaaatggctgcagatagatcccgcagtcccttctgaaaggaactgtgtagccagcagggacctaaactttggcaaaaagtgaacacaattcaaatacgaatgaaggaagagccctcagatggaacgaaaggcgatgtgcaaggccatcccagagagacggaagcaggtgcgatactaagcctcagcccaagaataaaagagagttcaactgttactcttttctttcatcaatcccctatcagttagaactgcaggccagttccaaagagtgtttgcttaagattcaaaagtgggtaagtaaaatggatcagtgggaaggataaggtgtccaacagaaagtgtggaggagaaactcttggcctatcaagtgctcctgagagaaaccttacactggaagcacaaaaagaagacgagaacaacaatgaccagaaagccaccgaagaggaaacgagcaaaccaaccagtagtgaaagcgggaaaaccaccgaaagagaggacacaacaaccaagaagaaacaccaaaagagaggcaaacaaggacacacaaaaagggggaactataaccagatttactctttgcttactagaaaaccggcgtcaaacagaccagaacaatagagacccacagttgtgaaaataaatggaagttggttgattgtctagaaagtgca

SEQ ID NO: 67609 - DNA, 5200 bp, Homo sapiens
aaaagcgccagctgaggggccgctgcgggtggagtgcggcggagtcggcctcgcgaccccagcttgatccgccgcctgctgcaccgcgcctccgccgcgttcctgcgcgtcccgagccccgacggccgcgtgagtcccgtccgtgcggggaaggcagggccgggtcggcgccgcctgtggagaggacccggcggccgggcctgcttggagccgggcgcggtggcagcggcggcagcggcggcgacttccgaggcccgggctagacagcgcagggccatggctgaggcggccccggccccgacatctgaatgggactccgagtgccttacatccctgcagccccttcctcttcctacacccccagcagcaaatgaggcacacctgcagacagcagctatctctctgtggacagtggtggccgccgtgcaggctatagagaggaaggtggagatccacagccggcgactcctacacctagaaggtcggacagggacagcagagaagaaactagccagctgtgaaaagacagttaccgagcttgggaaccagctggagggcaagtgggccgtgctgggaaccctgctgcaggagtacgggctgctgcagaggcggctggagaacttggagaacctgctgcgcaacaggaacttctggatcctgcggctccctccaggtattaagggagatatcccaaaggtgcctgtggcatttgatgatgtctccatctacttttccactccagagtgggaaaaattagaagaatggcaaaaggaactttacaagaatatcatgaagggcaactacgagtctctcatctccatggattatgctataaatcaacctgatgtcttatctcagattcaaccagaaggggaacataatacagaggaccaggcagggccagaggaaagtgagattcccacagaccccagtgaagagcctggtatttcaacatcagatattctgtcttggattaaacaagaagaagagcctcaggttggggccccaccggagtccaaggagagtgacgtgtacaaaagcacttatgctgatgaagagcttgtcatcaaagctgaaggccttgctagatcctcgttgtgccctgaggttccagtccctttctcttctccaccagcagcagcaaaggatgctttttcagatgtggctttcaaaagccagcagtctacatccatgacaccttttggacgtccagccactgacctgcctgaagcctctgagggacaagtgacttttactcagttgggtagctatcccctcccacctccagttggcgagcaggtgttctcatgccaccactgtggcaagaatctcagccaagacatgttgctgacccaccaatgtagccatgctactgagcaccccttaccctgtgcccagtgccctaagcactttactccacaggcggacctcagcagcacctcccaggaccatgccagcgagacaccccccacctgcccacactgtgccaggacttttactcacccatcaagacttacctaccatcttcgggtccataacagcactgagcgtcctttcccctgtcctgattgccccaagcgctttgctgaccaggctcgactcaccagccaccggagagctcatgcaagcgaaaggcccttccgctgtgcccagtgcggcaggagcttcagcttgaaaatcagcctcctgctccaccagcggggtcatgcacaagagcgccctttctcctgccctcagtgtggcattgacttcaacggccactcggccctgatccgccaccagatgatccacacaggcgagcgtccttacccctgcactgactgcagtaagagcttcatgcgcaaggagcacctgctgaaccaccggcggctgcacacaggcgagcggcccttcagttgtcctcactgtggcaagagcttcatccgcaagcaccacctaatgaaacaccagcgcatccacaccggggagcggccctacccctgctcctactgtggcaggagcttccgctacaaacagacactcaaggaccacctccgttcaggccacaatggaggctgtgggggtgatagtgacccatcaggtcagccacccaacccaccaggtcccctcataactgggcttgaaacttctggcctgggtgtcaacactgaaggtctagagaccaaccagtggtatggggaagggagtggagggggagttttgtaaatccaaatctctgtggcttcatgcttgtatatgctcacagcagggcacaaaatccaagagaaggtctgtgagccccatccaacacccacagtaattattatctggcacatcaatgaatttggggtcctatacacttgagacatgcttgtgttttggaatttcacacccttacaagaataccacattttgaaacccagaaagacctggaaaggagcccagcatgtccatcttttcaaagatacaacaaaagcagaagttacaagaatattgcggagaggttggaaagcaggatttaacctctagttctcttgttctcagagaacagcaggttgatagtagattatgtctctaggtagagacagatacatgagaagagcctccaaaactggaagcccatcataaggcatgagaatgtttaactataaagccttttattagttctttgatagctaagatggttgttggagaaagtgcttaagccactgtttatgttgctgcctcctctctcaaaaccagccaagatctgttcacacacctctgtggctgtctttccctgaaacatggtaactcaagactgcctgcctaggtttcttagattaattattcacataaattttgtttaatattggttgaacaagaaatctgactttaaaagattattaaggagaatattccttaactatactggcttgatttgaaacaggctcttattgccatttaaactgccagaaatctttgccaaggtcctggttaaaaaaattggaaacggttttcttagccccagctttaaaagctagagatctcagagaaatagctggcttaacaatgacagaacagcctaaaatttgtgcctacaccatgttctgagagtcgttcacatcaaattcttatcttttccaagccagtaagttggcttctccattcctggtgtctgatattcttgacaatcatcagcaacaaagatcacagcactttccagaagcatggagcttcagaaagtgccagtgaactcttggtcctcagtagtgagatgataacagtgttataatgcagcttccttgagccatcagagagagtgtatgttcaccctatctggctgtatcccattggcagtggacagattgaggaaattcctagatcactgagagctaagcaccatgcatagacaacagtttgttcttgcctgtgttgcttttagggactttgactaccacatgttcttttcttggggtgatttaatcacctgggagcatctgagtctgctcctaagtggctttgcaactgggcctaagttctgtttcctttatggatctcaaattttcatctgcacaatgaggctgttgaaaggaaaaaaagtgagcctctaggaattattcaaaaaaagtctgtgatacattccttttcctgccaaagttctgtctctgtctttggcttctgtccaggcaaagctaaataagacagcaaagtcaaagcagataaattcttgttgaaacttgactaaaatttatttgatttgttgttttactcccacttggaatcctgaggtagaagacagaatgcagaagtcttacatcttgggcaggaaactggtttattcctatactcttgtttcctctgcttcttcctgaggtctagaacaaggtctggaaatgtttagacaggatattttcttgatgaagtgataaggaaaggacccatttttttgctcatcacctagcccaaccttcactctctctagttatgcataacaacactagaagaaggtgttagcccagctaactttgcttctgggaaggctatgtctgaacatgttgctctgtaggataatcacacttagaaaacatctgctccatgacattcacaataccagggaccatgggagacacaagaaatgtgtgtctgctgtcataacttacagtgaaaaagcccaataatacagaacaagacatgatgggcaataccctagcatattgggattaagagctttctagccagaatctggacctataccatgggaaaatttaggggtgctgggaatcccaaagccaaggttctggcttcattggcaacccactaggaacttgaatgtgagattcagctctagtttgcaccttgatttccccagtgaaaagggagaagagccaaagtattgtctaggtgctgagttcccttttctgagtggatttcaagcatttgccagggtatgctggaggagggactcctaaagtaggtgagatgtgggactaggtaacactttaaatacttttttactcaaagatttgccaagaacacagcttattagtgaaagagacctgtggattgaaatggctgcagatagatcccgcagtcccttctgaaaggaactgtgtagccagcagggacctaaactttggcaaaaagtgaacacaattcaaatacgaatgaaggaagagccctcagatggaacgaaaggcgatgtgcaaggccatcccagagagacggaagcaggtgcgatactaagcctcagcccaagaataaaagagagttcaactgttactcttttctttcatcaatcccctatcagttagaactgcaggccagttccaaagagtgtttgcttaagattcaaaagtgggtaagtaaaatggatcagtgggaaggataaggtgtccaacagaaagtgtggaggagaaactcttggcctatcaagtgctcctgagagaaaccatgcaatttaacacttcagttaaagaaatacatgagaactgcttgtcatgaccagacaagataggaaaggggaaaccccagaaacgtgctcttcatctgtcagccttttggaccaagaagctgtcactatcacacataagcaccattcccttagagtggatccaggtgttgactataaccagatttactctttgcttactaggttttccattgtcaccattggatgaacctctggtttagccacagttgtgaaaataaatggaagttggttgattgtctagaaagtgca

SEQ ID NO: 67610 - DNA, 787 bp, Homo sapiens
aaaagcgccagctgaggggccgctgcgggtggagtgcggcggagtcggcctcgcgaccccagcttgatccgccgcctgctgcaccgcgcctccgccgcgttcctgcgcgtcccgagccccgacggccgcgtgagtcccgtccgtgcggggaaggcagggccgggtcggcgccgcctgtggagaggacccggcggccgggcctgcttggagccgggcgcggtggcagcggcggcagcggcggcgacttccgaggcccgggctagacagcgcagggccatggctgaggcggccccggccccgacatctgaatgggactccgagtgccttacatccctgcagccccttcctcttcctacacccccagcagcaaatgaggcacacctgcagacagcagctatctctctgtggacagtggtggccgccgtgcaggctatagagaggaaggtggagatccacagccggcgactcctacacctagaaggtcggacagggacagcagagaagaaactagccagctgtgaaaagacagttaccgagcttgggaaccagctggagggcaagtgggccgtgctgggaaccctgctgcaggagtacgggctgctgcagaggcggctggagaacttggagaacctgctgcgcaacaggaacttctggatcctgcggctccctccaggtattaagggagatatcccaaagctcggtaactgtcttttcacagctggctagtttcttctctgctgtccctgtccgaccttccaggtgtaggagtcgccggctgggtctcacg

SEQ ID NO: 67611 - DNA, 1415 bp, Homo sapiens
cgcagcggaggtagttgcgcagctggggttggtaaggtcgggccatggtggggcagaggttgggaagatggcgtggcgaggctgggcgcagagaggctggggctgcggccaggcgtggggtgcgtcggtgggcggccgcagctgcgaggagctcactgcggtcctaaccccgccgcagctcctcggacgcaggtttaacttctttattcaacaaaaatgcggattcagaaaagcacccaggaaggttgaacctcgaagatcagacccagggacaagtggtgaagcatacaagagaagtgctttgattcctcctgtggaagaaacagtcttttatccttctccctatcctataaggagtctcataaaacctttattttttactgttgggtttacaggctgtgcatttggatcagctgctatttggcaatatgaatcactgaaatccagggtccagagttattttgatggtataaaagctgattggttggatagcataagaccacaaaaagaaggagacttcagaaaggagattaacaagtggtggaataacctaagtgatggccagcggactgtgacaggtattatagctgcaaatgtccttgtattctgtttatggagagtaccttctctgcagcggacaatgatcagatatttcacatcgaatccagcctcaaaggtcctttgttctccaatgttgctgtcaacattcagtcacttctccttatttcacatggcagcaaatatgtatgttttgtggagcttctcttccagcatagtgaacattctgggtcaagagcagttcatggcagtgtacctatctgcaggtgttatttccaattttgtcagttacgtgggtaaagttgccacaggaagatatggaccatcacttggtgcatctggtgccatcatgacagtcctcgcagctgtctgcactaagatcccagaagggaggcttgccattattttccttccgatgttcacgttcacagcagggaatgccctgaaagccattatcgccatggatacagcaggaatgatcctgggatggaaattttttgatcatgcggcacatcttgggggagctctttttggaatatggtatgttacttacggtcatgaactgatttggaagaacagggagccgctagtgaaaatctggcatgaaataaggactaatggccccaaaaaaggaggtggctctaagtaaaactgggattggacagtagtggtgcatctggtccttgccgcctgagagccccaggagacatcggctagagtgaccatggctatgctcccgtctggaagatgccagcatctggcctcccactgttttcagctgtgtcccccagtccgtgtctttttagaatgtgaatgatgataaagttgtgaaataaaggtttctatctagtttgtaa

SEQ ID NO: 67612 - DNA, 748 bp, Homo sapiens
gaccacgcgtcggacccacgcgtccggttgctgtcaacattcagtcacttctccttatttcacatggcagcaaatatgtatgttttgtggagcttctcttccagcatagtgaacattctgggtcaagagcagttcatggcagtgtacctatctgcaggtgttatttccaattttgtcagttacgtgggtaaagttgccacaggaagatatggaccatcacttggtgcatctggtgccatcatgacagtcctcgcagctgtctgcactaagatcccagaagggaggcttgccattattttccttccgatgttcacgttcacagcagggaatgccctgaaagccattatcgccatggatacagcaggaatgatcctgggatggaaattttttgatcatgcggcacatcttgggggagctctttttggaatatggtatgttacttacggtcatgaactgatttggaagaacagggagccgctagtgaaaatctggcatgaaataaggactaatggccccaaaaaaggaggtggctctaagtaaaactgggattggacagtagtggtgcatctggtccttgccgcctgagagccccaggagacatcggctagagtgaccatggctatgctcccgtctggaagatgccagcatctggcctcccactgttttcagctgtgtcccccagtccgtgtctttttagaatgtgaatgatgataaagttgtgaaataaaggtttctatctagtttgtaa

SEQ ID NO: 67613 - DNA, 1439 bp, Homo sapiens
cgcagcggaggtagttgcgcagctggggttggtaaggtcgggccatggtggggcagaggttgggaagatggcgtggcgaggctgggcgcagagaggctggggctgcggccaggcgtggggtgcgtcggtgggcggccgcagctgcgaggagctcactgcggtcctaaccccgccgcagctcctcggacgcaggtttaacttctttattcaacaaaaatgcggattcagaaaagcacccaggaaggttgaacctcgaagatcagacccagggacaagtggtgaagcatacaagagaagtgctttgattcctcctgtggaagaaacagtcttttatccttctccctatcctataaggagtctcataaaacctttattttttactgttgggtttacaggctgtgcatttggatcagctgctatttggcaatatgaatcactgaaatccagggtccagagttattttgatggtataaaagctgattggttggatagcataagaccacaaaaagaaggagacttcagaaaggagattaacaagtggtggaataacctaagtgatggccagcggactgtgacaggtattatagctgcaaatgtccttgtattctgtttatggagagtaccttctctgcagcggacaatgatcagatatttcacatcgaatccagcctcaaaggtcctttgttctccaatgttgctgtcaacattcagtcacttctccttatttcacatggcagcaaatatgtatgttttgtggagcttctcttccagcatagtgaacattctgggtcaagagcagttcatggcagtgtacctatctgcaggtgttatttccaattttgtcagttacgtgggtaaagttgccacaggaagatatggaccatcacttggtgcatctggtgccatcatgacagtcctcgcagctgtctgcactaagatcccagaagggaggcttgccattattttccttccgatgttcacgttcacagcagggaatgccctgaaagccattatcgccatggatacagcaggaatgatcctgggatggaaattttttgatcatgcggcacatcttgggggagctctttttggaatatggtatgttacttacggtcatgaactgatttggaagaacagggagccgctagtgaaaatctggcatgaaataaggactaatggccccaaaaaaggaggtggctctaagtaaaactgggattggacagtagtggtgcatctggtccttgccgcctgagagccccaggagacatcggctagagtgaccatggctatgctcccgtctggaagatgccagcatctggcctcccactgttttcagctgtgtcccccagtccgtgtctttttagaatgtgaatgatgataaagttgtgaaataaaggtttctatctagtttgtaaaaaaaacaatattgaaataaaaaa

SEQ ID NO: 67614 - DNA, 1844 bp, Homo sapiens
  misc_feature (1643)..(1644): n is a, c, g, or t
  misc_feature (1688)..(1688): n is a, c, g, or t
  misc_feature (1706)..(1706): n is a, c, g, or t
  misc_feature (1778)..(1778): n is a, c, g, or t
  misc_feature (1819)..(1819): n is a, c, g, or t
cgcagcggaggtagttgcgcagctggggttggtaaggtcgggccatggtggggcagaggttgggaagatggcgtggcgaggctgggcgcagagaggctggggctgcggccaggcgtggggtgcgtcggtgggcggccgcagctgcgaggagctcactgcggtcctaaccccgccgcagctcctcggacgcaggtttaacttctttattcaacaaaaatgcggattcagaaaagcacccaggaaggttgaacctcgaagatcagacccagggacaagtggtgaagcatacaagagaagtgctttgattcctcctgtggaagaaacagtcttttatccttctccctatcctataaggagtctcataaaacctttattttttactgttgggtttacaggctgtgcatttggatcagctgctatttggcaatatgaatcactgaaatccagggtccagagttattttgatggtataaaagctgattggttggatagcataagaccacaaaaagaaggagacttcagaaaggagattaacaagtggtggaataacctaagtgatggccagcggactgtgacaggtattatagctgcaaatgtccttgtattctgtttatggagagtaccttctctgcagcggacaatgatcagatatttcacatcgaatccagcctcaaaggtcctttgttctccaatgttgctgtcaacattcagtcacttctccttatttcacatggcagcaaatatgtatgttttgtggagcttctcttccagcatagtgaacattctgggtcaagagcagttcatggcagtgtacctatctgcaggtgttatttccaattttgtcagttacgtgggtaaagttgccacaggaagatatggaccatcacttggtgcatctggtgccatcatgacagtcctcgcagctgtctgcactaagatcccagaagggaggcttgccattattttccttccgatgttcacgttcacagcagggaatgccctgaaagccattatcgccatggatacagcaggaatgatcctgggatggaaattttttgatcatgcggcacatcttgggggagctctttttggaatatggtatgttacttacggtcatgaactgatttggaagaacagggagccgctagtgaaaatctggcatgaaataaggactaatggccccaaaaaaggaggtggctctaagtaaaactgggattggacagtagtggtgcatctggtccttgccgcctgagagccccaggagacatcggctagagtgaccatggctatgctcccgtctggaagatgccagcatctggcctcccactgttttcagctgtgtcccccagtccgtgtctttttagaatgtgaatgatgataaagttgtgaaataaaggtttctatctagtttgtaacaaataaccgctcgcagagagccggctctcgaggagcatctttgcggcgttctctgtatttcctgaatctgaatgtcggcctgccttgctagattggggaaagtctcctggataatatcctgcagagtgttttccaacttggttccattctccctgtcactttcaggtacaccaatcagacgtagatttggtcttttcacatagtcccatatttcttggagggcttgnntaaattcttttaatcttttttctctaaacctccccttctagctncatttcattcaatttcgncttccatcactgatacccctttcttccagtgatcgcattcgctcctgaggctttctgcactcttcacgtagnttctcgagccctgggctttcagctccatcagctcctttaanggacctctcttgggtgggtattctt

SEQ ID NO: 67615 - DNA, 1025 bp, Homo sapiens
cgcagcggaggtagttgcgcagctggggttggtaaggtcgggccatggtggggcagaggttgggaagatggcgtggcgaggctgggcgcagagaggctggggctgcggccaggcgtggggtgcgtcggtgggcggccgcagctgcgaggagctcactgcggtcctaaccccgccgcagctcctcggacgcaggtttaacttctttattcaacaaaaatgcggattcagaaaagcacccaggaaggttgaacctcgaagatcagacccagggacaagtggtgaagcatacaagagaagtgctttgattcctcctgtggaagaaacagtcttttatccttctccctatcctataaggagtctcataaaacctttattttttactgttgggtttacaggctgtgcatttggatcagctgctatttggcaatatgaatcactgaaatccagggtccagagttattttgatggtataaaagctgattggttggatagcataagaccacaaaaagaaggagacttcagaaaggagattaacaagtggtggaataacctaagtgatggccagcggactgtgacaggtattatagctgcaaatgtccttgtattctgtttatggagagtaccttctctgcagcggacaatgatcagatatttcacatcgaatccagcctcaaaggtcctttgttctccaatgttgctgtcaacattcagtcacttctccttatttcacatggcagcaaatatgtatgttttgtggagcttctcttccagcatagtgaacattctgggtcaagagcagttcatggcagtgtacctatctgcaggtgttatttccaattttgtcagttacgtgggtaaagttgccacaggaagatatggaccatcacttggtgcatctggtgccatcatgacagtcctcgcagctgtctgcactaagatcccagaagggaggcttgccattattttccttccgatgttcacgttcacagcagggaatccataatgggatcctctagatcaccagg

SEQ ID NO: 67616 - DNA, 1471 bp, Homo sapiens
cgcagcggaggtagttgcgcagctggggttggtaaggtcgggccatggtggggcagaggttgggaagatggcgtggcgaggctgggcgcagagaggctggggctgcggccaggcgtggggtgcgtcggtgggcggccgcagctgcgaggagctcactgcggtcctaaccccgccgcagctcctcggacgcaggtttaacttctttattcaacaaaaatgcggattcagaaaagcacccaggaaggttgaacctcgaagatcagacccagggacaagtggtgaagcatacaagagaagtgctttgattcctcctgtggaagaaacagtcttttatccttctccctatcctataaggagtctcataaaacctttattttttactgttgggtttacaggctgtgcatttggatcagctgctatttggcaatatgaatcactgaaatccagggtccagagttattttgatggtataaaagctgattggttggatagcataagaccacaaaaagaaggagacttcagaaaggagattaacaagtggtggaataacctaagtgatggccagcggactgtgacaggtttgtgttagcttacacgttttaaccattcaagggaagagaaatcaaaccaaaaggtattatagctgcaaatgtccttgtattctgtttatggagagtaccttctctgcagcggacaatgatcagatatttcacatcgaatccagcctcaaaggtcctttgttctccaatgttgctgtcaacattcagtcacttctccttatttcacatggcagcaaatatgtatgttttgtggagcttctcttccagcatagtgaacattctgggtcaagagcagttcatggcagtgtacctatctgcaggtgttatttccaattttgtcagttacgtgggtaaagttgccacaggaagatatggaccatcacttggtgcatctggtgccatcatgacagtcctcgcagctgtctgcactaagatcccagaagggaggcttgccattattttccttccgatgttcacgttcacagcagggaatgccctgaaagccattatcgccatggatacagcaggaatgatcctgggatggaaattttttgatcatgcggcacatcttgggggagctctttttggaatatggtatgttacttacggtcatgaactgatttggaagaacagggagccgctagtgaaaatctggcatgaaataaggactaatggccccaaaaaaggaggtggctctaagtaaaactgggattggacagtagtggtgcatctggtccttgccgcctgagagccccaggagacatcggctagagtgaccatggctatgctcccgtctggaagatgccagcatctggcctcccactgttttcagctgtgtcccccagtccgtgtctttttagaatgtgaatgatgataaagttgtgaaataaaggtttctatctagtttgtaa

SEQ ID NO: 67617 - DNA, 1070 bp, Homo sapiens
gctaggagaggctgcggtgataactttattttttactcttgggtttacaggctgtgcatttggatcagctgctatttggcaatatgaatcactgaaatccagggtccagagttattttgatggtataaaagctgattggttggatagcataagaccacaaaaagaaggagacttcagaaaggagattaacaagtggtggaataacctaagtgatggccagcggactgtgacaggtattatagctgcaaatgtccttgtattctgtttatggagagtaccttctctgcagcggacaatgatcagatatttcacatcgaatccagcctcaaaggtcctttgttctccaatgttgctgtcaacattcagtcacttctccttatttcacatggcagcaaatatgtatgttttgtggagcttctcttccagcatagtgaacattctgggtcaagagcagttcatggcagtgtacctatctgcaggtgttatttccaattttgtcagttacgtgggtaaagttgccacaggaagatatggaccatcacttggtgcatctggtgccatcatgacagtcctcgcagctgtctgcactaagatcccagaagggaggcttgccattattttccttccgatgttcacgttcacagcagggaatgccctgaaagccattatcgccatggatacagcaggaatgatcctgggatggaaattttttgatcatgcggcacatcttgggggagctctttttggaatatggtatgttacttacggtcatgaactgatttggaagaacagggagccgctagtgaaaatctggcatgaaataaggactaatggccccaaaaaaggaggtggctctaagtaaaactgggattggacagtagtggtgcatctggtccttgccgcctgagagccccaggagacatcggctagagtgaccatggctatgctcccgtctggaagatgccagcatctggcctcccactgttttcagctgtgtcccccagtccgtgtctttttagaatgtgaatgatgataaagttgtgaaataaaggtttctatctagtttgtaa

SEQ ID NO: 67618 - DNA, 1029 bp, Homo sapiens
cgcagcggaggtagttgcgcagctggggttggtaaggtcgggccatggtggggcagaggttgggaagatggcgtggcgaggctgggcgcagagaggctggggctgcggccaggcgtggggtgcgtcggtgggcggccgcagctgcgaggagctcactgcggtcctaaccccgccgcagctcctcggacgcaggtattatagctgcaaatgtccttgtattctgtttatggagagtaccttctctgcagcggacaatgatcagatatttcacatcgaatccagcctcaaaggtcctttgttctccaatgttgctgtcaacattcagtcacttctccttatttcacatggcagcaaatatgtatgttttgtggagcttctcttccagcatagtgaacattctgggtcaagagcagttcatggcagtgtacctatctgcaggtgttatttccaattttgtcagttacgtgggtaaagttgccacaggaagatatggaccatcacttggtgcatctggtgccatcatgacagtcctcgcagctgtctgcactaagatcccagaagggaggcttgccattattttccttccgatgttcacgttcacagcagggaatgccctgaaagccattatcgccatggatacagcaggaatgatcctgggatggaaattttttgatcatgcggcacatcttgggggagctctttttggaatatggtatgttacttacggtcatgaactgatttggaagaacagggagccgctagtgaaaatctggcatgaaataaggactaatggccccaaaaaaggaggtggctctaagtaaaactgggattggacagtagtggtgcatctggtccttgccgcctgagagccccaggagacatcggctagagtgaccatggctatgctcccgtctggaagatgccagcatctggcctcccactgttttcagctgtgtcccccagtccgtgtctttttagaatgtgaatgatgataaagttgtgaaataaaggtttctatctagtttgtaa

SEQ ID NO: 67619 - DNA, 1124 bp, Homo sapiens
cgcagcggaggtagttgcgcagctggggttggtaaggtcgggccatggtggggcagaggttgggaagatggcgtggcgaggctgggcgcagagaggctggggctgcggccaggcgtggggtgcgtcggtgggcggccgcagctgcgaggagctcactgcggtcctaaccccgccgcagctcctcggacgcaggtttaacttctttattcaacaaaaatgcggattcagaaaagcacccaggaaggttgaacctcgaagatcagacccagggacaagtggtgaagcatacaagagaagtgctttgattcctcctgtggaagaaacagtcttttatccttctccctatcctataaggagtctcataaaacctttattttttactgttgggattaacaagtggtggaataacctaagtgatggccagcggactgtgacaggtattatagctgcaaatgtccttgtattctgtttatggagagtaccttctctgcagcggacaatgatcagatatttcacatcgaatccagcctcaagtgttatttccaattttgtcagttacgtgggtaaagttgccacaggaagatatggaccatcacttggtgcatctggtgccatcatgacagtcctcgcagctgtctgcactaagatcccagaagggaggcttgccattattttccttccgatgttcacgttcacagcagggaatgccctgaaagccattatcgccatggatacagcaggaatgatcctgggatggaaattttttgatcatgcggcacatcttgggggagctctttttggaatatggtatgttacttacggtcatgaactgatttggaagaacagggagccgctagtgaaaatctggcatgaaataaggactaatggccccaaaaaaggaggtggctctaagtaaaactgggattggacagtagtggtgcatctggtccttgccgcctgagagccccaggagacatcggctagagtgaccatggctatgctcccgtctggaagatgccagcatctggcctcccactgttttcagctgtgtcccccagtccgtgtctttttagaatgtgaatgatgataaagttgtgaaataaaggtttctatctagtttgtaa

SEQ ID NO: 67620 - DNA, 460 bp, Homo sapiens
catttctcgatgtgagtcagttttaatcggctacatagtgagtggcattcgattttaaaaatgtcaacttgggatctgtcaccatgctacttaccatttgtatgtcacactgtttgaatgtcggacctggtttgtttttctccagatggtatgttacttacggtcatgaactgatttggaagaacagggagccgctagtgaaaatctggcatgaaataaggactaatggccccaaaaaaggaggtggctctaagtaaaactgggattggacagtagtggtgcatctggtccttgccgcctgagagccccaggagacatcggctagagtgaccatggctatgctcccgtctggaagatgccagcatctggcctcccactgttttcagctgtgtcccccagtccgtgtctttttagaatgtgaatgatgataaagttgtgaaataaaggtttctatctagtt

SEQ ID NO: 67621 - DNA, 1265 bp, Homo sapiens
cgcagcggaggtagttgcgcagctggggttggtaaggtcgggccatggtggggcagaggttgggaagatggcgtggcgaggctgggcgcagagaggctggggctgcggccaggcgtggggtgcgtcggtgggcggccgcagctgcgaggagctcactgcggtcctaaccccgccgcagctcctcggacgcaggtttaacttctttattcaacaaaaatgcggattcagaaaagcacccaggaaggttgaacctcgaagatcagacccagggacaagtggtgaagcatacaagagaagtgctttgattcctcctgtggaagaaacagtcttttatccttctccctatcctataaggagtctcataaaacctttattttttactgttgggtttacaggctgtgcatttggatcagctgctatttggcaatatgaatcactgaaatccagggtccagagttattttgatggtataaaagctgattggttggatagcataagaccacaaaaagaaggagacttcagaaaggagattaacaagtggtggaataacctaagtgatggccagcggactgtgacaggtattatagctgcaaatgtccttgtattctgtttatggagagtaccttctctgcagcggacaatgatcagatatttcacatcgaatccagcctcaagtgttatttccaattttgtcagttacgtgggtaaagttgccacaggaagatatggaccatcacttggtgcatctggtgccatcatgacagtcctcgcagctgtctgcactaagatcccagaagggaggcttgccattattttccttccgatgttcacgttcacagcagggaatgccctgaaagccattatcgccatggatacagcaggaatgatcctgggatggaaattttttgatcatgcggcacatcttgggggagctctttttggaatatggtatgttacttacggtcatgaactgatttggaagaacagggagccgctagtgaaaatctggcatgaaataaggactaatggccccaaaaaaggaggtggctctaagtaaaactgggattggacagtagtggtgcatctggtccttgccgcctgagagccccaggagacatcggctagagtgaccatggctatgctcccgtctggaagatgccagcatctggcctcccactgttttcagctgtgtcccccagtccgtgtctttttagaatgtgaatgatgataaagttgtgaaataaaggtttctatctagtttgtaa

SEQ ID NO: 67622 - DNA, 1304 bp, Homo sapiens
  misc_feature (330)..(330): n is a, c, g, or t
  misc_feature (436)..(436): n is a, c, g, or t
  misc_feature (569)..(569): n is a, c, g, or t
cgcagcggaggtagttgcgcagctggggttggtaaggtcgggccatggtggggcagaggttgggaagatggcgtggcgaggctgggcgcagagaggctggggctgcggccaggcgtggggtgcgtcggtgggcggccgcagctgcgaggagctcactgcggtcctaaccccgccgcagctcctcggacgcaggtattatagctgcaaatgtccttgtattctgtttatggagagtaccttctctgcagcggacaatgatcagatatttcacatcgaatccagcctcaaaggtccaaataacaccaaaaaacatacaagcaaacaatacanaagcaccaaaaaacacagaatcaactgaatgaagaaagaataaaaatgatattcaacactgacgctaattcaatggaattgcataactaaatttgagatattcagnaacataatcgaatgaatcctaaacgaacagagaaagaaattgcaatgaatagatacattgaaaacataaggggtgcgacattgaactctgcatttaactaaagaggtagcttcattcagctatttattaacanactatatgatctcgtacaaaatacaatatcccagcatggattgaaaatcattggcttattgaagccaaaggatcgatattaggatgggttggggaggaaaaaaccggtaccctacatggaatcaccgtattctcattcgacatagaatgggggtcctataaaaagggccattattatagccttcctcacaattacatgccaggcctctttaatctattattcccaatttagcaatgcttatccttttttttattcattatcctttcactcacacgggagtttttaagcggtcggttttggtgtgcaaaacggttgaaataaaaacgttttgtcggtatttcctcattgggcgagaacgatgggtttaaacaaaacctgggttattctctttattttattgagttactatattcgaataacatactggttgttaaccaaatgtgtgtcgcggccaatagttgtctttaaattataatttggctcattttgttaaaaagcgagatttttataattcctctgtgtgcgtggggatgcaatttcctttttttcccataaactcctaggccttttttaaacctccttgtgttttttaacaatacctttctgtgaatttggttcccatagggtcaaaaaatggcgtctcctttcttgtttcaatcgttgtgcgagtagtgatttggttgtctccggcggcgggcgaattttttccagctcttgtgtaacgtctgcgggggc

SEQ ID NO: 67623 - DNA, 1754 bp, Homo sapiens
cgcagcggaggtagttgcgcagctggggttggtaaggtcgggccatggtggggcagaggttgggaagatggcgtggcgaggctgggcgcagagaggctggggctgcggccaggcgtggggtgcgtcggtgggcggccgcagctgcgaggagctcactgcggtcctaaccccgccgcagctcctcggacgcaggtttaacttctttattcaacaaaaatgcggattcagaaaagcacccaggaaggttgaacctcgaagatcagacccagggacaagtggtgaagcatacaagagaagtgctttgattcctcctgtggaagaaacagtcttttatccttctccctatcctataaggagtctcataaaacctttattttttactgttgggtttacaggctgtgcatttggatcagctgctatttggcaatatgaatcactgaaatccagggtccagagttattttgatggtataaaagctgattggttggatagcataagaccacaaaaagaaggagacttcagaaaggagattaacaagtggtggaataacctaagtgatggccagcggactgtgacaggtattatagctgcaaatgtccttgtattctgtttatggagagtaccttctctgcagcggacaatgatcagatatttcacatcgaatccagcctcaaaggtcctttgttctccaatgttgctgtcaacattcagtcacttctccttatttcacatggcagcaaatatgtatgttttgtggagcttctcttccagcatagtgaacattctgggtcaagagcagttcatggcagtgtacctatctgcaggtgttatttccaattttgtcagttacgtgggtaaagttgccacaggaagatatggaccatcacttggtgcatctggtgccatcatgacagtcctcgcagctgtctgcactaagatcccagaagggaggcttgccattattttccttccgatgttcacgttcacagcagggaatgccctgaaagccattatcgccatggatacagcaggaatgatcctgggatggaaattttttgatcatgcggcacatcttgggggagctctttttggaatatggtatgttacttacggtcatgaactgatttggaagaacagggagccgctagtgaaaatctggcatgaaataaggactaatggccccaaaaaaggaggtggctctaagtaaaactgggattggacagtagtggtgcatctggtccttgccgcctgagagccccaggagacatcggctagagtgaccatggctatgctcccgtctggaagatgccagcatctggcctcccactgttttcagctgtgtcccccagtccgtgtctttttagaatgtgaatgatgataaagttgtgaaataaaggtttctatctagtttgtaaaaaaaaaaaaaaaaaaaaacaaaaaaaaaaaaaaaaaaaaaaaaaaaaaaacaaaacaaacaaaccaaaacaaagcaaacaaaacacactcgcgcagacacaaccacatgacaacgcagagaaaagacaccacagacgagaacaacacacgcacacacgcgagaccggggccggaccgcagccaccaccacgacggacgcggcaccccagccgccccctgcccaccccagtcccacaccacccacgcacgcgccgggacagatcatatcccccgcccacgcgtccgcgcaaccgcaggcaggacggagcccccgcagcagccacagcccctctccccgc

SEQ ID NO: 67624 - DNA, 1313 bp, Homo sapiens
cgcagcggaggtagttgcgcagctggggttggtaaggtcgggccatggtggggcagaggttgggaagatggcgtggcgaggctgggcgcagagaggctggggctgcggccaggcgtggggtgcgtcggtgggcggccgcagctgcgaggagctcactgcggtcctaaccccgccgcagctcctcggacgcaggtttaacttctttattcaacaaaaatgcggattcagaaaagcacccaggaaggttgaacctcgaagatcagacccagggacaagtggtgaagcatacaagagaagtgctttgattcctcctgtggaagaaacagtcttttatccttctccctatcctataaggagtctcataaaacctttattttttactgttgggtttacaggctgtgcatttggatcagctgctatttggcaatatgaatcactgaaatccagggtccagagttattttgatggtataaaagctgattggttggatagcataagaccacaaaaagaaggagacttcagaaaggagattaacaagtggtggaataacctaagtgatggccagcggactgtgacaggtattatagctgcaaatgtccttgtattctgtttatggagagtaccttctctgcagcggacaatgatcagatatttcacatcgaatccagcctcaaaggtcctttgttctccaatgttgctgtcaacattcagtcacttctccttatttcacatggcagcaaatatgtatgttttgtggagcttctcttccagcatagtgaacattctgggtcaagagcagttcatggcagtgtacctatctgcaggtgttatttccaattttgtcagttacgtgggtaaagttgccacaggaagatatggaccatcacttggtgcagccctgaaagccattatcgccatggatacagcaggaatgatcctgggatggaaattttttgatcatgcggcacatcttgggggagctctttttggaatatggtatgttacttacggtcatgaactgatttggaagaacagggagccgctagtgaaaatctggcatgaaataaggactaatggccccaaaaaaggaggtggctctaagtaaaactgggattggacagtagtggtgcatctggtccttgccgcctgagagccccaggagacatcggctagagtgaccatggctatgctcccgtctggaagatgccagcatctggcctcccactgttttcagctgtgtcccccagtccgtgtctttttagaatgtgaatgatgataaagttgtgaaataaaggtttctatctagtttgtaa

SEQ ID NO: 67625 - DNA, 1364 bp, Homo sapiens
cgcagcggaggtagttgcgcagctggggttggtaaggtcgggccatggtggggcagaggttgggaagatggcgtggcgaggctgggcgcactgcgaggagctcactgcggtcctaaccccgccgcagctcctcggacgcaggtttaacttctttattcaacaaaaatgcggattcagaaaagcacccaggaaggttgaacctcgaagatcagacccagggacaagtggtgaagcatacaagagaagtgctttgattcctcctgtggaagaaacagtcttttatccttctccctatcctataaggagtctcataaaacctttattttttactgttgggtttacaggctgtgcatttggatcagctgctatttggcaatatgaatcactgaaatccagggtccagagttattttgatggtataaaagctgattggttggatagcataagaccacaaaaagaaggagacttcagaaaggagattaacaagtggtggaataacctaagtgatggccagcggactgtgacaggtattatagctgcaaatgtccttgtattctgtttatggagagtaccttctctgcagcggacaatgatcagatatttcacatcgaatccagcctcaaaggtcctttgttctccaatgttgctgtcaacattcagtcacttctccttatttcacatggcagcaaatatgtatgttttgtggagcttctcttccagcatagtgaacattctgggtcaagagcagttcatggcagtgtacctatctgcaggtgttatttccaattttgtcagttacgtgggtaaagttgccacaggaagatatggaccatcacttggtgcatctggtgccatcatgacagtcctcgcagctgtctgcactaagatcccagaagggaggcttgccattattttccttccgatgttcacgttcacagcagggaatgccctgaaagccattatcgccatggatacagcaggaatgatcctgggatggaaattttttgatcatgcggcacatcttgggggagctctttttggaatatggtatgttacttacggtcatgaactgatttggaagaacagggagccgctagtgaaaatctggcatgaaataaggactaatggccccaaaaaaggaggtggctctaagtaaaactgggattggacagtagtggtgcatctggtccttgccgcctgagagccccaggagacatcggctagagtgaccatggctatgctcccgtctggaagatgccagcatctggcctcccactgttttcagctgtgtcccccagtccgtgtctttttagaatgtgaatgatgataaagttgtgaaataaaggtttctatctagtttgtaa

SEQ ID NO: 67626 - DNA, 1163 bp, Homo sapiens
cgcagcggaggtagttgcgcagctggggttggtaaggtcgggccatggtggggcagaggttgggaagatggcgtggcgaggctgggcgcagagaggctggggctgcggccaggcgtggggtgcgtcggtgggcggccgcagctgcgaggagctcactgcggtcctaaccccgccgcagctcctcggacgcaggtttaacttctttattcaacaaaaatgcggattcagaaaagcacccaggaaggttgaacctcgaagatcagacccagggacaagtggtgaagcatacaagagaagtgctttgattcctcctgtggaagaaacagtcttttatccttctccctatcctataaggagtctcataaaacctttattttttactgttgggtttacaggctgtgcatttggatcagctgctatttggcaatatgaatcactgaaatccagggtccagagttattttgatggtataaaagctgattggttggatagcataagaccacaaaaagaaggagacttcagaaaggagattaacaagtggtggaataacctaagtgatggccagcggactgtgacaggtattatagctgcaaatgtccttgtattctgtttatggagagtaccttctctgcagcggacaatgatcagatatttcacatcgaatccagcctcaagtgttatttccaattttgtcagttacgtgggtaaagttgccacaggaagatatggaccatcacttggtgcagccctgaaagccattatcgccatggatacagcaggaatgatcctgggatggaaattttttgatcatgcggcacatcttgggggagctctttttggaatatggtatgttacttacggtcatgaactgatttggaagaacagggagccgctagtgaaaatctggcatgaaataaggactaatggccccaaaaaaggaggtggctctaagtaaaactgggattggacagtagtggtgcatctggtccttgccgcctgagagccccaggagacatcggctagagtgaccatggctatgctcccgtctggaagatgccagcatctggcctcccactgttttcagctgtgtcccccagtccgtgtctttttagaatgtgaatgatgataaagttgtgaaataaaggtttctatctagtttgtaa

SEQ ID NO: 67627 - DNA, 1640 bp, Homo sapiens
  misc_feature (1439)..(1440): n is a, c, g, or t
  misc_feature (1484)..(1484): n is a, c, g, or t
  misc_feature (1502)..(1502): n is a, c, g, or t
  misc_feature (1574)..(1574): n is a, c, g, or t
  misc_feature (1615)..(1615): n is a, c, g, or t
cgcagcggaggtagttgcgcagctggggttggtaaggtcgggccatggtggggcagaggttgggaagatggcgtggcgaggctgggcgcagagaggctggggctgcggccaggcgtggggtgcgtcggtgggcggccgcagctgcgaggagctcactgcggtcctaaccccgccgcagctcctcggacgcaggtttaacttctttattcaacaaaaatgcggattcagaaaagcacccaggaaggttgaacctcgaagatcagacccagggacaagtggtgaagcatacaagagaagtgctttgattcctcctgtggaagaaacagtcttttatccttctccctatcctataaggagtctcataaaacctttattttttactgttgggtttacaggctgtgcatttggatcagctgctatttggcaatatgaatcactgaaatccagggtccagagttattttgatggtataaaagctgattggttggatagcataagaccacaaaaagaaggagacttcagaaaggagattaacaagtggtggaataacctaagtgatggccagcggactgtgacaggtattatagctgcaaatgtccttgtattctgtttatggagagtaccttctctgcagcggacaatgatcagatatttcacatcgaatccagcctcaagtgttatttccaattttgtcagttacgtgggtaaagttgccacaggaagatatggaccatcacttggtgcatctggtgccatcatgacagtcctcgcagctgtctgcactaagatcccagaagggaggcttgccattattttccttccgatgttcacgttcacagcagggaatgccctgaaagccattatcgccatggatacagcaggaatgatcctgggatggaaattttttgatcatgcggcacatcttgggggagctctttttggaatatggtatgttacttacggtcatgaactgatttggaagaacagggagccgctagtgaaaatctggcatgaaataaggactaatggccccaaaaaaggaggtggctctaagtaagagacatcggctagagtgaccatggctatgctcccgtctggaagatgccagcatctggcctcccactgttttcagctgtgtcccccagtccgtgtctttttagaatgtgaatgatgataaagttgtgaaataaaggtttctatctagtttgtaacaaataaccgctcgcagagagccggctctcgaggagcatctttgcggcgttctctgtatttcctgaatctgaatgtcggcctgccttgctagattggggaaagtctcctggataatatcctgcagagtgttttccaacttggttccattctccctgtcactttcaggtacaccaatcagacgtagatttggtcttttcacatagtcccatatttcttggagggcttgnntaaattcttttaatcttttttctctaaacctccccttctagctncatttcattcaatttcgncttccatcactgatacccctttcttccagtgatcgcattcgctcctgaggctttctgcactcttcacgtagnttctcgagccctgggctttcagctccatcagctcctttaanggacctctcttgggtgggtattctt

SEQ ID NO: 67628 - DNA, 727 bp, Homo sapiens
cgcagcggaggtagttgcgcagctggggttggtaaggtcgggccatggtggggcagaggttgggaagatggcgtggcgaggctgggcgcagagaggctggggctgcggccaggcgtggggtgcgtcggtgggcggccgcagctgcgaggagctcactgcggtcctaaccccgccgcagctcctcggacgcaggtttaacttctttattcaacaaaaatgcggattcagaaaagcacccaggaaggttgaacctcgaagatcagacccagggacaagtggtgaagcatacaagagaagtgctttgattcctcctgtggaagaaacagtcttttatccttctccctatcctataaggagtctcataaaacctttattttttactgttgggaggtctacctgggttaggtctacctggccaggtagacctaacccagacatcattgttgattctggcaggccaatgcagagccacaggaccaagagctcttcctgtgatagactcatccctataatggcattagagtagactgtttttactttgtatgcatactgcggcatggtatagaataagatagggaccaaagtgaagaaaatcctcagcgtaaacaatgcctgggctgtaaggtggatcccagtgaactcgtgtgcttttttcaggatatggatcagaaagttacctatgtaaggtttcttccttaccgcagcctctaagttaggtctacctggt

SEQ ID NO: 67629 - DNA, 333 bp, Homo sapiens
tcaatcattgctggctgcctcatagctggaatgtcaggtagtcagggtgcaaggcagtggctgctacctccaaagggggaatgttttatctagcctaacttccagtttagaggacattcagcagtaacagagataatgggtagaggaaatgatagcacaggatccatgtgcgacatgctgctaaaccttgggcaacaagtaggttaatctttgtgggactctgtttccacattttaaatgagtcagtgaaactagagggtttccatagttctcccagctctatgagaagctgttatacttcttttacagaaaaccgtagatcatcagtgtttg

SEQ ID NO: 67630 - DNA, 446 bp, Homo sapiens
tgaacatgagtttttgtaacgtgactgaagttgagtttaagtaggaagcgcaggaagttcccaagtgccaggtgtgtgtagctcagagttccttttacagtgaggtgtctctcactgggggagcttccaggatcctgagcagactggacacaatcatctctcccttcctctatgtcaagcactgttacaaaagactgtgagcaaatttccatctaaatattaataattctgaagaagaggcaaaactgttgaatgcaagcgatacctattgttgaagaaacccacaaatttctgattctaagatcaggggatacaacaaaatctacaagtcatttcaaatagcacacaggaatcaaactttggtaaatcatttctgaggcacaattaaatatattgtagcactatgttaattaattatattaaatgtcgattcatcttgaatgtat

SEQ ID NO: 67631 - DNA, 401 bp, Homo sapiens
attaagtaaaatatgtttattatttagttataaattaaaaatatgtattttctattgttaatagattgttcttataccactaaatatataaaccattggaaattttcagtattgtataattacaatggtaaatgagaacagagtagaaacacagttgattgaaaagatgaaaaaggacaagattataaaatgctgtaaggctgggcagcgtggctcacacctgtaattccagcactttgggaggctgaggcgggcaggtcacgtgaggtcaagagttcgagaccagcctggccaacatggtgaaaccctgtttttactaaaaatacaaaaattagcagggcattgtggcaggctcctataatcccagctactcgggaaactgaggcaggagaatcacttga

SEQ ID NO: 67632 - DNA, 470 bp, Homo sapiens
gacccggcgctccattaaatagccgtagacggaacttcgcctttctctcggccttagcgccatttttttggaaacctctgcgccatgagagccaagtggaggaagaagcgaatgcgcaggctgaagcgcaaaagaagaaagatgaggcagaggtccaagtaaaccgctagcttgttgcaccgtggaggccacaggagcagaaacatggaatgccagacgctggggatgctggtacaagttgtgggactgcatgctactgtctagagcttgtctcaatggatctagaacttcatcgccctctgatcgccgatcacctctgagacccaccttgctcataaacaaaatgcccatgttggtcctctgccctggacctgtgacattctggactatttctgtgtttatttgtggccgagtgtaacaaccatataataaatcacctcttccgctgttttagctgaagaattaaatca

SEQ ID NO: 67633 - DNA, 667 bp, Homo sapiens
aaataaaaacctcccgagttcccttttttccaccattgcccctttttattgccctttttcccgagggggtgtgagggcagccctttttgtaggttcccgtcagtcctttggaataacttccaaatacagaaagaaaaaaaaaaatttttttgggtgagtgttttttggttcctgcgttgggattccgtgtacaatccatagacatctgacctcggcacttagcatcatcacagcaaactaactgtagcctttctctctttccctgtagaaacctctgcgccatgagagccaagtggaggaagaagcgaatgcgcaggctgaagcgcaaaagaagaaagatgaggcagaggtccaagtaaaccgctagcttgttgcaccgtggaggccacaggagcagaaacatggaatgccagacgctggggatgctggtacaagttgtgggactgcatgctactgtctagagcttgtctcaatggatctagaacttcatcgccctctgatcgccgatcacctctgagacccaccttgctcataaacaaaatgcccatgttggtcctctgccctggacctgtgacattctggactatttctgtgtttatttgtggccgagtgtaacaaccatataataaatcacctcttccgctgttttagctgaagaattaaatca

SEQ ID NO: 67634 - DNA, 835 bp, Homo sapiens
gacccggcgctccattaaatagccgtagacggaacttcgcctttctctcggccttagcgccatttttttggaaacctctgcgccatgagagccaagtggaggaagaagcgaatgcgcaggctgaagcgcaaaagaagaaagatgaggcagaggtccaagtaaaccgctagcttgttgcaccgtggaggccacaggagcagaaacatggaatgccagacgctggggatgctggtacaagttgtgggactgcatgctactgtctagagcttgtctcaatggatctagaacttcatcgccctctgatcgccgatcacctctgagacccaccttgctcataaacaaaatgcccatgttggtcctctgccctggacctgtgacattctggactatttctgtgtttatttgtggccgagtgtaacaaccatataataaatcacctcttccgctgttttagctgaagaattaaatcaaaaaaaaaaaaaaaaaaaaaaaaaaaaaaaaaaaaaaaaaaaaaaaaggggggggggaaaaaagaaaacccaaggggggcccacgagtagagggagaacacagaataagtgtacacagggggccccaaaagggaggcgcacaactaaaggcaaaggacaggggcacgagcaaaaaaagagaaagaggaaaaaaggaaaaagaaaaaaaggagagacccccacacggggggagcaaaagggaaaaaacacaaaaagagaaaaaaggcaagaggaaaataacacttaagacataaggggggaaaaacggaaaataggcaaaaaaaagtggaccagagataataggaaaatcacacggaaaaaaaaaa

SEQ ID NO: 67635 - DNA, 763 bp, Homo sapiens
gacccggcgctccattaaatagccgtagacggaacttcgcctttctctcggccttagcgccatttttttggaaacctctgcgccatgagagccaagtggaggaagaagcgaatgcgcaggctgaagcgcaaaagaagaaagatgaggcagaggtccaagtaaaccgctagcttgttgcaccgtggaggccacaggagcagaaacatggaatgccagacgctggggatgctggtacaagttgtgggactgcatgctactgtctagagcttgtctcaatggatctagaacttcatcgccctctgatcgccgatcacctctgagacccaccttgctcataaacaaaatgcccatgttggtcctctgccctggacctgtgacattctggactatttctgtgtttatttgtggccgagtgtaacaaccatataataaatcacctcttccgctgttttagctgaagaattaaatcaaaaaaaaaaaaaaaaaaaaaaaaaaaaaaaaaaaaaaaaaaaaaaaatgtaaattttatttatggggccccgttgggcccttgtcttttaaaacccgcataactttttcctggggcccggattatggctatatttgcccaattcccctattggggagcggtttaaaaaacaatgggccggggtttaacaagggggacgtggaaaaaccgggggttcccaaataaaatcctttagaagaaatcccctttttgagggtggggaaaaacaagggccctaccccctttttctgggcg

SEQ ID NO: 67636 - DNA, 480 bp, Homo sapiens
  misc_feature (1)..(1): n is a, c, g, or t
  misc_feature (17)..(17): n is a, c, g, or t
ngcacgcgcgaacgcgnccgcgtcgaacggctgcgagaagacgacagagcgagcgcagaggggctctcggcccagcgccggaaacctctgcgccatgagagccaagtggaggaagaagcgaatgcgcaggctgaagcgcaaaagaagaaagatgaggcagaggtccaagtaaaccgctagcttgttgcaccgtggaggccacaggagcagaaacatggaatgccagacgctggggatgctggtacaagttgtgggactgcatgctactgtctagagcttgtctcaatggatctagaacttcatcgccctctgatcgccgatcacctctgagacccaccttgctcataaacaaaatgcccatgttggtcctctgccctggacctgtgacattctggactatttctgtgtttatttgtggccgagtgtaacaaccatataataaatcacctcttccgctgttttagctgaagaattaaatca

SEQ ID NO: 67637 - DNA, 585 bp, Homo sapiens
gacccggcgctccattaaatagccgtagacggaacttcgcctttctctcggccttagcgccatttttttgggtgagtgttttttggttcctgcgttgggattccgtgtacaatccatagacatctgacctcggcacttagcatcatcacagcaaactaactgtagcctttctctctttccctgtagaaacctctgcgccatgagagccaagtggaggaagaagcgaatgcgcaggctgaagcgcaaaagaagaaagatgaggcagaggtccaagtaaaccgctagcttgttgcaccgtggaggccacaggagcagaaacatggaatgccagacgctggggatgctggtacaagttgtgggactgcatgctactgtctagagcttgtctcaatggatctagaacttcatcgccctctgatcgccgatcacctctgagacccaccttgctcataaacaaaatgcccatgttggtcctctgccctggacctgtgacattctggactatttctgtgtttatttgtggccgagtgtaacaaccatataataaatcacctcttccgctgttttagctgaagaattaaatca

SEQ ID NO: 67638 - DNA, 507 bp, Homo sapiens
  misc_feature (6)..(6): n is a, c, g, or t
  misc_feature (46)..(46): n is a, c, g, or t
  misc_feature (69)..(69): n is a, c, g, or t
  misc_feature (75)..(75): n is a, c, g, or t
cggcgnccgagaactatggatcccccgggcttcaggaccggccgcntcgattacggcttcgagaagacnacaganggggctctcggccttagcgccatttttttggggaaacctctgcgccatgagagccaagtggaggaagaagcgaatgcgcaggctgaagcgcaaaagaagaaagatgaggcagaggtccaagtaaaccgctagcttgttgcaccgtggaggccacaggagcagaaacatggaatgccagacgctggggatgctggtacaagttgtgggactgcatgctactgtctagagcttgtctcaatggatctagaacttcatcgccctctgatcgccgatcacctctgagacccaccttgctcataaacaaaatgcccatgttggtcctctgccctggacctgtgacattctggactatttctgtgtttatttgtggccgagtgtaacaaccatataataaatcacctcttccgctgttttagctgaagaattaaatca

SEQ ID NO: 67639 - DNA, 452 bp, Homo sapiens
ccggaaattcggccattatggccggggctctcggcttagcgccatttttttggaaacctctgcgccatgagagccaagtggaggaagaagcgaatgcgcaggctgaagcgcaaaagaagaaagatgaggcagaggtccaagtaaaccgctagcttgttgcaccgtggaggccacaggagcagaaacatggaatgccagacgctggggatgctggtacaagttgtgggactgcatgctactgtctagagcttgtctcaatggatctagaacttcatcgccctctgatcgccgatcacctctgagacccaccttgctcataaacaaaatgcccatgttggtcctctgccctggacctgtgacattctggactatttctgtgtttatttgtggccgagtgtaacaaccatataataaatcacctcttccgctgttttagctgaagaattaaatca

SEQ ID NO: 67640 - DNA, 408 bp, Homo sapiens
gcctactactactactactactaaattagcggccgcttcgacgaagcgaatgcgcaggctgaagcgcaaaagaagaaagatgaggcagaggtccaagtaaaccgctagcttgttgcaccgtggaggccacaggagcagaaacatggaatgccagacgctggggatgctggtacaagttgtgggactgcatgctactgtctagagcttgtctcaatggatctagaacttcatcgccctctgatcgccgatcacctctgagacccaccttgctcataaacaaaatgcccatgttggtcctctgccctggacctgtgacattctggactatttctgtgtttatttgtggccgagtgtaacaaccatataataaatcacctcttccgctgttttagctgaagaattaaatca

SEQ ID NO: 67641 - DNA, 467 bp, Homo sapiens
cactcattacaatcttagtagatacttcgtttaagtcctacctctcggccttagcgccatttttttggaaacctctgcgccatgagagccaagtggaggaagaagcgaatgcgcaggctgaagcgcaaaagaagaaagatgaggcagaggtccaagtaaaccgctagcttgttgcaccgtggaggccacaggagcagaaacatggaatgccagacgctggggatgctggtacaagttgtgggactgcatgctactgtctagagcttgtctcaatggatctagaacttcatcgccctctgatcgccgatcacctctgagacccaccttgctcataaacaaaatgcccatgttggtcctctgccctggacctgtgacattctggactatttctgtgtttatttgtggccgagtgtaacaaccatataataaatcacctcttccgctgttttagctgaagaattaaatca

SEQ ID NO: 67642 - DNA, 436 bp, Homo sapiens
cagctggtacggctctgggatgtacggatttttttggaaacctctgcgccatgagagccaagtggaggaagaagcgaatgcgcaggctgaagcgcaaaagaagaaagatgaggcagaggtccaagtaaaccgctagcttgttgcaccgtggaggccacaggagcagaaacatggaatgccagacgctggggatgctggtacaagttgtgggactgcatgctactgtctagagcttgtctcaatggatctagaacttcatcgccctctgatcgccgatcacctctgagacccaccttgctcataaacaaaatgcccatgttggtcctctgccctggacctgtgacattctggactatttctgtgtttatttgtggccgagtgtaacaaccatataataaatcacctcttccgctgttttagctgaagaattaaatca

SEQ ID NO: 67643 - DNA, 424 bp, Homo sapiens
  misc_feature (38)..(39): n is a, c, g, or t
taaattcatcgaatccatgcaataaaagcccaacccannaacccctggatggaaacagaaagcgaatgcgcaggctgaagcgcaaaagaagaaagatgaggcagaggtccaagtaaaccgctagcttgttgcaccgtggaggccacaggagcagaaacatggaatgccagacgctggggatgctggtacaagttgtgggactgcatgctactgtctagagcttgtctcaatggatctagaacttcatcgccctctgatcgccgatcacctctgagacccaccttgctcataaacaaaatgcccatgttggtcctctgccctggacctgtgacattctggactatttctgtgtttatttgtggccgagtgtaacaaccatataataaatcacctcttccgctgttttagctgaagaattaaatca

SEQ ID NO: 67644 - DNA, 409 bp, Homo sapiens
  misc_feature (1)..(1): n is a, c, g, or t
  misc_feature (17)..(17): n is a, c, g, or t
ngcacgcgcgaacgcgnccgcgtcgaacggctgcgagaagacgacagagcgagcgcaggctgaagcgcaaaagaagaaagatgaggcagaggtccaagtaaaccgctagcttgttgcaccgtggaggccacaggagcagaaacatggaatgccagacgctggggatgctggtacaagttgtgggactgcatgctactgtctagagcttgtctcaatggatctagaacttcatcgccctctgatcgccgatcacctctgagacccaccttgctcataaacaaaatgcccatgttggtcctctgccctggacctgtgacattctggactatttctgtgtttatttgtggccgagtgtaacaaccatataataaatcacctcttccgctgttttagctgaagaattaaatca

SEQ ID NO: 67645 - DNA, 666 bp, Homo sapiens
  misc_feature (524)..(524): n is a, c, g, or t
cagctggtacggctctgggatgtacggatttttttggaaacctctgcgccatgagagccaagtggaggaagaagcgaatgcgcaggctgaagcgcaaaagaagaaagatgaggcagaggtccaagtaaaccgctagcttgttgcaccgtggaggccacaggagcagaaacatggaatgccagacgctggggatgctggtacaagttgtgggactgcatgctactgtctagagcttgtctcaatggatctagaacttcatcgccctctgatcgccgatcacctctgagacccaccttgctcataaacaaaatgcccatgttggtcctctgccctggacctgtgacattctggactatttctgtgtttatttgtggccgagtgtaacaaccatataataaatcacctcttccgctgttttagctgaagaattaaatcaaaaaaaaaaaaaaaaaaaaaaaaaaaaaaaaaaaaaaaaaaaaaaaaaaaaaaaaaaaaaaaaaaaaaaagaaaaacaaaaagaaaanaaaaaaaaaagaaagaagacaacataacaagagaggcggaggcggggccgaggactgagcatatctttctcggcgctggggcgcgaggccatgcaaccaatggcgcctcccacacacttatgtagagagaggggggggcata

SEQ ID NO: 67646 - DNA, 793 bp, Homo sapiens
  misc_feature (537)..(537): n is a, c, g, or t
  misc_feature (716)..(716): n is a, c, g, or t
  misc_feature (737)..(737): n is a, c, g, or t
  misc_feature (750)..(750): n is a, c, g, or t
cactcattacaatcttagtagatacttcgtttaagtcctacctctcggccttagcgccatttttttggaaacctctgcgccatgagagccaagtggaggaagaagcgaatgcgcaggctgaagcgcaaaagaagaaagatgaggcagaggtccaagtaaaccgctagcttgttgcaccgtggaggccacaggagcagaaacatggaatgccagacgctggggatgctggtacaagttgtgggactgcatgctactgtctagagcttgtctcaatggatctagaacttcatcgccctctgatcgccgatcacctctgagacccaccttgctcataaacaaaatgcccatgttggtcctctgccctggacctgtgacattctggactatttctgtgtttatttgtggccgagtgtaacaaccatataataaatcacctcttccgctgttttagctgaagaattaaatcaaaaaaaaaaaaaaaaaaaaaaaaaaaaaaaaaaaaaaaaaaaaaaaagttttcgggacgggggacgcggntccaggcacccaacagcactgacggcgaacacttcacgggcgcgcgatgcctcgacaaggcggccgccaccaccacctcagctgccctcgcgggcagcacggcgcggcaaaagcgcacgtcgcctagcgatggcgcggggcggggacacgggctgtaccggcccgtcggaaacttccgnttccggggcccgccgcatcgntctcccggcttanaaggcccggttctgacgcgcagtgccagaccttacccctacgg

SEQ ID NO: 67647 - DNA, 654 bp, Homo sapiens
  misc_feature (6)..(6): n is a, c, g, or t
  misc_feature (46)..(46): n is a, c, g, or t
  misc_feature (69)..(69): n is a, c, g, or t
  misc_feature (75)..(75): n is a, c, g, or t
cggcgnccgagaactatggatcccccgggcttcaggaccggccgcntcgattacggcttcgagaagacnacaganggggctctcggccttagcgccatttttttggaaacctctgcgccatgagagccaaggtgagcggttcctggtagtaagcttgggaggtaggagttggcgagtagtagcgaggagacgaagtggaggaagaagcgaatgcgcaggctgaagcgcaaaagaagaaagatgaggcagaggtccaagtaaaccgctagcttgttgcaccgtggaggccacaggagcagaaacatggaatgccagacgctggggatgctggtacaagttgtgggactgcatgctactgtctagagcttgtctcaatggatctagaacttcatcgccctctgatcgccgatcacctctgagacccaccttgctcataaacaaaatgcccatgttggtcctctgccctggacctgtgacattctggactatttctgtgtttatttgtggccgagtgtaacaaccatataataaatcacctcttccgctgttttagctgaagaattaaatcaaaaaacagggtcaccaaggtctgccctatagggaggcgtaataccattggcgacgcggccgggaatttagatgggtgtagtaggc

SEQ ID NO: 67648 - DNA, 697 bp, Homo sapiens
  misc_feature (468)..(468): n is a, c, g, or t
  misc_feature (697)..(697): n is a, c, g, or t
ccggaaattcggccattatggccggggctctcggcttagcgccatttttttggaaacctctgcgccatgagagccaagtggaggaagaagcgaatgcgcaggctgaagcgcaaaagaagaaagatgaggcagaggtccaagtaaaccgctagcttgttgcaccgtggaggccacaggagcagaaacatggaatgccagacgctggggatgctggtacaagttgtgggactgcatgctactgtctagagcttgtctcaatggatctagaacttcatcgccctctgatcgccgatcacctctgagacccaccttgctcataaacaaaatgcccatgttggtcctctgccctggacctgtgacattctggactatttctgtgtttatttgtggccgagtgtaacaaccatataataaatcacctcttccgctgttttagctgaagaattaaatcaacaaaaaaaaaaaaantaccccactacattttcccactccctcacattcccacatattttattttaaaaaaaaaaaactcgagactagttctcctcgtgccgaattggcacgagattttggggccgcttttaacctggcctagtgtaactcccttaggcaaaaacctgagcccctggcaatggcaaacctgaaaccaagaaataccgtatgtttaacccaacccaaagcctaaattccaaacacn

SEQ ID NO: 67649 - DNA, 679 bp, Homo sapiens
  misc_feature (537)..(537): n is a, c, g, or t
cggacgcgtgggtcgacccacgcgtccggcgccatgagagccaagtggaggaagaagcgaatgcgcaggctgaagcgcaaaagaagaaagatgaggcagaggtccaagtaaaccgctagcttgttgcaccgtggaggccacaggagcagaaacatggaatgccagacgctggggatgctggtacaagttgtgggactgcatgctactgtctagagcttgtctcaatggatctagaacttcatcgccctctgatcgccgatcacctctgagacccaccttgctcataaacaaaatgcccatgttggtcctctgccctggacctgtgacattctggactatttctgtgtttatttgtggccgagtgtaacaaccatataataaatcacctcttccgctgttttagctgaagaattaaatcaaaaaaaaaaaaaaaaaaaaaaaaaaaaaaaaaaaaaaaaaaaaaaaacaaaaaacaaaaaaaaagaaaaaaacacacaaaaaaaaaaaaaaaaaaaacaagaaaaacaaaaagaaaanaaaaaaaaaagaaagaagacaacataacaagagaggcggaggcggggccgaggactgagcatatctttctcggcgctggggcgcgaggccatgcaaccaatggcgcctcccacacacttatgtagagagaggggggggcata

SEQ ID NO: 67650 - DNA, 623 bp, Homo sapiens
  misc_feature (42)..(42): n is a, c, g, or t
actagttctagctcgcgatctagaactagtcgccattttttnggaaacctctgcgccatgagagccaagtggaggaagaagcgaatgcgcaggctgaagcgcaaaagaagaaagatgaggcagaggtccaagtaaaccgctagcttgttgcaccgtggaggccacaggagcagaaacatggaatgccagacgctggggatgctggtacaagttgtgggactgcatgctactgtctagagcttgtctcaatggatctagaacttcatcgccctctgatcgccgatcacctctgagacccaccttgctcataaacaaaatgcccatgttggtcctctgccctggacctgtgacattctggactatttctgtgtttatttgtggccgagtgtaacaaccatataataaatcacctcttccgctgttttagctgaagaattaaatcatcatcttgtctattatgttttttatggttccatcgggtgggggttttctgtcattagagtttgccctgtcactacctgtgctatggagggtatcaaagctataaaggcaacagcccgggtaaaaaacaaagagacaaacaagcaagacacacaaaaaaaaaagaacagaaaaagcagagg

SEQ ID NO: 67651 - DNA, 964 bp, Homo sapiens
agagagtggaaggtgttgagaattgtatggcggttgcgcgccatgagaccaagtggaggaagaagcgaatgcgcaggctgaagcgcaaaagaagaaagatgaggcagaggtccaagtaaaccgctagcttgttgcaccgtggaggccacaggagcagaaacatggaatgccagacgctggggatgctggtacaagttgtgggactgcatgctactgtctagagcttgtctcaatggatctagaacttcatcgccctctgatcgccgatcacctctgagacccaccttgctcataaacaaaatgcccatgttggtcctctgccctggacctgtgacattctggactatttctgtgtttatttgtggccgagtgtaacaaccatataataaatcacctcttccgctgttttagctgaagaattaaatcaaaaaaaaaaaaaaaaaagaaaaaggggggggagggtgttatgaatattttccttgggagggggctatagctcttaagcgcagttcccgcgagattttgttgggtcagaaaagggggccccaattttagaggaggactgatcttatttgaacggcatagggaagaggtgggcattcgggtgtttaacaaaggttggttaactgggggaaatacactggtgatatgccttgtgggaagctcatgtagtgaagaagggggacgccttaataattttctgggggggggggggaacaatacatttggggcgaaaaatttactcgtagctaggaagtattttataaaaagggtctccatagaagggggtatactattttagcaagaattggttaaaagggtggttattgaagagggttggtgataagaccattatgggttggctgttaatagcatggggtgagcgtattggaagaaagatttgaggaacttggatggaagtttgtagactgtgaggggagaagaatttatatacctacagggg

SEQ ID NO: 67652 - DNA, 613 bp, Homo sapiens
  misc_feature (38)..(39): n is a, c, g, or t
  misc_feature (428)..(428): n is a, c, g, or t
  misc_feature (490)..(491): n is a, c, g, or t
taaattcatcgaatccatgcaataaaagcccaacccannaacccctggatggaaacagaaagcgaatgcgcaggctgaagcgcaaaagaagaaagatgaggcagaggtccaagtaaaccgctagcttgttgcaccgtggaggccacaggagcagaaacatggaatgccagacgctggggatgctggtacaagttgtgggactgcatgctactgtctagagcttgtctcaatggatctagaacttcatcgccctctgatcgccgatcacctctgagacccaccttgctcataaacaaaatgcccatgttggtcctctgccctggacctgtgacattctggactatttctgtgtttatttgtggccgagtgtaacaaccatataataaatcacctcttccgctgttttagctgaagaattaaatcacaanaaaaacaaaacctataaaaacctcaaactcaacgcacaaaactcttctcctcaacccaaaannaaaggaaagattaaatttcttttggggccgcctggcccaaataatttttaaatttgagaaagtttttttctgggccgcaattttgggctattttgccaaattccccttttggagagggggtt

SEQ ID NO: 67653 - DNA, 755 bp, Homo sapiens
  misc_feature (453)..(455): n is a, c, g, or t
  misc_feature (581)..(581): n is a, c, g, or t
  misc_feature (593)..(593): n is a, c, g, or t
  misc_feature (595)..(597): n is a, c, g, or t
  misc_feature (631)..(631): n is a, c, g, or t
  misc_feature (722)..(722): n is a, c, g, or t
tctatatggccggaggtcctttcagatcttatagcagccgttgttttggaaacctctgcgccatgagagccaagtggaggaagaagcgaatgcgcaggctgaagcgcaaaagaagaaagatgaggcagaggtccaagtaaaccgctagcttgttgcaccgtggaggccacaggagcagaaacatggaatgccagacgctggggatgctggtacaagttgtgggactgcatgctactgtctagagcttgtctcaatggatctagaacttcatcgccctctgatcgccgatcacctctgagacccaccttgctcataaacaaaatgcccatgttggtcctctgccctggacctgtgacattctggactatttctgtgtttatttgtggccgagtgtaacaaccatataataaatcacctcttccgctgttttagctgaagaattaaatcactccnnnaacccaggggagtaaccaaacttgtttcccaacttaaaaaataggggaaaaaaaacaatattgcaaagaaaaattcttttgggccgcctcggccaagcggattttaaattgaaggaggtttaggcnggcgggccggantnnngccccctgggccaattggccctttgggggggcgnataaacattacttgccccccttttaaaacgcgggactgaaaaaccctggggtcccaaactgaaggggggggaaaaatccccttttcccaantggggggggaggggcccccccccccgcccttcc

SEQ ID NO: 67654 - DNA, 672 bp, Homo sapiens
  misc_feature (1)..(1): n is a, c, g, or t
  misc_feature (17)..(17): n is a, c, g, or t
ngcacgcgcgaacgcgnccgcgtcgaacggctgcgagaagacgacagagcgagcgcaggctgaagcgcaaaagaagaaagatgaggcagaggtccaagtaaaccgctagcttgttgcaccgtggaggccacaggagcagaaacatggaatgccagacgctggggatgctggtacaagttgtgggactgcatgctactgtctagagcttgtctcaatggatctagaacttcatcgccctctgatcgccgatcacctctgagacccaccttgctcataaacaaaatgcccatgttggtcctctgccctggacctgtgacattctggactatttctgtgtttatttgtggccgagtgtaacaaccatataataaatcacctcttccgctgttttagctgaagaattaaatcagaaaaagaaaaaaaaaaaaaaaaaaaaaaaaaaaaaagaaaaacctacgggggaactcatatatgacggggggcgggaaaaaaagaggggtataagaagagaaggcgcccagagggcccaaaaaggggtgtttccacgtgaacacaaaattatttgttgctcacaaagggggggaaaaactcggcgaagggcaccccaatataaagaggcgccggaaaaaattcgagaaaaacacgggtaccccgttagatcttcacaacaat

SEQ ID NO: 67655 - DNA, 1032 bp, Homo sapiens
aaataaaaacctcccgagttcccttttttccaccattgcccctttttattgccctttttcccgagggggtgtgagggcagccctttttgtaggttcccgtcagtcctttggaataacttccaaatacagaaagaaaaaaaaaaatttttttgggtgagtgttttttggttcctgcgttgggattccgtgtacaatccatagacatctgacctcggcacttagcatcatcacagcaaactaactgtagcctttctctctttccctgtagaaacctctgcgccatgagagccaagtggaggaagaagcgaatgcgcaggctgaagcgcaaaagaagaaagatgaggcagaggtccaagtaaaccgctagcttgttgcaccgtggaggccacaggagcagaaacatggaatgccagacgctggggatgctggtacaagttgtgggactgcatgctactgtctagagcttgtctcaatggatctagaacttcatcgccctctgatcgccgatcacctctgagacccaccttgctcataaacaaaatgcccatgttggtcctctgccctggacctgtgacattctggactatttctgtgtttatttgtggccgagtgtaacaaccatataataaatcacctcttccgctgttttagctgaagaattaaatcaaaaaaaaaaaaaaaaaaaaaaaaaaaaaaaaaaaaaaaaaaaaaaaaggggggggggaaaaaagaaaacccaaggggggcccacgagtagagggagaacacagaataagtgtacacagggggccccaaaagggaggcgcacaactaaaggcaaaggacaggggcacgagcaaaaaaagagaaagaggaaaaaaggaaaaagaaaaaaaggagagacccccacacggggggagcaaaagggaaaaaacacaaaaagagaaaaaaggcaagaggaaaataacacttaagacataaggggggaaaaacggaaaataggcaaaaaaaagtggaccagagataataggaaaatcacacggaaaaaaaaaa

SEQ ID NO: 67656 - DNA, 1129 bp, Homo sapiens
gacccggcgctccattaaatagccgtagacggaacttcgcctttctctcggccttagcgccatttttttggaaacctctgcgccatgagagccaaggtgagcggttcctggtagtaagcttgggaggtaggagttggcgagtagtagcgaggagacgaaggcaagtccgccatacctcctgaactactgggtttcaagggtgcccaagagctggtgggagagagaaggtagtttgtgagagagctagcggttaagtgctatgggtagagagggtgggcttagaaaagggtggaattctgatcttatgttgggagggtgtccaagttactgatgtagttgttacgaccaatctttcatacttcttggttaagaatctgtccggttctaaagagtgcatttcatatccttgctaagcctactaataagcttcatcccttttttttttttttttttttaattatctgctgcttgtgatcggttgctagtggaggaagaagcgaatgcgcaggtacgttgagactttgccagcccaggaggagggaagttccttggacaaaacttaggagaaacatttggtttggaaatcttaaaagatctttaggagaaaaacgtttgagtgttttctccctggagccaggatttaacagaacagagaacgatagaaccgtagtgcttgttcattttaccacctcattctttatgtggacgtttgatttaatgtgggagggaaaggcaactctggtttgaggtgtattccattcctgtgtctgcttttcaggctgaagcgcaaaagaagaaagatgaggcagaggtccaagtaaaccgctagcttgttgcaccgtggaggccacaggagcagaaacatggaatgccagacgctggggatgctggtacaagttgtgggactgcatgctactgtctagagcttgtctcaatggatctagaacttcatcgccctctgatcgccgatcacctctgagacccaccttgctcataaacaaaatgcccatgttggtcctctgccctggacctgtgacattctggactatttctgtgtttatttgtggccgagtgtaacaaccatataataaatcacctcttccgctgttttagctgaagaattaaatca

SEQ ID NO: 67657 - DNA, 798 bp, Homo sapiens
aaataaaaacctcccgagttcccttttttccaccattgcccctttttattgccctttttcccgagggggtgtgagggcagccctttttgtaggttcccgtcagtcctttggaataacttccaaatacagaaagaaaaaaaaaaatttttttgggtgagtgttttttggttcctgcgttgggattccgtgtacaatccatagacatctgacctcggcacttagcatcatcacagcaaactaactgtagcctttctctctttccctgtagaaacctctgcgccatgagagccaaggtgagcggttcctggtagtaagcttgggaggtaggagttggcgagtagtagcgaggagacgaaggcaagtccgccatacctcctgaactactgggtttcaagggtgcccaagagctggtgggagagagaagtggaggaagaagcgaatgcgcaggctgaagcgcaaaagaagaaagatgaggcagaggtccaagtaaaccgctagcttgttgcaccgtggaggccacaggagcagaaacatggaatgccagacgctggggatgctggtacaagttgtgggactgcatgctactgtctagagcttgtctcaatggatctagaacttcatcgccctctgatcgccgatcacctctgagacccaccttgctcataaacaaaatgcccatgttggtcctctgccctggacctgtgacattctggactatttctgtgtttatttgtggccgagtgtaacaaccatataataaatcacctcttccgctgttttagctgaagaattaaatca

SEQ ID NO: 67658 - DNA, 1457 bp, Homo sapiens
aaataaaaacctcccgagttcccttttttccaccattgcccctttttattgccctttttcccgagggggtgtgagggcagccctttttgtaggttcccgtcagtcctttggaataacttccaaatacagaaagaaaaaaaaaaatttttttgggtgagtgttttttggttcctgcgttgggattccgtgtacaatccatagacatctgacctcggcacttagcatcatcacagcaaactaactgtagcctttctctctttccctgtagaaacctctgcgccatgagagccaagtggaggaagaagcgaatgcgcaggctgaagcgcaaaagaagaaagatgaggcagaggtccaagtaaaccgctagcttgttgcaccgtggaggccacaggagcagaaacatggaatgccagacgctggggatgctggtacaagttgtgggactgcatgctactgtctagagcttgtctcaatggatctagaacttcatcgccctctgatcgccgatcacctctgagacccaccttgctcataaacaaaatgcccatgttggtcctctgccctggacctgtgacattctggactatttctgtgtttatttgtggccgagtgtaacaaccatataataaatcacctcttccgctgttttagctgaagaattaaatcaaaaaaaaaaaaaacaacaccaccaaacacaacacacaaacaataaaaacacacacaccccaccaaacggggcgaggggagaaaacaaaggacacccacgcaggggcaccacaaacaaaacaaggcagacacagaaaaaaagagacaacaacacggcaccacccaaaagggagagacacgaacaaaaaacagaaaaggaaaagggccgacacaaatcaaccaaaacacaacaggaagacacaaaccacgagaaaggagaaaaaaacgaagaacagcggacgaaacaacaacagagcacagagccacaaaaacacgagagacaccagcaacacgaaggagacacgaaaaacaagcaacaaggggctcaacaacaacacacgcagaccggcacaacacgcgcgaaaccacagcaccaaaaacgcgcacacaaccaaacaacaacaaaaggaaaaagagagaaagaacacatcacgcggggaaacgagaacaaaaaaaccaccacagcaacagcacacggcagccaagagcgcgacagacgcaaccagcacaccgagccaccgcgagaaacgaggcaggcagcgagaacaccagagagggaggaggagcagacgaggagggaaggagacgggacaaggagcagcaacgacagagaaggaaaggaggagcgggacgaaaccgccacacgggacgcgagaaagcaggacgacgagagacgaggcgggaggaagacagagagcacgacgcgagcgaacacggcgcgagaaaagtgaagagggaggcagagacaacca

SEQ ID NO: 67659 - DNA, 856 bp, Homo sapiens
  misc_feature (671)..(671): n is a, c, g, or t
  misc_feature (733)..(734): n is a, c, g, or t
aaataaaaacctcccgagttcccttttttccaccattgcccctttttattgccctttttcccgagggggtgtgagggcagccctttttgtaggttcccgtcagtcctttggaataacttccaaatacagaaagaaaaaaaaaaatttttttgggtgagtgttttttggttcctgcgttgggattccgtgtacaatccatagacatctgacctcggcacttagcatcatcacagcaaactaactgtagcctttctctctttccctgtagaaacctctgcgccatgagagccaagtggaggaagaagcgaatgcgcaggctgaagcgcaaaagaagaaagatgaggcagaggtccaagtaaaccgctagcttgttgcaccgtggaggccacaggagcagaaacatggaatgccagacgctggggatgctggtacaagttgtgggactgcatgctactgtctagagcttgtctcaatggatctagaacttcatcgccctctgatcgccgatcacctctgagacccaccttgctcataaacaaaatgcccatgttggtcctctgccctggacctgtgacattctggactatttctgtgtttatttgtggccgagtgtaacaaccatataataaatcacctcttccgctgttttagctgaagaattaaatcacaanaaaaacaaaacctataaaaacctcaaactcaacgcacaaaactcttctcctcaacccaaaannaaaggaaagattaaatttcttttggggccgcctggcccaaataatttttaaatttgagaaagtttttttctgggccgcaattttgggctattttgccaaattccccttttggagagggggtt

SEQ ID NO: 67660 - DNA, 752 bp, Homo sapiens
aaataaaaacctcccgagttcccttttttccaccattgcccctttttattgccctttttcccgagggggtgtgagggcagccctttttgtaggttcccgtcagtcctttggaataacttccaaatacagaaagaaaaaaaaaaatttttttgggtgagtgttttttggttcctgcgttgggattccgtgtacaatccatagacatctgacctcggcacttagcatcatcacagcaaactaactgtagcctttctctctttccctgtagaaacctctgcgccatgagagccaagtggaggaagaagcgaatgcgcaggctgaagcgcaaaagaagaaagatgaggcagaggtccaagtaaaccgctagcttgttgcaccgtggaggccacaggagcagaaacatggaatgccagacgctggggatgctggtacaagttgtgggactgcatgctactgtctagagcttgtctcaatggatctagaacttcatcgccctctgatcgccgatcacctctgagacccaccttgctcataaacaaaatgcccatgttggtcctctgccctggacctgtgacattctggactatttctgtgtttatttgtggccgagtgtaacaaccatataataaatcacctcttccgctgttttagctgaagaattaaatcaaaaaacagggtcaccaaggtctgccctatagggaggcgtaataccattggcgacgcggccgggaatttagatgggtgtagtaggc

SEQ ID NO: 67661 - DNA, 847 bp, Homo sapiens
aaataaaaacctcccgagttcccttttttccaccattgcccctttttattgccctttttcccgagggggtgtgagggcagccctttttgtaggttcccgtcagtcctttggaataacttccaaatacagaaagaaaaaaaaaaatttttttgggtgagtgttttttggttcctgcgttgggattccgtgtacaatccatagacatctgacctcggcacttagcatcatcacagcaaactaactgtagcctttctctctttccctgtagaaacctctgcgccatgagagccaagtggaggaagaagcgaatgcgcaggctgaagcgcaaaagaagaaagatgaggcagaggtccaagtaaaccgctagcttgttgcaccgtggaggccacaggagcagaaacatggaatgccagacgctggggatgctggtacaagttgtgggactgcatgctactgtctagagcttgtctcaatggatctagaacttcatcgccctctgatcgccgatcacctctgagacccaccttgctcataaacaaaatgcccatgttggtcctctgccctggacctgtgacattctggactatttctgtgtttatttgtggccgagtgtaacaaccatataataaatcacctcttccgctgttttagctgaagaattaaatcatcatcttgtctattatgttttttatggttccatcgggtgggggttttctgtcattagagtttgccctgtcactacctgtgctatggagggtatcaaagctataaaggcaacagcccgggtaaaaaacaaagagacaaacaagcaagacacacaaaaaaaaaagaacagaaaaagcagagg

SEQ ID NO: 67662 - DNA, 500 bp, Homo sapiens
gacccggcgctccattaaatagccgtagacggaacttcgcctttctctcggccttagcgccatttttttggaaacctctgcgccatgagagccaaggtgagcggttcctggtagtaagcttgggagtggaggaagaagcgaatgcgcaggctgaagcgcaaaagaagaaagatgaggcagaggtccaagtaaaccgctagcttgttgcaccgtggaggccacaggagcagaaacatggaatgccagacgctggggatgctggtacaagttgtgggactgcatgctactgtctagagcttgtctcaatggatctagaacttcatcgccctctgatcgccgatcacctctgagacccaccttgctcataaacaaaatgcccatgttggtcctctgccctggacctgtgacattctggactatttctgtgtttatttgtggccgagtgtaacaaccatataataaatcacctcttccgctgttttagctgaagaattaaatca

SEQ ID NO: 67663 - DNA, 427 bp, Homo sapiens
agagagtggaaggtgttgagaattgtatggcggttgcgcgccatgagaccaagtggaggaagaagcgaatgcgcaggctgaagcgcaaaagaagaaagatgaggcagaggtccaagtaaaccgctagcttgttgcaccgtggaggccacaggagcagaaacatggaatgccagacgctggggatgctggtacaagttgtgggactgcatgctactgtctagagcttgtctcaatggatctagaacttcatcgccctctgatcgccgatcacctctgagacccaccttgctcataaacaaaatgcccatgttggtcctctgccctggacctgtgacattctggactatttctgtgtttatttgtggccgagtgtaacaaccatataataaatcacctcttccgctgttttagctgaagaattaaatca

SEQ ID NO: 67664 - DNA, 1919 bp, Homo sapiens
gacccggcgctccattaaatagccgtagacggaacttcgcctttctctcggccttagcgccatttttttggaaacctctgcgccatgagagccaaggtgagcggttcctggtagtaagcttgggaggtaggagttggcgagtagtagcgaggagacgaaggcaagtccgccatacctcctgaactactgggtttcaagggtgcccaagagctggtgggagagagaaggtagtttgtgagagagctagcggttaagtgctatgggtagagagggtgggcttagaaaagggtggaattctgatcttatgttgggagggtgtccaagttactgatgtagttgttacgaccaatctttcatacttcttggttaagaatctgtccggttctaaagagtgcatttcatatccttgctaagcctactaataagcttcatcccttttttttttttttttttttaattatctgctgcttgtgatcggttgctagtggaggaagaagcgaatgcgcaggtacgttgagactttgccagcccaggaggagggaagttccttggacaaaacttaggagaaacatttggtttggaaatcttaaaagatctttaggagaaaaacgtttgagtgttttctccctggagccaggatttaacagaacagagaacgatagaaccgtagtgcttgttcattttaccacctcattctttatgtggacgtttgatttaatgtgggagggaaaggcaactctggtttgaggtgtattccattcctgtgtctgcttttcaggctgaagcgcaaaagaagaaagatgaggcagaggtccaagtaaaccgctagcttgttgcaccgtggaggccacaggagcagaaacatggaatgccagacgctggggatgctggtacaagttgtgggactgcatgctactgtctagagcttgtctcaatggatctagaacttcatcgccctctgatcgccgatcacctctgagacccaccttgctcataaacaaaatgcccatgttggtcctctgccctggacctgtgacattctggactatttctgtgtttatttgtggccgagtgtaacaaccatataataaatcacctcttccgctgttttagctgaagaattaaatcaaaaaaaaaaaaaacaacaccaccaaacacaacacacaaacaataaaaacacacacaccccaccaaacggggcgaggggagaaaacaaaggacacccacgcaggggcaccacaaacaaaacaaggcagacacagaaaaaaagagacaacaacacggcaccacccaaaagggagagacacgaacaaaaaacagaaaaggaaaagggccgacacaaatcaaccaaaacacaacaggaagacacaaaccacgagaaaggagaaaaaaacgaagaacagcggacgaaacaacaacagagcacagagccacaaaaacacgagagacaccagcaacacgaaggagacacgaaaaacaagcaacaaggggctcaacaacaacacacgcagaccggcacaacacgcgcgaaaccacagcaccaaaaacgcgcacacaaccaaacaacaacaaaaggaaaaagagagaaagaacacatcacgcggggaaacgagaacaaaaaaaccaccacagcaacagcacacggcagccaagagcgcgacagacgcaaccagcacaccgagccaccgcgagaaacgaggcaggcagcgagaacaccagagagggaggaggagcagacgaggagggaaggagacgggacaaggagcagcaacgacagagaaggaaaggaggagcgggacgaaaccgccacacgggacgcgagaaagcaggacgacgagagacgaggcgggaggaagacagagagcacgacgcgagcgaacacggcgcgagaaaagtgaagagggaggcagagacaacca

SEQ ID NO: 67665 - DNA, 548 bp, Homo sapiens
cactcattacaatcttagtagatacttcgtttaagtcctacctctcggccttagcgccatttttttggaaacctctgcgccatgagagccaagtggaggaagaagcgaatgcgcaggctgaagcgcaaaagaagaaagatgaggcagaggtccaagtaaaccgctagcttgttgcaccgtggaggccacaggagcagaaacatggaatgccagacgctggggatgctggtacaagttgtgggactgcatgctactgtctagagcttgtctcaatggatctagaacttcatcgccctctgatcgccgatcacctctgagacccaccttgctcataaacaaaatgcccatgttggtcctctgccctggacctgtgacattctggactatttctgtgtttatttgtggccgagtgtaacaaccatataataaatcacctcttccgctgttttagctgaagaattaaatcaaaaaaaaaaaaaaaaaaaaaaaaaaaaaaaaaaaaaaaaaaaaaaaaaaaagggggggggggggaaaaaaaaaatcccgag

SEQ ID NO: 67666 - DNA, 561 bp, Homo sapiens
  misc_feature (1)..(1): n is a, c, g, or t
  misc_feature (17)..(17): n is a, c, g, or t
ngcacgcgcgaacgcgnccgcgtcgaacggctgcgagaagacgacagagcgagcgcagaggggctctcggcccagcgccggaaacctctgcgccatgagagccaagtggaggaagaagcgaatgcgcaggctgaagcgcaaaagaagaaagatgaggcagaggtccaagtaaaccgctagcttgttgcaccgtggaggccacaggagcagaaacatggaatgccagacgctggggatgctggtacaagttgtgggactgcatgctactgtctagagcttgtctcaatggatctagaacttcatcgccctctgatcgccgatcacctctgagacccaccttgctcataaacaaaatgcccatgttggtcctctgccctggacctgtgacattctggactatttctgtgtttatttgtggccgagtgtaacaaccatataataaatcacctcttccgctgttttagctgaagaattaaatcaaaaaaaaaaaaaaaaaaaaaaaaaaaaaaaaaaaaaaaaaaaaaaaaaaaagggggggggggggaaaaaaaaaatcccgag

SEQ ID NO: 67667 - DNA, 975 bp, Homo sapiens
gacccggcgctccattaaatagccgtagacggaacttcgcctttctctcggccttagcgccatttttttgggtgagtgttttttggttcctgcgttgggattccgtgtacaatccatagacatctgacctcggcacttagcatcatcacagcaaactaactgtagcctttctctctttccctgtagaaacctctgcgccatgagagccaagtggaggaagaagcgaatgcgcaggctgaagcgcaaaagaagaaagatgaggcagaggtccaagtaaaccgctagcttgttgcaccgtggaggccacaggagcagaaacatggaatgccagacgctggggatgctggtacaagttgtgggactgcatgctactgtctagagcttgtctcaatggatctagaacttcatcgccctctgatcgccgatcacctctgagacccaccttgctcataaacaaaatgcccatgttggtcctctgccctggacctgtgacattctggactatttctgtgtttatttgtggccgagtgtaacaaccatataataaatcacctcttccgctgttttagctgaagaattaaatcaaaaaaaaaaaaaaaaaaaaaaaaaaaaaaaaaaaaaaaaaaaaaaaaggggggggggaaaaaaatcggggggggaactaatgtcaacacacccgatttgtagaaagaggcacaccaaagaaggagtattattaaaccaggagagcgggcggtaaaaccaagggcggagagaaactatagtagggattatgtcgagaaacccctctgggggtcggtatctgcgcaccaccgagaataagggggggagaaaaaatgggttgagtggaaccgcttcggtcttcgattttctttttttatatcctgttgtcttactgtgataatgcatgaccatgagagtgtataagatgatcgtaagataacagatctatgtcgtgactatgttgtctcgttt

SEQ ID NO: 67668 - DNA, 624 bp, Homo sapiens
gacccggcgctccattaaatagccgtagacggaacttcgcctttctctcggccttagcgccatttttttggaaacctctgcgccatgagagccaaggtgagcggttcctggtagtaagcttgggagtggaggaagaagcgaatgcgcaggctgaagcgcaaaagaagaaagatgaggcagaggtccaagtaaaccgctagcttgttgcaccgtggaggccacaggagcagaaacatggaatgccagacgctggggatgctggtacaagttgtgggactgcatgctactgtctagagcttgtctcaatggatctagaacttcatcgccctctgatcgccgatcacctctgagacccaccttgctcataaacaaaatgcccatgttggtcctctgccctggacctgtgacattctggactatttctgtgtttatttgtggccgagtgtaacaaccatataataaatcacctcttccgctgttttagctgaagaattaaatcaaaaaaaaaaaaaaaaaaaaaaaaaaaaaaaaaaaaaaaaaaaaaaaagaaaaagaaaaaaaaaaaaaaaaaaaaaaaaaaaaaagaaaaaaaaagggggggggggggaaaaaaaaaatcccgag

SEQ ID NO: 67669 - DNA, 624 bp, Homo sapiens
gacccggcgctccattaaatagccgtagacggaacttcgcctttctctcggccttagcgccatttttttggaaacctctgcgccatgagagccaaggtgagcggttcctggtagtaagcttgggaggtaggagttggcgagtagtagcgaggagacgaaggcaagtccgccatacctcctgaactactgggtttcaagggtgcccaagagctggtgggagagagaaggtagtttgtgagagagctagcggttaagtgctatgggtagagagggtgggcttagaaaagggtggaattctgatcttatgttgggagggtgtccaagttactgatgtagttgttacgaccaatctttcatacttcttggttaagaatctgtccggttctaaagagtgcatttcatatccttgctaagcctactaataagcttcatcccttttttttttttttttttttaattatctgctgcttgtgatcggttgctagtggaggaagaagcgaatgcgcaggctgaagcgcaaaagaagaaagatgaggcagaggtccaagtaaaccgctagcttgttgcaccgtggaggccacaggagcagaaacatgtccccgtacatcgttagaagcttgaatt

SEQ ID NO: 67670 - DNA, 569 bp, Homo sapiens
  misc_feature (6)..(6): n is a, c, g, or t
  misc_feature (46)..(46): n is a, c, g, or t
  misc_feature (69)..(69): n is a, c, g, or t
  misc_feature (75)..(75): n is a, c, g, or t
cggcgnccgagaactatggatcccccgggcttcaggaccggccgcntcgattacggcttcgagaagacnacaganggggctctcggccttagcgccatttttttggaaacctctgcgccatgagagccaaggtgagcggttcctggtagtaagcttgggaggtaggagttggcgagtagtagcgaggagacgaagtggaggaagaagcgaatgcgcaggctgaagcgcaaaagaagaaagatgaggcagaggtccaagtaaaccgctagcttgttgcaccgtggaggccacaggagcagaaacatggaatgccagacgctggggatgctggtacaagttgtgggactgcatgctactgtctagagcttgtctcaatggatctagaacttcatcgccctctgatcgccgatcacctctgagacccaccttgctcataaacaaaatgcccatgttggtcctctgccctggacctgtgacattctggactatttctgtgtttatttgtggccgagtgtaacaaccatataataaatcacctcttccgctgttttagctgaagaattaaatca

SEQ ID NO: 67671 - DNA, 701 bp, Homo sapiens
  misc_feature (6)..(6): n is a, c, g, or t
  misc_feature (46)..(46): n is a, c, g, or t
  misc_feature (69)..(69): n is a, c, g, or t
  misc_feature (75)..(75): n is a, c, g, or t
cggcgnccgagaactatggatcccccgggcttcaggaccggccgcntcgattacggcttcgagaagacnacaganggggctctcggccttagcgccatttttttggggaaacctctgcgccatgagagccaagtggaggaagaagcgaatgcgcaggctgaagcgcaaaagaagaaagatgaggcagaggtccaagtaaaccgctagcttgttgcaccgtggaggccacaggagcagaaacatggaatgccagacgctggggatgctggtacaagttgtgggactgcatgctactgtctagagcttgtctcaatggatctagaacttcatcgccctctgatcgccgatcacctctgagacccaccttgctcataaacaaaatgcccatgttggtcctctgccctggacctgtgacattctggactatttctgtgtttatttgtggccgagtgtaacaaccatataataaatcacctcttccgctgttttagctgaagaattaaatcaaaaaaaaaaaaaaaaaaaaaatgcgggcgcaattcgagcctaattgggcaatttggccttatggggaaggcgattacaattaactgcccgtggtttacaacgtcgtaactggaccctgccgttacccaccttaatcgcttggaactccccttttggccagttgggtatatccggagcccggaccgtcgcctttt

SEQ ID NO: 67672 - DNA, 553 bp, Homo sapiens
  misc_feature (6)..(6): n is a, c, g, or t
  misc_feature (46)..(46): n is a, c, g, or t
  misc_feature (69)..(69): n is a, c, g, or t
  misc_feature (75)..(75): n is a, c, g, or t
  misc_feature (508)..(508): n is a, c, g, or t
cggcgnccgagaactatggatcccccgggcttcaggaccggccgcntcgattacggcttcgagaagacnacaganggggctctcggccttagcgccatttttttggggaaacctctgcgccatgagagccaagtggaggaagaagcgaatgcgcaggctgaagcgcaaaagaagaaagatgaggcagaggtccaagtaaaccgctagcttgttgcaccgtggaggccacaggagcagaaacatggaatgccagacgctggggatgctggtacaagttgtgggactgcatgctactgtctagagcttgtctcaatggatctagaacttcatcgccctctgatcgccgatcacctctgagacccaccttgctcataaacaaaatgcccatgttggtcctctgccctggacctgtgacattctggactatttctgtgtttatttgtggccgagtgtaacaaccatataataaatcacctcttccgctgttttagctgaagaattaaatcanacaaaaaaaaccttcctctcatcaacttcttccctttcacaaaaa

SEQ ID NO: 67673 - DNA, 1115 bp, Homo sapiens
  misc_feature (237)..(237): n is a, c, g, or t
  misc_feature (771)..(771): n is a, c, g, or t
  misc_feature (931)..(932): n is a, c, g, or t
taatgatcttttttcactgttgctgagaatctttggtttgaattattgaggcaggttctttcagtaagtttgagatataattgccatgtaataaactgcacatgtttttagcatacactttaagtttggacacatacacatatgtgtacatacacaccatcaagataatgaacatacctatcaaaccagatggtttcctcatgcccttttataatttcttcttctcctcacccttcnctgcctgtcactctcctgatccactgatttgctttctcttagaatagacgactttatattatgtacagtttttatataaatggaatcatatagtctggcatctttcaggataattttttcagatccatttatgttgtagggtccatttcactgctgaatagtattccattgcaaggcataccacaagctatttatccatgtgttatttctaccttttggctattgcaattaaaactgccttgaatacccatatgcagattattctttaaacatgtgcttctgtttctttaaatagttaagagtggaatgatcagatcatatgttagtgtacgtttaagtttttaagagactgctaaacctttctcaagtagttatgccatttgacatttccatgagcagtatataagagttgcaattcttctgcatccttgccaattattggtatggtcagtcttttttattttgaccattttaataggtgtgtagtagtatctcatggttttaatttgcatttccctagtgactaatgatgtnttacatggtttcacgtgcttactggccttctttaagcctttggggaagagtctgttcaaatcttttgcctgtttatattggctttattttttatttatttttatttttttttatatagagacagggttttactctgtctcccaggctgaagtgcgtggcnngatcatgtggttttgcaatatttattgaattttgagagtttaaaatttgtaatatatttaatattaaacctattagtgtatttgatattaatactttatatttaatataatgtacatttaaatatataataaaacatttcattttaacagaggtaacataaatacacttcccaatttatggag

SEQ ID NO: 67674 - DNA, 1626 bp, Homo sapiens
ccaccggcaggttgtactcaagagctccacgcagcccggctgggcagcaagggacagaacagaggcggccgctgacagcaccagcatgtcttacagtgtgaccctgactgggcccgggccctggggcttccgtctgcaggggggcaaggacttcaacatgcccctcactatctcccggatcacaccaggcagcaaggcagcccagtcccagctcagccagggtgacctcgtggtggccattgacggcgtcaacacagacaccatgacccacctggaagcccagaacaagatcaagtctgccagctacaacttgagcctcaccctgcagaaatcaaagcgtcccattcccatctccacgacagcacctccagtccagacccctctgccggtgatccctcaccagaaggtggtagtcaactctccagccaacgccgactaccaggaacgcttcaaccccagtgccctgaaggactcggccctgtccacccacaagcccatcgaggtgaaggggctgggcggcaaggccaccatcatccatgcgcagtacaacacgcccatcagcatgtattcccaggatgccatcatggatgccatcgctgggcaggcccaagcccaaggcagtgacttcagtgggagcctccctattaaggaccttgccgtagacagcgcctctcccgtctaccaggctgtgattaagagccagaacaagccagaagatgaggctgacgagtgggcacgccgttcctccaacctgcagtctcgctccttccgcatcctggcccagatgacggggacagaattcatgcaagaccctgatgaagaagctctgcgaaggtcaagggaaaggtttgaaacggaacgtaacagcccacgttttgccaaattgcgcaactggcaccatggcctttcagcccaaatccttaatgttaaaagctaaaaggctgcctggaatccccccaccccaacaggctggactccctccatccttacccccacacagatctggcatgtgagccccacggtgatgcttgacaatgtataactctgctgggggcacctctgatggccaaccgcagcatttctgtcctctgcccaccccagagctgatgctggggcccagccccctgcagctctgtacccaccaaacctccccagggcaaccctcgccaccccccaaatagcccgtagcccaatcccctgccctctgcacagggccttagctgtagaccagagagggcaggaggggtttgctggcataacaccccagaaccaagggaaatggatgggccgctgctcagtttcccaccatcctcagctcctggcctcatcccctcctagaatgagtcacccgtagatcagggtctggggaagaggctgatccctggcgctgcccggctccctcgctgccctctggagctcagggcagcccggaatagggctctttgaagaggaagtagaagccccagggtaatgaggcagagacccctcctggcagtggtgaggtgggggcatgcaccctcctttctgtaccgtgtgtgctggctccatagttctctcttctgtacatataagcatgcttgttctgaaataaagaagatttgaagtgaaccacaacaaaacagtcat

SEQ ID NO: 67675 - DNA, 1620 bp, Homo sapiens
gcaggcggagtgcctgagtgccctctcactcaaccctctctaccctttgtctgcagaggcggccgctgacagcaccagcatgtcttacagtgtgaccctgactgggcccgggccctggggcttccgtctgcaggggggcaaggacttcaacatgcccctcactatctcccggatcacaccaggcagcaaggcagcccagtcccagctcagccagggtgacctcgtggtggccattgacggcgtcaacacagacaccatgacccacctggaagcccagaacaagatcaagtctgccagctacaacttgagcctcaccctgcagaaatcaaagcgtcccattcccatctccacgacagcacctccagtccagacccctctgccggtgatccctcaccagaaggtggtagtcaactctccagccaacgccgactaccaggaacgcttcaaccccagtgccctgaaggactcggccctgtccacccacaagcccatcgaggtgaaggggctgggcggcaaggccaccatcatccatgcgcagtacaacacgcccatcagcatgtattcccaggatgccatcatggatgccatcgctgggcaggcccaagcccaaggcagtgacttcagtgggagcctccctattaaggaccttgccgtagacagcgcctctcccgtctaccaggctgtgattaagagccagaacaagccagaagatgaggctgacgagtgggcacgccgttcctccaacctgcagtctcgctccttccgcatcctggcccagatgacggggacagaattcatgcaagaccctgatgaagaagctctgcgaaggtcaagggaaaggtttgaaacggaacgtaacagcccacgttttgccaaattgcgcaactggcaccatggcctttcagcccaaatccttaatgttaaaagctaaaaggctgcctggaatccccccaccccaacaggctggactccctccatccttacccccacacagatctggcatgtgagccccacggtgatgcttgacaatgtataactctgctgggggcacctctgatggccaaccgcagcatttctgtcctctgcccaccccagagctgatgctggggcccagccccctgcagctctgtacccaccaaacctccccagggcaaccctcgccaccccccaaatagcccgtagcccaatcccctgccctctgcacagggccttagctgtagaccagagagggcaggaggggtttgctggcataacaccccagaaccaagggaaatggatgggccgctgctcagtttcccaccatcctcagctcctggcctcatcccctcctagaatgagtcacccgtagatcagggtctggggaagaggctgatccctggcgctgcccggctccctcgctgccctctggagctcagggcagcccggaatagggctctttgaagaggaagtagaagccccagggtaatgaggcagagacccctcctggcagtggtgaggtgggggcatgcaccctcctttctgtaccgtgtgtgctggctccatagttctctcttctgtacatataagcatgcttgttctgaaataaagaagatttgaagtgaaccacaacaaaacagtcat

SEQ ID NO: 67676 - DNA, 3978 bp, Homo sapiens
ccaccggcaggttgtactcaagagctccacgcagcccggctgggcagcaagggacagaacagaggcggccgctgacagcaccagcatgtcttacagtgtgaccctgactgggcccgggccctggggcttccgtctgcaggggggcaaggacttcaacatgcccctcactatctcccggatcacaccaggcagcaaggcagcccagtcccagctcagccagggtgacctcgtggtggccattgacggcgtcaacacagacaccatgacccacctggaagcccagaacaagatcaagtctgccagctacaacttgagcctcaccctgcagaaatcaaagcgtcccattcccatctccacgacagcacctccagtccagacccctctgccggtgatccctcaccagaaggtggtagtcaactctccagccaacgccgactaccaggaacgcttcaaccccagtgccctgaaggactcggccctgtccacccacaagcccatcgaggtgaaggggctgggcggcaaggccaccatcatccatgcgcagtacaacacgcccatcagcatgtattcccaggatgccatcatggatgccatcgctgggcaggcccaagcccaaggcagtgacttcagtgggagcctccctattaaggaccttgccgtagacagcgcctctcccgtctaccaggctgtgattaagagccagaacaagccagaagatgaggctgacgagtgggcacgccgttcctccaacctgcagtctcgctccttccgcatcctggcccagatgacggggacagaattcatgcaagaccctgatgaagaagctctgcgaaggtcaaggccccaggcctcttcctacagccccgcagtggccgcctcttcagcacctgccacccacaccagctacagtgagggccccgccgcccctgcacccaagccccgggttgtcaccactgccagcatccggccttctgtctaccagccagtgcctgcatctacctacagcccgtccccaggggccaattacagtcccactccctacaccccctcccctgcccctgcctacaccccctcccctgcccctgcctacaccccctcacctgtccccacctacactccatccccagcaccagcctataccccctcacctgcccccaactataaccctgcaccctcggtggcctacagcgggggccctgcggagcctgccagccgtccaccctgggtgacagatgatagcttctcccagaagtttgccccgggcaagagcaccacctccatcagcaagcagaccctgccccggggaggcccagcctacaccccagcgggtcctcaggtgccaccacttgccagggggaccgtccagagggctgagcgattcccagccagcagccggactccactctgcggtcactgcaacaatgtcatccggggcccatttctggtagccatgggccgttcttggcaccctgaagagttcacctgtgcctactgcaagacttccctggcagatgtgtgctttgtggaagagcagaacaacgtttactgtgagcgatgttatgagcaattctttgccccgctgtgtgccaagtgcaacaccaaaattatgggggaagtaatgcatgccttgagacagacatggcacaccacctgcttcgtctgtgcggcctgcaagaagccttttgggaacagcctcttccacatggaagacggggagccctactgcgagaaagactacatcaatctgttcagcaccaagtgccatggctgcgatttccccgtggaggctggcgacaagtttatcgaagccctgggccacacttggcacgacacctgcttcatttgcgcagtctgccatgtgaatctggaggggcagccgttctactccaagaaggacagacccctgtgcaagaagcacgcacacaccatcaacttgtaggcggccaaggccgcctgtgctgacgaggcccggagctgctcctgctgctggcaacaaaggattcgggaggctgatgtttcttctgaggggaatggggagagagaggaagcgactgagccctttggaagtataattttaggttttttcttctgtacacagatcgtgcatttgcatagttcagactaggagccaaatgaagactcaaaaccaagctagttattaatccaagactggaattgtacttcagacatttagagcagaattccaagaactcaaaagtgaaaagcaacaagcagctttcccaaagcgatacacttgctttggtcaccagaggaggacagagcttagagcagctgtggagaatctgaagcattctgcggagttcttaagcgctcccctggcaaacaaattgaagtgccaaacagcactcgctgcagggtatttttagagtcatagctgagagcttgttagctaagacccattgggctttcctcaccaaaaaaggaagtgttattccattactagcgtcatggagctacctctgcgcatcagacttcagaccttgaacaaacttaaaaccttcttgggagcccggacgtccaaagagatgtcttctgggagccactgggcaattgccagggctccaggaagggctctggctcaggttgcagacagctgagaaaagatggccctgtcagccaccctctctcagtctgaaacatccaacatccccagaaggcttagctcctttttgaattgtgatgggaaagtagagttgggtttttccagttttgctctgtggtgtgtgagagatttttttaaaggctttgggttgtctttggcctttgtttagctttaagggttcgttagcatgagtgtccagtcgtgtgcatgaatttcaccccaacttgtgactgctcacttatgacgtctcccccagtaccctccatctcaaataggcttggtggcctgtggaaaagaagagagacagagagacagtgtctgaaacaggatggcagaataggctcacatgcccaaactctgggtggggaagaggaaacttactttctgccaccctcagtaagaacacacgaggaggcaggacctcccaccttcaggtctgcatcatccttttcaaatgttcctttaaatgcagcacactgagtttgtacaattgtgttaactgctggaagggacagatgcactgatatatatgcatttgctgttttggccaatattttgaaaatgtatgagctgagttgatctagctattatttaagtatttattgaagtagaggggccttcaaactactttatactagtgatagtttgagttaggtaagcatcttaaagctgtttggtgataaagaaggcagcttagattctgtggttggaaacagtgtagtcgcttccctttttaggaagccctgttaatatgctcattgaaaacatggcattgaagcaggcacttgcgtggatgtttctcacttgagcacgatatttaggctctcttccaactcactctattctgtcctcactcctgttttggatttttctctttgcatgtttgaaatgttttatgggaatgtattagaactcttttcttctaaggactgagacttccaggggattgccatcttacctgtctcttctccatgagggagaaggaagcagctagctatgtccctagctgcaggaagcccctattttttccaagcacgaagccaccagtctcccccagggagcatcaggaagggacatggatgtgctccctgccacagggcccttcctatgccacagggcccttcctacctttggatctgtgagaaggtgaatacaaagcagcaggcagagtaaaatctgctgggactgcctggagatttgtcaggagctgcagacaagtaccttggagcattctgttatttttggaaagttcaaatatgcagggacaaggaggttgctgactgtactgacaggctctaagtcattttctccaaaaactatctattcaattatcaggggctggtcttgaggaagga

SEQ ID NO: 67677 - DNA, 1519 bp, Homo sapiens
agtccactggcgtcttcaccaccatggagaaggctggggctcatttgcaggggggagcccaccggcaggttatcacaccaggcagcaaggcagcccagtcccagctcagccagggtgacctcgtggtggccattgacggcgtcaacacagacaccatgacccacctggaagcccagaacaagatcaagtctgccagctacaacttgagcctcaccctgcagaaatcaaagcgtcccattcccatctccacgacagcacctccagtccagacccctctgccggtgatccctcaccagaaggtggtagtcaactctccagccaacgccgactaccaggaacgcttcaaccccagtgccctgaaggactcggccctgtccacccacaagcccatcgaggtgaaggggctgggcggcaaggccaccatcatccatgcgcagtacaacacgcccatcagcatgtattcccaggatgccatcatggatgccatcgctgggcaggcccaagcccaaggcagtgacttcagtgggagcctccctattaaggaccttgccgtagacagcgcctctcccgtctaccaggctgtgattaagagccagaacaagccagaagatgaggctgacgagtgggcacgccgttcctccaacctgcagtctcgctccttccgcatcctggcccagatgacggggacagaattcatgcaagaccctgatgaagaagctctgcgaaggtcaagggaaaggtttgaaacggaacgtaacagcccacgttttgccaaattgcgcaactggcaccatggcctttcagcccaaatccttaatgttaaaagctaaaaggctgcctggaatccccccaccccaacaggctggactccctccatccttacccccacacagatctggcatgtgagccccacggtgatgcttgacaatgtataactctgctgggggcacctctgatggccaaccgcagcatttctgtcctctgcccaccccagagctgatgctggggcccagccccctgcagctctgtacccaccaaacctccccagggcaaccctcgccaccccccaaatagcccgtagcccaatcccctgccctctgcacagggccttagctgtagaccagagagggcaggaggggtttgctggcataacaccccagaaccaagggaaatggatgggccgctgctcagtttcccaccatcctcagctcctggcctcatcccctcctagaatgagtcacccgtagatcagggtctggggaagaggctgatccctggcgctgcccggctccctcgctgccctctggagctcagggcagcccggaatagggctctttgaagaggaagtagaagccccagggtaatgaggcagagacccctcctggcagtggtgaggtgggggcatgcaccctcctttctgtaccgtgtgtgctggctccatagttctctcttctgtacatataagcatgcttgttctgaaataaagaagatttgaagtgaaccacaacaaaacagtcat

SEQ ID NO: 67678 - DNA, 2016 bp, Homo sapiens
ctcaacgctttatacttccaaagggcccggagctgctcctgctgctggcaacaaaggattcgggaggctgatgtttcttctgaggggaatggggagagagaggaagcgactgagccctttggaagtataattttaggttttttcttctgtacacagatcgtgcatttgcatagttcagactaggagccaaatgaagactcaaaaccaagctagttattaatccaagactggaattgtacttcagacatttagagcagaattccaagaactcaaaagtgaaaagcaacaagcagctttcccaaagcgatacacttgctttggtcaccagaggaggacagagcttagagcagctgtggagaatctgaagcattctgcggagttcttaagcgctcccctggcaaacaaattgaagtgccaaacagcactcgctgcagggtatttttagagtcatagctgagagcttgttagctaagacccattgggctttcctcaccaaaaaaggaagtgttattccattactagcgtcatggagctacctctgcgcatcagacttcagaccttgaacaaacttaaaaccttcttgggagcccggacgtccaaagagatgtcttctgggagccactgggcaattgccagggctccaggaagggctctggctcaggttgcagacagctgagaaaagatggccctgtcagccaccctctctcagtctgaaacatccaacatccccagaaggcttagctcctttttgaattgtgatgggaaagtagagttgggtttttccagttttgctctgtggtgtgtgagagatttttttaaaggctttgggttgtctttggcctttgtttagctttaagggttcgttagcatgagtgtccagtcgtgtgcatgaatttcaccccaacttgtgactgctcacttatgacgtctcccccagtaccctccatctcaaataggcttggtggcctgtggaaaagaagagagacagagagacagtgtctgaaacaggatggcagaataggctcacatgcccaaactctgggtggggaagaggaaacttactttctgccaccctcagtaagaacacacgaggaggcaggacctcccaccttcaggtctgcatcatccttttcaaatgttcctttaaatgcagcacactgagtttgtacaattgtgttaactgctggaagggacagatgcactgatatatatgcatttgctgttttggccaatattttgaaaatgtatgagctgagttgatctagctattatttaagtatttattgaagtagaggggccttcaaactactttatactagtgatagtttgagttaggtaagcatcttaaagctgtttggtgataaagaaggcagcttagattctgtggttggaaacagtgtagtcgcttccctttttaggaagccctgttaatatgctcattgaaaacatggcattgaagcaggcacttgcgtggatgtttctcacttgagcacgatatttaggctctcttccaactcactctattctgtcctcactcctgttttggatttttctctttgcatgtttgaaatgttttatgggaatgtattagaactcttttcttctaaggactgagacttccaggggattgccatcttacctgtctcttctccatgagggagaaggaagcagctagctatgtccctagctgcaggaagcccctattttttccaagcacgaagccaccagtctcccccagggagcatcaggaagggacatggatgtgctcctgccacagggcccttcctacctttggatctgtgagaaggtgaatacaaagcagcaggcagagtaaaatctgctgggactgcctggagatttgtcaggagctgcagacaagtaccttggagcattctgttatttttggaaagttcaaatatgcagggacaaggaggttgctgactgtactgacaggctctaagtcattttctccaaaaactatctattcaattatcaggggctggtcttgaggaagga

SEQ ID NO: 67679 - DNA, 2245 bp, Homo sapiens
  misc_feature (2238)..(2245): n is a, c, g, or t
ccaccggcaggttgtactcaagagctccacgcagcccggctgggcagcaagggacagaacagaggcggccgctgacagcaccagcatgtcttacagtgtgaccctgactgggcccgggccctggggcttccgtctgcaggggggcaaggacttcaacatgcccctcactatctcccggatcacaccaggcagcaaggcagcccagtcccagctcagccagggtgacctcgtggtggccattgacggcgtcaacacagacaccatgacccacctggaagcccagaacaagatcaagtctgccagctacaacttgagcctcaccctgcagaaatcaaagcgtcccattcccatctccacgacagcacctccagtccagacccctctgccggtgatccctcaccagaaggtggtagtcaactctccagccaacgccgactaccaggaacgcttcaaccccagtgccctgaaggactcggccctgtccacccacaagcccatcgaggtgaaggggctgggcggcaaggccaccatcatccatgcgcagtacaacacgcccatcagcatgtattcccaggatgccatcatggatgccatcgctgggcaggcccaagcccaaggcagtgacttcagtgggagcctccctattaaggaccttgccgtagacagcgcctctcccgtctaccaggctgtgattaagagccagaacaagccagaagatgaggctgacgagtgggcacgccgttcctccaacctgcagtctcgctccttccgcatcctggcccagatgacggggacagaattcatgcaagaccctgatgaagaagctctgcgaaggtcaagcacccctattgagcatgcgccggtgtgcaccagccaggccaccaccccgctgctgcccgcttctgcccagccacctgctgctgcctctcccagtgcggcttcgccacccctggccacagctgctgcccacactgccatcgcctccgcctccaccacagcccctgcttcaagtcctgccgacagcccaaggccccaggcctcttcctacagccccgcagtggccgcctcttcagcacctgccacccacaccagctacagtgagggccccgccgcccctgcacccaagccccgggttgtcaccactgccagcatccggccttctgtctaccagccagtgcctgcatctacctacagcccgtccccaggggccaattacagtcccactccctacaccccctcccctgcccctgcctacaccccctcccctgcccctgcctacaccccctcacctgtccccacctacactccatccccagcaccagcctataccccctcacctgcccccaactataaccctgcaccctcggtggcctacagcgggggccctgcggagcctgccagccgtccaccctgggtgacagatgatagcttctcccagaagtttgccccgggcaagagcaccacctccatcagcaagcagaccctgccccggggaggcccagcctacaccccagcgggtcctcaggtgccaccacttgccagggggaccgtccagagggctgagcgattcccagccagcagccggactccactctgcggtcactgcaacaatgtcatccggggcccatttctggtagccatgggccgttcttggcaccctgaagagttcacctgtgcctactgcaagacttccctggcagatgtgtgctttgtggaagagcagaacaacgtttactgtgagcgatgttatgagcaattctttgccccgctgtgtgccaagtgcaacaccaaaattatgggggaagtaatgcatgccttgagacagacatggcacaccacctgcttcgtctgtgcggcctgcaagaagccttttgggaacagcctcttccacatggaagacggggagccctactgcgagaaagactacatcaatctgttcagcaccaagtgccatggctgcgatttccccgtggaggctggcgacaagtttatcgaagccctgggccacacttggcacgacacctgcttcatttgcgcagtatgtctctagcttggggctctggctttctgagaagaggcaggagggaggaagtgggagccagatgaccaacctctacataccttgccacgctagctttctgacatcctgatcatttttaaaagctggcaaacaccatgatgcctcgatacatcacagtcgaacaaagtttcattcctaataattatttataaaccaannnnnnnn

SEQ ID NO: 67680 - DNA, 2294 bp, Homo sapiens
ccaccggcaggttgtactcaagagctccacgcagcccggctgggcagcaagggacagaacagaggcggccgctgacagcaccagcatgtcttacagtgtgaccctgactgggcccgggccctggggcttccgtctgcaggggggcaaggacttcaacatgcccctcactatctcccggatcacaccaggcagcaaggcagcccagtcccagctcagccagggtgacctcgtggtggccattgacggcgtcaacacagacaccatgacccacctggaagcccagaacaagatcaagtctgccagctacaacttgagcctcaccctgcagaaatcaaagcgtcccattcccatctccacgacagcacctccagtccagacccctctgccggtgatccctcaccagaaggtggtagtcaactctccagccaacgccgactaccaggaacgcttcaaccccagtgccctgaaggactcggccctgtccacccacaagcccatcgaggtgaaggggctgggcggcaaggccaccatcatccatgcgcagtacaacacgcccatcagcatgtattcccaggatgccatcatggatgccatcgctgggcaggcccaagcccaaggcagtgacttcagtgggagcctccctattaaggaccttgccgtagacagcgcctctcccgtctaccaggctgtgattaagagccagaacaagccagaagatgaggctgacgagtgggcacgccgttcctccaacctgcagtctcgctccttccgcatcctggcccagatgacggggacagaattcatgcaagaccctgatgaagaagctctgcgaaggtcaagcacccctattgagcatgcgccggtgtgcaccagccaggccaccaccccgctgctgcccgcttctgcccagccacctgctgctgcctctcccagtgcggcttcgccacccctggccacagctgctgcccacactgccatcgcctccgcctccaccacagcccctgcttcaagtcctgccgacagcccaaggccccaggcctcttcctacagccccgcagtggccgcctcttcagcacctgccacccacaccagctacagtgagggccccgccgcccctgcacccaagccccgggttgtcaccactgccagcatccggccttctgtctaccagccagtgcctgcatctacctacagcccgtccccaggggccaattacagtcccactccctacaccccctcccctgcccctgcctacaccccctcccctgcccctgcctacaccccctcacctgtccccacctacactccatccccagcaccagcctataccccctcacctgcccccaactataaccctgcaccctcggtggcctacagcgggggccctgcggagcctgccagccgtccaccctgggtgacagatgatagcttctcccagaagtttgccccgggcaagagcaccacctccatcagcaagcagaccctgccccggggaggcccagcctacaccccagcgggtcctcaggtgccaccacttgccagggggaccgtccagagggctgagcgattcccagccagcagccggactccactctgcggtcactgcaacaatgtcatccggggcccatttctggtagccatgggccgttcttggcaccctgaagagttcacctgtgcctactgcaagacttccctggcagatgtgtgctttgtggaagagcagaacaacgtttactgtgagcgatgttatgagcaattctttgccccgctgtgtgccaagtgcaacaccaaaattatgggggaagtaatgcatgccttgagacagacatggcacaccacctgcttcgtctgtgcggcctgcaagaagccttttgggaacagcctcttccacatggaagacggggagccctactgcgagaaagactacatcaatctgttcagcaccaagtgccatggctgcgatttccccgtggaggctggcgacaagtttatcgaagccctgggccacacttggcacgacacctgcttcatttgcgcagtctgccatgtgaatctggaggggcagccgttctactccaagaaggacagacccctgtgcaagaagcacgcacacacacacacacacacacacacacacacacgatcattaaaaagtgtatgctctttaagaagaaaagtaaaatatctcaaaggacggtttcaccaccgtcctttattgaatcaatttttctacatttcagagcaagtgtagattctgagggactcctatttgccaaaaagacaaaactagcaaa

SEQ ID NO: 67681 - DNA, 443 bp, Homo sapiens
ccccgcagtggccgcctcttcagcacctgccacccacaccagctacagtgagggccccgccgcccctgcacccaagccccgggttgtcaccactgccagcatccggccttctgtctaccagccaggtaagaggcagagcaggaggggaggctgtcgaaagccatgggcgggctccaggagccacaagagccaagaagtggctctgggggcacatccccagaagaatgggaagcaaggccttgctaatgatgctccgccctccgtcccctagctgtgggtcagaatcctatggagcctgcatctggtctgggggagacaggtgagcaagaaagcggtggatgattctaagggagagcgaaggagagcagagaagtcttctccggaccgggcatggtggctcacacttggaatcccagcactttgggaggctggggcaggaggat

SEQ ID NO: 67682 - DNA, 4298 bp, Homo sapiens
ccaccggcaggttgtactcaagagctccacgcagcccggctgggcagcaagggacagaacagaggcggccgctgacagcaccagcatgtcttacagtgtgaccctgactgggcccgggccctggggcttccgtctgcaggggggcaaggacttcaacatgcccctcactatctcccggatcacaccaggcagcaaggcagcccagtcccagctcagccagggtgacctcgtggtggccattgacggcgtcaacacagacaccatgacccacctggaagcccagaacaagatcaagtctgccagctacaacttgagcctcaccctgcagaaatcaaagcgtcccattcccatctccacgacagcacctccagtccagacccctctgccggtgatccctcaccagaaggtggtagtcagaccccgctctggacacgaacggcagcctggtggcacccagccccagccctgaggcgagggccagcccaggcaccccaggcaccccggagctcaggcccacctttagccctgccttctcccggccctccgccttctcctcactcgccgaggcctctgaccctggccctccgcgggccagcctgagggccaagaccagcccagagggggcccgggacctactcggcccaaaagccctgccgggctcgagccagccgaggcaatataacaaccccattggcctgtactcggcagagaccctgagggagatggctcagatgtaccagatgagcctccgagggaaggcctcgggtgtcggactcccaggagggagcctccctattaaggaccttgccgtagacagcgcctctcccgtctaccaggctgtgattaagagccagaacaagccagaagatgaggctgacgagtgggcacgccgttcctccaacctgcagtctcgctccttccgcatcctggcccagatgacggggacagaattcatgcaagaccctgatgaagaagctctgcgaaggtcaagcacccctattgagcatgcgccggtgtgcaccagccaggccaccaccccgctgctgcccgcttctgcccagccacctgctgctgcctctcccagtgcggcttcgccacccctggccacagctgctgcccacactgccatcgcctccgcctccaccacagcccctgcttcaagtcctgccgacagcccaaggccccaggcctcttcctacagccccgcagtggccgcctcttcagcacctgccacccacaccagctacagtgagggccccgccgcccctgcacccaagccccgggttgtcaccactgccagcatccggccttctgtctaccagccagtgcctgcatctacctacagcccgtccccaggggccaattacagtcccactccctacaccccctcccctgcccctgcctacaccccctcccctgcccctgcctacaccccctcacctgtccccacctacactccatccccagcaccagcctataccccctcacctgcccccaactataaccctgcaccctcggtggcctacagcgggggccctgcggagcctgccagccgtccaccctgggtgacagatgatagcttctcccagaagtttgccccgggcaagagcaccacctccatcagcaagcagaccctgccccggggaggcccagcctacaccccagcgggtcctcaggtgccaccacttgccagggggaccgtccagagggctgagcgattcccagccagcagccggactccactctgcggtcactgcaacaatgtcatccggggcccatttctggtagccatgggccgttcttggcaccctgaagagttcacctgtgcctactgcaagacttccctggcagatgtgtgctttgtggaagagcagaacaacgtttactgtgagcgatgttatgagcaattctttgccccgctgtgtgccaagtgcaacaccaaaattatgggggaagtaatgcatgccttgagacagacatggcacaccacctgcttcgtctgtgcggcctgcaagaagccttttgggaacagcctcttccacatggaagacggggagccctactgcgagaaagactacatcaatctgttcagcaccaagtgccatggctgcgatttccccgtggaggctggcgacaagtttatcgaagccctgggccacacttggcacgacacctgcttcatttgcgcagtctgccatgtgaatctggaggggcagccgttctactccaagaaggacagacccctgtgcaagaagcacgcacacaccatcaacttgtaggcggccaaggccgcctgtgctgacgaggcccggagctgctcctgctgctggcaacaaaggattcgggaggctgatgtttcttctgaggggaatggggagagagaggaagcgactgagccctttggaagtataattttaggttttttcttctgtacacagatcgtgcatttgcatagttcagactaggagccaaatgaagactcaaaaccaagctagttattaatccaagactggaattgtacttcagacatttagagcagaattccaagaactcaaaagtgaaaagcaacaagcagctttcccaaagcgatacacttgctttggtcaccagaggaggacagagcttagagcagctgtggagaatctgaagcattctgcggagttcttaagcgctcccctggcaaacaaattgaagtgccaaacagcactcgctgcagggtatttttagagtcatagctgagagcttgttagctaagacccattgggctttcctcaccaaaaaaggaagtgttattccattactagcgtcatggagctacctctgcgcatcagacttcagaccttgaacaaacttaaaaccttcttgggagcccggacgtccaaagagatgtcttctgggagccactgggcaattgccagggctccaggaagggctctggctcaggttgcagacagctgagaaaagatggccctgtcagccaccctctctcagtctgaaacatccaacatccccagaaggcttagctcctttttgaattgtgatgggaaagtagagttgggtttttccagttttgctctgtggtgtgtgagagatttttttaaaggctttgggttgtctttggcctttgtttagctttaagggttcgttagcatgagtgtccagtcgtgtgcatgaatttcaccccaacttgtgactgctcacttatgacgtctcccccagtaccctccatctcaaataggcttggtggcctgtggaaaagaagagagacagagagacagtgtctgaaacaggatggcagaataggctcacatgcccaaactctgggtggggaagaggaaacttactttctgccaccctcagtaagaacacacgaggaggcaggacctcccaccttcaggtctgcatcatccttttcaaatgttcctttaaatgcagcacactgagtttgtacaattgtgttaactgctggaagggacagatgcactgatatatatgcatttgctgttttggccaatattttgaaaatgtatgagctgagttgatctagctattatttaagtatttattgaagtagaggggccttcaaactactttatactagtgatagtttgagttaggtaagcatcttaaagctgtttggtgataaagaaggcagcttagattctgtggttggaaacagtgtagtcgcttccctttttaggaagccctgttaatatgctcattgaaaacatggcattgaagcaggcacttgcgtggatgtttctcacttgagcacgatatttaggctctcttccaactcactctattctgtcctcactcctgttttggatttttctctttgcatgtttgaaatgttttatgggaatgtattagaactcttttcttctaaggactgagacttccaggggattgccatcttacctgtctcttctccatgagggagaaggaagcagctagctatgtccctagctgcaggaagcccctattttttccaagcacgaagccaccagtctcccccagggagcatcaggaagggacatggatgtgctcctgccacagggcccttcctacctttggatctgtgagaaggtgaatacaaagcagcaggcagagtaaaatctgctgggactgcctggagatttgtcaggagctgcagacaagtaccttggagcattctgttatttttggaaagttcaaatatgcagggacaaggaggttgctgactgtactgacaggctctaagtcattttctccaaaaactatctattcaattatcaggggctggtcttgaggaagga

SEQ ID NO: 67683 - DNA, 3533 bp, Homo sapiens
ccaccggcaggttgtactcaagagctccacgcagcccggctgggcagcaagggacagaacagaggcggccgctgacagcaccagcatgtcttacagtgtgaccctgactgggcccgggccctggggcttccgtctgcaggggggcaaggacttcaacatgcccctcactatctcccggatcacaccaggcagcaaggcagcccagtcccagctcagccagggtgacctcgtggtggccattgacggcgtcaacacagacaccatgacccacctggaagcccagaacaagatcaagtctgccagctacaacttgagcctcaccctgcagaaatcaaagcgtcccattcccatctccacgacagcacctccagtccagacccctctgccggtgatccctcaccagaaggtggtagtcaccccgcagtggccgcctcttcagcacctgccacccacaccagctacagtgagggccccgccgcccctgcacccaagccccgggttgtcaccactgccagcatccggccttctgtctaccagccagtgcctgcatctacctacagcccgtccccaggggccaattacagtcccactccctacaccccctcccctgcccctgcctacaccccctcccctgcccctgcctacaccccctcacctgtccccacctacactccatccccagcaccagcctataccccctcacctgcccccaactataaccctgcaccctcggtggcctacagcgggggccctgcggagcctgccagccgtccaccctgggtgacagatgatagcttctcccagaagtttgccccgggcaagagcaccacctccatcagcaagcagaccctgccccggggaggcccagcctacaccccagcgggtcctcaggtgccaccacttgccagggggaccgtccagagggctgagcgattcccagccagcagccggactccactctgcggtcactgcaacaatgtcatccggggcccatttctggtagccatgggccgttcttggcaccctgaagagttcacctgtgcctactgcaagacttccctggcagatgtgtgctttgtggaagagcagaacaacgtttactgtgagcgatgttatgagcaattctttgccccgctgtgtgccaagtgcaacaccaaaattatgggggaagtaatgcatgccttgagacagacatggcacaccacctgcttcgtctgtgcggcctgcaagaagccttttgggaacagcctcttccacatggaagacggggagccctactgcgagaaagactacatcaatctgttcagcaccaagtgccatggctgcgatttccccgtggaggctggcgacaagtttatcgaagccctgggccacacttggcacgacacctgcttcatttgcgcagtctgccatgtgaatctggaggggcagccgttctactccaagaaggacagacccctgtgcaagaagcacgcacacaccatcaacttgtaggcggccaaggccgcctgtgctgacgaggcccggagctgctcctgctgctggcaacaaaggattcgggaggctgatgtttcttctgaggggaatggggagagagaggaagcgactgagccctttggaagtataattttaggttttttcttctgtacacagatcgtgcatttgcatagttcagactaggagccaaatgaagactcaaaaccaagctagttattaatccaagactggaattgtacttcagacatttagagcagaattccaagaactcaaaagtgaaaagcaacaagcagctttcccaaagcgatacacttgctttggtcaccagaggaggacagagcttagagcagctgtggagaatctgaagcattctgcggagttcttaagcgctcccctggcaaacaaattgaagtgccaaacagcactcgctgcagggtatttttagagtcatagctgagagcttgttagctaagacccattgggctttcctcaccaaaaaaggaagtgttattccattactagcgtcatggagctacctctgcgcatcagacttcagaccttgaacaaacttaaaaccttcttgggagcccggacgtccaaagagatgtcttctgggagccactgggcaattgccagggctccaggaagggctctggctcaggttgcagacagctgagaaaagatggccctgtcagccaccctctctcagtctgaaacatccaacatccccagaaggcttagctcctttttgaattgtgatgggaaagtagagttgggtttttccagttttgctctgtggtgtgtgagagatttttttaaaggctttgggttgtctttggcctttgtttagctttaagggttcgttagcatgagtgtccagtcgtgtgcatgaatttcaccccaacttgtgactgctcacttatgacgtctcccccagtaccctccatctcaaataggcttggtggcctgtggaaaagaagagagacagagagacagtgtctgaaacaggatggcagaataggctcacatgcccaaactctgggtggggaagaggaaacttactttctgccaccctcagtaagaacacacgaggaggcaggacctcccaccttcaggtctgcatcatccttttcaaatgttcctttaaatgcagcacactgagtttgtacaattgtgttaactgctggaagggacagatgcactgatatatatgcatttgctgttttggccaatattttgaaaatgtatgagctgagttgatctagctattatttaagtatttattgaagtagaggggccttcaaactactttatactagtgatagtttgagttaggtaagcatcttaaagctgtttggtgataaagaaggcagcttagattctgtggttggaaacagtgtagtcgcttccctttttaggaagccctgttaatatgctcattgaaaacatggcattgaagcaggcacttgcgtggatgtttctcacttgagcacgatatttaggctctcttccaactcactctattctgtcctcactcctgttttggatttttctctttgcatgtttgaaatgttttatgggaatgtattagaactcttttcttctaaggactgagacttccaggggattgccatcttacctgtctcttctccatgagggagaaggaagcagctagctatgtccctagctgcaggaagcccctattttttccaagcacgaagccaccagtctcccccagggagcatcaggaagggacatggatgtgctccctgccacagggcccttcctatgccacagggcccttcctacctttggatctgtgagaaggtgaatacaaagcagcaggcagagtaaaatctgctgggactgcctggagatttgtcaggagctgcagacaagtaccttggagcattctgttatttttggaaagttcaaatatgcagggacaaggaggttgctgactgtactgacaggctctaagtcattttctccaaaaactatctattcaattatcaggggctggtcttgaggaagga

SEQ ID NO: 67684 - DNA, 1409 bp, Homo sapiens
ccaccggcaggttgtactcaagagctccacgcagcccggctgggcagcaagggacagaacagaggcggccgctgacagcaccagcatgtcttacagtgtgaccctgactgggcccgggccctggggcttccgtctgcaggggggcaaggacttcaacatgcccctcactatctcccggatcacaccaggcagcaaggcagcccagtcccagctcagccagggtgacctcgtggtggccattgacggcgtcaacacagacaccatgacccacctggaagcccagaacaagatcaagtctgccagctacaacttgagcctcaccctgcagaaatcaaagcgtcccattcccatctccacgacagcacctccagtccagacccctctgccggtgatccctcaccagaaggtggtagtcagagcctccctattaaggaccttgccgtagacagcgcctctcccgtctaccaggctgtgattaagagccagaacaagccagaagatgaggctgacgagtgggcacgccgttcctccaacctgcagtctcgctccttccgcatcctggcccagatgacggggacagaattcatgcaagaccctgatgaagaagctctgcgaaggtcaagggaaaggtttgaaacggaacgtaacagcccacgttttgccaaattgcgcaactggcaccatggcctttcagcccaaatccttaatgttaaaagctaaaaggctgcctggaatccccccaccccaacaggctggactccctccatccttacccccacacagatctggcatgtgagccccacggtgatgcttgacaatgtataactctgctgggggcacctctgatggccaaccgcagcatttctgtcctctgcccaccccagagctgatgctggggcccagccccctgcagctctgtacccaccaaacctccccagggcaaccctcgccaccccccaaatagcccgtagcccaatcccctgccctctgcacagggccttagctgtagaccagagagggcaggaggggtttgctggcataacaccccagaaccaagggaaatggatgggccgctgctcagtttcccaccatcctcagctcctggcctcatcccctcctagaatgagtcacccgtagatcagggtctggggaagaggctgatccctggcgctgcccggctccctcgctgccctctggagctcagggcagcccggaatagggctctttgaagaggaagtagaagccccagggtaatgaggcagagacccctcctggcagtggtgaggtgggggcatgcaccctcctttctgtaccgtgtgtgctggctccatagttctctcttctgtacatataagcatgcttgttctgaaataaagaagatttgaagtgaaccacaacaaaacagtcat

SEQ ID NO: 67685 - DNA, 2468 bp, Homo sapiens
ccaccggcaggttgtactcaagagctccacgcagcccggctgggcagcaagggacagaacagaggcggccgctgacagcaccagcatgtcttacagtgtgaccctgactgggcccgggccctggggcttccgtctgcaggggggcaaggacttcaacatgcccctcactatctcccggatcacaccaggcagcaaggcagcccagtcccagctcagccagggtgacctcgtggtggccattgacggcgtcaacacagacaccatgacccacctggaagcccagaacaagatcaagtctgccagctacaacttgagcctcaccctgcagaaatcaaagcgtcccattcccatctccacgacagcacctccagtccagacccctctgccggtgatccctcaccagaaggtggtagtcaactctccagccaacgccgactaccaggaacgcttcaaccccagtgccctgaaggactcggccctgtccacccacaagcccatcgaggtgaaggggctgggcggcaaggccaccatcatccatgcgcagtacaacacgcccatcagcatgtattcccaggatgccatcatggatgccatcgctgggcaggcccaagcccaaggcagtgacttcagtgggagcctccctattaaggaccttgccgtagacagcgcctctcccgtctaccaggctgtgattaagagccagaacaagccagaagatgaggctgacgagtgggcacgccgttcctccaacctgcagtctcgctccttccgcatcctggcccagatgacggggacagaattcatgcaagaccctgatgaagaagctctgcgaaggtcaagcacccctattgagcatgcgccggtgtgcaccagccaggccaccaccccgctgctgcccgcttctgcccagccacctgctgctgcctctcccagtgcggcttcgccacccctggccacagctgctgcccacactgccatcgcctccgcctccaccacagcccctgcttcaagtcctgccgacagcccaaggccccaggcctcttcctacagccccgcagtggccgcctcttcagcacctgccacccacaccagctacagtgagggccccgccgcccctgcacccaagccccgggttgtcaccactgccagcatccggccttctgtctaccagccagtgcctgcatctacctacagcccgtccccaggggccaattacagtcccactccctacaccccctcccctgcccctgcctacaccccctcccctgcccctgcctacaccccctcacctgtccccacctacactccatccccagcaccagcctataccccctcacctgcccccaactataaccctgcaccctcggtggcctacagcgggggccctgcggagcctgccagccgtccaccctgggtgacagatgatagcttctcccagaagtttgccccgggcaagagcaccacctccatcagcaagcagaccctgccccggggaggcccagcctacaccccagcgggtcctcaggtgccaccacttgccagggggaccgtccagagggctgagcgattcccagccagcagccggactccactctgcggtcactgcaacaatgtcatccggggcccatttctggtagccatgggccgttcttggcaccctgaagagttcacctgtgcctactgcaagacttccctggcagatgtgtgctttgtggaagagcagaacaacgtttactgtgagcgatgttatgagcaattctttgccccgctgtgtgccaagtgcaacaccaaaattatgggggaagtaatgcatgccttgagacagacatggcacaccacctgcttcgtctgtgcggcctgcaagaagccttttgggaacagcctcttccacatggaagacggggagccctactgcgagaaagactacatcaatctgttcagcaccaagtgccatggctgcgatttccccgtggaggctggcgacaagtttatcgaagccctgggccacacttggcacgacacctgcttcatttgcgcagtctgccatgtgaatctggaggggcagccgttctactccaagaaggacagacccctgtgcaagaagcacgcacacaccatcaacttgtaggcggccaaggccgcctgtgctgacgaggcccggagctgctcctgctgctggcaacaaaggattcgggaggctgatgtttcttctgaggggaatggggagagagaggaagcgactgagccctttggaagtataattttaggttttttcttctgtacacagatcgtgcatttgcatagttcagactaggagccaaatgaagactcaaaaccaagctagttattaatccaagactggaattgtacttcagacatttagagcagaattccaagaactcaaaagtgaaaagcaacaagcagcaggaggaggacagagcttagagcagcaggaggaggacgccaga

SEQ ID NO: 67686 - DNA, 1264 bp, Homo sapiens
caggagggatggcttagacagtggggtaggggtgatctggctaaaaattggtagattctggattcataaaacctgtgacccatctagctgttgataagcttcaaatttcaagaagtggacttacatcctgaggctgtgagtctttctctagccagtgatacactgcaaaaagttcaggctttggaatcgaacagcccaagtaggaaacatcatttataacatcagtgactttgagtaagttacttgactttccaagcctgagtttacccatatattaatgggacaaattcatttcaggtctgtttagtgtgaagatcaaatagaacagaagctttgaagtgcctagggcattacccagcaaaatgttgggactcagtaaatattaatctgtccccacccctccatgctccacgcaggcactcacgctaggacagcattaacacctcatctccgggtcctggtctgaatcccctcctacccctgtggccatcctgccatacatccaggacattgagttggaagactatgatctgggtgggggcaggataacatggcttctctttacccagtgggtcccttcgatgctgagggtggtgagtatgtcactatgcaagggccctgagactatttgctgtgggctctcctccagcctgcccagggcccacccagatgcctctggggttacccctgtctgcttctggtttttctgttggagatctataggtccttttcctgcctccttcacatttcctccccagcttttgcggccacaacacatcagtgtcatttgggtgttttggcaactcaggggccttcggatgatcttaaacctttgtgttcagccagagcccctgtgccctggtaggcgttggggttagtatctctcgggtgccctcagagccacctctgcctgtgatcgtctgatgaggctccctcccaacctgatccaaaagccagtctcaggagtttacccctgggatgggggatgcatctgcacctgactttggggccacgtgccctgtggcaccccagctcactgggagtctcaggagggataaccggatttctgctctttcccctgtcactcccacatcacacagaaaaatggcattcctctctgtctctccctggcatggagagggcagactgtgcacatttcactagggtccaaatacagaagggcccagggcccaggggcttgcagcttcgtgaggggtctctggcccagtttccaatgaataaagttctcttgacagctcatgca

SEQ ID NO: 67687 - DNA, 2795 bp, Homo sapiens
tttgcggacacaagatggcggcgcccagcggagtaggggctgcgcttggggtttgctgaagctggctgcctctcccactccccttttgggtgcaaagcgccgctagcgggaagacgggggccgggcggggacaggggcacctgcgtagctggactgagagcctgcgcccagcttacatcgaccccacccggccccggcccgacccgacgcgacccgatccgatccgatcccattccatccgttcctcgtctcctcccggtctgacccgttgcccggccgtggttcgccacaccaggcatccaaagctgaggtcgctcctacggcctgggctcgccttcgctttagagatgtttggcctcttccctcccaaacagcccatcttcaaaacctggactcttggactggcacctggccacctttccctctaccaagactccacttccgtcttacccacttcttcctcagattcttggtaccccctgggttggagactgctcattttcctcccaaattaatcccagaccccctaaaatattgacaaccttgacaaccccccaaccgaggagccagactttgttttggactaacttccatagccctgtcatggaggcagtgtacctggtagtgaatgggttgggcctggtgctggacgtgctgaccttggtgttggacctcaacttcctgctggtgtcctccctcctggcttccctggcctggctcctggccttcgtctacaacctgccgcacacggtactgactagtcttctgcacttgggccgcggagtcttgctttcattgctggccttgatcgaagccgtggtccggttcacatgtgggggcttgcaggccttgtgtactctgctgtatagctgctgctctggcctagagagcctaaagctcctggggcacctggcctctcatggggcactgcggagcagggagatactgcaccggggcgtcctcaatgtggtctccagtggccatgctttgctgcgccaggcctgtgacatctgtgccattgccatgagcctggtggcttatgtgatcaacagcctggtcaacatctgcctcatcggcactcagaacctcttttccctggtgctggccctgtgggatgcagtgaccgggcctctgtggaggatgacagacgtagtggctgccttcctagcccacatttccagcagtgctgtggccatggccatcctcctttggacaccctgccaactagccctggagctgctggcctcagctgcccgcctcctggccagctttgtgcttgtcaatctcactggcttggtgttgctagcttgtgtgctggcagtgacggtgactgtgttgcatccggacttcaccctgaggctggctacccaggcactcagccagctccatgcccggccatcctaccaccgtcttcgagaggatgtcatgcggctctctcgcctagcactgggctcagaggcctggcgccgagtctggagccgcagtctgcagctggcgagttggccaaaccggggaggggcacctggagctccccagggtgaccctatgagggtattctcagttaggacccggagacaggacactcttcctgaagcggggcgcagatcagaggcagaagaggaggaggccaggaccatcagagtgacacctgtcaggggccgagagaggctcaatgaggaggagcctccaggtgggcaagacccttggaaattgctgaaggagcaagaggagcggaagaagtgtgtcatctgccaggaccagagcaagacagtgttgctcctgccctgccggcatctgtgcctgtgccaggcctgcactgaaatcctgatgcgccaccccgtctaccaccgcaattgcccgctctgccgccggggcatcctgcagaccctcaatgtctacctctgaagcctccttccctgcctgcccacccctccatgctccacgcaggcactcacgctaggacagcattaacacctcatctccgggtcctggtctgaatcccctcctacccctgtggccatcctgccatacatccaggacattgagttggaagactatgatctgggtgggggcaggataacatggcttctctttacccagtgggtcccttcgatgctgagggtggtgagtatgtcactatgcaagggccctgagactatttgctgtgggctctcctccagcctgcccagggcccacccagatgcctctggggttacccctgtctgcttctggtttttctgttggagatctataggtccttttcctgcctccttcacatttcctccccagcttttgcggccacaacacatcagtgtcatttgggtgttttggcaactcaggggccttcggatgatcttaaacctttgtgttcagccagagcccctgtgccctggtaggcgttggggttagtatctctcgggtgccctcagagccacctctgcctgtgatcgtctgatgaggctccctcccaacctgatccaaaagccagtctcaggagtttacccctgggatgggggatgcatctgcacctgactttggggccacgtgccctgtggcaccccagctcactgggagtctcaggagggataaccggatttctgctctttcccctgtcactcccacatcacacagaaaaatggcattcctctctgtctctccctggcatggagagggcagactgtgcacatttcactagggtccaaatacagaagggcccagggcccaggggcttgcagcttcgtgaggggtctctggcccagtttccaatgaataaagttctcttgacagctcatgca

SEQ ID NO: 67688 - DNA, 2621 bp, Homo sapiens
  misc_feature (24)..(24): n is a, c, g, or t
  misc_feature (32)..(32): n is a, c, g, or t
  misc_feature (34)..(34): n is a, c, g, or t
taggctaggtacgaggctggtgtnaatcggcngngcgacccgatccgatccgatcccattccatccgttcctcgtctcctcccggtctgacccgttgcccggccgtggttcgccacaccaggcatccaaagctgaggtcgctcctacggcctgggctcgccttcgctttagagatgtttggcctcttccctcccaaacagcccatcttcaaaacctggactcttggactggcacctggccacctttccctctaccaagactccacttccgtcttacccacttcttcctcagattcttggtaccccctgggttggagactgctcattttcctcccaaattaatcccagaccccctaaaatattgacaaccttgacaaccccccaaccgaggagccagactttgttttggactaacttccatagccctgtcatggaggcagtgtacctggtagtgaatgggttgggcctggtgctggacgtgctgaccttggtgttggacctcaacttcctgctggtgtcctccctcctggcttccctggcctggctcctggccttcgtctacaacctgccgcacacggtactgactagtcttctgcacttgggccgcggagtcttgctttcattgctggccttgatcgaagccgtggtccggttcacatgtgggggcttgcaggccttgtgtactctgctgtatagctgctgctctggcctagagagcctaaagctcctggggcacctggcctctcatggggcactgcggagcagggagatactgcaccggggcgtcctcaatgtggtctccagtggccatgctttgctgcgccaggcctgtgacatctgtgccattgccatgagcctggtggcttatgtgatcaacagcctggtcaacatctgcctcatcggcactcagaacctcttttccctggtgctggccctgtgggatgcagtgaccgggcctctgtggaggatgacagacgtagtggctgccttcctagcccacatttccagcagtgctgtggccatggccatcctcctttggacaccctgccaactagccctggagctgctggcctcagctgcccgcctcctggccagctttgtgcttgtcaatctcactggcttggtgttgctagcttgtgtgctggcagtgacggtgactgtgttgcatccggacttcaccctgaggctggctacccaggcactcagccagctccatgcccggccatcctaccaccgtcttcgagaggatgtcatgcggctctctcgcctagcactgggctcagaggcctggcgccgagtctggagccgcagtctgcagctggcgagttggccaaaccggggaggggcacctggagctccccagggtgaccctatgagggtattctcagttaggacccggagacaggacactcttcctgaagcggggcgcagatcagaggcagaagaggaggaggccaggaccatcagagtgacacctgtcaggggccgagagaggctcaatgaggaggagcctccaggtgggcaagacccttggaaattgctgaaggagcaagaggagcggaagaagtgtgtcatctgccaggaccagagcaagacagtgttgctcctgccctgccggcatctgtgcctgtgccaggcctgcactgaaatcctgatgcgccaccccgtctaccaccgcaattgcccgctctgccgccggggcatcctgcagaccctcaatgtctacctctgaagcctccttccctgcctgcccacccctccatgctccacgcaggcactcacgctaggacagcattaacacctcatctccgggtcctggtctgaatcccctcctacccctgtggccatcctgccatacatccaggacattgagttggaagactatgatctgggtgggggcaggataacatggcttctctttacccagtgggtcccttcgatgctgagggtggtgagtatgtcactatgcaagggccctgagactatttgctgtgggctctcctccagcctgcccagggcccacccagatgcctctggggttacccctgtctgcttctggtttttctgttggagatctataggtccttttcctgcctccttcacatttcctccccagcttttgcggccacaacacatcagtgtcatttgggtgttttggcaactcaggggccttcggatgatcttaaacctttgtgttcagccagagcccctgtgccctggtaggcgttggggttagtatctctcgggtgccctcagagccacctctgcctgtgatcgtctgatgaggctccctcccaacctgatccaaaagccagtctcaggagtttacccctgggatgggggatgcatctgcacctgactttggggccacgtgccctgtggcaccccagctcactgggagtctcaggagggataaccggatttctgctctttcccctgtcactcccacatcacacagaaaaatggcattcctctctgtctctccctggcatggagagggcagactgtgcacatttcactagggtccaaatacagaagggcccagggcccaggggcttgcagcttcgtgaggggtctctggcccagtttccaatgaataaagttctcttgacagctcatgca

SEQ ID NO: 67689 - DNA, 2872 bp, Homo sapiens
tttgcggacacaagatggcggcgcccagcggagtaggggctgcgcttggggtttgctgaagctggctgcctctcccactccccttttgggtgcaaagcgccgctagcgggaagacgggggccgggcggggacaggggcacctgcgtagctggactgagagcctgcgcccagcttacatcgaccccacccggccccggcccgacccgacgcgacccgatccgatccgatcccattccatccgttcctcgtctcctcccggtctgacccgttgcccggccgtggttcgccacaccaggcatccaaagctgaggtcgctcctacggcctgggctcgccttcgctttagagatgtttggcctcttccctcccaaacagcccatcttcaaaacctggactcttggactggcacctggccacctttccctctaccaagactccacttccgtcttacccacttcttcctcagattcttggtaccccctgggttggagactgctcattttcctcccaaattaatcccagaccccctaaaatattgacaaccttgacaaccccccaaccgaggagccagactttgttttggactaacttccatagccctgtcatggaggcagtgtacctggtagtgaatgggttgggcctggtgctggacgtgctgaccttggtgttggacctcaacttcctgctggtgtcctccctcctggcttccctggcctggctcctggccttcgtctacaacctgccgcacacggtactgactagtcttctgcacttgggccgcggagtcttgctttcattgctggccttgatcgaagccgtggtccggttcacatgtgggggcttgcaggccttgtgtactctgctgtatagctgctgctctggcctagagagcctaaagctcctggggcacctggcctctcatggggcactgcggagcagggagatactgcaccggggcgtcctcaatgtggtctccagtggccatgctttgctgcgccaggcctgtgacatctgtgccattgccatgagcctggtggcttatgtgatcaacagcctggtcaacatctgcctcatcggcactcagaacctcttttccctggtgctggccctgtgggatgcagtgaccgggcctctgtggaggatgacagacgtagtggctgccttcctagcccacatttccagcagtgctgtggccatggccatcctcctttggacaccctgccaactagccctggagctgctggcctcagctgcccgcctcctggccagctttgtgcttgtcaatctcactggcttggtgttgctagcttgtgtgctggcagtgacggtgactgtgttgcatccggacttcaccctgaggctggctacccaggcactcagccagctccatgcccggccatcctaccaccgtcttcgagaggatgtcatgcggctctctcgcctagcactgggctcagaggcctggcgccgagtctggagccgcagtctgcagctggcgagttggccaaaccggggaggggcacctggagctccccagggtgaccctatgagggtattctcagttaggacccggagacaggacactcttcctgaagcggggcgcagatcagaggcagaagaggaggaggccaggaccatcagagtgacacctgtcaggggccgagagaggctcaatgaggaggagcctccaggtgggcaagacccttggaaattgctgaaggagcaagaggagcggaagaagtgtgtcatctgccaggaccagagcaagacagtgttgctcctgccctgccggcatctgtgcctgtgccaggcctgcactgaaatcctgatgcgccaccccgtctaccaccgcaattgcccgctctgccgccggggcatcctgcagaccctcaatgtctacctctgaagcctccttccctgcctgcccacccctccatgctccacgcaggcactcacgctaggacagcattaacacctcatctccgggtcctggtctgaatcccctcctacccctgtggccatcctgccatacatccaggacattgagttggaagactatgatctgggtgggggcaggataacatggcttctctttacccagtgggtcccttcgatgctgagggtggtgagtatgtcactatgcaagggccctgagactatttgctgtgggctctcctccagcctgcccagggcccacccagatgcctctggggttacccctgtctgcttctggtttttctgttggagatctataggtccttttcctgcctccttcacatttcctccccagcttttgcggccacaacacatcagtgtcatttgggtgttttggcaactcaggggccttcggatgatcttaaacctttgtgttcagccagagcccctgtgccctggtaggcgttggggttagtatctctcgggtgccctcagagccacctctgcctgtgatcgtctgatgaggctccctcccaacctgatccaaaagccagtctcaggagtttacccctgggatgggggatgcatctgcacctgactttggggccacgtgccctgtggcaccccagctcactgggagtctcaggagggataaccggatttctgctctttcccctgtcactcccacatcacacagaaaaatggcattcctctctgtctctccctggcatggagagggcagactgtgcacatttcactagggtccaaatacagaagggcccagggcccaggggcttgcagcttcgtgaggggtctctggcccagtttccaatgaataaagttctcttgacagctcatgcaggattaccaaaactggttaataaacctgggggaggggcccggtccccaatttcgacctatactgggtcgtattacaa

SEQ ID NO: 67690 - DNA, 2551 bp, Homo sapiens
agcggaccgcggcgccgatctccggtgcgggggaggccatggcggaaaccttctcaggcccctgaggtcgctcctacggcctgggctcgccttcgctttagagatgtttggcctcttccctcccaaacagcccatcttcaaaacctggactcttggactggcacctggccacctttccctctaccaagactccacttccgtcttacccacttcttcctcagattcttggtaccccctgggttggagactgctcattttcctcccaaattaatcccagaccccctaaaatattgacaaccttgacaaccccccaaccgaggagccagactttgttttggactaacttccatagccctgtcatggaggcagtgtacctggtagtgaatgggttgggcctggtgctggacgtgctgaccttggtgttggacctcaacttcctgctggtgtcctccctcctggcttccctggcctggctcctggccttcgtctacaacctgccgcacacggtactgactagtcttctgcacttgggccgcggagtcttgctttcattgctggccttgatcgaagccgtggtccggttcacatgtgggggcttgcaggccttgtgtactctgctgtatagctgctgctctggcctagagagcctaaagctcctggggcacctggcctctcatggggcactgcggagcagggagatactgcaccggggcgtcctcaatgtggtctccagtggccatgctttgctgcgccaggcctgtgacatctgtgccattgccatgagcctggtggcttatgtgatcaacagcctggtcaacatctgcctcatcggcactcagaacctcttttccctggtgctggccctgtgggatgcagtgaccgggcctctgtggaggatgacagacgtagtggctgccttcctagcccacatttccagcagtgctgtggccatggccatcctcctttggacaccctgccaactagccctggagctgctggcctcagctgcccgcctcctggccagctttgtgcttgtcaatctcactggcttggtgttgctagcttgtgtgctggcagtgacggtgactgtgttgcatccggacttcaccctgaggctggctacccaggcactcagccagctccatgcccggccatcctaccaccgtcttcgagaggatgtcatgcggctctctcgcctagcactgggctcagaggcctggcgccgagtctggagccgcagtctgcagctggcgagttggccaaaccggggaggggcacctggagctccccagggtgaccctatgagggtattctcagttaggacccggagacaggacactcttcctgaagcggggcgcagatcagaggcagaagaggaggaggccaggaccatcagagtgacacctgtcaggggccgagagaggctcaatgaggaggagcctccaggtgggcaagacccttggaaattgctgaaggagcaagaggagcggaagaagtgtgtcatctgccaggaccagagcaagacagtgttgctcctgccctgccggcatctgtgcctgtgccaggcctgcactgaaatcctgatgcgccaccccgtctaccaccgcaattgcccgctctgccgccggggcatcctgcagaccctcaatgtctacctctgaagcctccttccctgcctgcccacccctccatgctccacgcaggcactcacgctaggacagcattaacacctcatctccgggtcctggtctgaatcccctcctacccctgtggccatcctgccatacatccaggacattgagttggaagactatgatctgggtgggggcaggataacatggcttctctttacccagtgggtcccttcgatgctgagggtggtgagtatgtcactatgcaagggccctgagactatttgctgtgggctctcctccagcctgcccagggcccacccagatgcctctggggttacccctgtctgcttctggtttttctgttggagatctataggtccttttcctgcctccttcacatttcctccccagcttttgcggccacaacacatcagtgtcatttgggtgttttggcaactcaggggccttcggatgatcttaaacctttgtgttcagccagagcccctgtgccctggtaggcgttggggttagtatctctcgggtgccctcagagccacctctgcctgtgatcgtctgatgaggctccctcccaacctgatccaaaagccagtctcaggagtttacccctgggatgggggatgcatctgcacctgactttggggccacgtgccctgtggcaccccagctcactgggagtctcaggagggataaccggatttctgctctttcccctgtcactcccacatcacacagaaaaatggcattcctctctgtctctccctggcatggagagggcagactgtgcacatttcactagggtccaaatacagaagggcccagggcccaggggcttgcagcttcgtgaggggtctctggcccagtttccaatgaataaagttctcttgacagctcatgca

SEQ ID NO: 67691 - DNA, 1262 bp, Homo sapiens
tttgcggacacaagatggcggcgcccagcggagtaggggctgcgcttggggtttgctgaagctggctgcctctcccactccccttttgggtgcaaagcgccgctagcgggaagacgggggccgggcggggacaggggcacctgcgtagctggactgagagcctgcgcccagcttacatcgaccccacccggccccggcccgacccgacgcgacccgatccgatccgatcccattccatccgttcctcgtctcctcccggtctgacccgttgcccggccgtggttcgccacaccaggcatccaaagctgaggtcgctcctacggcctgggctcgccttcgctttagagatgtttggcctcttccctcccaaacagcccatcttcaaaacctggactcttggactggcacctggccacctttccctctaccaagactccacttccgtcttacccacttcttcctcagattcttggtacccctgtggccatcctgccatacatccaggacattgagttggaagactatgatctgggtgggggcaggataacatggcttctctttacccagtgggtcccttcgatgctgagggtggtgagtatgtcactatgcaagggccctgagactatttgctgtgggctctcctccagcctgcccagggcccacccagatgcctctggggttacccctgtctgcttctggtttttctgttggagatctataggtccttttcctgcctccttcacatttcctccccagcttttgcggccacaacacatcagtgtcatttgggtgttttggcaactcaggggccttcggatgatcttaaacctttgtgttcagccagagcccctgtgccctggtaggcgttggggttagtatctctcgggtgccctcagagccacctctgcctgtgatcgtctgatgaggctccctcccaacctgatccaaaagccagtctcaggagtttacccctgggatgggggatgcatctgcacctgactttggggccacgtgccctgtggcaccccagctcactgggagtctcaggagggataaccggatttctgctctttcccctgtcactcccacatcacacagaaaaatggcattcctctctgtctctccctggcatggagagggcagactgtgcacatttcactagggtccaaatacagaagggcccagggcccaggggcttgcagcttcgtgaggggtctctggcccagtttccaatgaataaagttctcttgacagctcatgca

SEQ ID NO: 67692 - DNA, 2793 bp, Homo sapiens
aggcgtacgctcggttcgggatgcgccagggtaggggctgcgcttggggtttgctgaagctggctgcctctcccactccccttttgggtgcaaagcgccgctagcgggaagacgggggccgggcggggacaggggcacctgcgtagctggactgagagcctgcgcccagcttacatcgaccccacccggccccggcccgacccgacgcgacccgatccgatccgatcccattccatccgttcctcgtctcctcccggtctgacccgttgcccggccgtggttcgccacaccaggcatccaaagctgaggtcgctcctacggcctgggctcgccttcgctttagagatgtttggcctcttccctcccaaacagcccatcttcaaaacctggactcttggactggcacctggccacctttccctctaccaagactccacttccgtcttacccacttcttcctcagattcttggtaccccctgggttggagactgctcattttcctcccaaattaatcccagaccccctaaaatattgacaaccttgacaaccccccaaccgaggagccagactttgttttggactaacttccatagccctgtcatggaggcagtgtacctggtagtgaatgggttgggcctggtgctggacgtgctgaccttggtgttggacctcaacttcctgctggtgtcctccctcctggcttccctggcctggctcctggccttcgtctacaacctgccgcacacggtactgactagtcttctgcacttgggccgcggagtcttgctttcattgctggccttgatcgaagccgtggtccggttcacatgtgggggcttgcaggccttgtgtactctgctgtatagctgctgctctggcctagagagcctaaagctcctggggcacctggcctctcatggggcactgcggagcagggagatactgcaccggggcgtcctcaatgtggtctccagtggccatgctttgctgcgccaggcctgtgacatctgtgccattgccatgagcctggtggcttatgtgatcaacagcctggtcaacatctgcctcatcggcactcagaacctcttttccctggtgctggccctgtgggatgcagtgaccgggcctctgtggaggatgacagacgtagtggctgccttcctagcccacatttccagcagtgctgtggccatggccatcctcctttggacaccctgccaactagccctggagctgctggcctcagctgcccgcctcctggccagctttgtgcttgtcaatctcactggcttggtgttgctagcttgtgtgctggcagtgacggtgactgtgttgcatccggacttcaccctgaggctggctacccaggcactcagccagctccatgcccggccatcctaccaccgtcttcgagaggatgtcatgcggctctctcgcctagcactgggctcagaggcctggcgccgagtctggagccgcagtctgcagctggcgagttggccaaaccggggaggggcacctggagctccccagggtgaccctatgagggtattctcagttaggacccggagacaggacactcttcctgaagcggggcgcagatcagaggcagaagaggaggaggccaggaccatcagagtgacacctgtcaggggccgagagaggctcaatgaggaggagcctccaggtgggcaagacccttggaaattgctgaaggagcaagaggagcggaagaagtgtgtcatctgccaggaccagagcaagacagtgttgctcctgccctgccggcatctgtgcctgtgccaggcctgcactgaaatcctgatgcgccaccccgtctaccaccgcaattgcccgctctgccgccggggcatcctgcagaccctcaatgtctacctctgaagcctccttccctgcctgcccacccctccatgctccacgcaggcactcacgctaggacagcattaacacctcatctccgggtcctggtctgaatcccctcctacccctgtggccatcctgccatacatccaggacattgagttggaagactatgatctgggtgggggcaggataacatggcttctctttacccagtgggtcccttcgatgctgagggtggtgagtatgtcactatgcaagggccctgagactatttgctgtgggctctcctccagcctgcccagggcccacccagatgcctctggggttacccctgtctgcttctggtttttctgttggagatctataggtccttttcctgcctccttcacatttcctccccagcttttgcggccacaacacatcagtgtcatttgggtgttttggcaactcaggggccttcggatgatcttaaacctttgtgttcagccagagcccctgtgccctggtaggcgttggggttagtatctctcgggtgccctcagagccacctctgcctgtgatcgtctgatgaggctccctcccaacctgatccaaaagccagtctcaggagtttacccctgggatgggggatgcatctgcacctgactttggggccacgtgccctgtggcaccccagctcactgggagtctcaggagggataaccggatttctgctctttcccctgtcactcccacatcacacagaaaaatggcattcctctctgtctctccctggcatggagagggcagactgtgcacatttcactagggtccaaatacagaagggcccagggcccaggggcttgcagcttcgtgaggggtctctggcccagtttccaatgaataaagttctcttgacagctcatgca

SEQ ID NO: 67693 - DNA, 2564 bp, Homo sapiens
atagctaggtagagccggggttaatcggcagaggccgttgcccggccgtggttcgccacaccaggcatccaaagctgaggtcgctcctacggcctgggctcgccttcgctttagagatgtttggcctcttccctcccaaacagcccatcttcaaaacctggactcttggactggcacctggccacctttccctctaccaagactccacttccgtcttacccacttcttcctcagattcttggtaccccctgggttggagactgctcattttcctcccaaattaatcccagaccccctaaaatattgacaaccttgacaaccccccaaccgaggagccagactttgttttggactaacttccatagccctgtcatggaggcagtgtacctggtagtgaatgggttgggcctggtgctggacgtgctgaccttggtgttggacctcaacttcctgctggtgtcctccctcctggcttccctggcctggctcctggccttcgtctacaacctgccgcacacggtactgactagtcttctgcacttgggccgcggagtcttgctttcattgctggccttgatcgaagccgtggtccggttcacatgtgggggcttgcaggccttgtgtactctgctgtatagctgctgctctggcctagagagcctaaagctcctggggcacctggcctctcatggggcactgcggagcagggagatactgcaccggggcgtcctcaatgtggtctccagtggccatgctttgctgcgccaggcctgtgacatctgtgccattgccatgagcctggtggcttatgtgatcaacagcctggtcaacatctgcctcatcggcactcagaacctcttttccctggtgctggccctgtgggatgcagtgaccgggcctctgtggaggatgacagacgtagtggctgccttcctagcccacatttccagcagtgctgtggccatggccatcctcctttggacaccctgccaactagccctggagctgctggcctcagctgcccgcctcctggccagctttgtgcttgtcaatctcactggcttggtgttgctagcttgtgtgctggcagtgacggtgactgtgttgcatccggacttcaccctgaggctggctacccaggcactcagccagctccatgcccggccatcctaccaccgtcttcgagaggatgtcatgcggctctctcgcctagcactgggctcagaggcctggcgccgagtctggagccgcagtctgcagctggcgagttggccaaaccggggaggggcacctggagctccccagggtgaccctatgagggtattctcagttaggacccggagacaggacactcttcctgaagcggggcgcagatcagaggcagaagaggaggaggccaggaccatcagagtgacacctgtcaggggccgagagaggctcaatgaggaggagcctccaggtgggcaagacccttggaaattgctgaaggagcaagaggagcggaagaagtgtgtcatctgccaggaccagagcaagacagtgttgctcctgccctgccggcatctgtgcctgtgccaggcctgcactgaaatcctgatgcgccaccccgtctaccaccgcaattgcccgctctgccgccggggcatcctgcagaccctcaatgtctacctctgaagcctccttccctgcctgcccacccctccatgctccacgcaggcactcacgctaggacagcattaacacctcatctccgggtcctggtctgaatcccctcctacccctgtggccatcctgccatacatccaggacattgagttggaagactatgatctgggtgggggcaggataacatggcttctctttacccagtgggtcccttcgatgctgagggtggtgagtatgtcactatgcaagggccctgagactatttgctgtgggctctcctccagcctgcccagggcccacccagatgcctctggggttacccctgtctgcttctggtttttctgttggagatctataggtccttttcctgcctccttcacatttcctccccagcttttgcggccacaacacatcagtgtcatttgggtgttttggcaactcaggggccttcggatgatcttaaacctttgtgttcagccagagcccctgtgccctggtaggcgttggggttagtatctctcgggtgccctcagagccacctctgcctgtgatcgtctgatgaggctccctcccaacctgatccaaaagccagtctcaggagtttacccctgggatgggggatgcatctgcacctgactttggggccacgtgccctgtggcaccccagctcactgggagtctcaggagggataaccggatttctgctctttcccctgtcactcccacatcacacagaaaaatggcattcctctctgtctctccctggcatggagagggcagactgtgcacatttcactagggtccaaatacagaagggcccagggcccaggggcttgcagcttcgtgaggggtctctggcccagtttccaatgaataaagttctcttgacagctcatgca

SEQ ID NO: 67694 - DNA, 2815 bp, Homo sapiens
tttgcggacacaagatggcggcgcccagcggagtaggggctgcgcttggggtttgctgaagctggctgcctctcccactccccttttgggtgcaaagcgccgctagcgggaagacgggggccgggcggggacaggggcacctgcgtagctggactgagagcctgcgcccagcttacatcgaccccacccggccccggcccgacccgacgcgacccgatccgatccgatcccattccatccgttcctcgtctcctcccggtctgacccgttgcccggccgtggttcgccacaccaggcatccaaagctgaggtcgctcctacggcctgggctcgccttcgctttagagatgtttggcctcttccctcccaaacagcccatcttcaaaacctggactcttggactggcacctggccacctttccctctaccaagactccacttccgtcttacccacttcttcctcagattcttggtaccccctgggttggagactgctcattttcctcccaaattaatcccagaccccctaaaatattgacaaccttgacaaccccccaaccgaggagccagactttgttttggactaacttccatagccctgtcatggaggcagtgtacctggtagtgaatgggttgggcctggtgctggacgtgctgaccttggtgttggacctcaacttcctgctggtgtcctccctcctggcttccctggcctggctcctggccttcgtctacaacctgccgcacacggtactgactagtcttctgcacttgggccgcggagtcttgctttcattgctggccttgatcgaagccgtggtccggttcacatgtgggggcttgcaggccttgtgtactctgctgtatagctgctgctctggcctagagagcctaaagctcctggggcacctggcctctcatggggcactgcggagcagggagatactgcaccggggcgtcctcaatgtggtctccagtggccatgctttgctgcgccaggcctgtgacatctgtgccattgccatgagcctggtggcttatgtgatcaacagcctggtcaacatctgcctcatcggcactcagaacctcttttccctggtgctggccctgtgggatgcagtgaccgggcctctgtggaggatgacagacgtagtggctgccttcctagcccacatttccagcagtgctgtggccatggccatcctcctttggacaccctgccaactagccctggagctgctggcctcagctgcccgcctcctggccagctttgtgcttgtcaatctcactggcttggtgttgctagcttgtgtgctggcagtgacggtgactgtgttgcatccggacttcaccctgaggctggctacccaggcactcagccagctccatgcccggccatcctaccaccgtcttcgagaggatgtcatgcggctctctcgcctagcactgggctcagaggcctggcgccgagtctggagccgcagtctgcagctggcgagttggccaaaccggggaggggcacctggagctccccagggtgaccctatgagggtattctcagttaggacccggagacaggacactcttcctgaagcggggcgcagatcagaggcagaagaggaggaggccaggaccatcagagtgacacctgtcaggggccgagagaggctcaatgaggaggagcctccaggtgggcaagacccttggaaattgctgaaggagcaagaggagcggaagaagtgtgtcatctgccaggaccagagcaagacagtgttgctcctgccctgccggcatctgtgcctgtgccaggcctgcactgaaatcctgatgcgccaccccgtctaccaccgcaattgcccgctctgccgccggggcatcctgcagaccctcaatgtctacctctgaagcctccttccctgcctgcccacccctccatgctccacgcaggcactcacgctaggacagcattaacacctcatctccgggtcctggtctgaatcccctcctacccctgtggccatcctgccatacatccaggacattgagttggaagactatgatctgggtgggggcaggataacatggcttctctttacccagtgggtcccttcgatgctgagggtggtgagtatgtcactatgcaagggccctgagactatttgctgtgggctctcctccagcctgcccagggcccacccagatgcctctggggttacccctgtctgcttctggtttttctgttggagatctataggtccttttcctgcctccttcacatttcctccccagcttttgcggccacaacacatcagtgtcatttgggtgttttggcaactcaggggccttcggatgatcttaaacctttgtgttcagccagagcccctgtgccctggtaggcgttggggttagtatctctcgggtgccctcagagccacctctgcctgtgatcgtctgatgaggctccctcccaacctgatccaaaagccagtctcaggagtttacccctgggatgggggatgcatctgcacctgactttggggccacgtgccctgtggcaccccagctcactgggagtctcaggagggataaccggatttctgctctttcccctgtcactcccacatcacacagaaaaatggcattcctctctgtctctccctggcatggagagggcagactgtgcacatttcactagggtccaaatacagaagggcccagggcccaggggcttgcagcttcgtgaggggtctctggcccagtttccaatgaataaagttctcttgacagctcatgcaaaaaaaaagacaaggggtcg

SEQ ID NO: 67695 - DNA, 1786 bp, Homo sapiens
tatctatgttagccgttgttaatcaggcacgagggatcaccagcctggtcaacatctgcctcatcggcactcagaacctcttttccctggtgctggccctgtgggatgcagtgaccgggcctctgtggaggatgacagacgtagtggctgccttcctagcccacatttccagcagtgctgtggccatggccatcctcctttggacaccctgccaactagccctggagctgctggcctcagctgcccgcctcctggccagctttgtgcttgtcaatctcactggcttggtgttgctagcttgtgtgctggcagtgacggtgactgtgttgcatccggacttcaccctgaggctggctacccaggcactcagccagctccatgcccggccatcctaccaccgtcttcgagaggatgtcatgcggctctctcgcctagcactgggctcagaggcctggcgccgagtctggagccgcagtctgcagctggcgagttggccaaaccggggaggggcacctggagctccccagggtgaccctatgagggtattctcagttaggacccggagacaggacactcttcctgaagcggggcgcagatcagaggcagaagaggaggaggccaggaccatcagagtgacacctgtcaggggccgagagaggctcaatgaggaggagcctccaggtgggcaagacccttggaaattgctgaaggagcaagaggagcggaagaagtgtgtcatctgccaggaccagagcaagacagtgttgctcctgccctgccggcatctgtgcctgtgccaggcctgcactgaaatcctgatgcgccaccccgtctaccaccgcaattgcccgctctgccgccggggcatcctgcagaccctcaatgtctacctctgaagcctccttccctgcctgcccacccctccatgctccacgcaggcactcacgctaggacagcattaacacctcatctccgggtcctggtctgaatcccctcctacccctgtggccatcctgccatacatccaggacattgagttggaagactatgatctgggtgggggcaggataacatggcttctctttacccagtgggtcccttcgatgctgagggtggtgagtatgtcactatgcaagggccctgagactatttgctgtgggctctcctccagcctgcccagggcccacccagatgcctctggggttacccctgtctgcttctggtttttctgttggagatctataggtccttttcctgcctccttcacatttcctccccagcttttgcggccacaacacatcagtgtcatttgggtgttttggcaactcaggggccttcggatgatcttaaacctttgtgttcagccagagcccctgtgccctggtaggcgttggggttagtatctctcgggtgccctcagagccacctctgcctgtgatcgtctgatgaggctccctcccaacctgatccaaaagccagtctcaggagtttacccctgggatgggggatgcatctgcacctgactttggggccacgtgccctgtggcaccccagctcactgggagtctcaggagggataaccggatttctgctctttcccctgtcactcccacatcacacagaaaaatggcattcctctctgtctctccctggcatggagagggcagactgtgcacatttcactagggtccaaatacagaagggcccagggcccaggggcttgcagcttcgtgaggggtctctggcccagtttccaatgaataaagttctcttgacagctcatgca

SEQ ID NO: 67696 - DNA, 503 bp, Homo sapiens
atggcccttcctccccatcatccaccatggggccctcctgtgccacaacatggctctcatccttctgtctggacacttgccctgcctcctggagagccaggctcctgccctggcgggcatgtgagtgtgcatgtgtgtgagttgtgcatgtgtgtgcatgtggcacggagggggaagaagagagttctcctctgtggtgatcgccaccattcagttgaagggtttaagctgagccaagatgaagcaagagtgacaccaagtgccaagaacaagtgcttgctgtggtatcaggtgtgctctctcctcaaatcagaggagcagagagaagctcagttccagtctgcagtgttcacccctgtgagagggtgccgacccatccagaggtggccagccccctccagaggtggctcagtgctggcatgccactctgcccatttggacaaggggatggcctctctgggaattggatgcggaaccgaagctttgaatagatttaaaaaata

SEQ ID NO: 67697 - DNA, 463 bp, Homo sapiens
ctgctggtgtggggcaggagaagccataaggcactaaaaataacagcacacctcacatctatctggatggctgttatcaaaagaacagaaagtaatgctggtgagaatgtggggaaactggagcccttgtgcattgctggtggaaatgtaaaacgatgcagctactatagaaaatggttgagggtcctcaaaaaattaaacgcagagttaccatataatccagcaattccacttctaggtgtatacccccccaatgttgaaagccgggactcaaaaagacatgtgtacacacatgttcatagcatcggtattcacacactctattggttctgtttctccagtgaatcctgactaatgcatcttccaaaagaatctacagaacagctggggagcatgagtctaaggtctgtaggctccagatgaaagatcctgtcgctgatgctgggccagcctacaagcaccc

SEQ ID NO: 67698 - DNA, 433 bp, Homo sapiens
gatttataatgtctaattgcttgtccattttctgctgggagtataatttgaggagggttgagttccaattttccaatttttattatcaaaagtattacttcatcgtaaaagtaactttcctgttaacccagtattgtaccaaatggcagtataatttaaatcaaatgttgtctggttgcaagtaagatctaaaacagctacagtctcatttttcctccctttctaatgtaagcaaccttttcctattgtgttagtccattttcatgctgctgataaagacatacctgagactgggcaatttacaaaagaatgaggtttaattggacttacagttccacgtgctggggaagcctcacaatcatggcagaaagcaaggaggaacaagtctcgttttacgtggatggcagcagacaaagagagaatgaggaagaca

SEQ ID NO: 67699 - DNA, 288 bp, Homo sapiens
tgagacagggtcttgctctgtcacctggagtacagtggtgtgatcatggctcactgcagccccaaccaatcctctggcctcagcctccaaagtagctgagactacacgtgcatgccagcatgcttggcaattttttttttttttttttgagacggagtctcactctgtcgcccaggctggagtgcagtggtgcgatctccgctcactgcaagctccgcctcctgggttcatgccattctcctgcctcagcctcccgagtagctgggactacaggtgcctgccaccacg

SEQ ID NO: 67700 - DNA, 797 bp, Homo sapiens
cccagctgacatgatacttcttgatatcaaaatattttacagagctacaataaccaaaacagtatgggactagcttaaagagacatacagaccaaaggagcagaatagagagcccacaaataaaaacatgcaaataatatggtcaactgatcttcagggatgccaagaatgcacaataaggaaggaatgttttctgcaacaaatgatgttggaagaactaggtattcacatgaaaaaagatgaaattggacccctatcttctaccataaaaaagaaaaaaactcacaatgaattggagacttagacataagaccaaaaaatgtaaatctcctggaagaaaacatgaggggaagcttcaccacatcattcttagtaatttcgtggatgtgacgtcaaaagcacagccaacaacagaaaataagacaggtgggactacatcaaactaaaaagcttctgtacagcaaaggaaacaactgagtgaaaaggaaatctaaggaatgggagaaagtatttgcagaaccaaataaatgataaggaatgaatcccaaaaatatatgagaaactcccacaactgatagtaaaaaatatctgcccaattaaaaacagtctaaatgatgcagaaaaaaattaaattaaaaatgtttttttaaatgtgctaagaacttgaatagacatttctccaaacagatggccaacagatacatgaaaaaaaagttcagtgtcactaggcatcaaggaaatgcaaatcaaaaccactatgaggtatcagtcacttcacacctttcaggatggctatc

SEQ ID NO: 67701 - DNA, 462 bp, Homo sapiens
gaccttaatccaatggctggtgtccttataaggagagggagatgttttaaattttattattatttttatattattgagacagagttttgtggcccaggctggagtgcagtggagcaatcttggctcactgcaacctctgccccatgggttcaagcgattctcctgcctcagtctcccaagtagctgggattataggcactcgccaccccacccagctaattttttgtatttttagtacagatggggtttcaccatgttggccaggctggtctcgaactcctgacctcaagtgatctgcctgccttgctctcccagagtgctgggattacaggcatgagccaccgtgcccagctggagagggagatttgaatacagacacacacacagaggataaggccatgtgaggacacagacacagagggaagacagctgtgtaaagatggaaccagaggttggagtgat

SEQ ID NO: 67702 - DNA, 349 bp, Homo sapiens
caaagtgagatgtgtgagtgcgtgtgtgcgtgtctgccctctcatgcatagatgtgtgcatgtgtgtgtacatacatgtgtgggcgtgcacacagatgcacgcgtgagtgtgagaacgcacgcactgtgaacagccgtgtgactcatttcaaacagtccccttctcccaccctggagcgagtgggttgcactggccaccagcagtgttggacctggagctggtgtggacagtggaatggcaagcccagctggcatggtccttcctgctttcatggccttccccactgctcctccctttctctctctctctctgtatatatctatagatagatagatagccggccccttc

SEQ ID NO: 67703 - DNA, 387 bp, Homo sapiens
gccagagtagtaggaggcgtactggaatataaagccagaaggatgcatttcacaaaagaacattgctaaatcctgccaagactcaaaatgaggacagaaaagtgtacattgaatttggcagtgtgaactattcatagtaatttctgtgtaatggtgagacagaagccagactgtaggggataagaagtgaatggaacaaataagtagactactatttattacacattatatatcgttacttataaaatgtgtgactgtgatgtgaaggagagaagcattggttagaggagagaatatgggctcaaaggaaggagggtcttgtatttttatgagaaaattttgagcattcagaagaaatctgctagagaagagattgaagatactgaa

SEQ ID NO: 67704 - DNA, 239 bp, Homo sapiens
tccagactgaatcctggaaaagaaaaggtatattggtggaaagtgtaattaatagtattgcaacaatgttaatttcttaattctcataaggtactgtggttatacaagaagtttacaataagggaagcttggtgaatgatatgcgaactctatgctagctttgcaactcttctctaagtataaaattatttcaaaataaaaataaagctgcagggaagaaatcaggtcacctacagaaa

SEQ ID NO: 67705 - DNA, 395 bp, Homo sapiens
acatctgggggaagggcaatctggacagaaaggacagcttgtggaaagaccgaaggctgcagtagagggcaagtctcagatgaccagccattaacaggtcctgactctgcaggccctggcgggactctggcccttcctctcagtgaaagggacaccttcggagggtcttgagccaaggagggacaggatctgacttagaatgttttaaaaaatgtttgttattgtaaactaaaacacaggcacagaaaatcttgctgaacagattagagcgtaatgaatcattattaggcaaaccagacctgaaactaccatgcagaactttgccagcctccccagaaaccccttcaggtgcccccatcaaaaccacagcctctccctccctctaaaagcggccg

SEQ ID NO: 67706 - DNA, 550 bp, Homo sapiens
aaggcacccacctggtggattgaggagggcagagggtcaggccaggtggcggatgagggaagcctgggggatccctgcattgagagagtgcagggattcttgatggcttgacagtggggaccctgtgaccaggctgagaattctgttgaataatgaaagcatttggcccactctctaaaatgcttatcgattatgatcaaaaatgatctttctttgagattattatgatcctgtggagggagactgtcaggtaagaattgtgaaagactttgcagtgtgccataaaaaggattactgagtgtctcatctagcgcccttcagggttatctgattcgatagggacccgcgctttccatcgtctttgggctacttatctctgtaaattgtagaaatcttatagtagtgcactttgagtaatgcaaatttcttttccaaagaaatgcaaataaatgcaaattttatcctgtagaatataaatatggctattgctctgcagatactgacccgttttgcatctatttataaattcatttttgcactatcaaaatgt

SEQ ID NO: 67707 - DNA, 179 bp, Homo sapiens
gggtctcctggccccagaattgagactgctgagggaaggaagggcctgctgagttcccagagttatggctgggtcatggcattgggacccacactggcagctccagttacacagggctgggctggcaagggaagggaggatggtgcaggtcaatgcagcagttcagggagcaagtaaga

SEQ ID NO: 67708 - DNA, 2898 bp, Homo sapiens
  misc_feature (922)..(922): n is a, c, g, or t
  misc_feature (1322)..(1322): n is a, c, g, or t
  misc_feature (1499)..(1499): n is a, c, g, or t
  misc_feature (1568)..(1568): n is a, c, g, or t
  misc_feature (1981)..(1981): n is a, c, g, or t
gggtctcctggccccagaattgagactgctgagggaaggaagggcctgctgagttcccagagttatggctgggtcatggcattgggacccacactggcagctccagttacacagggctgggctggctctagcagccttgtcttacttgctccctgaactgctgcattgacctgcaccatcctcccttcccttgccagccgagaactgtgctcctcaggtttcctgggcagggtccagggctctgatgccaaacgcagcctggaaactctagctctcagcatgccaggatgcgggcacccaagtgaggccgcctgggatgcaggaagcttagtccaggcctgggcatgcctctgttccatctcccctcaagcaggaccagctacttaatctgcgggacccagagcagaatgaaaatgtgggcccctcattcaaaaatttaaaatttccaacaaaagaatgaaaaaataagaaaaaattaagaatttcaagatggtgatggcagagtatttaacacttcaaatcatgacccttactgtccaggtcacatgcccacaaagtcagccctgtcgtcaggccttggtttccttgtctgtcaagtgggagaatggtagccactggccaaaagggtgagggtgagaatgaggtgggagctggtggtaagaggtccagtgaacagcatgaggatgaggtaagagtctccgagttcatgatttgttatctgggtctcagcaccgggtggcaggccaaactccttgccaggagtttgattgcttacaacagctctttttcacagaaccaaaaaactaaaaatccatgaagcaaagtaacttgctcagggtcacacagagactcagtgggggaagccaagatcagagttctggcctggctctcttcgaagctggtgctttttgtgacccaggcnggagagagagaagcgcaggagggaggtgggatggggacaggctgctcaggacaaagagggccactgtgcagacacaaagacctgaccacagaggcccctctgggggctgggacagacaaatggatggagccctgtgactctatctgtggtgactggggtagctgccaggagctgcctcctagaccctacctggttgtgatgagggttggggagggtgttggtgtgcaggaaccaggaaatgggtcagggaggagaaacaaactcagagatgggccccttccccactccccaggcctctgaccccatctccccctagctcctcctgggcagcctgccagcttatggaatctcccacaaaccatccaccgccccacattcctccttctcagtgagggtgagnctcaggcaactcactgtctggcagtcccagcctcacaatacttctgacccttccccatcaccagtggcaggatgaagcatatgccctcggcgcagtgtccttcagggccctgtgtgacctgccctgctgacctttcttcactcacctgtccccactcctcctcagccttctacgctncagtcacatggaacgtcccaccattctccaaacactctgtcctttcatacacacgcccccatgttggcncatgcttttccttcttcctggggggctgtttcccctgctccagtagactgaaatcccatttctcctccatgaaccagctcaaatgccacctccagtagccagctttcctccatgcccacagttgggtttagcttcgctcattaacctgttaatcacacatgttgggttcacccactctagcggtgctcctcccacgctggcttgtgttgtagttgttccaatccacaaagcctacctggaagaggggacctttgagctgggccttacaggacaggtggacttcactagtgaatgtcagtggtaagaagtgacaggagctcaaagaatcagggatatcagccctatctccaaaattttatctgcatcagccaggttgctgagttcaaatagcaaggagtctatagttcagaatngcaggagttgagtgtgcagggacactgtcaagggataaagttaagaggttcaccagggccaagccacgaagggttttataatgccatactaaggaatttttttgcttgcttgtttaaaacacatttgaatttatttctcagctctatagtttactaagtaattaagttctggcttttatctttactattttctccctcttaattaccttggcctcccaaagtcctgggattacaggcgtgagccaccgtacctgacccctgtccctgaacatttgtcacaatatattatgagtgaatgagtaagaactctattttagtggtcaccttctttgtgctagtcattaagtttaaggtatctcgcttaatattctccagaaccctgtgagataggcattattttattctcatgtgacatgtagagaaacaggttcagaaaggggaagcgaaagtccaaagcagtgaatctgcggtgggtctcctggccccagaattgcagcctgatgggaaggaaggccctgctgagttcccagagttatggctgggtcatggcattgggacccacactggcagctccagttacacagggctgggctggctctagcagccttgtcttacttgctccctgaactgctgcattgacctgcaccatcctcccttcccttgccagccgagaactgtgctcctcaggtttcctgggcagggtccagggctctgatgccaaacgcagcctggaaactctagctctcagcatgccaggatgcgggcacccaagtgaggccgcctgggatgcaggaagcttagtccaggcctgggcatgcctctgttccatctcccctcaagcaggaccagctacttaatctgcgggacccagagcagaatgaaaatgtgggcccctcattcaaaaatttaaaatttcc

SEQ ID NO: 67709 - DNA, 326 bp, Homo sapiens
aaggattaagtgcttaaaagaaatctttgcttacacaagttgaactgactgctgctaaacttcggatcgactgagggtaaactacatccctgaccttcctttcttcctcaacctgggctctatttactcactgcaggtgcagctcagtcctgctctggtggcactgccccacctgggtgctgccggctgcctggtgaggtcaagagaagcagcccagcaaggagcttcctccactcatacaggacttggtctcaaacaaatgtagcacgacactaagtttaaaagcctaagatcgccttttctcacagaaatctttattttttcca

SEQ ID NO: 67710 - DNA, 411 bp, Homo sapiens
  misc_feature (275)..(275): n is a, c, g, or t
  misc_feature (308)..(308): n is a, c, g, or t
  misc_feature (340)..(340): n is a, c, g, or t
cagcactggcatacttctttctctcttaaagagttagtaaaacatcctcgtttttgttttttctcactgcatgcattatacatattacagaaactttaaaaagtataaataagggaaaaagaaaaataatacctattactaaatttgatttagcaaataaaaattcaggctttagcaagttttaaaaaatgaataatttttatagtataagcatatccctaatattgcataagatatactttcttgaaaacacctgtaagatccattagtattangacaacttttaaagaaatcaccatttcatctgnttgcactaagtcatgccactttcttaaacctnaattggggtttggtttatatgtaacctctaaaacttcagaggtataattaccatcatggggccagtatggg

SEQ ID NO: 67711 - DNA, 2348 bp, Homo sapiens
  misc_feature (2347)..(2347): n is a, c, g, or t
tactaagagtctccagcatcctccacctgtctaccaccgagcatgggcctatatttgaagccttagatctctccagcacagtaagcaccaggagtccatgaagaagatggctcctgccatggaatcccctactctactgtgtgtagccttactgttcttcggtaagtagagattcaattacccctcccagggaggcccaaatgaatttggggagcagctggggtaggaacctttactgtgggtggtgactttttctaggacatgtgcaaactattgggcatttcccagggactctgtagtggagccaagctagaaagcagaggcaagtgggctgagcaacacctaaggaggaagccagactgaaagcttggttccttgcatttgctctggcatcttccagagtgcaaatttcctaccaaggaaatgagggtagaggagagaaagaagctctttcttcccctgattctgattcctgaaaagacggttggtccttaaaattccatggatgtagatcttatccccacacccagattctagtcctctggagataaagaagactgctggacactaatgtatcctctctggacttttgcagctccagatggcgtgttagcaggtgagtcctctgttcttgttcccttggtgtttcaacatgtctgggcattgctttcctctcactattttcttcgtcccatcacttctgctttctaatgagcatgaatctgttccttggccagactactttccctctccaccttgccttgtctttctttttttccctgattcattgcattctctcaagtcattctctcctctgttttagtcaataaccatgtctgttgcacatatacatgtctcattctctctcctagacactttggcatgatctcgctcaataattacattattattattattgccattttataattgaggatgctgaaactcagtgattttctggtggttacatggctaaggaactggatttcaacataagttccttggatctaagtccagttctcttctgactatatcacccttttgttatcaccatgtatctacttctttggtctctgttcaaatttgcactacatccccttgttccaggaagccattcaagactgactttcttagtgcctctcactactttctggaactgacatatgtttttcactctgtatatacttacaattaaatagtcataaatattcagagcttggagaaaccttatatttcatccagtccagtaaatttatccatccataattcactcattcattcacataataaatatttaatgtaacaatggttgaacatggcagacagtgtttctacctcaaaagagattgcagtcctcatttacagatactgaattgaaattaacagaagtagagtgagtcagctcaaatcacatagtgaattggtttctttgtttttaaatctcctgcatatgtgtcctgtctttctccctgtgttgggcgttccctggggcaccaatactaatttctccttcccctagaaatcaaaacagggtcttatcaccaacagaataaggacaggttgaccactgattgtcagaatattgcttcgtttgtacttttaagcctagacagttttcaatgactttttttctctctacatgtcttttcatatttttatcttcttgaagtccctcagaaacctaaggtctccttgaaccctccatggaatagaatatttaaaggagagaatgtgactcttacatgtaatgggaacaatttctttgaagtcagttccaccaaatggttccacaatggcagcctttcagaagagacaaattcaagtttgaatattgtgaatgccaaatttgaagacagtggagaatacaaatgtcagcaccaacaagttaatgagagtgaacctgtgtacctggaagtcttcagtggtaagttccagggatatggaaatacagatctctcatgtgagggatggctcatctgaagatgggaaaaaacaggttattccaagggttaggacaccagagtgggattcaaggcctctcatttttaagacccctgcattggctgggcacagtggctcacgcctgtaatcccagcactttgggaggctgaggcaggtggatcacgaggtcaggagatcgagaccatccggctaacatggtgaaaccccatctctgctaaaaaatatatatatataaaattagccgggcgtagtggtgggcacctgtagtcccaggtactcgggaggctgaggcaggagaatggtgtgaacccaggaggtggaggttgcagtgagctgagatcacgccactgccctccagcctgggctacagagcaagactccgtcnc

SEQ ID NO: 67712 - DNA, 1181 bp, Homo sapiens
tactaagagtctccagcatcctccacctgtctaccaccgagcatgggcctatatttgaagccttagatctctccagcacagtaagcaccaggagtccatgaagaagatggctcctgccatggaatcccctactctactgtgtgtagccttactgttcttcgctccagatggcgtgttagcagtccctcagaaacctaaggtctccttgaaccctccatggaatagaatatttaaaggagagaatgtgactcttacatgtaatgggaacaatttctttgaagtcagttccaccaaatggttccacaatggcagcctttcagaagagacaaattcaagtttgaatattgtgaatgccaaatttgaagacagtggagaatacaaatgtcagcaccaacaagttaatgagagtgaacctgtgtacctggaagtcttcagtgactggctgctccttcaggcctctgctgaggtggtgatggagggccagcccctcttcctcaggtgccatggttggaggaactgggatgtgtacaaggtgatctattataaggatggtgaagctctcaagtactggtatgagaaccacaacatctccattacaaatgccacagttgaagacagtggaacctactactgtacgggcaaagtgtggcagctggactatgagtctgagcccctcaacattactgtaataaaagctccgcgtgagaagtactggctacaattttttatcccattgttggtggtgattctgtttgctgtggacacaggattatttatctcaactcagcagcaggtcacatttctcttgaagattaagagaaccaggaaaggcttcagacttctgaacccacatcctaagccaaaccccaaaaacaactgatataattactcaagaaatatttgcaacattagtttttttccagcatcagcaattgctactcaattgtcaaacacagcttgcaatatacatagaaacgtctgtgctcaaggatttatagaaatgcttcattaaactgagtgaaactggttaagtggcatgtaatagtaagtgctcaattaacattggttgaataaatgagagaatgaatagattcatttattagcatttgtaaaagagatgttcaatttcactcttatgaatatagaacaaaaaaaaaaaacgactgaaaaaaaagaaagaa

SEQ ID NO: 67713 - DNA, 1072 bp, Homo sapiens
tactaagagtctccagcatcctccacctgtctaccaccgagcatgggcctatatttgaagccttagatctctccagcacagtaagcaccaggagtccatgaagaagatggctcctgccatggaatcccctactctactgtgtgtagccttactgttcttcgctccagatggcgtgttagcagtcagttccaccaaatggttccacaatggcagcctttcagaagagacaaattcaagtttgaatattgtgaatgccaaatttgaagacagtggagaatacaaatgtcagcaccaacaagttaatgagagtgaacctgtgtacctggaagtcttcagtgactggctgctccttcaggcctctgctgaggtggtgatggagggccagcccctcttcctcaggtgccatggttggaggaactgggatgtgtacaaggtgatctattataaggatggtgaagctctcaagtactggtatgagaaccacaacatctccattacaaatgccacagttgaagacagtggaacctactactgtacgggcaaagtgtggcagctggactatgagtctgagcccctcaacattactgtaataaaagctccgcgtgagaagtactggctacaattttttatcccattgttggtggtgattctgtttgctgtggacacaggattatttatctcaactcagcagcaggtcacatttctcttgaagattaagagaaccaggaaaggcttcagacttctgaacccacatcctaagccaaaccccaaaaacaactgatataattactcaagaaatatttgcaacattagtttttttccagcatcagcaattgctactcaattgtcaaacacagcttgcaatatacatagaaacgtctgtgctcaaggatttatagaaatgcttcattaaactgagtgaaactggttaagtggcatgtaatagtaagtgctcaattaacattggttgaataaatgagagaatgaatagattcatttattagcatttgtaaaagagatgttcaatttcaataaaataaatataaaaccatgtaacagaatgcttctgagt

SEQ ID NO: 67714 - DNA, 1171 bp, Homo sapiens
tactaagagtctccagcatcctccacctgtctaccaccgagcatgggcctatatttgaagccttagatctctccagcacagtaagcaccaggagtccatgaagaagatggctcctgccatggaatcccctactctactgtgtgtagccttactgttcttcgctccagatggcgtgttagcagtccctcagaaacctaaggtctccttgaaccctccatggaatagaatatttaaaggagagaatgtgactcttacatgtaatgggaacaatttctttgaagtcagttccaccaaatggttccacaatggcagcctttcagaagagacaaattcaagtttgaatattgtgaatgccaaatttgaagacagtggagaatacaaatgtcagcaccaacaagttaatgagagtgaacctgtgtacctggaagtcttcagtgactggctgctccttcaggcctctgctgaggtggtgatggagggccagcccctcttcctcaggtgccatggttggaggaactgggatgtgtacaaggtgatctattataaggatggtgaagctctcaagtactggtatgagaaccacaacatctccattacaaatgccacagttgaagacagtggaacctactactgtacgggcaaagtgtggcagctggactatgagtctgagcccctcaacattactgtaataaaagctccgcgtgagaagtactggctacaattttttatcccattgttggtggtgattctgtttgctgtggacacaggattatttatctcaactcagcagcaggtcacatttctcttgaagattaagagaaccaggaaaggcttcagacttctgaacccacatcctaagccaaaccccaaaaacaactgatataattactcaagaaatatttgcaacattagtttttttccagcatcagcaattgctactcaattgtcaaacacagcttgcaatatacatagaaacgtctgtgctcaaggatttatagaaatgcttcattaaactgagtgaaactggttaagtggcatgtaatagtaagtgctcaattaacattggttgaataaatgagagaatgaatagattcatttattagcatttgtaaaagagatgttcaatttcaataaaataaatataaaaccatgtaacagaatgcttctgagt

SEQ ID NO: 67715 - DNA, 2523 bp, Homo sapiens
ccaaggctgtacgctccggagtacgggaggtgagaaatcagggcagattctgtctcccagggaaatacaaggataagggagggcaggggaattattcctgtgcattcctggtgagcctcccctgcccctacttcctccaagacagagaaagctgacccagtctgcagagcccttcttagggttgcctggggggagcaagaaaacctggagctttctttgcacacatttaataatggatcactcagtccttcacactttactgagagaatcattagactcaggtgtccaagtcatcagcttgctttgaactagaactaaacctgccagttgtctgctgaagacagaaatgactcttctgggcatgtaggggagaggacattgtggtggtggggaggggatattaattttgtcgatctggatcaggtttggagggtaaggaggtttagattaccaagctcccctagagggcaggggaagtggctttatgggcacagagtcccaggggatttagtagagagaactgttaaaggccagtttctctgctataagatgttgggagtgactgggtgaggctgggggtgaccactggtgcaggcccaggatgggggctacttgagtgtgcaagagaacctcttttcctctggtaccccagctgggaccgcagccagaagcgacgcagaccctcagggcagcaaggtgccctgaggcaggaggagagccagcagccactgacagacctgtccccggctggagtcactgtgctgggggccttcggggactcacctacccccacccctgaccatgaggagccccgagggggaccccggcctgggatgccccaccccaagggggctccagccttccagttgaaccggtgagggcaggggcaatgggatgggagggcaaagagggaaggcaacttaggtcttcagagctggggtgggggtgccctctggatgggtagtgaggaggcaggcgtggcctcccacagcccctggccctcccaagggggctggaccagctcctctctgggaggcacccttccttctcccagtctctcaggatctgtgtcctattctctgctgcccataactccaactctgccctctttggttttttctcatgccaccttgtctaagacaactctgccctcttaaccttgattccccctctttgtcttgaacttccccttctattctggcctaccccttggttcctgactgtgccctttccctcttcctctcaggattcccctggtgaatctgtgatgcccccaatgttggggtgcagccaagcaggaggccaaggggccggcacagcccccatcccactgagggtggggcagctgtggggagctggggccacaggggctcctggctcctgccccttgcacaccacccggaacactccccagccccacgggcaatcctatctgctcgccctcctgcaggtgggggcctcacatatctgtgacttcgggtccctgtccccacccttgtgcactcacatgaaagccttgcacactcacctccaccttcacaggccatttgcacacgctcctgcaccctctccccgtccataccgctccgctcagctgactctcatgttctctcgtctcacatttgcactctctccttcccacattctgtgctcagctcactcagtggtcagcgtttcctgcacactttacctctcatgtgcgtttcccggcctgatgttgtggtggtgtgcggcgtgctcactctctccctcatgaacacccacccacctcgtttccgcagcccctgcgtgctgctccagaggtgggtgggaggtgagctgggggctccttgggccctcatcggtcatggtctcgtcccattccacaccatttgtttctctgtctccccatcctactccaaggatgccggcatcaccctgagggctcccccttgggaatggggtagtgaggccccagacttcacccccagcccactgctaaaatctgttttctgacagatgggttttggggagtcgcctgctgcactacatgagaaagggactcccatttgcccttccctttctcctacagtcccttttgtcttgtctgtcctggctgtctgtgtgtgtgccattctctggacttcagagccccctgagccagtcctcccttcccagcctccctttgggcctccctaactccacctaggctgccagggaccggagtcagctggttcaaggccatcgggagctctgcctccaagtctacccttcccttcccggactccctcctgtcccctcctttcctccctccttccttccactctccttccttttgcttccctgccctttccccctcctcaggttcttccctccttctcactggtttttccaccttcctccttcccttcttccctggctcctaggctgtgatatatatttttgtattatctctttcttcttcttgtggtgatcatcttgaattactgtgggatgtaagtttcaaaattttcaaataaagcctttgcaagataaaaaaaaaaa

SEQ ID NO: 67716 - DNA, 1961 bp, Homo sapiens
caggggaggcccctcggccccacgtcatgtgtgcgtgtgggagcgagcacctccaccaagccgatctcctcgggtcccaagatcacgtcggcaagtcctgcctggcactgcacccccagccaccccatcaggctttgaggaggggccgccctcatcccaatacccctgggctatcgtgtggggtcccaccgtgtctcgagaggatggaggggaccccaactctgccaatcccggatttctggactatggttttgcagcccctcatgggctcgcaaccccacaccccaactcagactccatgcgaggtgatggagatgggcttatccttggagaggcacctgccaccctgcggccattcctgttcgggggccgtggggaaggtgtggacccccagctctatgtcacaattaccatctccatcatcattgttctcgtggccactggcatcatcttcaagttctgctgggaccgcagccagaagcgacgcagaccctcagggcagcaaggtgccctgaggcaggaggagagccagcagccactgacagacctgtccccggctggagtcactgtgctgggggccttcggggactcacctacccccacccctgaccatgaggagccccgagggggaccccggcctgggatgccccaccccaagggggctccagccttccagttgaaccggattcccctggtgaatctgtgatgcccccaatgttggggtgcagccaagcaggaggccaaggggccggcacagcccccatcccactgagggtggggcagctgtggggagctggggccacaggggctcctggctcctgccccttgcacaccacccggaacactccccagccccacgggcaatcctatctgctcgccctcctgcaggtgggggcctcacatatctgtgacttcgggtccctgtccccacccttgtgcactcacatgaaagccttgcacactcacctccaccttcacaggccatttgcacacgctcctgcaccctctccccgtccataccgctccgctcagctgactctcatgttctctcgtctcacatttgcactctctccttcccacattctgtgctcagctcactcagtggtcagcgtttcctgcacactttacctctcatgtgcgtttcccggcctgatgttgtggtggtgtgcggcgtgctcactctctccctcatgaacacccacccacctcgtttccgcagcccctgcgtgctgctccagaggtgggtgggaggtgagctgggggctccttgggccctcatcggtcatggtctcgtcccattccacaccatttgtttctctgtctccccatcctactccaaggatgccggcatcaccctgagggctcccccttgggaatggggtagtgaggccccagacttcacccccagcccactgctaaaatctgttttctgacagatgggttttggggagtcgcctgctgcactacatgagaaagggactcccatttgcccttccctttctcctacagtcccttttgtcttgtctgtcctggctgtctgtgtgtgtgccattctctggacttcagagccccctgagccagtcctcccttcccagcctccctttgggcctccctaactccacctaggctgccagggaccggagtcagctggttcaaggccatcgggagctctgcctccaagtctacccttcccttcccggactccctcctgtcccctcctttcctccctccttccttccactctccttccttttgcttccctgccctttccccctcctcaggttcttccctccttctcactggtttttccaccttcctccttcccttcttccctggctcctaggctgtgatatatatttttgtattatctctttcttcttcttgtggtgatcatcttgaattactgtgggatgtaagtttcaaaattttcaaataaagcctttgcaagataaaaaaaaaaa

SEQ ID NO: 67717 - DNA, 2291 bp, Homo sapiens
ccaaggctgtacgctccggagtacgggaggtgagaaatcagggcagattctgtctcccagggaaatacaaggataagggagggcaggggaattattcctgtgcattcctggtgagcctcccctgcccctacttcctccaagacagagaaagctgacccagtctgcagagcccttcttagggttgcctggggggagcaagaaaacctggagctttctttgcacacatttaataatggatcactcagtccttcacactttactgagagaatcattagactcaggtgtccaagtcatcagcttgctttgaactagaactaaacctgccagttgtctgctgaagacagaaatgactcttctgggcatgtaggggagaggacattgtggtggtggggaggggatattaattttgtcgatctggatcaggtttggagggtaaggaggtttagattaccaagctcccctagagggcaggggaagtggctttatgggcacagagtcccaggggatttagtagagagaactgttaaaggccagtttctctgctataagatgttgggagtgactgggtgaggctgggggtgaccactggtgcaggcccaggatgggggctacttgagtgtgcaagagaacctcttttcctctggtaccccagctgggaccgcagccagaagcgacgcagaccctcagggcagcaaggtgccctgaggcaggaggagagccagcagccactgacagacctgtccccggctggagtcactgtgctgggggccttcggggactcacctacccccacccctgaccatgaggagccccgagggggaccccggcctgggatgccccaccccaagggggctccagccttccagttgaaccggtgagggcaggggcaatgggatgggagggcaaagagggaaggcaacttaggtcttcagagctggggtgggggtgccctctggatgggtagtgaggaggcaggcgtggcctcccacagcccctggccctcccaagggggctggaccagctcctctctgggaggcacccttccttctcccagtctctcaggatctgtgtcctattctctgctgcccataactccaactctgccctctttggttttttctcatgccaccttgtctaagacaactctgccctcttaaccttgattccccctctttgtcttgaacttccccttctattctggcctaccccttggttcctgactgtgccctttccctcttcctctcaggattcccctggtgaatctgtgatgcccccaatgttggggtgcagccaagcaggaggccaaggggccggcacagcccccatcccactgagggtggggcagctgtggggagctggggccacaggggctcctggctcctgccccttgcacaccacccggaacactccccagccccacgggcaatcctatctgctcgccctcctgcaggtgggggcctcacatatctgtgacttcgggtccctgtccccacccttgtgcactcacatgaaagccttgcacactcacctccaccttcacaggccatttgcacacgctcctgcaccctctccccgtccataccgctccgctcagctgactctcatgttctctcgtctcacatttgcactctctccttcccacattctgtgctcagctcactcagtggtcagcgtttcctgcacactttacctctcatgtgcgtttcccggcctgatgttgtggtggtgtgcggcgtgctcactctctccctcatgaacacccacccacctcgtttccgcagcccctgcgtgctgctccagaggtgggtgggaggtgagctgggggctccttgggccctcatcggtcatggtctcgtcccattccacaccatttgtttctctgtctccccatcctactccaaggatgccggcatcaccctgagggctcccccttgggaatggggtagtgaggccccagacttcacccccagcccactgctaaaatctgttttctgacagatgggttttggggagtcgcctgctgcactacatgagaaagggactcccatttgcccttccctttctcctacagtcccttttgtcttgtctgtcctggctgtctgtgtgtgtgccattctctggacttcagagccccctgagccagtcctcccttcccatcttccctggctcctaggctgtgatatatatttttgtattatctctttcttcttcttgtggtgatcatcttgaattactgtgggatgtaagtttcaaaattttcaaataaagcctttgcaagataaaaaaaaaaa

SEQ ID NO: 67718 - DNA, 1917 bp, Homo sapiens
ccagcagaacttgaagatgatgccagtggccacgagaacaatgatgctgggaccgcagccagaagcgacgcagaccctcagggcagcaaggtgccctgaggcaggaggagagccagcagccactgacagacctgtccccggctggagtcactgtgctgggggccttcggggactcacctacccccacccctgaccatgaggagccccgagggggaccccggcctgggatgccccaccccaagggggctccagccttccagttgaaccggtgagggcaggggcaatgggatgggagggcaaagagggaaggcaacttaggtcttcagagctggggtgggggtgccctctggatgggtagtgaggaggcaggcgtggcctcccacagcccctggccctcccaagggggctggaccagctcctctctgggaggcacccttccttctcccagtctctcaggatctgtgtcctattctctgctgcccataactccaactctgccctctttggttttttctcatgccaccttgtctaagacaactctgccctcttaaccttgattccccctctttgtcttgaacttccccttctattctggcctaccccttggttcctgactgtgccctttccctcttcctctcaggattcccctggtgaatctgtgatgcccccaatgttggggtgcagccaagcaggaggccaaggggccggcacagcccccatcccactgagggtggggcagctgtggggagctggggccacaggggctcctggctcctgccccttgcacaccacccggaacactccccagccccacgggcaatcctatctgctcgccctcctgcaggtgggggcctcacatatctgtgacttcgggtccctgtccccacccttgtgcactcacatgaaagccttgcacactcacctccaccttcacaggccatttgcacacgctcctgcaccctctccccgtccataccgctccgctcagctgactctcatgttctctcgtctcacatttgcactctctccttcccacattctgtgctcagctcactcagtggtcagcgtttcctgcacactttacctctcatgtgcgtttcccggcctgatgttgtggtggtgtgcggcgtgctcactctctccctcatgaacacccacccacctcgtttccgcagcccctgcgtgctgctccagaggtgggtgggaggtgagctgggggctccttgggccctcatcggtcatggtctcgtcccattccacaccatttgtttctctgtctccccatcctactccaaggatgccggcatcaccctgagggctcccccttgggaatggggtagtgaggccccagacttcacccccagcccactgctaaaatctgttttctgacagatgggttttggggagtcgcctgctgcactacatgagaaagggactcccatttgcccttccctttctcctacagtcccttttgtcttgtctgtcctggctgtctgtgtgtgtgccattctctggacttcagagccccctgagccagtcctcccttcccagcctccctttgggcctccctaactccacctaggctgccagggaccggagtcagctggttcaaggccatcgggagctctgcctccaagtctacccttcccttcccggactccctcctgtcccctcctttcctccctccttccttccactctccttccttttgcttccctgccctttccccctcctcaggttcttccctccttctcactggtttttccaccttcctccttcccttcttccctggctcctaggctgtgatatatatttttgtattatctctttcttcttcttgtggtgatcatcttgaattactgtgggatgtaagtttcaaaattttcaaataaagcctttgcaagataaaaaaaaaaa

SEQ ID NO: 67719 - DNA, 892 bp, Homo sapiens
tgagtgtctacaggggaaagtatagagcacacgaggtctgggatgagactcccagggtttgcatcttgctgtatgaccttgagtagatttttaaacttctgattgcctcagtttactcatttgaaaaatggagataatgctacctagatcatgggttggttgtgagggttgaataagataatacctgggaagcatatgtgctgaataaacatcagctattatcatgatcactttgggccagactccaggagtaagagttctacctcagcccattttttttcaatcctgacaacaccctacaagaatgagtattattttccattctaaaaggttaagtgacttgtttaagggccttagctaataggtgaaggactaggatttgaaaaaatgcagctgagcatggtggctcacgcctatagtcccaacactttgggaggctgaggccagaggatcgcgtgagtccagcagtttgaggccagcctgggcaagatggtgagaccctgtctctatgaaaaaaaaaaaggcgtggtggcacgtgcctgtggttcgagctactcaggaggctgaggtggggaggatcacctaagcccaaggaggttgaggctgcagtgagccatgtttgcgccattgcattccagcctgggcaagagagagacgctgtctcaaaataaaaaagaaacccgatgaatggtgcaaaattttaaatatactcaaacagaagagttataaaaggcctgtggtgcccatcctcagcttcactcattatcagcattctgccagtctctccaaacctacctcccacctcaatcctgtgactggctagtatagtattgtaccttgaaatgtctccagcagtttaaggccgacgagaaccttttttaaaaaacataac

SEQ ID NO: 67720 - DNA, 594 bp, Homo sapiens
gaatcgttcccacggcttctgggtacccttagttccctgcttaggagggaagacagtagtcgggtcgtaataagcaagacttagcccgagcctccgttgccaacgcaggctgccttgcttggcgtgtgggcatcggcctgccccctcaccctggctacccaacacagctacaaaaggcagggaacaatgtaggtcccttggccctgcctaatgcctgttgccatggaaacccctatcctaatctggccaggagccccttgcagtgagccaggagagtgaggaagaggggatggggcccgctggccctgacctggccagaggaggtaatggttaaccggattgtgggagcagctgactagagccgggggggtagggaggcttgggccccagtcctaccttccctgccaaggagaaaggggcatgtctgcttttgtacctctgggaatctacctcagggatctgcccaacaactcccaggttccaagtgccccaggacccaaagattcccatatagcacaccaccttcagcaaaaatatggtggaagttagccacattctttaattctccctttttttctgccttgatggtaaaaa

SEQ ID NO: 67721 - DNA, 591 bp, Homo sapiens
caaagaaaaggagtaacaggctgggtgcggtggctcacgcctataatcccaacattcagggattacaggcatgagccaccatgcccggctgtttttttaagatagaaaaatatacttcatgtatagcctattgacagataatgactgatattttttcttatagataacacataataaacattgtgaagactaataagtaacttgcttattcttttcagttctaaaacctgtaggaaagaatctttagaagctgtcaacaagttgataatgtagcccaatctctacccatgataggagagtaaggcttatatattttatagtagggcactaaatacaggaaccatgtatttaaaaactttttagtgattatctcagaattctaggtgtccctctgctgtacatccctaaattttttgcgtaggtattattaataaattcattattttcaaagatggactgtgttctgtaaaaagcttttccagtatctgcaaatcacacagttttttttaactctattactattatataaaatgatttcttaatattgaaccaaccttgcattcctagaataaacctcacttagccatgatg

SEQ ID NO: 67722 - DNA, 4428 bp, Homo sapiens
gcttccggcctttgtgggtcacttttgatgggttccgggtcccaaaagggttcgaggcctcttgccttcgctccgtaggagggagttctcttctggccctgggggccgcaggactgtccaggaatacagtttccaggtgagatcttacttgaaacaccggtagttctagcacagctaaaatggcatctacttgggctatccaggcccacatggaccaggatgaacctttggaagtaaagatagaggaagagaaatataccaccagacaggattgggacctgcgtaaaaacaacacccatagcagagaggtcttccgtcagtacttcagacagttctgctaccaggagacatctggtccccgtgaggctttgagccgactccgagaactttgccatcagtggctgaggccagagacccacaccaaagaacagattctggagctgctggtgctggagcagttcctgaccatcctacctgaggagctccaggcctgggtgcaggagcagcatccagagagtggggaggaggtggtgactgtgctggaggatttagagagagaactggatgaaccaggagagcaggtctcagtccacactggggaacaggaaatgttcttgcaggagacggtacgtctacgaaaagaaggagaacccagtatgtccctccagtccatgaaagcccagccaaagtatgaatctccagaacttgaatcccaacaggagcaagttttagatgttgagactggaaatgagtatgggaatttaaagcaagaagtttctgaagaaatggaaccacatgggaagacatccagtaaatttgaaaatgatatgtccaagtctgctaggtgtggagaaactcgtgaacctgaagaaataacagaagagccctctgcttgctccagagaagataaacaacctacctgtgatgaaaatggagtaagcctgactgagaactctgaccatactgaacatcagagaatctgtccaggagaagaatcttacggatgtgatgactgtggaaaagcttttagtcagcactcacacctcatagaacatcagaggatccatactggagacagaccctacaaatgcgaagaatgtggaaaagctttccgtgggagaactgtgcttattcgacacaaaataatacacactggagagaaaccgtataagtgtaatgaatgtggcaaagcctttggccggtggtcagctcttaaccaacatcagagacttcacacaggagaaaaacactatcactgtaatgactgtggcaaagcctttagtcagaaagcaggcctctttcaccatatcaagatccacacaagagacaaaccttatcagtgcactcagtgtaataaaagttttagtcggcgttccatacttactcagcatcaaggagttcataccggcgccaagccgtatgagtgcaacgagtgtggaaaagcctttgtttataactcatcccttgtttcccatcaggaaatccaccacaaagaaaaatgctatcagtgtaaggaatgtgggaaatccttcagtcagagtggccttattcagcatcagagaattcacactggggaaaaaccctacaaatgtgacgtatgtgaaaaagcctttattcaaaggacaagtcttacagaacatcagcgaattcacactggagaaagaccctataaatgtgataagtgtgggaaggcgtttactcaaagatcagtcctcacggaacatcagagaatccacactggagagaggccctacaagtgtgatgagtgtgggaatgccttccgaggaatcaccagcctcattcagcatcagagaatccacactggggagaagccctaccaatgtgatgagtgtggaaaagccttcagacagaggtaaacaagacattaagtgtttaaggcaaaaagcatggagaggttggggaagagccaagtttcctaaagtaatgaaaagtgaggaagaagaccagctacaaggaaatacttctgaaaaatcactctgaaccccaagctggagtgaatcttctcctgagctctctcattccagaatggcaatcttgtttcaggagagatctctaatagtgactgatggtaaaggaagaaggctgtgcctagaacaaagaatcaggctggcaaagaaatcacaggtctttcctcaaactttaaattgctactctctggagatagctacctggactttacagagctgtcagaagacttgggaaggtttgccagcattggaaaaagccacttggacttcacagagctgtcagaagacttaggaagctttgccagtagttcctgagaccagaaatacatattatgaagcaggtgctggaacaggccctggcccctacttgtgaagctgcagatatagatggtgttactgagaaggaaactaaggacttggctccaaaacaaaacaaaacaaaatctggagatgctgaattttgttggggggaatgtctgtagaactgcaacatcaatgcagtaagtgtagtaaaagctttagtttatggtgagtcattactcagcatcatggagtccacgatgaagagaatctcttttcaatctgtgcaatcaacaagtttttgaaaggcttttgtttatagtggaaccctcttttccccctagaagaaccaccacaaggaaaaatgctgtcaccataaggaatgtgggaaagttttcagccacatggccttatttgacttcaaagaatccacatgagagagagactgcataaatgtaataactgaggaggcctttgttcagcaaagaaaccttatacaaactcgtataaagaatgtaggaagaccttcacccagaagccaggactgactgtgcaccagagaatctgcacaataaacatgatgaatgtggagatgcttgcttcagcattggagaattcacagtaaacggaaaccctgccagtgtgatgagtacggaaaagtcttcagaggttggaacttgggaaaaatcagtgagtgaattcatattagagaggctcttataaatgagaggattgtggaaacttgtatagacagagatcagacctcaacaagggagcctccacagtattgaaaagttaatataattaatgtaagtgggcaagttgtatggggaatgggtagtctaaattgctcattttagccagtaaaaacattaaattagtttcttagatcaagaaaaggaaatgttagaagttatttttcccttccagaggggtctatatgtgtaagcaaccaggacttttgaaataagttgcatctctggatttgtgatctgtctcctggatgattatctctgttttgggagacaggtattttttcttcatgcctgctctagtctcatctcatatctttaattcattcagcaagtatacacaatagtattatcgtctactgtttgttgtaaatatatatatattattttctttttggtctgagtaggcttgtattggtaccctaggacataaaaatcacatatatcatgtttcagtaaatgcagtgaaaggaactatattattaaattgctgggaatttctgtaaatttgagactacctttatattctccaacacaagaccgtgtaggtgtcccttcagagagtatatttttctagcttggcttctttattttctttatttttttgagatggagtcttgctcctgtcgcccaggctggagtgcaatggcacgatctcggctcactgcaacctccgcctcccaggttcaagtgattctcctgtctcagtctcccgagtagctgggattacaggcacttgccaccattcccagctaatttttgtatttttagtagagacggggtttcaccatgttggccaggctggtctcgaactcctgaccttgtgatctgcccaccttggcctcccaaagttcagggattacaggcatgagccaccatgcccggctgtttttttaagatagaaaaatatacttcatgtatagcctattgacagataatgactgatattttttcttatagataacacataataaacattgtgaagactaataagtaacttgcttattcttttcagttctaaaacctgtaggaaagaatctttagaagctgtcaacaagttgataatgtagcccaatctctacccatgataggagagtaaggcttatatattttatagtagggcactaaatacaggaaccatgtatttaaaaactttttagtgattatctcagaattctaggtgtccctctgctgtacatccctaaattttttgcgtaggtattattaataaattcattattttcaaagatggactgtgttctgtaaaaagcttttccagtatctgcaaatcacacagttttttttaactctattactattatataaaatgatttcttaatattgaaccaaccttgcattcctagaataaacctcacttagccatgatg

SEQ ID NO: 67723 - DNA, 2583 bp, Homo sapiens
cagccgttgacggcagcggcacgtgaaagtaccgacctttctggcctttgtgacggacctttggaggcgggtggtttcagattcgtgcgctccggcctttcagtgtctctggaagaagaccagctacaaggaaatacttctgaaaaatcactctgaaccccaagctggagtgaatcttctcctgagctctctcattccagaatggcaatcttgtttcaggagagatctctaatagtgactgatggtaaaggaagaaggctgtgcctagaacaaagaatcaggctggcaaagaaatcacaggtctttcctcaaactttaaattgctactctctggagatagctacctggactttacagagctgtcagaagacttgggaaggtttgccagcattggaaaaagccacttggacttcacagagctgtcagaagacttaggaagctttgccagtagttcctgagaccagaaatacatattatgaagcaggtgctggaacaggccctggcccctacttgtgaagctgcagatatagatggtgttactgagaaggaaactaaggacttggctccaaaacaaaacaaaacaaaatctggagatgctgaattttgttggggggaatgtctgtagaactgcaacatcaatgcagtaagtgtagtaaaagctttagtttatggtgagtcattactcagcatcatggagtccacgatgaagagaatctcttttcaatctgtgcaatcaacaagtttttgaaaggcttttgtttatagtggaaccctcttttccccctagaagaaccaccacaaggaaaaatgctgtcaccataaggaatgtgggaaagttttcagccacatggccttatttgacttcaaagaatccacatgagagagagactgcataaatgtaataactgaggaggcctttgttcagcaaagaaaccttatacaaactcgtataaagaatgtaggaagaccttcacccagaagccaggactgactgtgcaccagagaatctgcacaataaacatgatgaatgtggagatgcttgcttcagcattggagaattcacagtaaacggaaaccctgccagtgtgatgagtacggaaaagtcttcagaggttggaacttgggaaaaatcagtgagtgaattcatattagagaggctcttataaatgagaggattgtggaaacttgtatagacagagatcagacctcaacaagggagcctccacagtattgaaaagttaatataattaatgtaagtgggcaagttgtatggggaatgggtagtctaaattgctcattttagccagtaaaaacattaaattagtttcttagatcaagaaaaggaaatgttagaagttatttttcccttccagaggggtctatatgtgtaagcaaccaggacttttgaaataagttgcatctctggatttgtgatctgtctcctggatgattatctctgttttgggagacaggtattttttcttcatgcctgctctagtctcatctcatatctttaattcattcagcaagtatacacaatagtattatcgtctactgtttgttgtaaatatatatatattattttctttttggtctgagtaggcttgtattggtaccctaggacataaaaatcacatatatcatgtttcagtaaatgcagtgaaaggaactatattattaaattgctgggaatttctgtaaatttgagactacctttatattctccaacacaagaccgtgtaggtgtcccttcagagagtatatttttctagcttggcttctttattttctttatttttttgagatggagtcttgctcctgtcgcccaggctggagtgcaatggcacgatctcggctcactgcaacctccgcctcccaggttcaagtgattctcctgtctcagtctcccgagtagctgggattacaggcacttgccaccattcccagctaatttttgtatttttagtagagacggggtttcaccatgttggccaggctggtctcgaactcctgaccttgtgatctgcccaccttggcctcccaaagttcagggattacaggcatgagccaccatgcccggctgtttttttaagatagaaaaatatacttcatgtatagcctattgacagataatgactgatattttttcttatagataacacataataaacattgtgaagactaataagtaacttgcttattcttttcagttctaaaacctgtaggaaagaatctttagaagctgtcaacaagttgataatgtagcccaatctctacccatgataggagagtaaggcttatatattttatagtagggcactaaatacaggaaccatgtatttaaaaactttttagtgattatctcagaattctaggtgtccctctgctgtacatccctaaattttttgcgtaggtattattaataaattcattattttcaaagatggactgtgttctgtaaaaagcttttccagtatctgcaaatcacacagttttttttaactctattactattatataaaatgatttcttaatattgaaccaaccttgcattcctagaataaacctcacttagccatgatg

SEQ ID NO: 67724 - DNA, 2648 bp, Homo sapiens
cagccgttgacggcagcggcacgtgaaagtaccgacctttctggcctttgtgacggacctttggaggcgggtggtttcagattcgtgcgctccggcctttcagtgtctctggtgaggttgggcctgataggttgagagctgccaggggaagttaaggatgacttccaagttttgaggaagaagaccagctacaaggaaatacttctgaaaaatcactctgaaccccaagctggagtgaatcttctcctgagctctctcattccagaatggcaatcttgtttcaggagagatctctaatagtgactgatggtaaaggaagaaggctgtgcctagaacaaagaatcaggctggcaaagaaatcacaggtctttcctcaaactttaaattgctactctctggagatagctacctggactttacagagctgtcagaagacttgggaaggtttgccagcattggaaaaagccacttggacttcacagagctgtcagaagacttaggaagctttgccagtagttcctgagaccagaaatacatattatgaagcaggtgctggaacaggccctggcccctacttgtgaagctgcagatatagatggtgttactgagaaggaaactaaggacttggctccaaaacaaaacaaaacaaaatctggagatgctgaattttgttggggggaatgtctgtagaactgcaacatcaatgcagtaagtgtagtaaaagctttagtttatggtgagtcattactcagcatcatggagtccacgatgaagagaatctcttttcaatctgtgcaatcaacaagtttttgaaaggcttttgtttatagtggaaccctcttttccccctagaagaaccaccacaaggaaaaatgctgtcaccataaggaatgtgggaaagttttcagccacatggccttatttgacttcaaagaatccacatgagagagagactgcataaatgtaataactgaggaggcctttgttcagcaaagaaaccttatacaaactcgtataaagaatgtaggaagaccttcacccagaagccaggactgactgtgcaccagagaatctgcacaataaacatgatgaatgtggagatgcttgcttcagcattggagaattcacagtaaacggaaaccctgccagtgtgatgagtacggaaaagtcttcagaggttggaacttgggaaaaatcagtgagtgaattcatattagagaggctcttataaatgagaggattgtggaaacttgtatagacagagatcagacctcaacaagggagcctccacagtattgaaaagttaatataattaatgtaagtgggcaagttgtatggggaatgggtagtctaaattgctcattttagccagtaaaaacattaaattagtttcttagatcaagaaaaggaaatgttagaagttatttttcccttccagaggggtctatatgtgtaagcaaccaggacttttgaaataagttgcatctctggatttgtgatctgtctcctggatgattatctctgttttgggagacaggtattttttcttcatgcctgctctagtctcatctcatatctttaattcattcagcaagtatacacaatagtattatcgtctactgtttgttgtaaatatatatatattattttctttttggtctgagtaggcttgtattggtaccctaggacataaaaatcacatatatcatgtttcagtaaatgcagtgaaaggaactatattattaaattgctgggaatttctgtaaatttgagactacctttatattctccaacacaagaccgtgtaggtgtcccttcagagagtatatttttctagcttggcttctttattttctttatttttttgagatggagtcttgctcctgtcgcccaggctggagtgcaatggcacgatctcggctcactgcaacctccgcctcccaggttcaagtgattctcctgtctcagtctcccgagtagctgggattacaggcacttgccaccattcccagctaatttttgtatttttagtagagacggggtttcaccatgttggccaggctggtctcgaactcctgaccttgtgatctgcccaccttggcctcccaaagttcagggattacaggcatgagccaccatgcccggctgtttttttaagatagaaaaatatacttcatgtatagcctattgacagataatgactgatattttttcttatagataacacataataaacattgtgaagactaataagtaacttgcttattcttttcagttctaaaacctgtaggaaagaatctttagaagctgtcaacaagttgataatgtagcccaatctctacccatgataggagagtaaggcttatatattttatagtagggcactaaatacaggaaccatgtatttaaaaactttttagtgattatctcagaattctaggtgtccctctgctgtacatccctaaattttttgcgtaggtattattaataaattcattattttcaaagatggactgtgttctgtaaaaagcttttccagtatctgcaaatcacacagttttttttaactctattactattatataaaatgatttcttaatattgaaccaaccttgcattcctagaataaacctcacttagccatgatg

SEQ ID NO: 67725 - DNA, 2780 bp, Homo sapiens
gcttccggcctttgtgggtcacttttgatgggttccgggtcccaaaagggttcgaggcctcttgccttcgctccgtaggagggagttctcttctggccctgggggccgcaggactgtccaggaatacagtttccaggtgagatcttacttgaaacaccggtagttctagcacagctaaaatggcatctacttgggctatccaggcccacatggaccaggatgaacctttggaagtaaagatagaggaagagaaatataccaccagacaggattgggacctgcgtaaaaacaacacccatagcagagaggtcttccgtcagtacttcagacagttctgctaccaggagacatctggtccccgtgaggctttgagccgactccgagaactttgccatcagtggctgaggccagagacccacaccaaagaacagattctggagctgctggtgctggagcagttcctgaccatcctacctgaggagctccaggcctgggtgcaggagcagcatccagagagtggggaggaggtggtgactgtgctggaggatttagagagagaactggatgaaccaggagagcaggtctcagtccacactggggaacaggaaatgttcttgcaggagacggtacgtctacgaaaagaaggagaacccagtatgtccctccagtccatgaaagcccagccaaagtatgaatctccagaacttgaatcccaacaggagcaagttttagatgttgagactggaaatgagtatgggaatttaaagcaagaagtttctgaagaaatggaaccacatgggaagacatccagtaaatttgaaaatgatatgtccaagtctgctaggtgtggagaaactcgtgaacctgaagaaataacagaagagccctctgcttgctccagagaagataaacaacctacctgtgatgaaaatggagtaagcctgactgagaactctgaccatactgaacatcagagaatctgtccaggagaagaatcttacggatgtgatgactgtggaaaagcttttagtcagcactcacacctcatagaacatcagaggatccatactggagacagaccctacaaatgcgaagaatgtggaaaagctttccgtgggagaactgtgcttattcgacacaaaataatacacactggagagaaaccgtataagtgtaatgaatgtggcaaagcctttggccggtggtcagctcttaaccaacatcagagacttcacacaggagaaaaacactatcactgtaatgactgtggcaaagcctttagtcagaaagcaggcctctttcaccatatcaagatccacacaagagacaaaccttatcagtgcactcagtgtaataaaagttttagtcggcgttccatacttactcagcatcaaggagttcataccggcgccaagccgtatgagtgcaacgagtgtggaaaagcctttgtttataactcatcccttgtttcccatcaggaaatccaccacaaagaaaaatgctatcagtgtaaggaatgtgggaaatccttcagtcagagtggccttattcagcatcagagaattcacactggggaaaaaccctacaaatgtgacgtatgtgaaaaagcctttattcaaaggacaagtcttacagaacatcagcgaattcacactggagaaagaccctataaatgtgataagtgtgggaaggcgtttactcaaagatcagtcctcacggaacatcagagaatccacactggagagaggccctacaagtgtgatgagtgtgggaatgccttccgaggaatcaccagcctcattcagcatcagagaatccacactggggagaagccctaccaatgtgatgagtgtggaaaagccttcagacagaggtaaacaagacattaagtgtttaaggcaaaaagcatggagaggttggggaagagccaagtttcctaaagtaatgaaaagtgaggaagaagaccagctacaaggaaatacttctgaaaaatcactctgaaccccaagctggagtgaatcttctcctgagctctctcattccagaatggcaatcttgtttcaggagagatctctaatagtgactgatggtaaaggaagaaggctgtgcctagaacaaagaatcaggctggcaaagaaatcacaggtctttcctcaaactttaaattgctactctctggagatagctacctggactttacagagctgtcagaagacttgggaaggtttgccagcattggaaaaagccacttggacttcacagagctgtcagaagacttaggaagctttgccagtagttcctgagaccagaaatacatattatgaagcaggtgctggaacaggccctggcccctacttgtgaagctgcagatatagatggtgttactgagaaggaaactaaggacttggctccaaaacaaaacaaaacaaaatctggagatgctgaattttgttggggggaatgtctgtagaactgcaacatcaatgcagtaagtgtagtaaaagctttagtttatggtgagtcattactcagcatcatggagtccacgatgaagagaatctcttttcaatctgtgcaatcaacaagtttttgaaaggcttttgtttatagtggaaccctcttttccccctagaagaaccaccacaaggaaaaatgctgtcaccataaggaatgtgggaaagttttcagccacatggccttatttgacttcaaagaatccagtgagccgagatcatgctactgcactccagcctgggcgacaagagcaaaactccccgtca

SEQ ID NO: 67726 - DNA, 2029 bp, Homo sapiens
gcttccggcctttgtgggtcacttttgatgggttccgggtcccaaaagggttcgaggcctcttgccttcgctccgtaggagggagttctcttctggccctgggggccgcaggactgtccaggaatacagtttccaggtgagatcttacttgaaacaccggtagttctagcacagctaaaatggcatctacttgggctatccaggcccacatggaccaggatgaacctttggaagtaaagatagaggaagagaaatataccaccagacaggattgggacctgcgtaaaaacaacacccatagcagagaggtcttccgtcagtacttcagacagttctgctaccaggagacatctggtccccgtgaggctttgagccgactccgagaactttgccatcagtggctgaggccagagacccacaccaaagaacagattctggagctgctggtgctggagcagttcctgaccatcctacctgaggagctccaggcctgggtgcaggagcagcatccagagagtggggaggaggtggtgactgtgctggaggatttagagagagaactggatgaaccaggagagcaggtctcagtccacactggggaacaggaaatgttcttgcaggagacggtacgtctacgaaaagaaggagaacccagtatgtccctccagtccatgaaagcccagccaaagtatgaatctccagaacttgaatcccaacaggagcaagttttagatgttgagactggaaatgagtatgggaatttaaagcaagaagtttctgaagaaatggaaccacatgggaagacatccagtaaatttgaaaatgatatgtccaagtctgctaggtgtggagaaactcgtgaacctgaagaaataacagaagagccctctgcttgctccagagaagataaacaacctacctgtgatgaaaatggagtaagcctgactgagaactctgaccatactgaacatcagagaatctgtccaggagaagaatcttacggatgtgatgactgtggaaaagcttttagtcagcactcacacctcatagaacatcagaggatccatactggagacagaccctacaaatgcgaagaatgtggaaaagctttccgtgggagaactgtgcttattcgacacaaaataatacacactggagagaaaccgtataagtgtaatgaatgtggcaaagcctttggccggtggtcagctcttaaccaacatcagagacttcacacaggagaaaaacactatcactgtaatgactgtggcaaagcctttagtcagaaagcaggcctctttcaccatatcaagatccacacaagagacaaaccttatcagtgcactcagtgtaataaaagttttagtcggcgttccatacttactcagcatcaaggagttcataccggcgccaagccgtatgagtgcaacgagtgtggaaaagcctttgtttataactcatcccttgtttcccatcaggaaatccaccacaaagaaaaatgctatcagtgtaaggaatgtgggaaatccttcagtcagagtggccttattcagcatcagagaattcacactggggaaaaaccctacaaatgtgacgtatgtgaaaaagcctttattcaaaggacaagtcttacagaacatcagcgaattcacactggagaaagaccctataaatgtgataagtgtgggaaggcgtttactcaaagatcagtcctcacggaacatcagagaatccacactggagagaggccctacaagtgtgatgagtgtgggaatgccttccgaggaatcaccagcctcattcagcatcagagaatccacactggggagaagccctaccaatgtgatgagtgtggaaaagccttcagacagaggtaaacaagacattaagtgtttaaggcaaaaagcatggagaggttggggaagagccaagtttcctaaagtaatgaaaagtgagatagaagaccagctagcaaggagagtatttctgccccatcactctgacatcaatgctgggtgacttcgctgta

SEQ ID NO: 67727 - DNA, 248 bp, Homo sapiens
ggtagggttatggcaggcttatatctgggaaaaaggtcatttcagggttcagccactgccacaaatagtatactttttgttttctgttatcagagtgagtctgtcagctacatctcattttcctcaggtctcagtccacactggggaacaggaaatgttcttgcaggagacggtacgtctacgaaaagaaggagaacccagtatgtccctccagtccatgaaagcccagccaaagtatgaatctccag

SEQ ID NO: 67728 - DNA, 439 bp, Homo sapiens
gcggcacgtgaaagtaccgacctttctggcctttgtgacggacctttggaggcgggtggtttcagattcgtgcgctccggcctttcagtgtctctggtgaggttgggcctgataggttgagagctgccaggggaagttaaggatgacttccaagttttgaggtatcaggaaaactggctgttgagaaaaaggagtctgggttccccgtttggtgaaaggaaagttgggttcatttggggaaattatgtgattcatgattttcccaagatcgacgctgagtacaagaaaagacagaatccacctagctgttgtgtgactttgagcaaattacttaatctctctgtgcctcagttttattcctctgtcagtgagattataagtgtctacttaaatggctgcatgcatggtgcattttaaataaatattagctgttgttatt

SEQ ID NO: 67729 - DNA, 347 bp, Homo sapiens
agaatgtggagacgaggcaatcgatgatgctggaaaagttgaagagagagtttgaatgaaggacaaaccaccgatgggaaagcttgggaggatcacttataggcttgactagcaaaaggctttgggaataggatagaaagcagcaaacctgaactttaggatccaccagatgtctctggagccataacccaacatttcccataaatagtaggttttaattctcctgctatttaggtgcatctctgggacctcctctttctatattgggttttttgtttgttgggtgttttaacttaggatttagcttcaaattccatttcccaagaccaattttatcacattgcctt

SEQ ID NO: 67730 - DNA, 5641 bp, Homo sapiens
gcttccggcctttgtgggtcacttttgatgggttccgggtcccaaaagggttcgaggcctcttgccttcgctccgtaggagggagttctcttctggccctgggggccgcaggactgtccaggaatacagtttccaggtgagatcttacttgaaacaccggtagttctagcacagctaaaatggcatctacttgggctatccaggcccacatggaccaggatgaacctttggaagtaaagatagaggaagagaaatataccaccagacaggattgggacctgcgtaaaaacaacacccatagcagagaggtcttccgtcagtacttcagacagttctgctaccaggagacatctggtccccgtgaggctttgagccgactccgagaactttgccatcagtggctgaggccagagacccacaccaaagaacagattctggagctgctggtgctggagcagttcctgaccatcctacctgaggagctccaggcctgggtgcaggagcagcatccagagagtggggaggaggtggtgactgtgctggaggatttagagagagaactggatgaaccaggagagcaggtctcagtccacactggggaacaggaaatgttcttgcaggagacggtacgtctacgaaaagaaggagaacccagtatgtccctccagtccatgaaagcccagccaaagtatgaatctccagaacttgaatcccaacaggagcaagttttagatgttgagactggaaatgagtatgggaatttaaagcaagaagtttctgaagaaatggaaccacatgggaagacatccagtaaatttgaaaatgatatgtccaagtctgctaggtgtggagaaactcgtgaacctgaagaaataacagaagagccctctgcttgctccagagaagataaacaacctacctgtgatgaaaatggagtaagcctgactgagaactctgaccatactgaacatcagagaatctgtccaggagaagaatcttacggatgtgatgactgtggaaaagcttttagtcagcactcacacctcatagaacatcagaggatccatactggagacagaccctacaaatgcgaagaatgtggaaaagctttccgtgggagaactgtgcttattcgacacaaaataatacacactggagagaaaccgtataagtgtaatgaatgtggcaaagcctttggccggtggtcagctcttaaccaacatcagagacttcacacaggagaaaaacactatcactgtaatgactgtggcaaagcctttagtcagaaagcaggcctctttcaccatatcaagatccacacaagagacaaaccttatcagtgcactcagtgtaataaaagttttagtcggcgttccatacttactcagcatcaaggagttcataccggcgccaagccgtatgagtgcaacgagtgtggaaaagcctttgtttataactcatcccttgtttcccatcaggaaatccaccacaaagaaaaatgctatcagtgtaaggaatgtgggaaatccttcagtcagagtggccttattcagcatcagagaattcacactggggaaaaaccctacaaatgtgacgtatgtgaaaaagcctttattcaaaggacaagtcttacagaacatcagcgaattcacactggagaaagaccctataaatgtgataagtgtgggaaggcgtttactcaaagatcagtcctcacggaacatcagagaatccacactggagagaggccctacaagtgtgatgagtgtgggaatgccttccgaggaatcaccagcctcattcagcatcagagaatccacactggggagaagccctaccaatgtgatgagtgtggaaaagccttcagacagaggaagaagaccagctacaaggaaatacttctgaaaaatcactctgaaccccaagctggagtgaatcttctcctgagctctctcattccagaatggcaatcttgtttcaggagagatctctaatagtgactgatggtaaaggaagaaggctgtgcctagaacaaagaatcaggctggcaaagaaatcacaggtctttcctcaaactttaaattgctactctctggagatagctacctggactttacagagctgtcagaagacttgggaaggtttgccagcattggaaaaagccacttggacttcacagagctgtcagaagacttaggaagctttgccagtagttcctgagaccagaaatacatattatgaagcaggtgctggaacaggccctggcccctacttgtgaagctgcagatataggtaagataatatcatccagaatgtggagacgaggcaatcgatgatgctggaaaagttgaagagagagtttgaatgaaggacaaaccaccgatgggaaagcttgactagcaaaaggctttgggaataggatagaaagcagcaaacctgaactttaggatccaccagatgtctctggagccataacccaacatttcccataaatagtaggttttaattctcctgctatttaggtgcatctctgggacctcctctttctatattgggttttttgtttgttgggtgttttaacttaggatttagcttcaaattccatttcccaagaccaattttatcacattgcctttaggtctcaggctaaatgatataacaagatatgcttttggcaaagatagtaccttggaatgaaaggtttcagatcaaacctaagatcctaccttagtttacctctcagtgttattgccttttgatatggaaagctgatgagagagcatctctggagagaaagaggagagcctcacgggaagcttttagaacttttagtagcatcctctccccagaaaacttgtctctactcatctccttctcattatctacctgattcgttaagtaggaaatctcagccatatttgtaggggattggggttttgttttttttgacccacttaactcctttagcttcaaagtgttgctttcttacattttagacatgaatattacctagaaaatttatttccccactgttaattttccagtttattgatttccccacatcagattagtgtgtattttgaaactggtttagctattgtttcaagttaactttgatcatatcccgttgtttactgatccactcaacaaatatttattgaacattctgtaggtttatagtagtagccaagatacttaaagtgagtagaaatagtccttttaactgtccttaacaaattaaactttctcttggtttcatgatattccttgtttctcagctttggattcaaactgatcttctcttttttgattatactttcctgatttcttttattgtcacatttttgtgaaaagtcttccatgcacttccagtctctttctgcctagctgtctcttctcacccaaattggacccccctactcctaccctgccacgtgccttcacaaaaatgagatgcttgtttagagacttagaaaaggcatgcactttaggtaaaagtggattttatttttaatcactgtaccctatcataaatctcatttcagaagagacaactgacatttgaattgtctgtgcattttgttttagatggtgttactgagaaggaaactaaggacttggctccaaaacaaaacaaaacaaaatctggagatgctgaattttgttggggggaatgtctgtagaactgcaacatcaatgcagtaagtgtagtaaaagctttagtttatggtgagtcattactcagcatcatggagtccacgatgaagagaatctcttttcaatctgtgcaatcaacaagtttttgaaaggcttttgtttatagtggaaccctcttttccccctagaagaaccaccacaaggaaaaatgctgtcaccataaggaatgtgggaaagttttcagccacatggccttatttgacttcaaagaatccacatgagagagagactgcataaatgtaataactgaggaggcctttgttcagcaaagaaaccttatacaaactcgtataaagaatgtaggaagaccttcacccagaagccaggactgactgtgcaccagagaatctgcacaataaacatgatgaatgtggagatgcttgcttcagcattggagaattcacagtaaacggaaaccctgccagtgtgatgagtacggaaaagtcttcagaggttggaacttgggaaaaatcagtgagtgaattcatattagagaggctcttataaatgagaggattgtggaaacttgtatagacagagatcagacctcaacaagggagcctccacagtattgaaaagttaatataattaatgtaagtgggcaagttgtatggggaatgggtagtctaaattgctcattttagccagtaaaaacattaaattagtttcttagatcaagaaaaggaaatgttagaagttatttttcccttccagaggggtctatatgtgtaagcaaccaggacttttgaaataagttgcatctctggatttgtgatctgtctcctggatgattatctctgttttgggagacaggtattttttcttcatgcctgctctagtctcatctcatatctttaattcattcagcaagtatacacaatagtattatcgtctactgtttgttgtaaatatatatatattattttctttttggtctgagtaggcttgtattggtaccctaggacataaaaatcacatatatcatgtttcagtaaatgcagtgaaaggaactatattattaaattgctgggaatttctgtaaatttgagactacctttatattctccaacacaagaccgtgtaggtgtcccttcagagagtatatttttctagcttggcttctttattttctttatttttttgagatggagtcttgctcctgtcgcccaggctggagtgcaatggcacgatctcggctcactgcaacctccgcctcccaggttcaagtgattctcctgtctcagtctcccgagtagctgggattacaggcacttgccaccattcccagctaatttttgtatttttagtagagacggggtttcaccatgttggccaggctggtctcgaactcctgaccttgtgatctgcccaccttggcctcccaaagttcagggattacaggcatgagccaccatgcccggctgtttttttaagatagaaaaatatacttcatgtatagcctattgacagataatgactgatattttttcttatagataacacataataaacattgtgaagactaataagtaacttgcttattcttttcagttctaaaacctgtaggaaagaatctttagaagctgtcaacaagttgataatgtagcccaatctctacccatgataggagagtaaggcttatatattttatagtagggcactaaatacaggaaccatgtatttaaaaactttttagtgattatctcagaattctaggtgtccctctgctgtacatccctaaattttttgcgtaggtattattaataaattcattattttcaaagatggactgtgttctgtaaaaagcttttccagtatctgcaaatcacacagttttttttaactctattactattatataaaatgatttcttaatattgaaccaaccttgcattcctagaataaacctcacttagccatgatg

SEQ ID NO: 67731 - DNA, 3181 bp, Homo sapiens
gcttccggcctttgtgggtcacttttgatgggttccgggtcccaaaagggttcgaggcctcttgccttcgctccgtaggagggagttctcttctggccctgggggccgcaggactgtccaggaatacagtttccaggtgagatcttacttgaaacaccggtagttctagcacagctaaaatggcatctacttgggctatccaggcccacatggaccaggatgaacctttggaagtaaagatagaggaagagaaatataccaccagacaggattgggacctgcgtaaaaacaacacccatagcagagaggtcttccgtcagtacttcagacagttctgctaccaggagacatctggtccccgtgaggctttgagccgactccgagaactttgccatcagtggctgaggccagagacccacaccaaagaacagattctggagctgctggtgctggagcagttcctgaccatcctacctgaggagctccaggcctgggtgcaggagcagcatccagagagtggggaggaggtggtgactgtgctggaggatttagagagagaactggatgaaccaggagagcaggtctcagtccacactggggaacaggaaatgttcttgcaggagacggtacgtctacgaaaagaaggagaacccagtatgtccctccagtccatgaaagcccagccaaagtatgaatctccagaacttgaatcccaacaggagcaagttttagatgttgagactggaaatgagtatgggaatttaaagcaagaagtttctgaagaaatggaaccacatgggaagacatccagtaaatttgaaaatgatatgtccaagtctgctaggtgtggagaaactcgtgaacctgaagaaataacagaagagccctctgcttgctccagagaagataaacaacctacctgtgatgaaaatggagtaagcctgactgagaactctgaccatactgaacatcagagaatctgtccaggagaagaatcttacggatgtgatgactgtggaaaagcttttagtcagcactcacacctcatagaacatcagaggatccatactggagacagaccctacaaatgcgaagaatgtggaaaagctttccgtgggagaactgtgcttattcgacacaaaataatacacactggagagaaaccgtataagtgtaatgaatgtggcaaagcctttggccggtggtcagctcttaaccaacatcagagacttcacacaggagaaaaacactatcactgtaatgactgtggcaaagcctttagtcagaaagcaggcctctttcaccatatcaagatccacacaagagacaaaccttatcagtgcactcagtgtaataaaagttttagtcggcgttccatacttactcagcatcaaggagttcataccggcgccaagccgtatgagtgcaacgagtgtggaaaagcctttgtttataactcatcccttgtttcccatcaggaaatccaccacaaagaaaaatgctatcagtgtaaggaatgtgggaaatccttcagtcagagtggccttattcagcatcagagaattcacactggggaaaaaccctacaaatgtgacgtatgtgaaaaagcctttattcaaaggacaagtcttacagaacatcagcgaattcacactggagaaagaccctataaatgtgataagtgtgggaaggcgtttactcaaagatcagtcctcacggaacatcagagaatccacactggagagaggccctacaagtgtgatgagtgtgggaatgccttccgaggaatcaccagcctcattcagcatcagagaatccacactggggagaagccctaccaatgtgatgagtgtggaaaagccttcagacagaggtaaacaagacattaagtgtttaaggcaaaaagcatggagaggttggggaagagccaagtttcctaaagtaatgaaaagtgaggaagaagaccagctacaaggaaatacttctgaaaaatcactctgaaccccaagctggagtgaatcttctcctgagctctctcattccagaatggcaatcttgtttcaggagagatctctaatagtgactgatggtaaaggaagaaggctgtgcctagaacaaagaatcaggctggcaaagaaatcacaggtctttcctcaaactttaaattgctactctctggagatagctacctggactttacagagctgtcagaagacttgggaaggtttgccagcattggaaaaagccacttggacttcacagagctgtcagaagacttaggaagctttgccagtagttcctgagaccagaaatacatattatgaagcaggtgctggaacaggccctggcccctacttgtgaagctgcagatatagatggtgttactgagaaggaaactaaggacttggctccaaaacaaaacaaaacaaaatctggagatgctgaattttgttggggggaatgtctgtagaactgcaacatcaatgcagtaagtgtagtaaaagctttagtttatggtgagtcattactcagcatcatggagtccacgatgaagagaatctcttttcaatctgtgcaatcaacaagtttttgaaaggcttttgtttatagtggaaccctcttttccccctagaagaaccaccacaaggaaaaatgctgtcaccataaggaatgtgggaaagttttcagccacatggccttatttgacttcaaagaatccacatgagagagagactgcataaatgtaataactgaggaggcctttgttcagcaaagaaaccttatacaaactcgtataaagaatgtaggaagaccttcacccagaagccaggactgactgtgcaccagagaatctgcacaataaacatgatgaatgtggagatgcttgcttcagcattggagaattcacagtaaacggaaaccctgccagtgtgatgagtacggaaaagtcttcagaggttggaacttgggaaaaatcagtgagtgaattcatattagagaggctcttataaatgagaggattgtggaaacttgtatagacagagatcagacctcaacaagggagcctccacagtattgaaaagttaatataattaatgtaagtgggcaagttgtatggggaatgggtagtctaaattgctcattttagccagtaaaaacattaaattagtttcttagatca

SEQ ID NO: 67732 - DNA, 668 bp, Homo sapiens
gaaaaggataggcatacagaatcccccctctggcagggtttgcctttggggtctgcttaaagccatgtttgctagtagaaatcttgagtaaccagatatgttttataatgctgtgtcatatttaaattctgatgagattgacatctttaaataagcttggacacagattggatttgtacagggaactggactgaagaataatcgtagatcagtaatagatttagatatactatttttatattgtaagcagttacttctcaggattagtattctaattcatttgatttaatatgtaataggtaatattaaaaataaagattttatgctttgaaactccttaactgaatattttcataggaataagcatagtttttgtgtttagtaattttagttagtgagtaatgattagcagacaacatggtaattatattgaaatattacgtgagtgccaataacaaagctttctgatcaaatgctaagaaatatgttgtgtaaagggatctcacattttttattgcggctttctttctacaatgtgacaaatttctgggatatttcattatcttctttttgaatttttttcaagcaagactgttcagtattatgttagcattgatataaaaagaagcagaccattgttaacattaaaatgttactgagatttcaaa

SEQ ID NO: 67733 - DNA, 387 bp, Homo sapiens
attctggtgtggaatgagtgataaggtttctgactttcaacaaaatgtatctcctctgatatatgtgctaccttaacagaaagccaaagcacagaggcatattccaatagcaatttgcaagagacagtaggtttggaatggggtggtaaacttttactattttgcagggattttatctttcatttgatttatttttaatcatgaaatttatattgaaattctgtgaaacattgaaggatctttggaagatttataattagggaagggccagatgtagtggctaatgtctgtactcccagcactttgggagaccgaggcaggaggattgcttgaggccaggagtttgagaccagcctgggcaatatagcaaaactcattagtctgtta

SEQ ID NO: 67734 - DNA, 479 bp, Homo sapiens
  misc_feature (16)..(16): n is a, c, g, or t
  misc_feature (25)..(25): n is a, c, g, or t
ttttttaaaaaaaaanttaaaaatncttaccaaccaactacaacaaaaatgtaccattttcaagcagtactacattaggagcccttttatagaaaataatttcttctttacccccgttccagtgtgaatctagtattctgttaacatttgtgtggcatttggagtttgtcatccccattgaagggagagccttctcagacatgaagcaagggaaacatactgaatagttttacacaaatttgatctggcttccatttgtccccctcatttcccaaatgtttaaatgtattggatttggattctcaatgtataagttgccttatctgttaatgtctatcttctgtctctttaattttgtatatctgctgttttgcttttggatacattttctaattagaagtcacatgataaatataatcagtatagtaataataccataatgtgcacatactcaataaataaatgactgcattgttgta

SEQ ID NO: 67735 - DNA, 2033 bp, Homo sapiens
  misc_feature (6)..(6): n is a, c, g, or t
  misc_feature (626)..(626): n is a, c, g, or t
  misc_feature (662)..(662): n is a, c, g, or t
  misc_feature (1613)..(1613): n is a, c, g, or t
tttaantactaaatattacttataggaaaggaaaaacattattgaatatttatttaaatgtcacatctaatcaacttggtctgtttttgttctttttcttcttttaacctccaaaccatttcttaacccagtttcctctatctcaataaataaccccatcgtccactatccaaaaacctgcaggccatgttggattctgcttttccccttgttctttccttatccaatctaaataggaaattctggcagctctacctccaacgtatatcatattcatttatttctctccatctccactaaagctaactaaagctaaagtcactgaagctaacttgctttcaccctttttctggacattgtaattggcacctaaatggtatagcccctcaccttccttccaacctccaaacagcaggcatagaagctgtagtatatatgtgtgtatgtgtgtgtgtgtgtgtgtgtgtgtgtgtgtgtgtgtgtgtgtattgtttagacggaatcttgctctgtcgcccaggctggagtgcagtggcgcaatcttggctcactgcaagctctgcctcccgggttcatgccattctcctgcctcagcctcctgagtagctgggactacaggcacccgncaccacgcctggctaatttttttgtatttttagtanagacggggtttaccatgttagccaggatggtctcgatctcctgacctcgtgatccgtccacctcagcctcccaaagtgctgggattacaagcgtgagccaccacgcctgaccagtaatagtttttgaaatgtgaattagatcaagcttaaaccctttagtgggttccactagaaaaaaattacactttttttttttttgagatggagtctcactctgtcacccaggctgcagtgcagtggcccgatctcggctcaccgtaacctccacctcccgggttcaggcgattcttctgcctcacctctcaagtggctgggattacaggcacctgtcaccactcccggctaatatttttgtatttttagtggagacggggtttcaccatgttggccagggtagtgtagaactcctgacctcaagtgatccacctgcctcggcctcccaaagtgctgggattacaggtgtgagccaccgcgcccggccaaattacacttttgaaggcctgttttgccatccttatctcctctcaccttaccttctgtcaccagattctacccataagcagccctttggcatttttctgaacatgctgagatccttccttctttggggcttttgtgcttactgtttcttctaacttgaatgttctttgtcagtttttctgcggcgattcctctatattcacgtttcattgcaactattacctcttcagagaggccttttctaattttccttaatagtgtagtgccccccccaattattttgtattaaattactattttctttccttcatggtacttatcataatctgaaatttatttattatcatttattttttaaattcaataaatcatgacatcctctttccaatgagaatatgagccccatgaggaaagcaacctcaactgtcttcttcaccactgtacccctgcagtgccttgaacaatgcctgncacacagtagactgcatgaatctatgctgagcaaatggtgctaaggaatactaaagattgacaattgccaaattattatgccctctttggtactatatgccatggatgtgaatttcccatagaagctggtgacatgttcctggaagctctgggctacacctggcatgacacttgctttgtatgctcagtgtgttgtgaaagtttggaaggtcagacctttttctccaagaaggacaagcccctgtgtaagaaacatgctcattctgtgaatttttgaaagtcaacagttcaggagaagagaaggaatttgaagagaaaaaggaaaattaaaattactaattaatttttagattcaatatttatatggagttttgaaaaataatagtggccctgaaggaataaattccagctttaaaaacc

SEQ ID NO: 67736 - DNA, 383 bp, Homo sapiens
  misc_feature (2)..(2): n is a, c, g, or t
cngggcagtacggatgtgcgggccagtgtgaatctagtattctgttaacatttgtgtggcatttggagtttgtcatccccattgaagggagagccttctcagacatgaagcaagggaaacatactgaatagttttacacaaatttgatctggcttccatttgtccccctcatttcccaaatgtttaaatgtattggatttggattctcaatgtataagttgccttatctgttaatgtctatcttctgtctctttaattttgtatatctgctgttttgcttttggatacattttctaattagaagtcacatgataaatataatcagtatagtaataataccataatgtgcacatactcaataaataaatgactgcattgttgta

SEQ ID NO: 67737 - DNA, 834 bp, Homo sapiens
gggcgagggagagccaggaggcggaagttcccgcgggcggtggggacggcgccctcaccgcgagtcacttgtcagcccttgtctgaggcggaggcagccccgcgccgcgccggacccgagcatatttcattttctgtcattggactttgagccattagaaccatgagcaactacagtgtgtcactggttggcccagctccttggggtttccggctgcagggcggtaaggatttcaacatgcctctgacaatctctagtctaaaagatggcggcaaggcagcccaggcaaatgtaagaataggcgatgtggttctcagcattgatggaataaatgcacaaggaatgactcatcttgaagcccagaataagattaagggttgtacaggctctttgaatatgactctgcaaagagcatctgctgcacccaagcctgagccggttcctgttcaaaagcccacagtcaccagcgtgtgttccgagacttctcaggagctagcagagggacagagaagaggatcccagggtgacagtaaacagcaaaatggcatgatgtttgtgtaacatcttcactgaaaatcattgttttgaattttatttcattgtcttttctttttcttcttttctcccctctttgtctgttgttcatcttccggggaacatcaatgtcttctctactctatcgcatcttttttgtgtgtgttattcttccctcagtaaccctggcactgtgtaagtacttaaccaatgattcactttgtaattgtctctgtaactttccttcttgctttcaatttaatactaccagcaaattttgttaggattttctcattataa

SEQ ID NO: 67738 - DNA, 619 bp, Homo sapiens
  misc_feature (44)..(44): n is a, c, g, or t
agtccaactccatcctcaggtcgctctagagatccccgtctgancaagctgggacggccaaaccaaggagtaccttccactggaagaatctcaaacagcgctacttactcaggatcagtggcaccagccaactcagctttgggacaaacccagccaagtgaccaggacactttagtgcaaagagctgagcacattccagcagggaaacgaactccgatgtgcgcccattgtaaccaggtcatcagaggaccattcttagtggcactggggaaatcttggcacccagaagaattcaactgcgctcactgcaaaaatacaatggcctacattggatttgtagaggagaaaggagccctgtattgtgagctgtgctatgagaaattctttgcccctgaatgtggtcgatgccaaaggaagatccttggagaagtcatcaatgcgttgaaacaaacttggcatgtttcctgttttgtgtgtgtagcctgtggaaagcccattcggaacaatgtttttcacttggaggatggtgaaccctactgtgagactgattattatgccctctttggtactatatgccatggatgtgaatttcccagctgctcagcggtaccgcgctcga

SEQ ID NO: 67739 - DNA, 787 bp, Homo sapiens
gggcgagggagagccaggaggcggaagttcccgcgggcggtggggacggcgccctcaccgcgagtcacttgtcagcccttgtctgaggcggaggcagccccgcgccgcgccggacccgagcatatttcattttctgtcattggactttgagccattagaaccatgagcaactacagtgtgtcactggttggcccagctccttggggtttccggctgcagggcggtaaggatttcaacatgcctctgacaatctctagtctaaaagatggcggcaaggcagcccaggcaaatgtaagaataggcgatgtggttctcagcattgatggaataaatgcacaaggaatgactcatcttgaagcccagaataagattaagggttgtacaggctctttgaatatgactctgcaaagagcatctgctgcacccaagcctgagccggttcctgttcaaaaggtgtgtttttaagctagcacccagagtatcacttgattgtccttgctgagctactgtaattcccattactgtctcagaccatactgacattcatttaatttatagtctcagtacaattttccttgtagttcttttccttcagagatgagtagggaaatggagatcagcacataccattgtaattatacatgttataaaacattatttccaaagccatatgttacaataacttatgtcagatttcttacatttctattcacttttgatgagcccatctttatccaaatccttatattttctaaagagaataaataagtggttactgaaaattaat

SEQ ID NO: 67740 - DNA, 316 bp, Homo sapiens
cccgacaattgcagtataggggggggtatgcatagagatagagtaagggatacatggttagtatccactcagaaatttgatctggcttccatttgtccccctcatttcccaaatgtttaaatgtattggatttggattctcaatgtataagttgccttatctgttaatgtctatcttctgtctctttaattttgtatatctgctgttttgcttttggatacattttctaattagaagtcacatgataaatataatcagtatagtaataataccataatgtgcacatactcaataaataaatgactgcattgttgta
